United States Patent Application Publication US 2010/0120627 A1 - sequence listing, part 7

SEQ ID NO: 13202 - DNA, 2420 bp, Homo sapiens
tggatactcacgacgcggacccagttctcactcccattgggtgtcgggtttccagagaagccaatcagtgtcgtcgcggtcgctgttctaaagcccgcacgcacccaccgggactcagattctccccagacgccgaggatggccgtcatggcgccccgaaccctcctcctgctactctcgggggccctggccctgacccagacctgggcgggctcccactccatgaggtatttcttcacatccgtgtcccggcccggccgcggggagccccgcttcatcgccgtgggctacgtggacgacacgcagttcgtgcggttcgacagcgacgccgcgagccagaggatggagccgcgggcgccgtggatagagcaggaggggccggagtattgggaccaggagacacggaatgtgaaggcccagtcacagactgaccgagtggacctggggaccctgcgcggctactacaaccagagcgaggccggttctcacaccatccagataatgtatggctgcgacgtggggtcggacgggcgcttcctccgcgggtaccggcaggacgcctacgacggcaaggattacatcgccctgaacgaggacctgcgctcttggaccgcggcggacatggcggctcagatcaccaagcgcaagtgggaggcggcccatgaggcggagcagttgagagcctacctggatggcacgtgcgtggagtggctccgcagatacctggagaacgggaaggagacgctgcagcgcacggacccccccaagacacatatgacccaccaccccatctctgaccatgaggccaccctgaggtgctgggccctgggcttctaccctgcggagatcacactgacctggcagcgggatggggaggaccagacccaggacacggagctcgtggagaccaggcctgcaggggatggaaccttccagaagtgggcggctgtggtggtgccttctggagaggagcagagatacacctgccatgtgcagcatgagggtctgcccaagcccctcaccctgagatggggtaaggagggagatgggggtgtcatgtctcttagggaaagcaggagcctctctggagacctttagcagggtcagggcccctcaccttcccctcttttcccagagctgtcttcccagcccaccatccccatcgtgggcatcattgctggcctggttctccttggagctgtgatcactggagctgtggtcgctgccgtgatgtggaggaggaagagctcaggtggagaaggggtgaagggtggggtctgagatttcttgtctcactgagggttccaagccccagctagaaatgtgccctgtctcattactgggaagcaccgtccacaatcatgggcctacccagtctgggccctgtgtgccagcacttactcttttgtaaagcacctgttaaaatgaaggacagatttatcaccttgattacggcggtgatgggacctgatcccagcagtcacaagtcacaggggaaggtccctgaggacagacctcaggagggctattggtccaggacccacacctgctttcttcatgtttcctgatcccgccctgggtctgcagtcacacatttctggaaacttctctggggtccaagactaggaggttcctctaggaccttaaggccctggctcctttctggtatctcacaggacattttcttctcacagatagaaaaggagggagttacactcaggctgcaagtaagtatgaaggaggctgatgcctgaggtccttgggatattgtgtttgggagcccatgggggagcccacccacctcacaattcctcctctagccacatcttctgtgggatctgaccaggttctgtttttgttctaccccaggcagtgacagtgcccagggctctgatgtgtccctcacagcttgtaaaggtgagagcttggaggacctaatgtgtgttgggtgttgggcggaacagtggacacagctgtgctatggggtttctttgcattggatgtattgagcatgcgatgggctgtttaaggtgtgacccctcactgtgatggatatgaatttgttcatgaatatttttttctatagtgtgagacagctgccttgtgtgggactgagaggcaagagttgttcctgcccttccctttgtgacttgaagaaccctgactttgtttctgcaaaggcacctgcatgtgtctgtgttcgtgtaggcataatgtgaggaggtggggagaccaccccacccccatgtccaccatgaccctcttcccacgctgacctgtgctccctccccaatcatctttcctgttccagagaggtggggctgaggtgtctccatctctgtctcaacttcatggtgcactgagctgtaacttcttccttccctattaaaattagaaccttagtataaatttactttctc

SEQ ID NO: 13203 - protein, 319 aa, Homo sapiens
MAVMAPRTLLLLLSGALALTQTWAGSHSMRYFFTSVSRPGRGEPRFIAVGYVDDTQFVRFDSDAASQRMEPRAPWIEQEGPEYWDQETRNVKAQSQTDRVDLGTLRGYYNQSEAGSHTIQIMYGCDVGSDGRFLRGYRQDAYDGKDYIALNEDLRSWTAADMAAQITKRKWEAAHEAEQLRAYLDGTCVEWLRRYLENGKETLQRTDPPKTHMTHHPISDHEATLRCWALGFYPAEITLTWQRDGEDQTQDTELVETRPAGDGTFQKWAAVVVPSGEEQRYTCHVQHEGLPKPLTLRWGKEGDGGVMSLRESRSLSGDL

SEQ ID NO: 13204 - DNA, 1565 bp, Homo sapiens
tggatactcacgacgcggacccagttctcactcccattgggtgtcgggtttccagagaagccaatcagtgtcgtcgcggtcgctgttctaaagcccgcacgcacccaccgggactcagattctccccagacgccgaggatggccgtcatggcgccccgaaccctcctcctgctactctcgggggccctggccctgacccagacctgggcgggctcccactccatgaggtatttcttcacatccgtgtcccggcccggccgcggggagccccgcttcatcgccgtgggctacgtggacgacacgcagttcgtgcggttcgacagcgacgccgcgagccagaggatggagccgcgggcgccgtggatagagcaggaggggccggagtattgggaccaggagacacggaatgtgaaggcccagtcacagactgaccgagtggacctggggaccctgcgcggctactacaaccagagcgaggccggttctcacaccatccagataatgtatggctgcgacgtggggtcggacgggcgcttcctccgcgggtaccggcaggacgcctacgacggcaaggattacatcgccctgaacgaggacctgcgctcttggaccgcggcggacatggcggctcagatcaccaagcgcaagtgggaggcggcccatgaggcggagcagttgagagcctacctggatggcacgtgcgtggagtggctccgcagatacctggagaacgggaaggagacgctgcagcgcacggacccccccaagacacatatgacccaccaccccatctctgaccatgaggccaccctgaggtgctgggccctgggcttctaccctgcggagatcacactgacctggcagcgggatggggaggaccagacccaggacacggagctcgtggagaccaggcctgcaggggatggaaccttccagaagtgggcggctgtggtggtgccttctggagaggagcagagatacacctgccatgtgcagcatgagggtctgcccaagcccctcaccctgagatgggagctgtcttcccagcccaccatccccatcgtgggcatcattgctggcctggttctccttggagctgtgatcactggagctgtggtcgctgccgtgatgtggaggaggaagagctcagatagaaaaggagggagttacactcaggctgcaagcagtgacagtgcccagggctctgatgtgtccctcacagcttgtaaagtgtgagacagctgccttgtgtgggactgagaggcaagagttgttcctgcccttccctttgtgacttgaagaaccctgactttgtttctgcaaaggcacctgcatgtgtctgtgttcgtgtaggcataatgtgaggaggtggggagaccaccccacccccatgtccaccatgaccctcttcccacgctgacctgtgctccctccccaatcatctttcctgttccagagaggtggggctgaggtgtctccatctctgtctcaacttcatggtgcactgagctgtaacttcttccttccctattaaaattagaaccttagtataaatttactttctc

SEQ ID NO: 13205 - protein, 365 aa, Homo sapiens; identical to SEQ ID NO: 1381

SEQ ID NO: 13206 - DNA, 2469 bp, Homo sapiens
tggatactcacgacgcggacccagttctcactcccattgggtgtcgggtttccagagaagccaatcagtgtcgtcgcggtcgctgttctaaagcccgcacgcacccaccgggactcagattctccccagacgccgaggatggccgtcatggcgccccgaaccctcctcctgctactctcgggggccctggccctgacccagacctgggcgggctcccactccatgaggtatttcttcacatccgtgtcccggcccggccgcggggagccccgcttcatcgccgtgggctacgtggacgacacgcagttcgtgcggttcgacagcgacgccgcgagccagaggatggagccgcgggcgccgtggatagagcaggaggggccggagtattgggaccaggagacacggaatgtgaaggcccagtcacagactgaccgagtggacctggggaccctgcgcggctactacaaccagagcgaggccggttctcacaccatccagataatgtatggctgcgacgtggggtcggacgggcgcttcctccgcgggtaccggcaggacgcctacgacggcaaggattacatcgccctgaacgaggacctgcgctcttggaccgcggcggacatggcggctcagatcaccaagcgcaagtgggaggcggcccatgaggcggagcagttgagagcctacctggatggcacgtgcgtggagtggctccgcagatacctggagaacgggaaggagacgctgcagcgcacggacccccccaagacacatatgacccaccaccccatctctgaccatgaggccaccctgaggtgctgggccctgggcttctaccctgcggagatcacactgacctggcagcgggatggggaggaccagacccaggacacggagctcgtggagaccaggcctgcaggggatggaaccttccagaagtgggcggctgtggtggtgccttctggagaggagcagagatacacctgccatgtgcagcatgagggtctgcccaagcccctcaccctgagatggggtaaggagggagatgggggtgtcatgtctcttagggaaagcaggagcctctctggagacctttagcagggtcagggcccctcaccttcccctcttttcccagagctgtcttcccagcccaccatccccatcgtgggcatcattgctggcctggttctccttggagctgtgatcactggagctgtggtcgctgccgtgatgtggaggaggaagagctcaggtggagaaggggtgaagggtggggtctgagatttcttgtctcactgagggttccaagccccagctagaaatgtgccctgtctcattactgggaagcaccgtccacaatcatgggcctacccagtctgggccctgtgtgccagcacttactcttttgtaaagcacctgttaaaatgaaggacagatttatcaccttgattacggcggtgatgggacctgatcccagcagtcacaagtcacaggggaaggtccctgaggacagacctcaggagggctattggtccaggacccacacctgctttcttcatgtttcctgatcccgccctgggtctgcagtcacacatttctggaaacttctctggggtccaagactaggaggttcctctaggaccttaaggccctggctcctttctggtatctcacaggacattttcttctcacagatagaaaaggagggagttacactcaggctgcaagtaagtatgaaggaggctgatgcctgaggtccttgggatattgtgtttgggagcccatgggggagcccacccacctcacaattcctcctctagccacatcttctgtgggatctgaccaggttctgtttttgttctaccccaggcagtgacagtgcccagggctctgatgtgtccctcacagcttgtaaaggtgagagcttggaggacctaatgtgtgttgggtgttgggcggaacagtggacacagctgtgctatggggtttctttgcattggatgtattgagcatgcgatgggctgtttaaggtgtgacccctcactgtgatggatatgaatttgttcatgaatatttttttctatagtgtgagacagctgccttgtgtgggactgagaggcaagagttgttcctgcccttccctttgtgacttgaagaaccctgactttgtttctgcaaaggcacctgcatgtgtctgtgttcgtgtaggcataatgtgaggaggtggggagaccaccccacccccatgtccaccatgaccctcttcccacgctgacctgtgctccctccccaatcatctttcctgttccagagaggtggggctgaggtgtctccatctctgtctcaacttcatggtgcactgagctgtaacttcttccttccctattaaaattagaaccttagtataaatttactttctcaaattcttgccatgagaggttgatgagttaattaaaggagaagattcct

SEQ ID NO: 13207 - protein, 319 aa, Homo sapiens; identical to SEQ ID NO: 13203

SEQ ID NO: 13208 - DNA, 1614 bp, Homo sapiens
tggatactcacgacgcggacccagttctcactcccattgggtgtcgggtttccagagaagccaatcagtgtcgtcgcggtcgctgttctaaagcccgcacgcacccaccgggactcagattctccccagacgccgaggatggccgtcatggcgccccgaaccctcctcctgctactctcgggggccctggccctgacccagacctgggcgggctcccactccatgaggtatttcttcacatccgtgtcccggcccggccgcggggagccccgcttcatcgccgtgggctacgtggacgacacgcagttcgtgcggttcgacagcgacgccgcgagccagaggatggagccgcgggcgccgtggatagagcaggaggggccggagtattgggaccaggagacacggaatgtgaaggcccagtcacagactgaccgagtggacctggggaccctgcgcggctactacaaccagagcgaggccggttctcacaccatccagataatgtatggctgcgacgtggggtcggacgggcgcttcctccgcgggtaccggcaggacgcctacgacggcaaggattacatcgccctgaacgaggacctgcgctcttggaccgcggcggacatggcggctcagatcaccaagcgcaagtgggaggcggcccatgaggcggagcagttgagagcctacctggatggcacgtgcgtggagtggctccgcagatacctggagaacgggaaggagacgctgcagcgcacggacccccccaagacacatatgacccaccaccccatctctgaccatgaggccaccctgaggtgctgggccctgggcttctaccctgcggagatcacactgacctggcagcgggatggggaggaccagacccaggacacggagctcgtggagaccaggcctgcaggggatggaaccttccagaagtgggcggctgtggtggtgccttctggagaggagcagagatacacctgccatgtgcagcatgagggtctgcccaagcccctcaccctgagatgggagctgtcttcccagcccaccatccccatcgtgggcatcattgctggcctggttctccttggagctgtgatcactggagctgtggtcgctgccgtgatgtggaggaggaagagctcagatagaaaaggagggagttacactcaggctgcaagcagtgacagtgcccagggctctgatgtgtccctcacagcttgtaaagtgtgagacagctgccttgtgtgggactgagaggcaagagttgttcctgcccttccctttgtgacttgaagaaccctgactttgtttctgcaaaggcacctgcatgtgtctgtgttcgtgtaggcataatgtgaggaggtggggagaccaccccacccccatgtccaccatgaccctcttcccacgctgacctgtgctccctccccaatcatctttcctgttccagagaggtggggctgaggtgtctccatctctgtctcaacttcatggtgcactgagctgtaacttcttccttccctattaaaattagaaccttagtataaatttactttctcaaattcttgccatgagaggttgatgagttaattaaaggagaagattcct

SEQ ID NO: 13209 - protein, 365 aa, Homo sapiens; identical to SEQ ID NO: 1381

SEQ ID NO: 13210 - DNA, 2320 bp, Homo sapiens
tggatactcacgacgcggacccagttctcactcccattgggtgtcgggtttccagagaagccaatcagtgtcgtcgcggtcgctgttctaaagcccgcacgcacccaccgggactcagattctccccagacgccgaggatggccgtcatggcgccccgaaccctcctcctgctactctcgggggccctggccctgacccagacctgggcgggctcccactccatgaggtatttcttcacatccgtgtcccggcccggccgcggggagccccgcttcatcgccgtgggctacgtggacgacacgcagttcgtgcggttcgacagcgacgccgcgagccagaggatggagccgcgggcgccgtggatagagcaggaggggccggagtattgggaccaggagacacggaatgtgaaggcccagtcacagactgaccgagtggacctggggaccctgcgcggctactacaaccagagcgaggccggttctcacaccatccagataatgtatggctgcgacgtggggtcggacgggcgcttcctccgcgggtaccggcaggacgcctacgacggcaaggattacatcgccctgaacgaggacctgcgctcttggaccgcggcggacatggcggctcagatcaccaagcgcaagtgggaggcggcccatgaggcggagcagttgagagcctacctggatggcacgtgcgtggagtggctccgcagatacctggagaacgggaaggagacgctgcagcgcacgggccaccctgaggtgctgggccctgggcttctaccctgcggagatcacactgacctggcagcgggatggggaggaccagacccaggacacggagctcgtggagaccaggcctgcaggggatggaaccttccagaagtgggcggctgtggtggtgccttctggagaggagcagagatacacctgccatgtgcagcatgagggtctgcccaagcccctcaccctgagatgggagctgtcttcccagcccaccatccccatcgtgggcatcattgctggcctggttctccttggagctgtgatcactggagctgtggtcgctgccgtgatgtggaggaggaagagctcaggtggagaaggggtgaagggtggggtctgagatttcttgtctcactgagggttccaagccccagctagaaatgtgccctgtctcattactgggaagcaccgtccacaatcatgggcctacccagtctgggccctgtgtgccagcacttactcttttgtaaagcacctgttaaaatgaaggacagatttatcaccttgattacggcggtgatgggacctgatcccagcagtcacaagtcacaggggaaggtccctgaggacagacctcaggagggctattggtccaggacccacacctgctttcttcatgtttcctgatcccgccctgggtctgcagtcacacatttctggaaacttctctggggtccaagactaggaggttcctctaggaccttaaggccctggctcctttctggtatctcacaggacattttcttctcacagatagaaaaggagggagttacactcaggctgcaagtaagtatgaaggaggctgatgcctgaggtccttgggatattgtgtttgggagcccatgggggagcccacccacctcacaattcctcctctagccacatcttctgtgggatctgaccaggttctgtttttgttctaccccaggcagtgacagtgcccagggctctgatgtgtccctcacagcttgtaaaggtgagagcttggaggacctaatgtgtgttgggtgttgggcggaacagtggacacagctgtgctatggggtttctttgcattggatgtattgagcatgcgatgggctgtttaaggtgtgacccctcactgtgatggatatgaatttgttcatgaatatttttttctatagtgtgagacagctgccttgtgtgggactgagaggcaagagttgttcctgcccttccctttgtgacttgaagaaccctgactttgtttctgcaaaggcacctgcatgtgtctgtgttcgtgtaggcataatgtgaggaggtggggagaccaccccacccccatgtccaccatgaccctcttcccacgctgacctgtgctccctccccaatcatctttcctgttccagagaggtggggctgaggtgtctccatctctgtctcaacttcatggtgcactgagctgtaacttcttccttccctattaaaattagaaccttagtataaatttactttctcaaattcttgccatgagaggttgatgagttaattaaaggagaagattcct

SEQ ID NO: 13211 - protein, 271 aa, Homo sapiens; identical to SEQ ID NO: 13201

SEQ ID NO: 13212 - DNA, 2520 bp, Homo sapiens
tggatactcacgacgcggacccagttctcactcccattgggtgtcgggtttccagagaagccaatcagtgtcgtcgcggtcgctgttctaaagcccgcacgcacccaccgggactcagattctccccagacgccgaggatggccgtcatggcgccccgaaccctcctcctgctactctcgggggccctggccctgacccagacctgggcgggctcccactccatgaggtatttcttcacatccgtgtcccggcccggccgcggggagccccgcttcatcgccgtgggctacgtggacgacacgcagttcgtgcggttcgacagcgacgccgcgagccagaggatggagccgcgggcgccgtggatagagcaggaggggccggagtattgggaccaggagacacggaatgtgaaggcccagtcacagactgaccgagtggacctggggaccctgcgcggctactacaaccagagcgaggccggttctcacaccatccagataatgtatggctgcgacgtggggtcggacgggcgcttcctccgcgggtaccggcaggacgcctacgacggcaaggattacatcgccctgaacgaggacctgcgctcttggaccgcggcggacatggcggctcagatcaccaagcgcaagtgggaggcggcccatgaggcggagcagttgagagcctacctggatggcacgtgcgtggagtggctccgcagatacctggagaacgggaaggagacgctgcagcgcacggacccccccaagacacatatgacccaccaccccatctctgaccatgaggccaccctgaggtgctgggccctgggcttctaccctgcggagatcacactgacctggcagcgggatggggaggaccagacccaggacacggagctcgtggagaccaggcctgcaggggatggaaccttccagaagtgggcggctgtggtggtgccttctggagaggagcagagatacacctgccatgtgcagcatgagggtctgcccaagcccctcaccctgagatggggtaaggagggagatgggggtgtcatgtctcttagggaaagcaggagcctctctggagacctttagcagggtcagggcccctcaccttcccctcttttcccagagctgtcttcccagcccaccatccccatcgtgggcatcattgctggcctggttctccttggagctgtgatcactggagctgtggtcgctgccgtgatgtggaggaggaagagctcaggtggagaaggggtgaagggtggggtctgagatttcttgtctcactgagggttccaagccccagctagaaatgtgccctgtctcattactgggaagcaccgtccacaatcatgggcctacccagtctgggccctgtgtgccagcacttactcttttgtaaagcacctgttaaaatgaaggacagatttatcaccttgattacggcggtgatgggacctgatcccagcagtcacaagtcacaggggaaggtccctgaggacagacctcaggagggctattggtccaggacccacacctgctttcttcatgtttcctgatcccgccctgggtctgcagtcacacatttctggaaacttctctggggtccaagactaggaggttcctctaggaccttaaggccctggctcctttctggtatctcacaggacattttcttctcacagatagaaaaggagggagttacactcaggctgcaagtaagtatgaaggaggctgatgcctgaggtccttgggatattgtgtttgggagcccatgggggagcccacccacctcacaattcctcctctagccacatcttctgtgggatctgaccaggttctgtttttgttctaccccaggcagtgacagtgcccagggctctgatgtgtccctcacagcttgtaaaggtgagagcttggaggacctaatgtgtgttgggtgttgggcggaacagtggacacagctgtgctatggggtttctttgcattggatgtattgagcatgcgatgggctgtttaaggtgtgacccctcactgtgatggatatgaatttgttcatgaatatttttttctatagtgtgagacagctgccttgtgtgggactgagaggcaagagttgttcctgcccttccctttgtgacttgaagaaccctgactttgtttctgcaaaggcacctgcatgtgtctgtgttcgtgtaggcataatgtgaggaggtggggagaccaccccacccccatgtccaccatgaccctcttcccacgctgacctgtgctccctccccaatcatctttcctgttccagagaggtggggctgaggtgtctccatctctgtctcaacttcatggtgcactgagctgtaacttcttccttccctattaaaattagaaccttagtataaatttactttctcaaattcttgccatgagaggttgatgagttaattaaaggagaagattcctaaaatttgagagacaaaataaatggaagacatgagaaccttccagagtcca

SEQ ID NO: 13213 - protein, 319 aa, Homo sapiens; identical to SEQ ID NO: 13203

SEQ ID NO: 13214 - DNA, 1665 bp, Homo sapiens
tggatactcacgacgcggacccagttctcactcccattgggtgtcgggtttccagagaagccaatcagtgtcgtcgcggtcgctgttctaaagcccgcacgcacccaccgggactcagattctccccagacgccgaggatggccgtcatggcgccccgaaccctcctcctgctactctcgggggccctggccctgacccagacctgggcgggctcccactccatgaggtatttcttcacatccgtgtcccggcccggccgcggggagccccgcttcatcgccgtgggctacgtggacgacacgcagttcgtgcggttcgacagcgacgccgcgagccagaggatggagccgcgggcgccgtggatagagcaggaggggccggagtattgggaccaggagacacggaatgtgaaggcccagtcacagactgaccgagtggacctggggaccctgcgcggctactacaaccagagcgaggccggttctcacaccatccagataatgtatggctgcgacgtggggtcggacgggcgcttcctccgcgggtaccggcaggacgcctacgacggcaaggattacatcgccctgaacgaggacctgcgctcttggaccgcggcggacatggcggctcagatcaccaagcgcaagtgggaggcggcccatgaggcggagcagttgagagcctacctggatggcacgtgcgtggagtggctccgcagatacctggagaacgggaaggagacgctgcagcgcacggacccccccaagacacatatgacccaccaccccatctctgaccatgaggccaccctgaggtgctgggccctgggcttctaccctgcggagatcacactgacctggcagcgggatggggaggaccagacccaggacacggagctcgtggagaccaggcctgcaggggatggaaccttccagaagtgggcggctgtggtggtgccttctggagaggagcagagatacacctgccatgtgcagcatgagggtctgcccaagcccctcaccctgagatgggagctgtcttcccagcccaccatccccatcgtgggcatcattgctggcctggttctccttggagctgtgatcactggagctgtggtcgctgccgtgatgtggaggaggaagagctcagatagaaaaggagggagttacactcaggctgcaagcagtgacagtgcccagggctctgatgtgtccctcacagcttgtaaagtgtgagacagctgccttgtgtgggactgagaggcaagagttgttcctgcccttccctttgtgacttgaagaaccctgactttgtttctgcaaaggcacctgcatgtgtctgtgttcgtgtaggcataatgtgaggaggtggggagaccaccccacccccatgtccaccatgaccctcttcccacgctgacctgtgctccctccccaatcatctttcctgttccagagaggtggggctgaggtgtctccatctctgtctcaacttcatggtgcactgagctgtaacttcttccttccctattaaaattagaaccttagtataaatttactttctcaaattcttgccatgagaggttgatgagttaattaaaggagaagattcctaaaatttgagagacaaaataaatggaagacatgagaaccttccagagtcca

SEQ ID NO: 13215 - protein, 365 aa, Homo sapiens; identical to SEQ ID NO: 1381

SEQ ID NO: 13216 - DNA, 2371 bp, Homo sapiens
tggatactcacgacgcggacccagttctcactcccattgggtgtcgggtttccagagaagccaatcagtgtcgtcgcggtcgctgttctaaagcccgcacgcacccaccgggactcagattctccccagacgccgaggatggccgtcatggcgccccgaaccctcctcctgctactctcgggggccctggccctgacccagacctgggcgggctcccactccatgaggtatttcttcacatccgtgtcccggcccggccgcggggagccccgcttcatcgccgtgggctacgtggacgacacgcagttcgtgcggttcgacagcgacgccgcgagccagaggatggagccgcgggcgccgtggatagagcaggaggggccggagtattgggaccaggagacacggaatgtgaaggcccagtcacagactgaccgagtggacctggggaccctgcgcggctactacaaccagagcgaggccggttctcacaccatccagataatgtatggctgcgacgtggggtcggacgggcgcttcctccgcgggtaccggcaggacgcctacgacggcaaggattacatcgccctgaacgaggacctgcgctcttggaccgcggcggacatggcggctcagatcaccaagcgcaagtgggaggcggcccatgaggcggagcagttgagagcctacctggatggcacgtgcgtggagtggctccgcagatacctggagaacgggaaggagacgctgcagcgcacgggccaccctgaggtgctgggccctgggcttctaccctgcggagatcacactgacctggcagcgggatggggaggaccagacccaggacacggagctcgtggagaccaggcctgcaggggatggaaccttccagaagtgggcggctgtggtggtgccttctggagaggagcagagatacacctgccatgtgcagcatgagggtctgcccaagcccctcaccctgagatgggagctgtcttcccagcccaccatccccatcgtgggcatcattgctggcctggttctccttggagctgtgatcactggagctgtggtcgctgccgtgatgtggaggaggaagagctcaggtggagaaggggtgaagggtggggtctgagatttcttgtctcactgagggttccaagccccagctagaaatgtgccctgtctcattactgggaagcaccgtccacaatcatgggcctacccagtctgggccctgtgtgccagcacttactcttttgtaaagcacctgttaaaatgaaggacagatttatcaccttgattacggcggtgatgggacctgatcccagcagtcacaagtcacaggggaaggtccctgaggacagacctcaggagggctattggtccaggacccacacctgctttcttcatgtttcctgatcccgccctgggtctgcagtcacacatttctggaaacttctctggggtccaagactaggaggttcctctaggaccttaaggccctggctcctttctggtatctcacaggacattttcttctcacagatagaaaaggagggagttacactcaggctgcaagtaagtatgaaggaggctgatgcctgaggtccttgggatattgtgtttgggagcccatgggggagcccacccacctcacaattcctcctctagccacatcttctgtgggatctgaccaggttctgtttttgttctaccccaggcagtgacagtgcccagggctctgatgtgtccctcacagcttgtaaaggtgagagcttggaggacctaatgtgtgttgggtgttgggcggaacagtggacacagctgtgctatggggtttctttgcattggatgtattgagcatgcgatgggctgtttaaggtgtgacccctcactgtgatggatatgaatttgttcatgaatatttttttctatagtgtgagacagctgccttgtgtgggactgagaggcaagagttgttcctgcccttccctttgtgacttgaagaaccctgactttgtttctgcaaaggcacctgcatgtgtctgtgttcgtgtaggcataatgtgaggaggtggggagaccaccccacccccatgtccaccatgaccctcttcccacgctgacctgtgctccctccccaatcatctttcctgttccagagaggtggggctgaggtgtctccatctctgtctcaacttcatggtgcactgagctgtaacttcttccttccctattaaaattagaaccttagtataaatttactttctcaaattcttgccatgagaggttgatgagttaattaaaggagaagattcctaaaatttgagagacaaaataaatggaagacatgagaaccttccagagtcca

SEQ ID NO: 13217 - protein, 271 aa, Homo sapiens; identical to SEQ ID NO: 13201

SEQ ID NO: 13218 - DNA, 1567 bp, Homo sapiens
tggatactcacgacgcggacccagttctcactcccattgggtgtcgggtttccagagaagccaatcagtgtcgtcgcggtcgctgttctaaagcccgcacgcacccaccgggactcagattctccccagacgccgaggatggccgtcatggcgccccgaaccctcctcctgctactctcgggggccctggccctgacccagacctgggcgggctcccactccatgaggtatttcttcacatccgtgtcccggcccggccgcggggagccccgcttcatcgccgtgggctacgtggacgacacgcagttcgtgcggttcgacagcgacgccgcgagccagaggatggagccgcgggcgccgtggatagagcaggaggggccggagtattgggaccaggagacacggaatgtgaaggcccagtcacagactgaccgagtggacctggggaccctgcgcggctactacaaccagagcgaggccggttctcacaccatccagataatgtatggctgcgacgtggggtcggacgggcgcttcctccgcgggtaccggcaggacgcctacgacggcaaggattacatcgccctgaacgaggacctgcgctcttggaccgcggcggacatggcggctcagatcaccaagcgcaagtgggaggcggcccatgaggcggagcagttgagagcctacctggatggcacgtgcgtggagtggctccgcagatacctggagaacgggaaggagacgctgcagcgcacggacccccccaagacacatatgacccaccaccccatctctgaccatgaggccaccctgaggtgctgggccctgggcttctaccctgcggagatcacactgacctggcagcgggatggggaggaccagacccaggacacggagctcgtggagaccaggcctgcaggggatggaaccttccagaagtgggcggctgtggtggtgccttctggagaggagcagagatacacctgccatgtgcagcatgagggtctgcccaagcccctcaccctgagatgggagctgtcttcccagcccaccatccccatcgtgggcatcattgctggcctggttctccttggagctgtgatcactggagctgtggtcgctgccgtgatgtggaggaggaagagctcagatagaaaaggagggagcaagagttgttcctgcccttccctttgtgacttgaagaaccctgactttgtttctgcaaaggcacctgcatgtgtctgtgttcgtgtaggcataatgtgaggaggtggggagaccaccccacccccatgtccaccatgaccctcttcccacgctgacctgtgctccctccccaatcatctttcctgttccagagaggtggggctgaggtgtctccatctctgtctcaacttcatggtgcactgagctgtaacttcttccttccctattaaaattagaaccttagtataaatttactttctcaaattcttgccatgagaggttgatgagttaattaaaggagaagattcctaaaatttgagagacaaaataaatggaagacatgagaaccttccagagtcca

SEQ ID NO: 13219 - protein, 375 aa, Homo sapiens
MAVMAPRTLLLLLSGALALTQTWAGSHSMRYFFTSVSRPGRGEPRFIAVGYVDDTQFVRFDSDAASQRMEPRAPWIEQEGPEYWDQETRNVKAQSQTDRVDLGTLRGYYNQSEAGSHTIQIMYGCDVGSDGRFLRGYRQDAYDGKDYIALNEDLRSWTAADMAAQITKRKWEAAHEAEQLRAYLDGTCVEWLRRYLENGKETLQRTDPPKTHMTHHPISDHEATLRCWALGFYPAEITLTWQRDGEDQTQDTELVETRPAGDGTFQKWAAVVVPSGEEQRYTCHVQHEGLPKPLTLRWELSSQPTIPIVGIIAGLVLLGAVITGAVVAAVMWRRKSSDRKGGSKSCSCPSLCDLKNPDFVSAKAPACVCVRVGIM

SEQ ID NO: 13220 - DNA, 2762 bp, Homo sapiens
aatcagtgtcgtcgcggtcgctgttctaaagcccgcacgcacccaccgggactcagattctccccagacgccgaggatggccgtcatggcgccccgaaccctcctcctgctactctcgggggccctggccctgacccagacctgggcgggctcccactccatgaggtatttcttcacatccgtgtcccggcccggccgcggggagccccgcttcatcgccgtgggctacgtggacgacacgcagttcgtgcggttcgacagcgacgccgcgagccagaggatggagccgcgggcgccgtggatagagcaggaggggccggagtattgggaccaggagacacggaatgtgaaggcccagtcacagactgaccgagtggacctggggaccctgcgcggctactacaaccagagcgaggccggttctcacaccatccagataatgtatggctgcgacgtggggtcggacgggcgctggctccgcagatacctggagaacgggaaggagacgctgcagcgcacgggtaccaggggccacggggcgcctccctgatcgcctgtagatctcccgggctggcctcccacaaggaggggagacaattgggaccaacactagaatatcaccctccctctggtcctgagggagaggaatcctcctgggttccagatcctgtaccagagagtgactctgaggttccgccctgctctctgacacaattaagggataaaatctctgaaggagtgacgggaagacgatccctcgaatactgatgagtggttccctttgacaccggcagcagccttgggcccgtgacttttcctctcaggccttgttctctgcttcacactcaatgtgtgtgggggtctgagtccagcacttctgagtccctcagcctccactcaggtcaggaccagaagtcgctgttcccttctcagggaatagaagattatcccaggtgcctgtgtccaggctggtgtctgggttctgtgctctcttccccatcccgggtgtcctgtccattctcaagatggccacatgcgtgctggtggagtgtcccatgacagatgcaaaatgcctgaattttctgactcttcccgtcagacccccccaagacacatatgacccaccaccccatctctgaccatgaggccaccctgaggtgctgggccctgggcttctaccctgcggagatcacactgacctggcagcgggatggggaggaccagacccaggacacggagctcgtggagaccaggcctgcaggggatggaaccttccagaagtgggcggctgtggtggtgccttctggagaggagcagagatacacctgccatgtgcagcatgagggtctgcccaagcccctcaccctgagatggggtaaggagggagatgggggtgtcatgtctcttagggaaagcaggagcctctctggagacctttagcagggtcagggcccctcaccttcccctcttttcccagagctgtcttcccagcccaccatccccatcgtgggcatcattgctggcctggttctccttggagctgtgatcactggagctgtggtcgctgccgtgatgtggaggaggaagagctcaggtggagaaggggtgaagggtggggtctgagatttcttgtctcactgagggttccaagccccagctagaaatgtgccctgtctcattactgggaagcaccgtccacaatcatgggcctacccagtctgggccctgtgtgccagcacttactcttttgtaaagcacctgttaaaatgaaggacagatttatcaccttgattacggcggtgatgggacctgatcccagcagtcacaagtcacaggggaaggtccctgaggacagacctcaggagggctattggtccaggacccacacctgctttcttcatgtttcctgatcccgccctgggtctgcagtcacacatttctggaaacttctctggggtccaagactaggaggttcctctaggaccttaaggccctggctcctttctggtatctcacaggacattttcttctcacagatagaaaaggagggagttacactcaggctgcaagtaagtatgaaggaggctgatgcctgaggtccttgggatattgtgtttgggagcccatgggggagcccacccacctcacaattcctcctctagccacatcttctgtgggatctgaccaggttctgtttttgttctaccccaggcagtgacagtgcccagggctctgatgtgtccctcacagcttgtaaaggtgagagcttggaggacctaatgtgtgttgggtgttgggcggaacagtggacacagctgtgctatggggtttctttgcattggatgtattgagcatgcgatgggctgtttaaggtgtgacccctcactgtgatggatatgaatttgttcatgaatatttttttctatagtgtgagacagctgccttgtgtgggactgagaggcaagagttgttcctgcccttccctttgtgacttgaagaaccctgactttgtttctgcaaaggcacctgcatgtgtctgtgttcgtgtaggcataatgtgaggaggtggggagaccaccccacccccatgtccaccatgaccctcttcccacgctgacctgtgctccctccccaatcatctttcctgttccagagaggtggggctgaggtgtctccatctctgtctcaacttcatggtgcactgagctgtaacttcttccttccctattaaaattagaaccttagtataaatttactttctc

SEQ ID NO: 13221 - protein, 157 aa, Homo sapiens
MAVMAPRTLLLLLSGALALTQTWAGSHSMRYFFTSVSRPGRGEPRFIAVGYVDDTQFVRFDSDAASQRMEPRAPWIEQEGPEYWDQETRNVKAQSQTDRVDLGTLRGYYNQSEAGSHTIQIMYGCDVGSDGRWLRRYLENGKETLQRTGTRGHGAPP

SEQ ID NO: 13222 - DNA, 2233 bp, Homo sapiens
aatcagtgtcgtcgcggtcgctgttctaaagcccgcacgcacccaccgggactcagattctccccagacgccgaggatggccgtcatggcgccccgaaccctcctcctgctactctcgggggccctggccctgacccagacctgggcgggctcccactccatgaggtatttcttcacatccgtgtcccggcccggccgcggggagccccgcttcatcgccgtgggctacgtggacgacacgcagttcgtgcggttcgacagcgacgccgcgagccagaggatggagccgcgggcgccgtggatagagcaggaggggccggagtattgggaccaggagacacggaatgtgaaggcccagtcacagactgaccgagtggacctggggaccctgcgcggctactacaaccagagcgaggccggttctcacaccatccagataatgtatggctgcgacgtggggtcggacgggcgcttcctccgcgggtaccggcaggacgcctacgacggcaaggattacatcgccctgaacgaggacctgcgctcttggaccgcggcggacatggcggctcagatcaccaagcacacatatgacccaccaccccatctctgaccatgaggccaccctgaggtgctgggccctgggcttctaccctgcggagatcacactgacctggcagcgggatggggaggaccagacccaggacacggagctcgtggagaccaggcctgcaggggatggaaccttccagaagtgggcggctgtggtggtgccttctggagaggagcagagatacacctgccatgtgcagcatgagggtctgcccaagcccctcaccctgagatggggtaaggagggagatgggggtgtcatgtctcttagggaaagcaggagcctctctggagacctttagcagggtcagggcccctcaccttcccctcttttcccagagctgtcttcccagcccaccatccccatcgtgggcatcattgctggcctggttctccttggagctgtgatcactggagctgtggtcgctgccgtgatgtggaggaggaagagctcaggtggagaaggggtgaagggtggggtctgagatttcttgtctcactgagggttccaagccccagctagaaatgtgccctgtctcattactgggaagcaccgtccacaatcatgggcctacccagtctgggccctgtgtgccagcacttactcttttgtaaagcacctgttaaaatgaaggacagatttatcaccttgattacggcggtgatgggacctgatcccagcagtcacaagtcacaggggaaggtccctgaggacagacctcaggagggctattggtccaggacccacacctgctttcttcatgtttcctgatcccgccctgggtctgcagtcacacatttctggaaacttctctggggtccaagactaggaggttcctctaggaccttaaggccctggctcctttctggtatctcacaggacattttcttctcacagatagaaaaggagggagttacactcaggctgcaagtaagtatgaaggaggctgatgcctgaggtccttgggatattgtgtttgggagcccatgggggagcccacccacctcacaattcctcctctagccacatcttctgtgggatctgaccaggttctgtttttgttctaccccaggcagtgacagtgcccagggctctgatgtgtccctcacagcttgtaaaggtgagagcttggaggacctaatgtgtgttgggtgttgggcggaacagtggacacagctgtgctatggggtttctttgcattggatgtattgagcatgcgatgggctgtttaaggtgtgacccctcactgtgatggatatgaatttgttcatgaatatttttttctatagtgtgagacagctgccttgtgtgggactgagaggcaagagttgttcctgcccttccctttgtgacttgaagaaccctgactttgtttctgcaaaggcacctgcatgtgtctgtgttcgtgtaggcataatgtgaggaggtggggagaccaccccacccccatgtccaccatgaccctcttcccacgctgacctgtgctccctccccaatcatctttcctgttccagagaggtggggctgaggtgtctccatctctgtctcaacttcatggtgcactgagctgtaacttcttccttccctattaaaattagaaccttagtataaatttactttctc

SEQ ID NO: 13223 - protein, 177 aa, Homo sapiens
MAVMAPRTLLLLLSGALALTQTWAGSHSMRYFFTSVSRPGRGEPRFIAVGYVDDTQFVRFDSDAASQRMEPRAPWIEQEGPEYWDQETRNVKAQSQTDRVDLGTLRGYYNQSEAGSHTIQIMYGCDVGSDGRFLRGYRQDAYDGKDYIALNEDLRSWTAADMAAQITKHTYDPPPHL

SEQ ID NO: 13224 - DNA, 2811 bp, Homo sapiens
aatcagtgtcgtcgcggtcgctgttctaaagcccgcacgcacccaccgggactcagattctccccagacgccgaggatggccgtcatggcgccccgaaccctcctcctgctactctcgggggccctggccctgacccagacctgggcgggctcccactccatgaggtatttcttcacatccgtgtcccggcccggccgcggggagccccgcttcatcgccgtgggctacgtggacgacacgcagttcgtgcggttcgacagcgacgccgcgagccagaggatggagccgcgggcgccgtggatagagcaggaggggccggagtattgggaccaggagacacggaatgtgaaggcccagtcacagactgaccgagtggacctggggaccctgcgcggctactacaaccagagcgaggccggttctcacaccatccagataatgtatggctgcgacgtggggtcggacgggcgctggctccgcagatacctggagaacgggaaggagacgctgcagcgcacgggtaccaggggccacggggcgcctccctgatcgcctgtagatctcccgggctggcctcccacaaggaggggagacaattgggaccaacactagaatatcaccctccctctggtcctgagggagaggaatcctcctgggttccagatcctgtaccagagagtgactctgaggttccgccctgctctctgacacaattaagggataaaatctctgaaggagtgacgggaagacgatccctcgaatactgatgagtggttccctttgacaccggcagcagccttgggcccgtgacttttcctctcaggccttgttctctgcttcacactcaatgtgtgtgggggtctgagtccagcacttctgagtccctcagcctccactcaggtcaggaccagaagtcgctgttcccttctcagggaatagaagattatcccaggtgcctgtgtccaggctggtgtctgggttctgtgctctcttccccatcccgggtgtcctgtccattctcaagatggccacatgcgtgctggtggagtgtcccatgacagatgcaaaatgcctgaattttctgactcttcccgtcagacccccccaagacacatatgacccaccaccccatctctgaccatgaggccaccctgaggtgctgggccctgggcttctaccctgcggagatcacactgacctggcagcgggatggggaggaccagacccaggacacggagctcgtggagaccaggcctgcaggggatggaaccttccagaagtgggcggctgtggtggtgccttctggagaggagcagagatacacctgccatgtgcagcatgagggtctgcccaagcccctcaccctgagatggggtaaggagggagatgggggtgtcatgtctcttagggaaagcaggagcctctctggagacctttagcagggtcagggcccctcaccttcccctcttttcccagagctgtcttcccagcccaccatccccatcgtgggcatcattgctggcctggttctccttggagctgtgatcactggagctgtggtcgctgccgtgatgtggaggaggaagagctcaggtggagaaggggtgaagggtggggtctgagatttcttgtctcactgagggttccaagccccagctagaaatgtgccctgtctcattactgggaagcaccgtccacaatcatgggcctacccagtctgggccctgtgtgccagcacttactcttttgtaaagcacctgttaaaatgaaggacagatttatcaccttgattacggcggtgatgggacctgatcccagcagtcacaagtcacaggggaaggtccctgaggacagacctcaggagggctattggtccaggacccacacctgctttcttcatgtttcctgatcccgccctgggtctgcagtcacacatttctggaaacttctctggggtccaagactaggaggttcctctaggaccttaaggccctggctcctttctggtatctcacaggacattttcttctcacagatagaaaaggagggagttacactcaggctgcaagtaagtatgaaggaggctgatgcctgaggtccttgggatattgtgtttgggagcccatgggggagcccacccacctcacaattcctcctctagccacatcttctgtgggatctgaccaggttctgtttttgttctaccccaggcagtgacagtgcccagggctctgatgtgtccctcacagcttgtaaaggtgagagcttggaggacctaatgtgtgttgggtgttgggcggaacagtggacacagctgtgctatggggtttctttgcattggatgtattgagcatgcgatgggctgtttaaggtgtgacccctcactgtgatggatatgaatttgttcatgaatatttttttctatagtgtgagacagctgccttgtgtgggactgagaggcaagagttgttcctgcccttccctttgtgacttgaagaaccctgactttgtttctgcaaaggcacctgcatgtgtctgtgttcgtgtaggcataatgtgaggaggtggggagaccaccccacccccatgtccaccatgaccctcttcccacgctgacctgtgctccctccccaatcatctttcctgttccagagaggtggggctgaggtgtctccatctctgtctcaacttcatggtgcactgagctgtaacttcttccttccctattaaaattagaaccttagtataaatttactttctcaaattcttgccatgagaggttgatgagttaattaaaggagaagattcct

SEQ ID NO: 13225 - protein, 157 aa, Homo sapiens; identical to SEQ ID NO: 13221

SEQ ID NO: 13226 - DNA, 2282 bp, Homo sapiens
aatcagtgtcgtcgcggtcgctgttctaaagcccgcacgcacccaccgggactcagattctccccagacgccgaggatggccgtcatggcgccccgaaccctcctcctgctactctcgggggccctggccctgacccagacctgggcgggctcccactccatgaggtatttcttcacatccgtgtcccggcccggccgcggggagccccgcttcatcgccgtgggctacgtggacgacacgcagttcgtgcggttcgacagcgacgccgcgagccagaggatggagccgcgggcgccgtggatagagcaggaggggccggagtattgggaccaggagacacggaatgtgaaggcccagtcacagactgaccgagtggacctggggaccctgcgcggctactacaaccagagcgaggccggttctcacaccatccagataatgtatggctgcgacgtggggtcggacgggcgcttcctccgcgggtaccggcaggacgcctacgacggcaaggattacatcgccctgaacgaggacctgcgctcttggaccgcggcggacatggcggctcagatcaccaagcacacatatgacccaccaccccatctctgaccatgaggccaccctgaggtgctgggccctgggcttctaccctgcggagatcacactgacctggcagcgggatggggaggaccagacccaggacacggagctcgtggagaccaggcctgcaggggatggaaccttccagaagtgggcggctgtggtggtgccttctggagaggagcagagatacacctgccatgtgcagcatgagggtctgcccaagcccctcaccctgagatggggtaaggagggagatgggggtgtcatgtctcttagggaaagcaggagcctctctggagacctttagcagggtcagggcccctcaccttcccctcttttcccagagctgtcttcccagcccaccatccccatcgtgggcatcattgctggcctggttctccttggagctgtgatcactggagctgtggtcgctgccgtgatgtggaggaggaagagctcaggtggagaaggggtgaagggtggggtctgagatttcttgtctcactgagggttccaagccccagctagaaatgtgccctgtctcattactgggaagcaccgtccacaatcatgggcctacccagtctgggccctgtgtgccagcacttactcttttgtaaagcacctgttaaaatgaaggacagatttatcaccttgattacggcggtgatgggacctgatcccagcagtcacaagtcacaggggaaggtccctgaggacagacctcaggagggctattggtccaggacccacacctgctttcttcatgtttcctgatcccgccctgggtctgcagtcacacatttctggaaacttctctggggtccaagactaggaggttcctctaggaccttaaggccctggctcctttctggtatctcacaggacattttcttctcacagatagaaaaggagggagttacactcaggctgcaagtaagtatgaaggaggctgatgcctgaggtccttgggatattgtgtttgggagcccatgggggagcccacccacctcacaattcctcctctagccacatcttctgtgggatctgaccaggttctgtttttgttctaccccaggcagtgacagtgcccagggctctgatgtgtccctcacagcttgtaaaggtgagagcttggaggacctaatgtgtgttgggtgttgggcggaacagtggacacagctgtgctatggggtttctttgcattggatgtattgagcatgcgatgggctgtttaaggtgtgacccctcactgtgatggatatgaatttgttcatgaatatttttttctatagtgtgagacagctgccttgtgtgggactgagaggcaagagttgttcctgcccttccctttgtgacttgaagaaccctgactttgtttctgcaaaggcacctgcatgtgtctgtgttcgtgtaggcataatgtgaggaggtggggagaccaccccacccccatgtccaccatgaccctcttcccacgctgacctgtgctccctccccaatcatctttcctgttccagagaggtggggctgaggtgtctccatctctgtctcaacttcatggtgcactgagctgtaacttcttccttccctattaaaattagaaccttagtataaatttactttctcaaattcttgccatgagaggttgatgagttaattaaaggagaagattcct

SEQ ID NO: 13227 - protein, 177 aa, Homo sapiens; identical to SEQ ID NO: 13223

SEQ ID NO: 13228 - DNA, 2862 bp, Homo sapiens
aatcagtgtcgtcgcggtcgctgttctaaagcccgcacgcacccaccgggactcagattctccccagacgccgaggatggccgtcatggcgccccgaaccctcctcctgctactctcgggggccctggccctgacccagacctgggcgggctcccactccatgaggtatttcttcacatccgtgtcccggcccggccgcggggagccccgcttcatcgccgtgggctacgtggacgacacgcagttcgtgcggttcgacagcgacgccgcgagccagaggatggagccgcgggcgccgtggatagagcaggaggggccggagtattgggaccaggagacacggaatgtgaaggcccagtcacagactgaccgagtggacctggggaccctgcgcggctactacaaccagagcgaggccggttctcacaccatccagataatgtatggctgcgacgtggggtcggacgggcgctggctccgcagatacctggagaacgggaaggagacgctgcagcgcacgggtaccaggggccacggggcgcctccctgatcgcctgtagatctcccgggctggcctcccacaaggaggggagacaattgggaccaacactagaatatcaccctccctctggtcctgagggagaggaatcctcctgggttccagatcctgtaccagagagtgactctgaggttccgccctgctctctgacacaattaagggataaaatctctgaaggagtgacgggaagacgatccctcgaatactgatgagtggttccctttgacaccggcagcagccttgggcccgtgacttttcctctcaggccttgttctctgcttcacactcaatgtgtgtgggggtctgagtccagcacttctgagtccctcagcctccactcaggtcaggaccagaagtcgctgttcccttctcagggaatagaagattatcccaggtgcctgtgtccaggctggtgtctgggttctgtgctctcttccccatcccgggtgtcctgtccattctcaagatggccacatgcgtgctggtggagtgtcccatgacagatgcaaaatgcctgaattttctgactcttcccgtcagacccccccaagacacatatgacccaccaccccatctctgaccatgaggccaccctgaggtgctgggccctgggcttctaccctgcggagatcacactgacctggcagcgggatggggaggaccagacccaggacacggagctcgtggagaccaggcctgcaggggatggaaccttccagaagtgggcggctgtggtggtgccttctggagaggagcagagatacacctgccatgtgcagcatgagggtctgcccaagcccctcaccctgagatggggtaaggagggagatgggggtgtcatgtctcttagggaaagcaggagcctctctggagacctttagcagggtcagggcccctcaccttcccctcttttcccagagctgtcttcccagcccaccatccccatcgtgggcatcattgctggcctggttctccttggagctgtgatcactggagctgtggtcgctgccgtgatgtggaggaggaagagctcaggtggagaaggggtgaagggtggggtctgagatttcttgtctcactgagggttccaagccccagctagaaatgtgccctgtctcattactgggaagcaccgtccacaatcatgggcctacccagtctgggccctgtgtgccagcacttactcttttgtaaagcacctgttaaaatgaaggacagatttatcaccttgattacggcggtgatgggacctgatcccagcagtcacaagtcacaggggaaggtccctgaggacagacctcaggagggctattggtccaggacccacacctgctttcttcatgtttcctgatcccgccctgggtctgcagtcacacatttctggaaacttctctggggtccaagactaggaggttcctctaggaccttaaggccctggctcctttctggtatctcacaggacattttcttctcacagatagaaaaggagggagttacactcaggctgcaagtaagtatgaaggaggctgatgcctgaggtccttgggatattgtgtttgggagcccatgggggagcccacccacctcacaattcctcctctagccacatcttctgtgggatctgaccaggttctgtttttgttctaccccaggcagtgacagtgcccagggctctgatgtgtccctcacagcttgtaaaggtgagagcttggaggacctaatgtgtgttgggtgttgggcggaacagtggacacagctgtgctatggggtttctttgcattggatgtattgagcatgcgatgggctgtttaaggtgtgacccctcactgtgatggatatgaatttgttcatgaatatttttttctatagtgtgagacagctgccttgtgtgggactgagaggcaagagttgttcctgcccttccctttgtgacttgaagaaccctgactttgtttctgcaaaggcacctgcatgtgtctgtgttcgtgtaggcataatgtgaggaggtggggagaccaccccacccccatgtccaccatgaccctcttcccacgctgacctgtgctccctccccaatcatctttcctgttccagagaggtggggctgaggtgtctccatctctgtctcaacttcatggtgcactgagctgtaacttcttccttccctattaaaattagaaccttagtataaatttactttctcaaattcttgccatgagaggttgatgagttaattaaaggagaagattcctaaaatttgagagacaaaataaatggaagacatgagaaccttccagagtcca

SEQ ID NO: 13229 - protein, 157 aa, Homo sapiens; identical to SEQ ID NO: 13221

SEQ ID NO: 13230 - DNA, 2333 bp, Homo sapiens
aatcagtgtcgtcgcggtcgctgttctaaagcccgcacgcacccaccgggactcagattctccccagacgccgaggatggccgtcatggcgccccgaaccctcctcctgctactctcgggggccctggccctgacccagacctgggcgggctcccactccatgaggtatttcttcacatccgtgtcccggcccggccgcggggagccccgcttcatcgccgtgggctacgtggacgacacgcagttcgtgcggttcgacagcgacgccgcgagccagaggatggagccgcgggcgccgtggatagagcaggaggggccggagtattgggaccaggagacacggaatgtgaaggcccagtcacagactgaccgagtggacctggggaccctgcgcggctactacaaccagagcgaggccggttctcacaccatccagataatgtatggctgcgacgtggggtcggacgggcgcttcctccgcgggtaccggcaggacgcctacgacggcaaggattacatcgccctgaacgaggacctgcgctcttggaccgcggcggacatggcggctcagatcaccaagcacacatatgacccaccaccccatctctgaccatgaggccaccctgaggtgctgggccctgggcttctaccctgcggagatcacactgacctggcagcgggatggggaggaccagacccaggacacggagctcgtggagaccaggcctgcaggggatggaaccttccagaagtgggcggctgtggtggtgccttctggagaggagcagagatacacctgccatgtgcagcatgagggtctgcccaagcccctcaccctgagatggggtaaggagggagatgggggtgtcatgtctcttagggaaagcaggagcctctctggagacctttagcagggtcagggcccctcaccttcccctcttttcccagagctgtcttcccagcccaccatccccatcgtgggcatcattgctggcctggttctccttggagctgtgatcactggagctgtggtcgctgccgtgatgtggaggaggaagagctcaggtggagaaggggtgaagggtggggtctgagatttcttgtctcactgagggttccaagccccagctagaaatgtgccctgtctcattactgggaagcaccgtccacaatcatgggcctacccagtctgggccctgtgtgccagcacttactcttttgtaaagcacctgttaaaatgaaggacagatttatcaccttgattacggcggtgatgggacctgatcccagcagtcacaagtcacaggggaaggtccctgaggacagacctcaggagggctattggtccaggacccacacctgctttcttcatgtttcctgatcccgccctgggtctgcagtcacacatttctggaaacttctctggggtccaagactaggaggttcctctaggaccttaaggccctggctcctttctggtatctcacaggacattttcttctcacagatagaaaaggagggagttacactcaggctgcaagtaagtatgaaggaggctgatgcctgaggtccttgggatattgtgtttgggagcccatgggggagcccacccacctcacaattcctcctctagccacatcttctgtgggatctgaccaggttctgtttttgttctaccccaggcagtgacagtgcccagggctctgatgtgtccctcacagcttgtaaaggtgagagcttggaggacctaatgtgtgttgggtgttgggcggaacagtggacacagctgtgctatggggtttctttgcattggatgtattgagcatgcgatgggctgtttaaggtgtgacccctcactgtgatggatatgaatttgttcatgaatatttttttctatagtgtgagacagctgccttgtgtgggactgagaggcaagagttgttcctgcccttccctttgtgacttgaagaaccctgactttgtttctgcaaaggcacctgcatgtgtctgtgttcgtgtaggcataatgtgaggaggtggggagaccaccccacccccatgtccaccatgaccctcttcccacgctgacctgtgctccctccccaatcatctttcctgttccagagaggtggggctgaggtgtctccatctctgtctcaacttcatggtgcactgagctgtaacttcttccttccctattaaaattagaaccttagtataaatttactttctcaaattcttgccatgagaggttgatgagttaattaaaggagaagattcctaaaatttgagagacaaaataaatggaagacatgagaaccttccagagtcca

SEQ ID NO: 13231 - protein, 177 aa, Homo sapiens; identical to SEQ ID NO: 13223

SEQ ID NO: 13232 - DNA, 845 bp, Homo sapiens
aatcagtgtcgtcgcggtcgctgttctaaagcccgcacgcacccaccgggactcagattctccccagacgccgaggatggccgtcatggcgccccgaaccctcctcctgctactctcgggggccctggccctgacccagacctgggcgggctcccactccatgaggtatttcttcacatccgtgtcccggcccggccgcggggagccccgcttcatcgccgtgggctacgtggacgacacgcagttcgtgcggttcgacagcgacgccgcgagccagaggatggagccgcgggcgccgtggatagagcaggaggggccggagtattgggaccaggagacacggaatgtgaaggcccagtcacagactgaccgagtggacctggggaccctgcgcggctactacaaccagagcgaggccggttctcacaccatccagataatgtatggctgcgacgtggggtcggacgggcgcttcctccgcgggtaccggcaggacgcctacgacggcaaggattacatcgccctgaacgaggacctgcgctcttggaccgcggcggacatggcggctcagatcaccaagcgcaagtgggaggcggcccatgaggcggagcagtggtgccttctggagaggagcagagatacacctgccatgtgcagcatgagggtctgcccaagcccctcaccctgagatgggagctgtcttcccagcccaccatccccatcgtgggcatcattgctggcctggttctccttggagctgtgatcactggagctgtggtcgctgccgtgatgtggaggaggaagagctcagatagaaaaggagggagctactctcaggctgcaag

SEQ ID NO: 13233 - protein, 203 aa, Homo sapiens
MAVMAPRTLLLLLSGALALTQTWAGSHSMRYFFTSVSRPGRGEPRFIAVGYVDDTQFVRFDSDAASQRMEPRAPWIEQEGPEYWDQETRNVKAQSQTDRVDLGTLRGYYNQSEAGSHTIQIMYGCDVGSDGRFLRGYRQDAYDGKDYIALNEDLRSWTAADMAAQITKRKWEAAHEAEQWCLLERSRDTPAMCSMRVCPSPSP

SEQ ID NO: 13234 - DNA, 1918 bp, Homo sapiens
agattctccccagacgccgaggatggccgtcatggcgccccgaaccctcctcctgctactctcgggggccctggccctgacccagacctgggcgggctcccactccatgaggtatttcttcacatccgtgtcccggcccggccgcggggagccccgcttcatcgccgtgggctacgtggacgacacgcagttcgtgcggttcgacagcgacgccgcgagccagaggatggagccgcgggcgccgtggatagagcaggaggggccggagtattgggaccaggagacacggaatgtgaaggcccagtcacagactgaccgaatacctggagaacgggaaggagacgctgcagcgcacggacccccccaagacacatatgacccaccaccccatctctgaccatgaggccaccctgaggtgctgggccctgggcttctaccctgcggagatcacactgacctggcagcgggatggggaggaccagacccaggacacggagctcgtggagaccaggcctgcaggggatggaaccttccagaagtgggcggctgtggtggtgccttctggagaggagcagagatacacctgccatgtgcagcatgagggtctgcccaagcccctcaccctgagatgggagctgtcttcccagcccaccatccccatcgtgggcatcattgctggcctggttctccttggagctgtgatcactggagctgtggtcgctgccgtgatgtggaggaggaagagctcaggtggagaaggggtgaagggtggggtctgagatttcttgtctcactgagggttccaagccccagctagaaatgtgccctgtctcattactgggaagcaccgtccacaatcatgggcctacccagtctgggccctgtgtgccagcacttactcttttgtaaagcacctgttaaaatgaaggacagatttatcaccttgattacggcggtgatgggacctgatcccagcagtcacaagtcacaggggaaggtccctgaggacagacctcaggagggctattggtccaggacccacacctgctttcttcatgtttcctgatcccgccctgggtctgcagtcacacatttctggaaacttctctggggtccaagactaggaggttcctctaggaccttaaggccctggctcctttctggtatctcacaggacattttcttctcacagatagaaaaggagggagttacactcaggctgcaagtaagtatgaaggaggctgatgcctgaggtccttgggatattgtgtttgggagcccatgggggagcccacccacctcacaattcctcctctagccacatcttctgtgggatctgaccaggttctgtttttgttctaccccaggcagtgacagtgcccagggctctgatgtgtccctcacagcttgtaaaggtgagagcttggaggacctaatgtgtgttgggtgttgggcggaacagtggacacagctgtgctatggggtttctttgcattggatgtattgagcatgcgatgggctgtttaaggtgtgacccctcactgtgatggatatgaatttgttcatgaatatttttttctatagtgtgagacagctgccttgtgtgggactgagaggcaagagttgttcctgcccttccctttgtgacttgaagaaccctgactttgtttctgcaaaggcacctgcatgtgtctgtgttcgtgtaggcataatgtgaggaggtggggagaccaccccacccccatgtccaccatgaccctcttcccacgctgacctgtgctccctccccaatcatctttcctgttccagagaggtggggctgaggtgtctccatctctgtctcaacttcatggtgcactgagctgtaacttcttccttccctattaaaattagaaccttagtataaatttactttctc

SEQ ID NO: 13235 - protein, 134 aa, Homo sapiens
MTHHPISDHEATLRCWALGFYPAEITLTWQRDGEDQTQDTELVETRPAGDGTFQKWAAVVVPSGEEQRYTCHVQHEGLPKPLTLRWELSSQPTIPIVGIIAGLVLLGAVITGAVVAAVMWRRKSSGGEGVKGGV

SEQ ID NO: 13236 - DNA, 2545 bp, Homo sapiens
agattctccccagacgccgaggatggccgtcatggcgccccgaaccctcctcctgctactctcgggggccctggccctgacccagacctgggcgggctcccactccatgaggtatttcttcacatccgtgtcccggcccggccgcggggagccccgcttcatcgccgtgggctacgtggacgacacgcagttcgtgcggttcgacagcgacgccgcgagccagaggatggagccgcgggcgccgtggatagagcaggaggggccggagtattgggaccaggagacacggaatgtgaaggcccagtcacagactgaccgagtggacctggggaccctgcgcggctactacaaccagagcgaggccggtgagtgaccccggccgggggcgcaggtcaggacccctcatcccccacggacgggccaggtcgcccacagtctccgggtccgagatccaccccgaagccgcgggaccccgagacccttgccccgggagaggcccaggcgcctttacccggtttcattttcagtttaggccaaaaatccccccgggttggtcggggctgggcggggctcgggggactgggctgaccgcggggtcggggccaggttctcacaccatccagataatgtatggctgcgacgtggggtcggacgggcgcttcctccgcgggtaccggcaggacgcctacgacggcaaggattacatcgccctgaacgaggacctgcgctcttggaccgcggcggacatggcggctcagatcaccaagcgcaagtgggaggcggcccatgaggcggagcagttgagagcctacctggatggcacgtgcgtggagtggctccgcagatacctggagaacgggaaggagacgctgcagcgcacggacccccccaagacacatatgacccaccaccccatctctgaccatgaggccaccctgaggtgctgggccctgggcttctaccctgcggagatcacactgacctggcagcgggatggggaggaccagacccaggacacggagctcgtggagaccaggcctgcaggggatggaaccttccagaagtgggcggctgtggtggtgccttctggagaggagcagagatacacctgccatgtgcagcatgagggtctgcccaagcccctcaccctgagatggggtaaggagggagatgggggtgtcatgtctcttagggaaagcaggagcctctctggagacctttagcagggtcagggcccctcaccttcccctcttttcccagagctgtcttcccagcccaccatccccatcgtgggcatcattgctggcctggttctccttggagctgtgatcactggagctgtggtcgctgccgtgatgtggaggaggaagagctcaggtggagaaggggtgaagggtggggtctgagatttcttgtctcactgagggttccaagccccagctagaaatgtgccctgtctcattactgggaagcaccgtccacaatcatgggcctacccagtctgggccctgtgtgccagcacttactcttttgtaaagcacctgttaaaatgaaggacagatttatcaccttgattacggcggtgatgggacctgatcccagcagtcacaagtcacaggggaaggtccctgaggacagacctcaggagggctattggtccaggacccacacctgctttcttcatgtttcctgatcccgccctgggtctgcagtcacacatttctggaaacttctctggggtccaagactaggaggttcctctaggaccttaaggccctggctcctttctggtatctcacaggacattttcttctcacagatagaaaaggagggagttacactcaggctgcaagtaagtatgaaggaggctgatgcctgaggtccttgggatattgtgtttgggagcccatgggggagcccacccacctcacaattcctcctctagccacatcttctgtgggatctgaccaggttctgtttttgttctaccccaggcagtgacagtgcccagggctctgatgtgtccctcacagcttgtaaaggtgagagcttggaggacctaatgtgtgttgggtgttgggcggaacagtggacacagctgtgctatggggtttctttgcattggatgtattgagcatgcgatgggctgtttaaggtgtgacccctcactgtgatggatatgaatttgttcatgaatatttttttctatagtgtgagacagctgccttgtgtgggactgagaggcaagagttgttcctgcccttccctttgtgacttgaagaaccctgactttgtttctgcaaaggcacctgcatgtgtctgtgttcgtgtaggcataatgtgaggaggtggggagaccaccccacccccatgtccaccatgaccctcttcccacgctgacctgtgctccctccccaatcatctttcctgttccagagaggtggggctgaggtgtctccatctctgtctcaacttcatggtgcactgagctgtaacttcttccttccctattaaaattagaaccttagtataaatttactttctc

SEQ ID NO: 13237 - protein, 198 aa, Homo sapiens
MYGCDVGSDGRFLRGYRQDAYDGKDYIALNEDLRSWTAADMAAQITKRKWEAAHEAEQLRAYLDGTCVEWLRRYLENGKETLQRTDPPKTHMTHHPISDHEATLRCWALGFYPAEITLTWQRDGEDQTQDTELVETRPAGDGTFQKWAAVVVPSGEEQRYTCHVQHEGLPKPLTLRWGKEGDGGVMSLRESRSLSGDL

SEQ ID NO: 13238 - DNA, 1967 bp, Homo sapiens
agattctccccagacgccgaggatggccgtcatggcgccccgaaccctcctcctgctactctcgggggccctggccctgacccagacctgggcgggctcccactccatgaggtatttcttcacatccgtgtcccggcccggccgcggggagccccgcttcatcgccgtgggctacgtggacgacacgcagttcgtgcggttcgacagcgacgccgcgagccagaggatggagccgcgggcgccgtggatagagcaggaggggccggagtattgggaccaggagacacggaatgtgaaggcccagtcacagactgaccgaatacctggagaacgggaaggagacgctgcagcgcacggacccccccaagacacatatgacccaccaccccatctctgaccatgaggccaccctgaggtgctgggccctgggcttctaccctgcggagatcacactgacctggcagcgggatggggaggaccagacccaggacacggagctcgtggagaccaggcctgcaggggatggaaccttccagaagtgggcggctgtggtggtgccttctggagaggagcagagatacacctgccatgtgcagcatgagggtctgcccaagcccctcaccctgagatgggagctgtcttcccagcccaccatccccatcgtgggcatcattgctggcctggttctccttggagctgtgatcactggagctgtggtcgctgccgtgatgtggaggaggaagagctcaggtggagaaggggtgaagggtggggtctgagatttcttgtctcactgagggttccaagccccagctagaaatgtgccctgtctcattactgggaagcaccgtccacaatcatgggcctacccagtctgggccctgtgtgccagcacttactcttttgtaaagcacctgttaaaatgaaggacagatttatcaccttgattacggcggtgatgggacctgatcccagcagtcacaagtcacaggggaaggtccctgaggacagacctcaggagggctattggtccaggacccacacctgctttcttcatgtttcctgatcccgccctgggtctgcagtcacacatttctggaaacttctctggggtccaagactaggaggttcctctaggaccttaaggccctggctcctttctggtatctcacaggacattttcttctcacagatagaaaaggagggagttacactcaggctgcaagtaagtatgaaggaggctgatgcctgaggtccttgggatattgtgtttgggagcccatgggggagcccacccacctcacaattcctcctctagccacatcttctgtgggatctgaccaggttctgtttttgttctaccccaggcagtgacagtgcccagggctctgatgtgtccctcacagcttgtaaaggtgagagcttggaggacctaatgtgtgttgggtgttgggcggaacagtggacacagctgtgctatggggtttctttgcattggatgtattgagcatgcgatgggctgtttaaggtgtgacccctcactgtgatggatatgaatttgttcatgaatatttttttctatagtgtgagacagctgccttgtgtgggactgagaggcaagagttgttcctgcccttccctttgtgacttgaagaaccctgactttgtttctgcaaaggcacctgcatgtgtctgtgttcgtgtaggcataatgtgaggaggtggggagaccaccccacccccatgtccaccatgaccctcttcccacgctgacctgtgctccctccccaatcatctttcctgttccagagaggtggggctgaggtgtctccatctctgtctcaacttcatggtgcactgagctgtaacttcttccttccctattaaaattagaaccttagtataaatttactttctcaaattcttgccatgagaggttgatgagttaattaaaggagaagattcct

SEQ ID NO: 13239 - protein, 134 aa, Homo sapiens; identical to SEQ ID NO: 13235

SEQ ID NO: 13240 - DNA, 2594 bp, Homo sapiens
agattctccccagacgccgaggatggccgtcatggcgccccgaaccctcctcctgctactctcgggggccctggccctgacccagacctgggcgggctcccactccatgaggtatttcttcacatccgtgtcccggcccggccgcggggagccccgcttcatcgccgtgggctacgtggacgacacgcagttcgtgcggttcgacagcgacgccgcgagccagaggatggagccgcgggcgccgtggatagagcaggaggggccggagtattgggaccaggagacacggaatgtgaaggcccagtcacagactgaccgagtggacctggggaccctgcgcggctactacaaccagagcgaggccggtgagtgaccccggccgggggcgcaggtcaggacccctcatcccccacggacgggccaggtcgcccacagtctccgggtccgagatccaccccgaagccgcgggaccccgagacccttgccccgggagaggcccaggcgcctttacccggtttcattttcagtttaggccaaaaatccccccgggttggtcggggctgggcggggctcgggggactgggctgaccgcggggtcggggccaggttctcacaccatccagataatgtatggctgcgacgtggggtcggacgggcgcttcctccgcgggtaccggcaggacgcctacgacggcaaggattacatcgccctgaacgaggacctgcgctcttggaccgcggcggacatggcggctcagatcaccaagcgcaagtgggaggcggcccatgaggcggagcagttgagagcctacctggatggcacgtgcgtggagtggctccgcagatacctggagaacgggaaggagacgctgcagcgcacggacccccccaagacacatatgacccaccaccccatctctgaccatgaggccaccctgaggtgctgggccctgggcttctaccctgcggagatcacactgacctggcagcgggatggggaggaccagacccaggacacggagctcgtggagaccaggcctgcaggggatggaaccttccagaagtgggcggctgtggtggtgccttctggagaggagcagagatacacctgccatgtgcagcatgagggtctgcccaagcccctcaccctgagatggggtaaggagggagatgggggtgtcatgtctcttagggaaagcaggagcctctctggagacctttagcagggtcagggcccctcaccttcccctcttttcccagagctgtcttcccagcccaccatccccatcgtgggcatcattgctggcctggttctccttggagctgtgatcactggagctgtggtcgctgccgtgatgtggaggaggaagagctcaggtggagaaggggtgaagggtggggtctgagatttcttgtctcactgagggttccaagccccagctagaaatgtgccctgtctcattactgggaagcaccgtccacaatcatgggcctacccagtctgggccctgtgtgccagcacttactcttttgtaaagcacctgttaaaatgaaggacagatttatcaccttgattacggcggtgatgggacctgatcccagcagtcacaagtcacaggggaaggtccctgaggacagacctcaggagggctattggtccaggacccacacctgctttcttcatgtttcctgatcccgccctgggtctgcagtcacacatttctggaaacttctctggggtccaagactaggaggttcctctaggaccttaaggccctggctcctttctggtatctcacaggacattttcttctcacagatagaaaaggagggagttacactcaggctgcaagtaagtatgaaggaggctgatgcctgaggtccttgggatattgtgtttgggagcccatgggggagcccacccacctcacaattcctcctctagccacatcttctgtgggatctgaccaggttctgtttttgttctaccccaggcagtgacagtgcccagggctctgatgtgtccctcacagcttgtaaaggtgagagcttggaggacctaatgtgtgttgggtgttgggcggaacagtggacacagctgtgctatggggtttctttgcattggatgtattgagcatgcgatgggctgtttaaggtgtgacccctcactgtgatggatatgaatttgttcatgaatatttttttctatagtgtgagacagctgccttgtgtgggactgagaggcaagagttgttcctgcccttccctttgtgacttgaagaaccctgactttgtttctgcaaaggcacctgcatgtgtctgtgttcgtgtaggcataatgtgaggaggtggggagaccaccccacccccatgtccaccatgaccctcttcccacgctgacctgtgctccctccccaatcatctttcctgttccagagaggtggggctgaggtgtctccatctctgtctcaacttcatggtgcactgagctgtaacttcttccttccctattaaaattagaaccttagtataaatttactttctcaaattcttgccatgagaggttgatgagttaattaaaggagaagattcct

SEQ ID NO: 13241 - protein, 198 aa, Homo sapiens; identical to SEQ ID NO: 13237

SEQ ID NO: 13242 - DNA, 2018 bp, Homo sapiens
agattctccccagacgccgaggatggccgtcatggcgccccgaaccctcctcctgctactctcgggggccctggccctgacccagacctgggcgggctcccactccatgaggtatttcttcacatccgtgtcccggcccggccgcggggagccccgcttcatcgccgtgggctacgtggacgacacgcagttcgtgcggttcgacagcgacgccgcgagccagaggatggagccgcgggcgccgtggatagagcaggaggggccggagtattgggaccaggagacacggaatgtgaaggcccagtcacagactgaccgaatacctggagaacgggaaggagacgctgcagcgcacggacccccccaagacacatatgacccaccaccccatctctgaccatgaggccaccctgaggtgctgggccctgggcttctaccctgcggagatcacactgacctggcagcgggatggggaggaccagacccaggacacggagctcgtggagaccaggcctgcaggggatggaaccttccagaagtgggcggctgtggtggtgccttctggagaggagcagagatacacctgccatgtgcagcatgagggtctgcccaagcccctcaccctgagatgggagctgtcttcccagcccaccatccccatcgtgggcatcattgctggcctggttctccttggagctgtgatcactggagctgtggtcgctgccgtgatgtggaggaggaagagctcaggtggagaaggggtgaagggtggggtctgagatttcttgtctcactgagggttccaagccccagctagaaatgtgccctgtctcattactgggaagcaccgtccacaatcatgggcctacccagtctgggccctgtgtgccagcacttactcttttgtaaagcacctgttaaaatgaaggacagatttatcaccttgattacggcggtgatgggacctgatcccagcagtcacaagtcacaggggaaggtccctgaggacagacctcaggagggctattggtccaggacccacacctgctttcttcatgtttcctgatcccgccctgggtctgcagtcacacatttctggaaacttctctggggtccaagactaggaggttcctctaggaccttaaggccctggctcctttctggtatctcacaggacattttcttctcacagatagaaaaggagggagttacactcaggctgcaagtaagtatgaaggaggctgatgcctgaggtccttgggatattgtgtttgggagcccatgggggagcccacccacctcacaattcctcctctagccacatcttctgtgggatctgaccaggttctgtttttgttctaccccaggcagtgacagtgcccagggctctgatgtgtccctcacagcttgtaaaggtgagagcttggaggacctaatgtgtgttgggtgttgggcggaacagtggacacagctgtgctatggggtttctttgcattggatgtattgagcatgcgatgggctgtttaaggtgtgacccctcactgtgatggatatgaatttgttcatgaatatttttttctatagtgtgagacagctgccttgtgtgggactgagaggcaagagttgttcctgcccttccctttgtgacttgaagaaccctgactttgtttctgcaaaggcacctgcatgtgtctgtgttcgtgtaggcataatgtgaggaggtggggagaccaccccacccccatgtccaccatgaccctcttcccacgctgacctgtgctccctccccaatcatctttcctgttccagagaggtggggctgaggtgtctccatctctgtctcaacttcatggtgcactgagctgtaacttcttccttccctattaaaattagaaccttagtataaatttactttctcaaattcttgccatgagaggttgatgagttaattaaaggagaagattcctaaaatttgagagacaaaataaatggaagacatgagaaccttccagagtcca

SEQ ID NO: 13243 - protein, 134 aa, Homo sapiens; identical to SEQ ID NO: 13235

SEQ ID NO: 13244 - DNA, 2645 bp, Homo sapiens
agattctccccagacgccgaggatggccgtcatggcgccccgaaccctcctcctgctactctcgggggccctggccctgacccagacctgggcgggctcccactccatgaggtatttcttcacatccgtgtcccggcccggccgcggggagccccgcttcatcgccgtgggctacgtggacgacacgcagttcgtgcggttcgacagcgacgccgcgagccagaggatggagccgcgggcgccgtggatagagcaggaggggccggagtattgggaccaggagacacggaatgtgaaggcccagtcacagactgaccgagtggacctggggaccctgcgcggctactacaaccagagcgaggccggtgagtgaccccggccgggggcgcaggtcaggacccctcatcccccacggacgggccaggtcgcccacagtctccgggtccgagatccaccccgaagccgcgggaccccgagacccttgccccgggagaggcccaggcgcctttacccggtttcattttcagtttaggccaaaaatccccccgggttggtcggggctgggcggggctcgggggactgggctgaccgcggggtcggggccaggttctcacaccatccagataatgtatggctgcgacgtggggtcggacgggcgcttcctccgcgggtaccggcaggacgcctacgacggcaaggattacatcgccctgaacgaggacctgcgctcttggaccgcggcggacatggcggctcagatcaccaagcgcaagtgggaggcggcccatgaggcggagcagttgagagcctacctggatggcacgtgcgtggagtggctccgcagatacctggagaacgggaaggagacgctgcagcgcacggacccccccaagacacatatgacccaccaccccatctctgaccatgaggccaccctgaggtgctgggccctgggcttctaccctgcggagatcacactgacctggcagcgggatggggaggaccagacccaggacacggagctcgtggagaccaggcctgcaggggatggaaccttccagaagtgggcggctgtggtggtgccttctggagaggagcagagatacacctgccatgtgcagcatgagggtctgcccaagcccctcaccctgagatggggtaaggagggagatgggggtgtcatgtctcttagggaaagcaggagcctctctggagacctttagcagggtcagggcccctcaccttcccctcttttcccagagctgtcttcccagcccaccatccccatcgtgggcatcattgctggcctggttctccttggagctgtgatcactggagctgtggtcgctgccgtgatgtggaggaggaagagctcaggtggagaaggggtgaagggtggggtctgagatttcttgtctcactgagggttccaagccccagctagaaatgtgccctgtctcattactgggaagcaccgtccacaatcatgggcctacccagtctgggccctgtgtgccagcacttactcttttgtaaagcacctgttaaaatgaaggacagatttatcaccttgattacggcggtgatgggacctgatcccagcagtcacaagtcacaggggaaggtccctgaggacagacctcaggagggctattggtccaggacccacacctgctttcttcatgtttcctgatcccgccctgggtctgcagtcacacatttctggaaacttctctggggtccaagactaggaggttcctctaggaccttaaggccctggctcctttctggtatctcacaggacattttcttctcacagatagaaaaggagggagttacactcaggctgcaagtaagtatgaaggaggctgatgcctgaggtccttgggatattgtgtttgggagcccatgggggagcccacccacctcacaattcctcctctagccacatcttctgtgggatctgaccaggttctgtttttgttctaccccaggcagtgacagtgcccagggctctgatgtgtccctcacagcttgtaaaggtgagagcttggaggacctaatgtgtgttgggtgttgggcggaacagtggacacagctgtgctatggggtttctttgcattggatgtattgagcatgcgatgggctgtttaaggtgtgacccctcactgtgatggatatgaatttgttcatgaatatttttttctatagtgtgagacagctgccttgtgtgggactgagaggcaagagttgttcctgcccttccctttgtgacttgaagaaccctgactttgtttctgcaaaggcacctgcatgtgtctgtgttcgtgtaggcataatgtgaggaggtggggagaccaccccacccccatgtccaccatgaccctcttcccacgctgacctgtgctccctccccaatcatctttcctgttccagagaggtggggctgaggtgtctccatctctgtctcaacttcatggtgcactgagctgtaacttcttccttccctattaaaattagaaccttagtataaatttactttctcaaattcttgccatgagaggttgatgagttaattaaaggagaagattcctaaaatttgagagacaaaataaatggaagacatgagaaccttccagagtcca

SEQ ID NO: 13245 - protein, 198 aa, Homo sapiens; identical to SEQ ID NO: 13237

SEQ ID NO: 13246 - DNA, 639 bp, Homo sapiens
agattctccccagacgccgaggatggccgtcatggcgccccgaaccctcctcctgctactctcgggggccctggccctgacccagacctgggcgggctcccactccatgaggtatttcttcacatccgtgtcccggcccggccgcggggagccccgcttcatcgccgtgggctacgtggacgacacgcagttcgtgcggttcgacagcgacgccgcgagccagaggatggagccgcgggcgccgtggatagagcaggaggggccggagtattgggaccaggagacacggaatgtgaaggcccagtcacagactgaccgagtggacctggggaccctgcgcggctactacaaccagagcgaggccggtgagtgaccccgcctcttcccacgctgacctgtgctccctccccaatcatctttcctgttccagagaggtggggctgaggtgtctccatctctgtctcaacttcatggtgcactgagctgtaacttcttccttccctattaaaattagaaccttagtataaatttactttctcaaattcttgccatgagaggttgatgagttaattaaaggagaagattcctaaaatttgagagacaaaataaatggaagacatgagaaccttccagagtcca

SEQ ID NO: 13247 - protein, 116 aa, Homo sapiens
MAVMAPRTLLLLLSGALALTQTWAGSHSMRYFFTSVSRPGRGEPRFIAVGYVDDTQFVRFDSDAASQRMEPRAPWIEQEGPEYWDQETRNVKAQSQTDRVDLGTLRGYYNQSEAGE

SEQ ID NO: 13248 - DNA, 2784 bp, Homo sapiens
attctccccagacgccgaggatggccgtcatggcgccccgaaccctcctcctgctactctcgggggccctggccctgacccagacctgggcgggctcccactccatgagcgacgccgcgagccagaggatggagccgcgggcgccgtggatagagcaggaggggccggagtattgggaccaggagacacggaatgtgaaggcccagtcacagactgaccgagtggacctggggaccctgcgcggctactacaaccagagcgaggccggttctcacaccatccagataatgtatggctgcgacgtggggtcggacgggcgcttcctccgcgggtaccggcaggacgcctacgacggcaaggattacatcgccctgaacgaggacctgcgctcttggaccgcggcggacatggcggctcagatcaccaagcgcaagtgggaggcggcccatgaggcggagcagttgagagcctacctggatggcacgtgcgtggagtggctccgcagatacctggagaacgggaaggagacgctgcagcgcacgggtaccaggggccacggggcgcctccctgatcgcctgtagatctcccgggctggcctcccacaaggaggggagacaattgggaccaacactagaatatcaccctccctctggtcctgagggagaggaatcctcctgggttccagatcctgtaccagagagtgactctgaggttccgccctgctctctgacacaattaagggataaaatctctgaaggagtgacgggaagacgatccctcgaatactgatgagtggttccctttgacaccggcagcagccttgggcccgtgacttttcctctcaggccttgttctctgcttcacactcaatgtgtgtgggggtctgagtccagcacttctgagtccctcagcctccactcaggtcaggaccagaagtcgctgttcccttctcagggaatagaagattatcccaggtgcctgtgtccaggctggtgtctgggttctgtgctctcttccccatcccgggtgtcctgtccattctcaagatggccacatgcgtgctggtggagtgtcccatgacagatgcaaaatgcctgaattttctgactcttcccgtcagacccccccaagacacatatgacccaccaccccatctctgaccatgaggccaccctgaggtgctgggccctgggcttctaccctgcggagatcacactgacctggcagcgggatggggaggaccagacccaggacacggagctcgtggagaccaggcctgcaggggatggaaccttccagaagtgggcggctgtggtggtgccttctggagaggagcagagatacacctgccatgtgcagcatgagggtctgcccaagcccctcaccctgagatggggtaaggagggagatgggggtgtcatgtctcttagggaaagcaggagcctctctggagacctttagcagggtcagggcccctcaccttcccctcttttcccagagctgtcttcccagcccaccatccccatcgtgggcatcattgctggcctggttctccttggagctgtgatcactggagctgtggtcgctgccgtgatgtggaggaggaagagctcaggtggagaaggggtgaagggtggggtctgagatttcttgtctcactgagggttccaagccccagctagaaatgtgccctgtctcattactgggaagcaccgtccacaatcatgggcctacccagtctgggccctgtgtgccagcacttactcttttgtaaagcacctgttaaaatgaaggacagatttatcaccttgattacggcggtgatgggacctgatcccagcagtcacaagtcacaggggaaggtccctgaggacagacctcaggagggctattggtccaggacccacacctgctttcttcatgtttcctgatcccgccctgggtctgcagtcacacatttctggaaacttctctggggtccaagactaggaggttcctctaggaccttaaggccctggctcctttctggtatctcacaggacattttcttctcacagatagaaaaggagggagttacactcaggctgcaagtaagtatgaaggaggctgatgcctgaggtccttgggatattgtgtttgggagcccatgggggagcccacccacctcacaattcctcctctagccacatcttctgtgggatctgaccaggttctgtttttgttctaccccaggcagtgacagtgcccagggctctgatgtgtccctcacagcttgtaaaggtgagagcttggaggacctaatgtgtgttgggtgttgggcggaacagtggacacagctgtgctatggggtttctttgcattggatgtattgagcatgcgatgggctgtttaaggtgtgacccctcactgtgatggatatgaatttgttcatgaatatttttttctatagtgtgagacagctgccttgtgtgggactgagaggcaagagttgttcctgcccttccctttgtgacttgaagaaccctgactttgtttctgcaaaggcacctgcatgtgtctgtgttcgtgtaggcataatgtgaggaggtggggagaccaccccacccccatgtccaccatgaccctcttcccacgctgacctgtgctccctccccaatcatctttcctgttccagagaggtggggctgaggtgtctccatctctgtctcaacttcatggtgcactgagctgtaacttcttccttccctattaaaattagaaccttagtataaatttactttctc

SEQ ID NO: 13249 - protein, 183 aa, Homo sapiens
MAVMAPRTLLLLLSGALALTQTWAGSHSMSDAASQRMEPRAPWIEQEGPEYWDQETRNVKAQSQTDRVDLGTLRGYYNQSEAGSHTIQIMYGCDVGSDGRFLRGYRQDAYDGKDYIALNEDLRSWTAADMAAQITKRKWEAAHEAEQLRAYLDGTCVEWLRRYLENGKETLQRTGTRGHGAPP

SEQ ID NO: 13250 - DNA, 2833 bp, Homo sapiens
attctccccagacgccgaggatggccgtcatggcgccccgaaccctcctcctgctactctcgggggccctggccctgacccagacctgggcgggctcccactccatgagcgacgccgcgagccagaggatggagccgcgggcgccgtggatagagcaggaggggccggagtattgggaccaggagacacggaatgtgaaggcccagtcacagactgaccgagtggacctggggaccctgcgcggctactacaaccagagcgaggccggttctcacaccatccagataatgtatggctgcgacgtggggtcggacgggcgcttcctccgcgggtaccggcaggacgcctacgacggcaaggattacatcgccctgaacgaggacctgcgctcttggaccgcggcggacatggcggctcagatcaccaagcgcaagtgggaggcggcccatgaggcggagcagttgagagcctacctggatggcacgtgcgtggagtggctccgcagatacctggagaacgggaaggagacgctgcagcgcacgggtaccaggggccacggggcgcctccctgatcgcctgtagatctcccgggctggcctcccacaaggaggggagacaattgggaccaacactagaatatcaccctccctctggtcctgagggagaggaatcctcctgggttccagatcctgtaccagagagtgactctgaggttccgccctgctctctgacacaattaagggataaaatctctgaaggagtgacgggaagacgatccctcgaatactgatgagtggttccctttgacaccggcagcagccttgggcccgtgacttttcctctcaggccttgttctctgcttcacactcaatgtgtgtgggggtctgagtccagcacttctgagtccctcagcctccactcaggtcaggaccagaagtcgctgttcccttctcagggaatagaagattatcccaggtgcctgtgtccaggctggtgtctgggttctgtgctctcttccccatcccgggtgtcctgtccattctcaagatggccacatgcgtgctggtggagtgtcccatgacagatgcaaaatgcctgaattttctgactcttcccgtcagacccccccaagacacatatgacccaccaccccatctctgaccatgaggccaccctgaggtgctgggccctgggcttctaccctgcggagatcacactgacctggcagcgggatggggaggaccagacccaggacacggagctcgtggagaccaggcctgcaggggatggaaccttccagaagtgggcggctgtggtggtgccttctggagaggagcagagatacacctgccatgtgcagcatgagggtctgcccaagcccctcaccctgagatggggtaaggagggagatgggggtgtcatgtctcttagggaaagcaggagcctctctggagacctttagcagggtcagggcccctcaccttcccctcttttcccagagctgtcttcccagcccaccatccccatcgtgggcatcattgctggcctggttctccttggagctgtgatcactggagctgtggtcgctgccgtgatgtggaggaggaagagctcaggtggagaaggggtgaagggtggggtctgagatttcttgtctcactgagggttccaagccccagctagaaatgtgccctgtctcattactgggaagcaccgtccacaatcatgggcctacccagtctgggccctgtgtgccagcacttactcttttgtaaagcacctgttaaaatgaaggacagatttatcaccttgattacggcggtgatgggacctgatcccagcagtcacaagtcacaggggaaggtccctgaggacagacctcaggagggctattggtccaggacccacacctgctttcttcatgtttcctgatcccgccctgggtctgcagtcacacatttctggaaacttctctggggtccaagactaggaggttcctctaggaccttaaggccctggctcctttctggtatctcacaggacattttcttctcacagatagaaaaggagggagttacactcaggctgcaagtaagtatgaaggaggctgatgcctgaggtccttgggatattgtgtttgggagcccatgggggagcccacccacctcacaattcctcctctagccacatcttctgtgggatctgaccaggttctgtttttgttctaccccaggcagtgacagtgcccagggctctgatgtgtccctcacagcttgtaaaggtgagagcttggaggacctaatgtgtgttgggtgttgggcggaacagtggacacagctgtgctatggggtttctttgcattggatgtattgagcatgcgatgggctgtttaaggtgtgacccctcactgtgatggatatgaatttgttcatgaatatttttttctatagtgtgagacagctgccttgtgtgggactgagaggcaagagttgttcctgcccttccctttgtgacttgaagaaccctgactttgtttctgcaaaggcacctgcatgtgtctgtgttcgtgtaggcataatgtgaggaggtggggagaccaccccacccccatgtccaccatgaccctcttcccacgctgacctgtgctccctccccaatcatctttcctgttccagagaggtggggctgaggtgtctccatctctgtctcaacttcatggtgcactgagctgtaacttcttccttccctattaaaattagaaccttagtataaatttactttctcaaattcttgccatgagaggttgatgagttaattaaaggagaagattcct

SEQ ID NO: 13251 - protein, 183 aa, Homo sapiens; identical to SEQ ID NO: 13249

SEQ ID NO: 13252 - DNA, 2884 bp, Homo sapiens
attctccccagacgccgaggatggccgtcatggcgccccgaaccctcctcctgctactctcgggggccctggccctgacccagacctgggcgggctcccactccatgagcgacgccgcgagccagaggatggagccgcgggcgccgtggatagagcaggaggggccggagtattgggaccaggagacacggaatgtgaaggcccagtcacagactgaccgagtggacctggggaccctgcgcggctactacaaccagagcgaggccggttctcacaccatccagataatgtatggctgcgacgtggggtcggacgggcgcttcctccgcgggtaccggcaggacgcctacgacggcaaggattacatcgccctgaacgaggacctgcgctcttggaccgcggcggacatggcggctcagatcaccaagcgcaagtgggaggcggcccatgaggcggagcagttgagagcctacctggatggcacgtgcgtggagtggctccgcagatacctggagaacgggaaggagacgctgcagcgcacgggtaccaggggccacggggcgcctccctgatcgcctgtagatctcccgggctggcctcccacaaggaggggagacaattgggaccaacactagaatatcaccctccctctggtcctgagggagaggaatcctcctgggttccagatcctgtaccagagagtgactctgaggttccgccctgctctctgacacaattaagggataaaatctctgaaggagtgacgggaagacgatccctcgaatactgatgagtggttccctttgacaccggcagcagccttgggcccgtgacttttcctctcaggccttgttctctgcttcacactcaatgtgtgtgggggtctgagtccagcacttctgagtccctcagcctccactcaggtcaggaccagaagtcgctgttcccttctcagggaatagaagattatcccaggtgcctgtgtccaggctggtgtctgggttctgtgctctcttccccatcccgggtgtcctgtccattctcaagatggccacatgcgtgctggtggagtgtcccatgacagatgcaaaatgcctgaattttctgactcttcccgtcagacccccccaagacacatatgacccaccaccccatctctgaccatgaggccaccctgaggtgctgggccctgggcttctaccctgcggagatcacactgacctggcagcgggatggggaggaccagacccaggacacggagctcgtggagaccaggcctgcaggggatggaaccttccagaagtgggcggctgtggtggtgccttctggagaggagcagagatacacctgccatgtgcagcatgagggtctgcccaagcccctcaccctgagatggggtaaggagggagatgggggtgtcatgtctcttagggaaagcaggagcctctctggagacctttagcagggtcagggcccctcaccttcccctcttttcccagagctgtcttcccagcccaccatccccatcgtgggcatcattgctggcctggttctccttggagctgtgatcactggagctgtggtcgctgccgtgatgtggaggaggaagagctcaggtggagaaggggtgaagggtggggtctgagatttcttgtctcactgagggttccaagccccagctagaaatgtgccctgtctcattactgggaagcaccgtccacaatcatgggcctacccagtctgggccctgtgtgccagcacttactcttttgtaaagcacctgttaaaatgaaggacagatttatcaccttgattacggcggtgatgggacctgatcccagcagtcacaagtcacaggggaaggtccctgaggacagacctcaggagggctattggtccaggacccacacctgctttcttcatgtttcctgatcccgccctgggtctgcagtcacacatttctggaaacttctctggggtccaagactaggaggttcctctaggaccttaaggccctggctcctttctggtatctcacaggacattttcttctcacagatagaaaaggagggagttacactcaggctgcaagtaagtatgaaggaggctgatgcctgaggtccttgggatattgtgtttgggagcccatgggggagcccacccacctcacaattcctcctctagccacatcttctgtgggatctgaccaggttctgtttttgttctaccccaggcagtgacagtgcccagggctctgatgtgtccctcacagcttgtaaaggtgagagcttggaggacctaatgtgtgttgggtgttgggcggaacagtggacacagctgtgctatggggtttctttgcattggatgtattgagcatgcgatgggctgtttaaggtgtgacccctcactgtgatggatatgaatttgttcatgaatatttttttctatagtgtgagacagctgccttgtgtgggactgagaggcaagagttgttcctgcccttccctttgtgacttgaagaaccctgactttgtttctgcaaaggcacctgcatgtgtctgtgttcgtgtaggcataatgtgaggaggtggggagaccaccccacccccatgtccaccatgaccctcttcccacgctgacctgtgctccctccccaatcatctttcctgttccagagaggtggggctgaggtgtctccatctctgtctcaacttcatggtgcactgagctgtaacttcttccttccctattaaaattagaaccttagtataaatttactttctcaaattcttgccatgagaggttgatgagttaattaaaggagaagattcctaaaatttgagagacaaaataaatggaagacatgagaaccttccagagtcca

SEQ ID NO: 13253 - protein, 183 aa, Homo sapiens; identical to SEQ ID NO: 13249

SEQ ID NO: 13254 - DNA, 2701 bp, Homo sapiens
cgccgaggatggccgtcatggcgccccgaaccctcctcctgctactctcgggggccctggccctgacccagacctgggcgggctcccactccatgagcgaggccgtttaggccaaaaatccccccgggttggtcggggctgggcggggctcgggggactgggctgaccgcggggtcggggccaggttctcacaccatccagataatgtatggctgcgacgtggggtcggacgggcgcttcctccgcgggtaccggcaggacgcctacgacggcaaggattacatcgccctgaacgaggacctgcgctcttggaccgcggcggacatggcggctcagatcaccaagcgcaagtgggaggcggcccatgaggcggagcagttgagagcctacctggatggcacgtgcgtggagtggctccgcagatacctggagaacgggaaggagacgctgcagcgcacgggtaccaggggccacggggcgcctccctgatcgcctgtagatctcccgggctggcctcccacaaggaggggagacaattgggaccaacactagaatatcaccctccctctggtcctgagggagaggaatcctcctgggttccagatcctgtaccagagagtgactctgaggttccgccctgctctctgacacaattaagggataaaatctctgaaggagtgacgggaagacgatccctcgaatactgatgagtggttccctttgacaccggcagcagccttgggcccgtgacttttcctctcaggccttgttctctgcttcacactcaatgtgtgtgggggtctgagtccagcacttctgagtccctcagcctccactcaggtcaggaccagaagtcgctgttcccttctcagggaatagaagattatcccaggtgcctgtgtccaggctggtgtctgggttctgtgctctcttccccatcccgggtgtcctgtccattctcaagatggccacatgcgtgctggtggagtgtcccatgacagatgcaaaatgcctgaattttctgactcttcccgtcagacccccccaagacacatatgacccaccaccccatctctgaccatgaggccaccctgaggtgctgggccctgggcttctaccctgcggagatcacactgacctggcagcgggatggggaggaccagacccaggacacggagctcgtggagaccaggcctgcaggggatggaaccttccagaagtgggcggctgtggtggtgccttctggagaggagcagagatacacctgccatgtgcagcatgagggtctgcccaagcccctcaccctgagatggggtaaggagggagatgggggtgtcatgtctcttagggaaagcaggagcctctctggagacctttagcagggtcagggcccctcaccttcccctcttttcccagagctgtcttcccagcccaccatccccatcgtgggcatcattgctggcctggttctccttggagctgtgatcactggagctgtggtcgctgccgtgatgtggaggaggaagagctcaggtggagaaggggtgaagggtggggtctgagatttcttgtctcactgagggttccaagccccagctagaaatgtgccctgtctcattactgggaagcaccgtccacaatcatgggcctacccagtctgggccctgtgtgccagcacttactcttttgtaaagcacctgttaaaatgaaggacagatttatcaccttgattacggcggtgatgggacctgatcccagcagtcacaagtcacaggggaaggtccctgaggacagacctcaggagggctattggtccaggacccacacctgctttcttcatgtttcctgatcccgccctgggtctgcagtcacacatttctggaaacttctctggggtccaagactaggaggttcctctaggaccttaaggccctggctcctttctggtatctcacaggacattttcttctcacagatagaaaaggagggagttacactcaggctgcaagtaagtatgaaggaggctgatgcctgaggtccttgggatattgtgtttgggagcccatgggggagcccacccacctcacaattcctcctctagccacatcttctgtgggatctgaccaggttctgtttttgttctaccccaggcagtgacagtgcccagggctctgatgtgtccctcacagcttgtaaaggtgagagcttggaggacctaatgtgtgttgggtgttgggcggaacagtggacacagctgtgctatggggtttctttgcattggatgtattgagcatgcgatgggctgtttaaggtgtgacccctcactgtgatggatatgaatttgttcatgaatatttttttctatagtgtgagacagctgccttgtgtgggactgagaggcaagagttgttcctgcccttccctttgtgacttgaagaaccctgactttgtttctgcaaaggcacctgcatgtgtctgtgttcgtgtaggcataatgtgaggaggtggggagaccaccccacccccatgtccaccatgaccctcttcccacgctgacctgtgctccctccccaatcatctttcctgttccagagaggtggggctgaggtgtctccatctctgtctcaacttcatggtgcactgagctgtaacttcttccttccctattaaaattagaaccttagtataaatttactttctc

SEQ ID NO: 13255 - protein, 33 aa, Homo sapiens
MAVMAPRTLLLLLSGALALTQTWAGSHSMSEAV

SEQ ID NO: 13256 - DNA, 2750 bp, Homo sapiens
cgccgaggatggccgtcatggcgccccgaaccctcctcctgctactctcgggggccctggccctgacccagacctgggcgggctcccactccatgagcgaggccgtttaggccaaaaatccccccgggttggtcggggctgggcggggctcgggggactgggctgaccgcggggtcggggccaggttctcacaccatccagataatgtatggctgcgacgtggggtcggacgggcgcttcctccgcgggtaccggcaggacgcctacgacggcaaggattacatcgccctgaacgaggacctgcgctcttggaccgcggcggacatggcggctcagatcaccaagcgcaagtgggaggcggcccatgaggcggagcagttgagagcctacctggatggcacgtgcgtggagtggctccgcagatacctggagaacgggaaggagacgctgcagcgcacgggtaccaggggccacggggcgcctccctgatcgcctgtagatctcccgggctggcctcccacaaggaggggagacaattgggaccaacactagaatatcaccctccctctggtcctgagggagaggaatcctcctgggttccagatcctgtaccagagagtgactctgaggttccgccctgctctctgacacaattaagggataaaatctctgaaggagtgacgggaagacgatccctcgaatactgatgagtggttccctttgacaccggcagcagccttgggcccgtgacttttcctctcaggccttgttctctgcttcacactcaatgtgtgtgggggtctgagtccagcacttctgagtccctcagcctccactcaggtcaggaccagaagtcgctgttcccttctcagggaatagaagattatcccaggtgcctgtgtccaggctggtgtctgggttctgtgctctcttccccatcccgggtgtcctgtccattctcaagatggccacatgcgtgctggtggagtgtcccatgacagatgcaaaatgcctgaattttctgactcttcccgtcagacccccccaagacacatatgacccaccaccccatctctgaccatgaggccaccctgaggtgctgggccctgggcttctaccctgcggagatcacactgacctggcagcgggatggggaggaccagacccaggacacggagctcgtggagaccaggcctgcaggggatggaaccttccagaagtgggcggctgtggtggtgccttctggagaggagcagagatacacctgccatgtgcagcatgagggtctgcccaagcccctcaccctgagatggggtaaggagggagatgggggtgtcatgtctcttagggaaagcaggagcctctctggagacctttagcagggtcagggcccctcaccttcccctcttttcccagagctgtcttcccagcccaccatccccatcgtgggcatcattgctggcctggttctccttggagctgtgatcactggagctgtggtcgctgccgtgatgtggaggaggaagagctcaggtggagaaggggtgaagggtggggtctgagatttcttgtctcactgagggttccaagccccagctagaaatgtgccctgtctcattactgggaagcaccgtccacaatcatgggcctacccagtctgggccctgtgtgccagcacttactcttttgtaaagcacctgttaaaatgaaggacagatttatcaccttgattacggcggtgatgggacctgatcccagcagtcacaagtcacaggggaaggtccctgaggacagacctcaggagggctattggtccaggacccacacctgctttcttcatgtttcctgatcccgccctgggtctgcagtcacacatttctggaaacttctctggggtccaagactaggaggttcctctaggaccttaaggccctggctcctttctggtatctcacaggacattttcttctcacagatagaaaaggagggagttacactcaggctgcaagtaagtatgaaggaggctgatgcctgaggtccttgggatattgtgtttgggagcccatgggggagcccacccacctcacaattcctcctctagccacatcttctgtgggatctgaccaggttctgtttttgttctaccccaggcagtgacagtgcccagggctctgatgtgtccctcacagcttgtaaaggtgagagcttggaggacctaatgtgtgttgggtgttgggcggaacagtggacacagctgtgctatggggtttctttgcattggatgtattgagcatgcgatgggctgtttaaggtgtgacccctcactgtgatggatatgaatttgttcatgaatatttttttctatagtgtgagacagctgccttgtgtgggactgagaggcaagagttgttcctgcccttccctttgtgacttgaagaaccctgactttgtttctgcaaaggcacctgcatgtgtctgtgttcgtgtaggcataatgtgaggaggtggggagaccaccccacccccatgtccaccatgaccctcttcccacgctgacctgtgctccctccccaatcatctttcctgttccagagaggtggggctgaggtgtctccatctctgtctcaacttcatggtgcactgagctgtaacttcttccttccctattaaaattagaaccttagtataaatttactttctcaaattcttgccatgagaggttgatgagttaattaaaggagaagattcct

SEQ ID NO: 13257 - protein, 33 aa, Homo sapiens; identical to SEQ ID NO: 13255

SEQ ID NO: 13258 - DNA, 2801 bp, Homo sapiens
cgccgaggatggccgtcatggcgccccgaaccctcctcctgctactctcgggggccctggccctgacccagacctgggcgggctcccactccatgagcgaggccgtttaggccaaaaatccccccgggttggtcggggctgggcggggctcgggggactgggctgaccgcggggtcggggccaggttctcacaccatccagataatgtatggctgcgacgtggggtcggacgggcgcttcctccgcgggtaccggcaggacgcctacgacggcaaggattacatcgccctgaacgaggacctgcgctcttggaccgcggcggacatggcggctcagatcaccaagcgcaagtgggaggcggcccatgaggcggagcagttgagagcctacctggatggcacgtgcgtggagtggctccgcagatacctggagaacgggaaggagacgctgcagcgcacgggtaccaggggccacggggcgcctccctgatcgcctgtagatctcccgggctggcctcccacaaggaggggagacaattgggaccaacactagaatatcaccctccctctggtcctgagggagaggaatcctcctgggttccagatcctgtaccagagagtgactctgaggttccgccctgctctctgacacaattaagggataaaatctctgaaggagtgacgggaagacgatccctcgaatactgatgagtggttccctttgacaccggcagcagccttgggcccgtgacttttcctctcaggccttgttctctgcttcacactcaatgtgtgtgggggtctgagtccagcacttctgagtccctcagcctccactcaggtcaggaccagaagtcgctgttcccttctcagggaatagaagattatcccaggtgcctgtgtccaggctggtgtctgggttctgtgctctcttccccatcccgggtgtcctgtccattctcaagatggccacatgcgtgctggtggagtgtcccatgacagatgcaaaatgcctgaattttctgactcttcccgtcagacccccccaagacacatatgacccaccaccccatctctgaccatgaggccaccctgaggtgctgggccctgggcttctaccctgcggagatcacactgacctggcagcgggatggggaggaccagacccaggacacggagctcgtggagaccaggcctgcaggggatggaaccttccagaagtgggcggctgtggtggtgccttctggagaggagcagagatacacctgccatgtgcagcatgagggtctgcccaagcccctcaccctgagatggggtaaggagggagatgggggtgtcatgtctcttagggaaagcaggagcctctctggagacctttagcagggtcagggcccctcaccttcccctcttttcccagagctgtcttcccagcccaccatccccatcgtgggcatcattgctggcctggttctccttggagctgtgatcactggagctgtggtcgctgccgtgatgtggaggaggaagagctcaggtggagaaggggtgaagggtggggtctgagatttcttgtctcactgagggttccaagccccagctagaaatgtgccctgtctcattactgggaagcaccgtccacaatcatgggcctacccagtctgggccctgtgtgccagcacttactcttttgtaaagcacctgttaaaatgaaggacagatttatcaccttgattacggcggtgatgggacctgatcccagcagtcacaagtcacaggggaaggtccctgaggacagacctcaggagggctattggtccaggacccacacctgctttcttcatgtttcctgatcccgccctgggtctgcagtcacacatttctggaaacttctctggggtccaagactaggaggttcctctaggaccttaaggccctggctcctttctggtatctcacaggacattttcttctcacagatagaaaaggagggagttacactcaggctgcaagtaagtatgaaggaggctgatgcctgaggtccttgggatattgtgtttgggagcccatgggggagcccacccacctcacaattcctcctctagccacatcttctgtgggatctgaccaggttctgtttttgttctaccccaggcagtgacagtgcccagggctctgatgtgtccctcacagcttgtaaaggtgagagcttggaggacctaatgtgtgttgggtgttgggcggaacagtggacacagctgtgctatggggtttctttgcattggatgtattgagcatgcgatgggctgtttaaggtgtgacccctcactgtgatggatatgaatttgttcatgaatatttttttctatagtgtgagacagctgccttgtgtgggactgagaggcaagagttgttcctgcccttccctttgtgacttgaagaaccctgactttgtttctgcaaaggcacctgcatgtgtctgtgttcgtgtaggcataatgtgaggaggtggggagaccaccccacccccatgtccaccatgaccctcttcccacgctgacctgtgctccctccccaatcatctttcctgttccagagaggtggggctgaggtgtctccatctctgtctcaacttcatggtgcactgagctgtaacttcttccttccctattaaaattagaaccttagtataaatttactttctcaaattcttgccatgagaggttgatgagttaattaaaggagaagattcctaaaatttgagagacaaaataaatggaagacatgagaaccttccagagtcca

SEQ ID NO: 13259 - protein, 33 aa, Homo sapiens; identical to SEQ ID NO: 13255

SEQ ID NO: 13260 - DNA, 2790 bp, Homo sapiens
caggctcccactccatgaggtatttcttcacatccgtgtcccggcccggccgcggggagccccgcttcatcgccgtgggctacgtggacgacacgcagttcgtgcggttcgacagcgacgccgcgagccagaggatggagccgcgggcgccgtggatagagcaggaggggccggagtattgggaccaggagacacggaatgtgaaggcccagtcacagactgaccgagtggacctggggaccctgcgcggctactacaaccagagcgaggccggttctcacaccatccagataatgtatggctgcgacgtggggtcggacgggcgcttcctccgcgggtaccggcaggacgcctacgacggcaaggattacatcgccctgaacgaggacctgcgctcttggaccgcggcggacatggcggctcagatcaccaagcgcaagtgggaggcggcccatgaggcggagcagttgagagcctacctggatggcacgtgcgtggagtggctccgcagatacctggagaacgggaaggagacgctgcagcgcacgggtaccaggggccacggggcgcctccctgatcgcctgtagatctcccgggctggcctcccacaaggaggggagacaattgggaccaacactagaatatcaccctccctctggtcctgagggagaggaatcctcctgggttccagatcctgtaccagagagtgactctgaggttccgccctgctctctgacacaattaagggataaaatctctgaaggagtgacgggaagacgatccctcgaatactgatgagtggttccctttgacaccggcagcagccttgggcccgtgacttttcctctcaggccttgttctctgcttcacactcaatgtgtgtgggggtctgagtccagcacttctgagtccctcagcctccactcaggtcaggaccagaagtcgctgttcccttctcagggaatagaagattatcccaggtgcctgtgtccaggctggtgtctgggttctgtgctctcttccccatcccgggtgtcctgtccattctcaagatggccacatgcgtgctggtggagtgtcccatgacagatgcaaaatgcctgaattttctgactcttcccgtcagacccccccaagacacatatgacccaccaccccatctctgaccatgaggccaccctgaggtgctgggccctgggcttctaccctgcggagatcacactgacctggcagcgggatggggaggaccagacccaggacacggagctcgtggagaccaggcctgcaggggatggaaccttccagaagtgggcggctgtggtggtgccttctggagaggagcagagatacacctgccatgtgcagcatgagggtctgcccaagcccctcaccctgagatggggtaaggagggagatgggggtgtcatgtctcttagggaaagcaggagcctctctggagacctttagcagggtcagggcccctcaccttcccctcttttcccagagctgtcttcccagcccaccatccccatcgtgggcatcattgctggcctggttctccttggagctgtgatcactggagctgtggtcgctgccgtgatgtggaggaggaagagctcaggtggagaaggggtgaagggtggggtctgagatttcttgtctcactgagggttccaagccccagctagaaatgtgccctgtctcattactgggaagcaccgtccacaatcatgggcctacccagtctgggccctgtgtgccagcacttactcttttgtaaagcacctgttaaaatgaaggacagatttatcaccttgattacggcggtgatgggacctgatcccagcagtcacaagtcacaggggaaggtccctgaggacagacctcaggagggctattggtccaggacccacacctgctttcttcatgtttcctgatcccgccctgggtctgcagtcacacatttctggaaacttctctggggtccaagactaggaggttcctctaggaccttaaggccctggctcctttctggtatctcacaggacattttcttctcacagatagaaaaggagggagttacactcaggctgcaagtaagtatgaaggaggctgatgcctgaggtccttgggatattgtgtttgggagcccatgggggagcccacccacctcacaattcctcctctagccacatcttctgtgggatctgaccaggttctgtttttgttctaccccaggcagtgacagtgcccagggctctgatgtgtccctcacagcttgtaaaggtgagagcttggaggacctaatgtgtgttgggtgttgggcggaacagtggacacagctgtgctatggggtttctttgcattggatgtattgagcatgcgatgggctgtttaaggtgtgacccctcactgtgatggatatgaatttgttcatgaatatttttttctatagtgtgagacagctgccttgtgtgggactgagaggcaagagttgttcctgcccttccctttgtgacttgaagaaccctgactttgtttctgcaaaggcacctgcatgtgtctgtgttcgtgtaggcataatgtgaggaggtggggagaccaccccacccccatgtccaccatgaccctcttcccacgctgacctgtgctccctccccaatcatctttcctgttccagagaggtggggctgaggtgtctccatctctgtctcaacttcatggtgcactgagctgtaacttcttccttccctattaaaattagaaccttagtataaatttactttctc

SEQ ID NO: 13261 - protein, 187 aa, Homo sapiens
MRYFFTSVSRPGRGEPRFIAVGYVDDTQFVRFDSDAASQRMEPRAPWIEQEGPEYWDQETRNVKAQSQTDRVDLGTLRGYYNQSEAGSHTIQIMYGCDVGSDGRFLRGYRQDAYDGKDYIALNEDLRSWTAADMAAQITKRKWEAAHEAEQLRAYLDGTCVEWLRRYLENGKETLQRTGTRGHGAPP

SEQ ID NO: 13262 - DNA, 2212 bp, Homo sapiens
caggctcccactccatgaggtatttcttcacatccgtgtcccggcccggccgcggggagccccgcttcatcgccgtgggctacgtggacgacacgcagttcgtgcggttcgacagcgacgccgcgagccagaggatggagccgcgggcgccgtggatagagcaggaggggccggagtattgggaccaggagacacggaatgtgaaggcccagtcacagactgaccgagtggacctggggaccctgcgcggctactacaaccagagcgaggccggttctcacaccatccagataatgtatggctgcgacgtggggtcggacgggcgcttcctccgcgggtaccggcaggacgcctacgacggcaaggattacatcgccctgaacgaggacctgcgctcttggaccgcggcggacatggcggctcagatcaccaagcgcaagtgggaggcggcccatgaggcggagcagttgagagcctacctggatggcacgtgcgtggagtggctccgcagatacctggagaacgggaaggagacgctgcagcgcacggacccccccaagacacatatgacccaccaccccatctctgaccatgaggccaccctgaggtgctgggccctgggcttctaccctgcggagatcacactgacctggcagcgggatggggaggaccagacccaggacacggagctcgtggagaccaggcctgcaggggatggaaccttccagaagtgggcggctgtggtggtgccttctggagaggagcagagatacacctgccatgtgcagcatgagggtctgcccaagcccctcaccctgagatggggtaaggagggagatgggggtgtcatgtctcttagggaaagcaggagcctctctggagacctttagcagggtcagggcccctcaccttcccctcttttcccagagctgtcttcccagcccaccatccccatcgtgggcatcattgctggcctggttctccttggagctgtgatcactggagctgtggtcgctgccgtgatgtggaggaggaagagctcaggtggagaaggggtgaagggtggggtctgagatttcttgtctcactgagggttccaagccccagctagaaatgtgccctgtctcattactgggaagcaccgtccacaatcatgggcctacccagtctgggccctgtgtgccagcacttactcttttgtaaagcacctgttaaaatgaaggacagatttatcaccttgattacggcggtgatgggacctgatcccagcagtcacaagtcacaggggaaggtccctgaggacagacctcaggagggctattggtccaggacccacacctgctttcttcatgtttcctgatcccgccctgggtctgcagtcacacatttctggaaacttctctggggtccaagactaggaggttcctctaggaccttaaggccctggctcctttctggtatctcacaggacattttcttctcacagatagaaaaggagggagttacactcaggctgcaagtaagtatgaaggaggctgatgcctgaggtccttgggatattgtgtttgggagcccatgggggagcccacccacctcacaattcctcctctagccacatcttctgtgggatctgaccaggttctgtttttgttctaccccaggcagtgacagtgcccagggctctgatgtgtccctcacagcttgtaaaggtgagagcttggaggacctaatgtgtgttgggtgttgggcggaacagtggacacagctgtgctatggggtttctttgcattggatgtattgagcatgcgatgggctgtttaaggtgtgacccctcactgtgatggatatgaatttgttcatgaatatttttttctatagtgtgagacagctgccttgtgtgggactgagaggcaagagttgttcctgcccttccctttgtgacttgaagaaccctgactttgtttctgcaaaggcacctgcatgtgtctgtgttcgtgtaggcataatgtgaggaggtggggagaccaccccacccccatgtccaccatgaccctcttcccacgctgacctgtgctccctccccaatcatctttcctgttccagagaggtggggctgaggtgtctccatctctgtctcaacttcatggtgcactgagctgtaacttcttccttccctattaaaattagaaccttagtataaatttactttctc

SEQ ID NO: 13263 - protein, 291 aa, Homo sapiens
MRYFFTSVSRPGRGEPRFIAVGYVDDTQFVRFDSDAASQRMEPRAPWIEQEGPEYWDQETRNVKAQSQTDRVDLGTLRGYYNQSEAGSHTIQIMYGCDVGSDGRFLRGYRQDAYDGKDYIALNEDLRSWTAADMAAQITKRKWEAAHEAEQLRAYLDGTCVEWLRRYLENGKETLQRTDPPKTHMTHHPISDHEATLRCWALGFYPAEITLTWQRDGEDQTQDTELVETRPAGDGTFQKWAAVVVPSGEEQRYTCHVQHEGLPKPLTLRWGKEGDGGVMSLRESRSLSGDL

SEQ ID NO: 13264 - DNA, 1357 bp, Homo sapiens
caggctcccactccatgaggtatttcttcacatccgtgtcccggcccggccgcggggagccccgcttcatcgccgtgggctacgtggacgacacgcagttcgtgcggttcgacagcgacgccgcgagccagaggatggagccgcgggcgccgtggatagagcaggaggggccggagtattgggaccaggagacacggaatgtgaaggcccagtcacagactgaccgagtggacctggggaccctgcgcggctactacaaccagagcgaggccggttctcacaccatccagataatgtatggctgcgacgtggggtcggacgggcgcttcctccgcgggtaccggcaggacgcctacgacggcaaggattacatcgccctgaacgaggacctgcgctcttggaccgcggcggacatggcggctcagatcaccaagcgcaagtgggaggcggcccatgaggcggagcagttgagagcctacctggatggcacgtgcgtggagtggctccgcagatacctggagaacgggaaggagacgctgcagcgcacggacccccccaagacacatatgacccaccaccccatctctgaccatgaggccaccctgaggtgctgggccctgggcttctaccctgcggagatcacactgacctggcagcgggatggggaggaccagacccaggacacggagctcgtggagaccaggcctgcaggggatggaaccttccagaagtgggcggctgtggtggtgccttctggagaggagcagagatacacctgccatgtgcagcatgagggtctgcccaagcccctcaccctgagatgggagctgtcttcccagcccaccatccccatcgtgggcatcattgctggcctggttctccttggagctgtgatcactggagctgtggtcgctgccgtgatgtggaggaggaagagctcagatagaaaaggagggagttacactcaggctgcaagcagtgacagtgcccagggctctgatgtgtccctcacagcttgtaaagtgtgagacagctgccttgtgtgggactgagaggcaagagttgttcctgcccttccctttgtgacttgaagaaccctgactttgtttctgcaaaggcacctgcatgtgtctgtgttcgtgtaggcataatgtgaggaggtggggagaccaccccacccccatgtccaccatgaccctcttcccacgctgacctgtgctccctccccaatcatctttcctgttccagagaggtggggctgaggtgtctccatctctgtctcaacttcatggtgcactgagctgtaacttcttccttccctattaaaattagaaccttagtataaatttactttctc

SEQ ID NO: 13265 - protein, 337 aa, Homo sapiens
MRYFFTSVSRPGRGEPRFIAVGYVDDTQFVRFDSDAASQRMEPRAPWIEQEGPEYWDQETRNVKAQSQTDRVDLGTLRGYYNQSEAGSHTIQIMYGCDVGSDGRFLRGYRQDAYDGKDYIALNEDLRSWTAADMAAQITKRKWEAAHEAEQLRAYLDGTCVEWLRRYLENGKETLQRTDPPKTHMTHHPISDHEATLRCWALGFYPAEITLTWQRDGEDQTQDTELVETRPAGDGTFQKWAAVVVPSGEEQRYTCHVQHEGLPKPLTLRWELSSQPTIPIVGIIAGLVLLGAVITGAVVAAVMWRRKSSDRKGGSYTQAASSDSAQGSDVSLTACKV

SEQ ID NO: 13266 - DNA, 2839 bp, Homo sapiens
caggctcccactccatgaggtatttcttcacatccgtgtcccggcccggccgcggggagccccgcttcatcgccgtgggctacgtggacgacacgcagttcgtgcggttcgacagcgacgccgcgagccagaggatggagccgcgggcgccgtggatagagcaggaggggccggagtattgggaccaggagacacggaatgtgaaggcccagtcacagactgaccgagtggacctggggaccctgcgcggctactacaaccagagcgaggccggttctcacaccatccagataatgtatggctgcgacgtggggtcggacgggcgcttcctccgcgggtaccggcaggacgcctacgacggcaaggattacatcgccctgaacgaggacctgcgctcttggaccgcggcggacatggcggctcagatcaccaagcgcaagtgggaggcggcccatgaggcggagcagttgagagcctacctggatggcacgtgcgtggagtggctccgcagatacctggagaacgggaaggagacgctgcagcgcacgggtaccaggggccacggggcgcctccctgatcgcctgtagatctcccgggctggcctcccacaaggaggggagacaattgggaccaacactagaatatcaccctccctctggtcctgagggagaggaatcctcctgggttccagatcctgtaccagagagtgactctgaggttccgccctgctctctgacacaattaagggataaaatctctgaaggagtgacgggaagacgatccctcgaatactgatgagtggttccctttgacaccggcagcagccttgggcccgtgacttttcctctcaggccttgttctctgcttcacactcaatgtgtgtgggggtctgagtccagcacttctgagtccctcagcctccactcaggtcaggaccagaagtcgctgttcccttctcagggaatagaagattatcccaggtgcctgtgtccaggctggtgtctgggttctgtgctctcttccccatcccgggtgtcctgtccattctcaagatggccacatgcgtgctggtggagtgtcccatgacagatgcaaaatgcctgaattttctgactcttcccgtcagacccccccaagacacatatgacccaccaccccatctctgaccatgaggccaccctgaggtgctgggccctgggcttctaccctgcggagatcacactgacctggcagcgggatggggaggaccagacccaggacacggagctcgtggagaccaggcctgcaggggatggaaccttccagaagtgggcggctgtggtggtgccttctggagaggagcagagatacacctgccatgtgcagcatgagggtctgcccaagcccctcaccctgagatggggtaaggagggagatgggggtgtcatgtctcttagggaaagcaggagcctctctggagacctttagcagggtcagggcccctcaccttcccctcttttcccagagctgtcttcccagcccaccatccccatcgtgggcatcattgctggcctggttctccttggagctgtgatcactggagctgtggtcgctgccgtgatgtggaggaggaagagctcaggtggagaaggggtgaagggtggggtctgagatttcttgtctcactgagggttccaagccccagctagaaatgtgccctgtctcattactgggaagcaccgtccacaatcatgggcctacccagtctgggccctgtgtgccagcacttactcttttgtaaagcacctgttaaaatgaaggacagatttatcaccttgattacggcggtgatgggacctgatcccagcagtcacaagtcacaggggaaggtccctgaggacagacctcaggagggctattggtccaggacccacacctgctttcttcatgtttcctgatcccgccctgggtctgcagtcacacatttctggaaacttctctggggtccaagactaggaggttcctctaggaccttaaggccctggctcctttctggtatctcacaggacattttcttctcacagatagaaaaggagggagttacactcaggctgcaagtaagtatgaaggaggctgatgcctgaggtccttgggatattgtgtttgggagcccatgggggagcccacccacctcacaattcctcctctagccacatcttctgtgggatctgaccaggttctgtttttgttctaccccaggcagtgacagtgcccagggctctgatgtgtccctcacagcttgtaaaggtgagagcttggaggacctaatgtgtgttgggtgttgggcggaacagtggacacagctgtgctatggggtttctttgcattggatgtattgagcatgcgatgggctgtttaaggtgtgacccctcactgtgatggatatgaatttgttcatgaatatttttttctatagtgtgagacagctgccttgtgtgggactgagaggcaagagttgttcctgcccttccctttgtgacttgaagaaccctgactttgtttctgcaaaggcacctgcatgtgtctgtgttcgtgtaggcataatgtgaggaggtggggagaccaccccacccccatgtccaccatgaccctcttcccacgctgacctgtgctccctccccaatcatctttcctgttccagagaggtggggctgaggtgtctccatctctgtctcaacttcatggtgcactgagctgtaacttcttccttccctattaaaattagaaccttagtataaatttactttctcaaattcttgccatgagaggttgatgagttaattaaaggagaagattcct

SEQ ID NO: 13267 - protein, 187 aa, Homo sapiens; identical to SEQ ID NO: 13261

SEQ ID NO: 13268 - DNA, 2261 bp, Homo sapiens
caggctcccactccatgaggtatttcttcacatccgtgtcccggcccggccgcggggagccccgcttcatcgccgtgggctacgtggacgacacgcagttcgtgcggttcgacagcgacgccgcgagccagaggatggagccgcgggcgccgtggatagagcaggaggggccggagtattgggaccaggagacacggaatgtgaaggcccagtcacagactgaccgagtggacctggggaccctgcgcggctactacaaccagagcgaggccggttctcacaccatccagataatgtatggctgcgacgtggggtcggacgggcgcttcctccgcgggtaccggcaggacgcctacgacggcaaggattacatcgccctgaacgaggacctgcgctcttggaccgcggcggacatggcggctcagatcaccaagcgcaagtgggaggcggcccatgaggcggagcagttgagagcctacctggatggcacgtgcgtggagtggctccgcagatacctggagaacgggaaggagacgctgcagcgcacggacccccccaagacacatatgacccaccaccccatctctgaccatgaggccaccctgaggtgctgggccctgggcttctaccctgcggagatcacactgacctggcagcgggatggggaggaccagacccaggacacggagctcgtggagaccaggcctgcaggggatggaaccttccagaagtgggcggctgtggtggtgccttctggagaggagcagagatacacctgccatgtgcagcatgagggtctgcccaagcccctcaccctgagatggggtaaggagggagatgggggtgtcatgtctcttagggaaagcaggagcctctctggagacctttagcagggtcagggcccctcaccttcccctcttttcccagagctgtcttcccagcccaccatccccatcgtgggcatcattgctggcctggttctccttggagctgtgatcactggagctgtggtcgctgccgtgatgtggaggaggaagagctcaggtggagaaggggtgaagggtggggtctgagatttcttgtctcactgagggttccaagccccagctagaaatgtgccctgtctcattactgggaagcaccgtccacaatcatgggcctacccagtctgggccctgtgtgccagcacttactcttttgtaaagcacctgttaaaatgaaggacagatttatcaccttgattacggcggtgatgggacctgatcccagcagtcacaagtcacaggggaaggtccctgaggacagacctcaggagggctattggtccaggacccacacctgctttcttcatgtttcctgatcccgccctgggtctgcagtcacacatttctggaaacttctctggggtccaagactaggaggttcctctaggaccttaaggccctggctcctttctggtatctcacaggacattttcttctcacagatagaaaaggagggagttacactcaggctgcaagtaagtatgaaggaggctgatgcctgaggtccttgggatattgtgtttgggagcccatgggggagcccacccacctcacaattcctcctctagccacatcttctgtgggatctgaccaggttctgtttttgttctaccccaggcagtgacagtgcccagggctctgatgtgtccctcacagcttgtaaaggtgagagcttggaggacctaatgtgtgttgggtgttgggcggaacagtggacacagctgtgctatggggtttctttgcattggatgtattgagcatgcgatgggctgtttaaggtgtgacccctcactgtgatggatatgaatttgttcatgaatatttttttctatagtgtgagacagctgccttgtgtgggactgagaggcaagagttgttcctgcccttccctttgtgacttgaagaaccctgactttgtttctgcaaaggcacctgcatgtgtctgtgttcgtgtaggcataatgtgaggaggtggggagaccaccccacccccatgtccaccatgaccctcttcccacgctgacctgtgctccctccccaatcatctttcctgttccagagaggtggggctgaggtgtctccatctctgtctcaacttcatggtgcactgagctgtaacttcttccttccctattaaaattagaaccttagtataaatttactttctcaaattcttgccatgagaggttgatgagttaattaaaggagaagattcct

SEQ ID NO: 13269 - protein, 291 aa, Homo sapiens; identical to SEQ ID NO: 13263

SEQ ID NO: 13270 - DNA, 1406 bp, Homo sapiens
caggctcccactccatgaggtatttcttcacatccgtgtcccggcccggccgcggggagccccgcttcatcgccgtgggctacgtggacgacacgcagttcgtgcggttcgacagcgacgccgcgagccagaggatggagccgcgggcgccgtggatagagcaggaggggccggagtattgggaccaggagacacggaatgtgaaggcccagtcacagactgaccgagtggacctggggaccctgcgcggctactacaaccagagcgaggccggttctcacaccatccagataatgtatggctgcgacgtggggtcggacgggcgcttcctccgcgggtaccggcaggacgcctacgacggcaaggattacatcgccctgaacgaggacctgcgctcttggaccgcggcggacatggcggctcagatcaccaagcgcaagtgggaggcggcccatgaggcggagcagttgagagcctacctggatggcacgtgcgtggagtggctccgcagatacctggagaacgggaaggagacgctgcagcgcacggacccccccaagacacatatgacccaccaccccatctctgaccatgaggccaccctgaggtgctgggccctgggcttctaccctgcggagatcacactgacctggcagcgggatggggaggaccagacccaggacacggagctcgtggagaccaggcctgcaggggatggaaccttccagaagtgggcggctgtggtggtgccttctggagaggagcagagatacacctgccatgtgcagcatgagggtctgcccaagcccctcaccctgagatgggagctgtcttcccagcccaccatccccatcgtgggcatcattgctggcctggttctccttggagctgtgatcactggagctgtggtcgctgccgtgatgtggaggaggaagagctcagatagaaaaggagggagttacactcaggctgcaagcagtgacagtgcccagggctctgatgtgtccctcacagcttgtaaagtgtgagacagctgccttgtgtgggactgagaggcaagagttgttcctgcccttccctttgtgacttgaagaaccctgactttgtttctgcaaaggcacctgcatgtgtctgtgttcgtgtaggcataatgtgaggaggtggggagaccaccccacccccatgtccaccatgaccctcttcccacgctgacctgtgctccctccccaatcatctttcctgttccagagaggtggggctgaggtgtctccatctctgtctcaacttcatggtgcactgagctgtaacttcttccttccctattaaaattagaaccttagtataaatttactttctcaaattcttgccatgagaggttgatgagttaattaaaggagaagattcct

SEQ ID NO: 13271 - protein, 337 aa, Homo sapiens; identical to SEQ ID NO: 13265

SEQ ID NO: 13272 - DNA, 2890 bp, Homo sapiens
caggctcccactccatgaggtatttcttcacatccgtgtcccggcccggccgcggggagccccgcttcatcgccgtgggctacgtggacgacacgcagttcgtgcggttcgacagcgacgccgcgagccagaggatggagccgcgggcgccgtggatagagcaggaggggccggagtattgggaccaggagacacggaatgtgaaggcccagtcacagactgaccgagtggacctggggaccctgcgcggctactacaaccagagcgaggccggttctcacaccatccagataatgtatggctgcgacgtggggtcggacgggcgcttcctccgcgggtaccggcaggacgcctacgacggcaaggattacatcgccctgaacgaggacctgcgctcttggaccgcggcggacatggcggctcagatcaccaagcgcaagtgggaggcggcccatgaggcggagcagttgagagcctacctggatggcacgtgcgtggagtggctccgcagatacctggagaacgggaaggagacgctgcagcgcacgggtaccaggggccacggggcgcctccctgatcgcctgtagatctcccgggctggcctcccacaaggaggggagacaattgggaccaacactagaatatcaccctccctctggtcctgagggagaggaatcctcctgggttccagatcctgtaccagagagtgactctgaggttccgccctgctctctgacacaattaagggataaaatctctgaaggagtgacgggaagacgatccctcgaatactgatgagtggttccctttgacaccggcagcagccttgggcccgtgacttttcctctcaggccttgttctctgcttcacactcaatgtgtgtgggggtctgagtccagcacttctgagtccctcagcctccactcaggtcaggaccagaagtcgctgttcccttctcagggaatagaagattatcccaggtgcctgtgtccaggctggtgtctgggttctgtgctctcttccccatcccgggtgtcctgtccattctcaagatggccacatgcgtgctggtggagtgtcccatgacagatgcaaaatgcctgaattttctgactcttcccgtcagacccccccaagacacatatgacccaccaccccatctctgaccatgaggccaccctgaggtgctgggccctgggcttctaccctgcggagatcacactgacctggcagcgggatggggaggaccagacccaggacacggagctcgtggagaccaggcctgcaggggatggaaccttccagaagtgggcggctgtggtggtgccttctggagaggagcagagatacacctgccatgtgcagcatgagggtctgcccaagcccctcaccctgagatggggtaaggagggagatgggggtgtcatgtctcttagggaaagcaggagcctctctggagacctttagcagggtcagggcccctcaccttcccctcttttcccagagctgtcttcccagcccaccatccccatcgtgggcatcattgctggcctggttctccttggagctgtgatcactggagctgtggtcgctgccgtgatgtggaggaggaagagctcaggtggagaaggggtgaagggtggggtctgagatttcttgtctcactgagggttccaagccccagctagaaatgtgccctgtctcattactgggaagcaccgtccacaatcatgggcctacccagtctgggccctgtgtgccagcacttactcttttgtaaagcacctgttaaaatgaaggacagatttatcaccttgattacggcggtgatgggacctgatcccagcagtcacaagtcacaggggaaggtccctgaggacagacctcaggagggctattggtccaggacccacacctgctttcttcatgtttcctgatcccgccctgggtctgcagtcacacatttctggaaacttctctggggtccaagactaggaggttcctctaggaccttaaggccctggctcctttctggtatctcacaggacattttcttctcacagatagaaaaggagggagttacactcaggctgcaagtaagtatgaaggaggctgatgcctgaggtccttgggatattgtgtttgggagcccatgggggagcccacccacctcacaattcctcctctagccacatcttctgtgggatctgaccaggttctgtttttgttctaccccaggcagtgacagtgcccagggctctgatgtgtccctcacagcttgtaaaggtgagagcttggaggacctaatgtgtgttgggtgttgggcggaacagtggacacagctgtgctatggggtttctttgcattggatgtattgagcatgcgatgggctgtttaaggtgtgacccctcactgtgatggatatgaatttgttcatgaatatttttttctatagtgtgagacagctgccttgtgtgggactgagaggcaagagttgttcctgcccttccctttgtgacttgaagaaccctgactttgtttctgcaaaggcacctgcatgtgtctgtgttcgtgtaggcataatgtgaggaggtggggagaccaccccacccccatgtccaccatgaccctcttcccacgctgacctgtgctccctccccaatcatctttcctgttccagagaggtggggctgaggtgtctccatctctgtctcaacttcatggtgcactgagctgtaacttcttccttccctattaaaattagaaccttagtataaatttactttctcaaattcttgccatgagaggttgatgagttaattaaaggagaagattcctaaaatttgagagacaaaataaatggaagacatgagaaccttccagagtcca

SEQ ID NO: 13273 - protein, 187 aa, Homo sapiens; identical to SEQ ID NO: 13261

SEQ ID NO: 13274 - DNA, 2312 bp, Homo sapiens
caggctcccactccatgaggtatttcttcacatccgtgtcccggcccggccgcggggagccccgcttcatcgccgtgggctacgtggacgacacgcagttcgtgcggttcgacagcgacgccgcgagccagaggatggagccgcgggcgccgtggatagagcaggaggggccggagtattgggaccaggagacacggaatgtgaaggcccagtcacagactgaccgagtggacctggggaccctgcgcggctactacaaccagagcgaggccggttctcacaccatccagataatgtatggctgcgacgtggggtcggacgggcgcttcctccgcgggtaccggcaggacgcctacgacggcaaggattacatcgccctgaacgaggacctgcgctcttggaccgcggcggacatggcggctcagatcaccaagcgcaagtgggaggcggcccatgaggcggagcagttgagagcctacctggatggcacgtgcgtggagtggctccgcagatacctggagaacgggaaggagacgctgcagcgcacggacccccccaagacacatatgacccaccaccccatctctgaccatgaggccaccctgaggtgctgggccctgggcttctaccctgcggagatcacactgacctggcagcgggatggggaggaccagacccaggacacggagctcgtggagaccaggcctgcaggggatggaaccttccagaagtgggcggctgtggtggtgccttctggagaggagcagagatacacctgccatgtgcagcatgagggtctgcccaagcccctcaccctgagatggggtaaggagggagatgggggtgtcatgtctcttagggaaagcaggagcctctctggagacctttagcagggtcagggcccctcaccttcccctcttttcccagagctgtcttcccagcccaccatccccatcgtgggcatcattgctggcctggttctccttggagctgtgatcactggagctgtggtcgctgccgtgatgtggaggaggaagagctcaggtggagaaggggtgaagggtggggtctgagatttcttgtctcactgagggttccaagccccagctagaaatgtgccctgtctcattactgggaagcaccgtccacaatcatgggcctacccagtctgggccctgtgtgccagcacttactcttttgtaaagcacctgttaaaatgaaggacagatttatcaccttgattacggcggtgatgggacctgatcccagcagtcacaagtcacaggggaaggtccctgaggacagacctcaggagggctattggtccaggacccacacctgctttcttcatgtttcctgatcccgccctgggtctgcagtcacacatttctggaaacttctctggggtccaagactaggaggttcctctaggaccttaaggccctggctcctttctggtatctcacaggacattttcttctcacagatagaaaaggagggagttacactcaggctgcaagtaagtatgaaggaggctgatgcctgaggtccttgggatattgtgtttgggagcccatgggggagcccacccacctcacaattcctcctctagccacatcttctgtgggatctgaccaggttctgtttttgttctaccccaggcagtgacagtgcccagggctctgatgtgtccctcacagcttgtaaaggtgagagcttggaggacctaatgtgtgttgggtgttgggcggaacagtggacacagctgtgctatggggtttctttgcattggatgtattgagcatgcgatgggctgtttaaggtgtgacccctcactgtgatggatatgaatttgttcatgaatatttttttctatagtgtgagacagctgccttgtgtgggactgagaggcaagagttgttcctgcccttccctttgtgacttgaagaaccctgactttgtttctgcaaaggcacctgcatgtgtctgtgttcgtgtaggcataatgtgaggaggtggggagaccaccccacccccatgtccaccatgaccctcttcccacgctgacctgtgctccctccccaatcatctttcctgttccagagaggtggggctgaggtgtctccatctctgtctcaacttcatggtgcactgagctgtaacttcttccttccctattaaaattagaaccttagtataaatttactttctcaaattcttgccatgagaggttgatgagttaattaaaggagaagattcctaaaatttgagagacaaaataaatggaagacatgagaaccttccagagtcca

SEQ ID NO: 13275 - protein, 291 aa, Homo sapiens; identical to SEQ ID NO: 13263

SEQ ID NO: 13276 - DNA, 1457 bp, Homo sapiens
caggctcccactccatgaggtatttcttcacatccgtgtcccggcccggccgcggggagccccgcttcatcgccgtgggctacgtggacgacacgcagttcgtgcggttcgacagcgacgccgcgagccagaggatggagccgcgggcgccgtggatagagcaggaggggccggagtattgggaccaggagacacggaatgtgaaggcccagtcacagactgaccgagtggacctggggaccctgcgcggctactacaaccagagcgaggccggttctcacaccatccagataatgtatggctgcgacgtggggtcggacgggcgcttcctccgcgggtaccggcaggacgcctacgacggcaaggattacatcgccctgaacgaggacctgcgctcttggaccgcggcggacatggcggctcagatcaccaagcgcaagtgggaggcggcccatgaggcggagcagttgagagcctacctggatggcacgtgcgtggagtggctccgcagatacctggagaacgggaaggagacgctgcagcgcacggacccccccaagacacatatgacccaccaccccatctctgaccatgaggccaccctgaggtgctgggccctgggcttctaccctgcggagatcacactgacctggcagcgggatggggaggaccagacccaggacacggagctcgtggagaccaggcctgcaggggatggaaccttccagaagtgggcggctgtggtggtgccttctggagaggagcagagatacacctgccatgtgcagcatgagggtctgcccaagcccctcaccctgagatgggagctgtcttcccagcccaccatccccatcgtgggcatcattgctggcctggttctccttggagctgtgatcactggagctgtggtcgctgccgtgatgtggaggaggaagagctcagatagaaaaggagggagttacactcaggctgcaagcagtgacagtgcccagggctctgatgtgtccctcacagcttgtaaagtgtgagacagctgccttgtgtgggactgagaggcaagagttgttcctgcccttccctttgtgacttgaagaaccctgactttgtttctgcaaaggcacctgcatgtgtctgtgttcgtgtaggcataatgtgaggaggtggggagaccaccccacccccatgtccaccatgaccctcttcccacgctgacctgtgctccctccccaatcatctttcctgttccagagaggtggggctgaggtgtctccatctctgtctcaacttcatggtgcactgagctgtaacttcttccttccctattaaaattagaaccttagtataaatttactttctcaaattcttgccatgagaggttgatgagttaattaaaggagaagattcctaaaatttgagagacaaaataaatggaagacatgagaaccttccagagtcca

SEQ ID NO: 13277 - protein, 337 aa, Homo sapiens; identical to SEQ ID NO: 13265

SEQ ID NO: 13278 - DNA, 1090 bp, Homo sapiens
ggccaggttctcacaccatccagataatgtatggctgcgacgtggggtcggacgggcgcttcctccgcgggtaccggcaggacgcctacgacggcaaggattacatcgccctgaacgaggacctgcgctcttggaccgcggcggacatggcggctcagatcaccaagcgcaagtgggaggcggcccatgaggcggagcagttgagagcctacctggatggcacgtgcgtggagtggctccgcagatacctggagaacgggaaggagacgctgcagcgcacggacccccccaagacacatatgacccaccaccccatctctgaccatgaggccaccctgaggtgctgggccctgggcttctaccctgcggagatcacactgacctggcagcgggatggggaggaccagacccaggacacggagctcgtggagaccaggcctgcaggggatggaaccttccagaagtgggcggctgtggtggtgccttctggagaggagcagagatacacctgccatgtgcagcatgagggtctgcccaagcccctcaccctgagatgggagctgtcttcccagcccaccatccccatcgtgggcatcattgctggcctggttctccttggagctgtgatcactggagctgtggtcgctgccgtgatgtggaggaggaagagctcagatagaaaaggagggagttacactcaggctgcaagcagtgacagtgcccagggctctgatgtgtccctcacagcttgtaaagtgtgagacagctgccttgtgtgggactgagaggcaagagttgttcctgcccttccctttgtgacttgaagaaccctgactttgtttctgcaaaggcacctgcatgtgtctgtgttcgtgtaggcataatgtgaggaggtggggagaccaccccacccccatgtccaccatgaccctcttcccacgctgacctgtgctccctccccaatcatctttcctgttccagagaggtggggctgaggtgtctccatctctgtctcaacttcatggtgcactgagctgtaacttcttccttccctattaaaattagaaccttagtataaatttactttctc

SEQ ID NO: 13279 - protein, 244 aa, Homo sapiens
MYGCDVGSDGRFLRGYRQDAYDGKDYIALNEDLRSWTAADMAAQITKRKWEAAHEAEQLRAYLDGTCVEWLRRYLENGKETLQRTDPPKTHMTHHPISDHEATLRCWALGFYPAEITLTWQRDGEDQTQDTELVETRPAGDGTFQKWAAVVVPSGEEQRYTCHVQHEGLPKPLTLRWELSSQPTIPIVGIIAGLVLLGAVITGAVVAAVMWRRKSSDRKGGSYTQAASSDSAQGSDVSLTACKV

SEQ ID NO: 13280 - DNA, 894 bp, Homo sapiens
ggccaggttctcacaccatccagataatgtatggctgcgacgtggggtcggacgggcgcttcctccgcgggtaccggcaggacgcctacgacggcaaggattacatcgccctgaacgaggacctgcgctcttggaccgcggcggacatggcggctcagatcaccaagcgcaagtgggaggcggcccatgaggcggagcagttgagagcctacctggatggcacgtgcgtggagtggctccgcagatacctggagaacgggaaggagacgctgcagcgcacggacccccccaagacacatatgacccaccaccccatctctgaccatgaggccaccctgaggtgctgggccctgggcttctaccctgcggagatcacactgacctggcagcgggatggggaggaccagacccaggacacggagctcctgtgatcactggagctgtggtcgctgccgtgatgtggaggaggaagagctcagatagaaaaggagggagttacactcaggctgcaagcagtgacagtgcccagggctctgatgtgtccctcacagcttgtaaagtgtgagacagctgccttgtgtgggactgagaggcaagagttgttcctgcccttccctttgtgacttgaagaaccctgactttgtttctgcaaaggcacctgcatgtgtctgtgttcgtgtaggcataatgtgaggaggtggggagaccaccccacccccatgtccaccatgaccctcttcccacgctgacctgtgctccctccccaatcatctttcctgttccagagaggtggggctgaggtgtctccatctctgtctcaacttcatggtgcactgagctgtaacttcttccttccctattaaaattagaaccttagtataaatttactttctc

SEQ ID NO: 13281 - protein, 134 aa, Homo sapiens
MYGCDVGSDGRFLRGYRQDAYDGKDYIALNEDLRSWTAADMAAQITKRKWEAAHEAEQLRAYLDGTCVEWLRRYLENGKETLQRTDPPKTHMTHHPISDHEATLRCWALGFYPAEITLTWQRDGEDQTQDTELL

SEQ ID NO: 13282 - DNA, 1945 bp, Homo sapiens
ggccaggttctcacaccatccagataatgtatggctgcgacgtggggtcggacgggcgcttcctccgcgggtaccggcaggacgcctacgacggcaaggattacatcgccctgaacgaggacctgcgctcttggaccgcggcggacatggcggctcagatcaccaagcgcaagtgggaggcggcccatgaggcggagcagttgagagcctacctggatggcacgtgcgtggagtggctccgcagatacctggagaacgggaaggagacgctgcagcgcacggacccccccaagacacatatgacccaccaccccatctctgaccatgaggccaccctgaggtgctgggccctgggcttctaccctgcggagatcacactgacctggcagcgggatggggaggaccagacccaggacacggagctcgtggagaccaggcctgcaggggatggaaccttccagaagtgggcggctgtggtggtgccttctggagaggagcagagatacacctgccatgtgcagcatgagggtctgcccaagcccctcaccctgagatggggtaaggagggagatgggggtgtcatgtctcttagggaaagcaggagcctctctggagacctttagcagggtcagggcccctcaccttcccctcttttcccagagctgtcttcccagcccaccatccccatcgtgggcatcattgctggcctggttctccttggagctgtgatcactggagctgtggtcgctgccgtgatgtggaggaggaagagctcaggtggagaaggggtgaagggtggggtctgagatttcttgtctcactgagggttccaagccccagctagaaatgtgccctgtctcattactgggaagcaccgtccacaatcatgggcctacccagtctgggccctgtgtgccagcacttactcttttgtaaagcacctgttaaaatgaaggacagatttatcaccttgattacggcggtgatgggacctgatcccagcagtcacaagtcacaggggaaggtccctgaggacagacctcaggagggctattggtccaggacccacacctgctttcttcatgtttcctgatcccgccctgggtctgcagtcacacatttctggaaacttctctggggtccaagactaggaggttcctctaggaccttaaggccctggctcctttctggtatctcacaggacattttcttctcacagatagaaaaggagggagttacactcaggctgcaagtaagtatgaaggaggctgatgcctgaggtccttgggatattgtgtttgggagcccatgggggagcccacccacctcacaattcctcctctagccacatcttctgtgggatctgaccaggttctgtttttgttctaccccaggcagtgacagtgcccagggctctgatgtgtccctcacagcttgtaaaggtgagagcttggaggacctaatgtgtgttgggtgttgggcggaacagtggacacagctgtgctatggggtttctttgcattggatgtattgagcatgcgatgggctgtttaaggtgtgacccctcactgtgatggatatgaatttgttcatgaatatttttttctatagtgtgagacagctgccttgtgtgggactgagaggcaagagttgttcctgcccttccctttgtgacttgaagaaccctgactttgtttctgcaaaggcacctgcatgtgtctgtgttcgtgtaggcataatgtgaggaggtggggagaccaccccacccccatgtccaccatgaccctcttcccacgctgacctgtgctccctccccaatcatctttcctgttccagagaggtggggctgaggtgtctccatctctgtctcaacttcatggtgcactgagctgtaacttcttccttccctattaaaattagaaccttagtataaatttactttctc

SEQ ID NO: 13283 - protein, 198 aa, Homo sapiens; identical to SEQ ID NO: 13237

SEQ ID NO: 13284 - DNA, 798 bp, Homo sapiens
ggccaggttctcacaccatccagataatgtatggctgcgacgtggggtcggacgggcgcttcctccgcgggtaccggcaggacgcctacgacggcaaggattacatcgccctgaacgaggacctgcgctcttggaccgcggcggacatggcggctcagatcaccaagcgcaagtgggaggcggcccatgaggcggagcagttgagagcctacctggatggcacgtgcgtggagtggctccgcagatacctggagaacgggaaggagacgctgcagcgcacggacccccccaagacacatatgacccaccaccccatctctgaccatgaggccaccctgaggtgctgggccctgggcttctaccctgtggagaaggggtgaaggatagaaaaggagggagttacactcaggctgcaagcagtgacagtgcccagggctctgatgtgtccctcacagcttgtaaagtgtgagacagctgccttgtgtgggactgagaggcaagagttgttcctgcccttccctttgtgacttgaagaaccctgactttgtttctgcaaaggcacctgcatgtgtctgtgttcgtgtaggcataatgtgaggaggtggggagaccaccccacccccatgtccaccatgaccctcttcccacgctgacctgtgctccctccccaatcatctttcctgttccagagaggtggggctgaggtgtctccatctctgtctcaacttcatggtgcactgagctgtaacttcttccttccctattaaaattagaaccttagtataaatttactttctc

SEQ ID NO: 13285 - protein, 117 aa, Homo sapiens
MYGCDVGSDGRFLRGYRQDAYDGKDYIALNEDLRSWTAADMAAQITKRKWEAAHEAEQLRAYLDGTCVEWLRRYLENGKETLQRTDPPKTHMTHHPISDHEATLRCWALGFYPVEKG

SEQ ID NO: 13286 - DNA, 794 bp, Homo sapiens
ggccaggttctcacaccatccagataatgtatggctgcgacgtggggtcggacgggcgcttcctccgcgggtaccggcaggacgcctacgacggcaaggattacatcgccctgaacgaggacctgcgctcttggaccgcggcggacatggcggctcagatcaccaagcgcaagtgggaggcggcccatgaggcggagcagttgagagcctacctggatggcacgtgcgtggagtggctccgcagatacctggagaacgggaaggagacgctgcagcgcacggacccccccaagacacatcattgctggcctggttctccttggagctgtgatcactggagctgtggtcgctgccgtgatgtggaggaggaagagctcagatagaaaaggagggagttacactcaggctgcaagcagtgacagtgcccagggctctgatgtgtccctcacagcttgtaaagtgtgagacagctgccttgtgtgggactgagaggcaagagttgttcctgcccttccctttgtgacttgaagaaccctgactttgtttctgcaaaggcacctgcatgtgtctgtgttcgtgtaggcataatgtgaggaggtggggagaccaccccacccccatgtccaccatgaccctcttcccacgctgacctgtgctccctccccaatcatctttcctgttccagagaggtggggctgaggtgtctccatctctgtctcaacttcatggtgcactgagctgtaacttcttccttccctattaaaattagaaccttagtataaatttactttctc

SEQ ID NO: 13287 - protein, 118 aa, Homo sapiens
MYGCDVGSDGRFLRGYRQDAYDGKDYIALNEDLRSWTAADMAAQITKRKWEAAHEAEQLRAYLDGTCVEWLRRYLENGKETLQRTDPPKTHHCWPGSPWSCDHWSCGRCRDVEEEELR

SEQ ID NO: 13288 - DNA, 1139 bp, Homo sapiens
ggccaggttctcacaccatccagataatgtatggctgcgacgtggggtcggacgggcgcttcctccgcgggtaccggcaggacgcctacgacggcaaggattacatcgccctgaacgaggacctgcgctcttggaccgcggcggacatggcggctcagatcaccaagcgcaagtgggaggcggcccatgaggcggagcagttgagagcctacctggatggcacgtgcgtggagtggctccgcagatacctggagaacgggaaggagacgctgcagcgcacggacccccccaagacacatatgacccaccaccccatctctgaccatgaggccaccctgaggtgctgggccctgggcttctaccctgcggagatcacactgacctggcagcgggatggggaggaccagacccaggacacggagctcgtggagaccaggcctgcaggggatggaaccttccagaagtgggcggctgtggtggtgccttctggagaggagcagagatacacctgccatgtgcagcatgagggtctgcccaagcccctcaccctgagatgggagctgtcttcccagcccaccatccccatcgtgggcatcattgctggcctggttctccttggagctgtgatcactggagctgtggtcgctgccgtgatgtggaggaggaagagctcagatagaaaaggagggagttacactcaggctgcaagcagtgacagtgcccagggctctgatgtgtccctcacagcttgtaaagtgtgagacagctgccttgtgtgggactgagaggcaagagttgttcctgcccttccctttgtgacttgaagaaccctgactttgtttctgcaaaggcacctgcatgtgtctgtgttcgtgtaggcataatgtgaggaggtggggagaccaccccacccccatgtccaccatgaccctcttcccacgctgacctgtgctccctccccaatcatctttcctgttccagagaggtggggctgaggtgtctccatctctgtctcaacttcatggtgcactgagctgtaacttcttccttccctattaaaattagaaccttagtataaatttactttctcaaattcttgccatgagaggttgatgagttaattaaaggagaagattcct

SEQ ID NO: 13289 - protein, 244 aa, Homo sapiens; identical to SEQ ID NO: 13279

SEQ ID NO: 13290 - DNA, 1994 bp, Homo sapiens
ggccaggttctcacaccatccagataatgtatggctgcgacgtggggtcggacgggcgcttcctccgcgggtaccggcaggacgcctacgacggcaaggattacatcgccctgaacgaggacctgcgctcttggaccgcggcggacatggcggctcagatcaccaagcgcaagtgggaggcggcccatgaggcggagcagttgagagcctacctggatggcacgtgcgtggagtggctccgcagatacctggagaacgggaaggagacgctgcagcgcacggacccccccaagacacatatgacccaccaccccatctctgaccatgaggccaccctgaggtgctgggccctgggcttctaccctgcggagatcacactgacctggcagcgggatggggaggaccagacccaggacacggagctcgtggagaccaggcctgcaggggatggaaccttccagaagtgggcggctgtggtggtgccttctggagaggagcagagatacacctgccatgtgcagcatgagggtctgcccaagcccctcaccctgagatggggtaaggagggagatgggggtgtcatgtctcttagggaaagcaggagcctctctggagacctttagcagggtcagggcccctcaccttcccctcttttcccagagctgtcttcccagcccaccatccccatcgtgggcatcattgctggcctggttctccttggagctgtgatcactggagctgtggtcgctgccgtgatgtggaggaggaagagctcaggtggagaaggggtgaagggtggggtctgagatttcttgtctcactgagggttccaagccccagctagaaatgtgccctgtctcattactgggaagcaccgtccacaatcatgggcctacccagtctgggccctgtgtgccagcacttactcttttgtaaagcacctgttaaaatgaaggacagatttatcaccttgattacggcggtgatgggacctgatcccagcagtcacaagtcacaggggaaggtccctgaggacagacctcaggagggctattggtccaggacccacacctgctttcttcatgtttcctgatcccgccctgggtctgcagtcacacatttctggaaacttctctggggtccaagactaggaggttcctctaggaccttaaggccctggctcctttctggtatctcacaggacattttcttctcacagatagaaaaggagggagttacactcaggctgcaagtaagtatgaaggaggctgatgcctgaggtccttgggatattgtgtttgggagcccatgggggagcccacccacctcacaattcctcctctagccacatcttctgtgggatctgaccaggttctgtttttgttctaccccaggcagtgacagtgcccagggctctgatgtgtccctcacagcttgtaaaggtgagagcttggaggacctaatgtgtgttgggtgttgggcggaacagtggacacagctgtgctatggggtttctttgcattggatgtattgagcatgcgatgggctgtttaaggtgtgacccctcactgtgatggatatgaatttgttcatgaatatttttttctatagtgtgagacagctgccttgtgtgggactgagaggcaagagttgttcctgcccttccctttgtgacttgaagaaccctgactttgtttctgcaaaggcacctgcatgtgtctgtgttcgtgtaggcataatgtgaggaggtggggagaccaccccacccccatgtccaccatgaccctcttcccacgctgacctgtgctccctccccaatcatctttcctgttccagagaggtggggctgaggtgtctccatctctgtctcaacttcatggtgcactgagctgtaacttcttccttccctattaaaattagaaccttagtataaatttactttctcaaattcttgccatgagaggttgatgagttaattaaaggagaagattcct

SEQ ID NO: 13291 - protein, 198 aa, Homo sapiens; identical to SEQ ID NO: 13237

SEQ ID NO: 13292 - DNA, 847 bp, Homo sapiens
ggccaggttctcacaccatccagataatgtatggctgcgacgtggggtcggacgggcgcttcctccgcgggtaccggcaggacgcctacgacggcaaggattacatcgccctgaacgaggacctgcgctcttggaccgcggcggacatggcggctcagatcaccaagcgcaagtgggaggcggcccatgaggcggagcagttgagagcctacctggatggcacgtgcgtggagtggctccgcagatacctggagaacgggaaggagacgctgcagcgcacggacccccccaagacacatatgacccaccaccccatctctgaccatgaggccaccctgaggtgctgggccctgggcttctaccctgtggagaaggggtgaaggatagaaaaggagggagttacactcaggctgcaagcagtgacagtgcccagggctctgatgtgtccctcacagcttgtaaagtgtgagacagctgccttgtgtgggactgagaggcaagagttgttcctgcccttccctttgtgacttgaagaaccctgactttgtttctgcaaaggcacctgcatgtgtctgtgttcgtgtaggcataatgtgaggaggtggggagaccaccccacccccatgtccaccatgaccctcttcccacgctgacctgtgctccctccccaatcatctttcctgttccagagaggtggggctgaggtgtctccatctctgtctcaacttcatggtgcactgagctgtaacttcttccttccctattaaaattagaaccttagtataaatttactttctcaaattcttgccatgagaggttgatgagttaattaaaggagaagattcct

SEQ ID NO: 13293 - protein, 117 aa, Homo sapiens; identical to SEQ ID NO: 13285

SEQ ID NO: 13294 - DNA, 843 bp, Homo sapiens
ggccaggttctcacaccatccagataatgtatggctgcgacgtggggtcggacgggcgcttcctccgcgggtaccggcaggacgcctacgacggcaaggattacatcgccctgaacgaggacctgcgctcttggaccgcggcggacatggcggctcagatcaccaagcgcaagtgggaggcggcccatgaggcggagcagttgagagcctacctggatggcacgtgcgtggagtggctccgcagatacctggagaacgggaaggagacgctgcagcgcacggacccccccaagacacatcattgctggcctggttctccttggagctgtgatcactggagctgtggtcgctgccgtgatgtggaggaggaagagctcagatagaaaaggagggagttacactcaggctgcaagcagtgacagtgcccagggctctgatgtgtccctcacagcttgtaaagtgtgagacagctgccttgtgtgggactgagaggcaagagttgttcctgcccttccctttgtgacttgaagaaccctgactttgtttctgcaaaggcacctgcatgtgtctgtgttcgtgtaggcataatgtgaggaggtggggagaccaccccacccccatgtccaccatgaccctcttcccacgctgacctgtgctccctccccaatcatctttcctgttccagagaggtggggctgaggtgtctccatctctgtctcaacttcatggtgcactgagctgtaacttcttccttccctattaaaattagaaccttagtataaatttactttctcaaattcttgccatgagaggttgatgagttaattaaaggagaagattcct

SEQ ID NO: 13295 - protein, 118 aa, Homo sapiens; identical to SEQ ID NO: 13287

SEQ ID NO: 13296 - DNA, 1190 bp, Homo sapiens
ggccaggttctcacaccatccagataatgtatggctgcgacgtggggtcggacgggcgcttcctccgcgggtaccggcaggacgcctacgacggcaaggattacatcgccctgaacgaggacctgcgctcttggaccgcggcggacatggcggctcagatcaccaagcgcaagtgggaggcggcccatgaggcggagcagttgagagcctacctggatggcacgtgcgtggagtggctccgcagatacctggagaacgggaaggagacgctgcagcgcacggacccccccaagacacatatgacccaccaccccatctctgaccatgaggccaccctgaggtgctgggccctgggcttctaccctgcggagatcacactgacctggcagcgggatggggaggaccagacccaggacacggagctcgtggagaccaggcctgcaggggatggaaccttccagaagtgggcggctgtggtggtgccttctggagaggagcagagatacacctgccatgtgcagcatgagggtctgcccaagcccctcaccctgagatgggagctgtcttcccagcccaccatccccatcgtgggcatcattgctggcctggttctccttggagctgtgatcactggagctgtggtcgctgccgtgatgtggaggaggaagagctcagatagaaaaggagggagttacactcaggctgcaagcagtgacagtgcccagggctctgatgtgtccctcacagcttgtaaagtgtgagacagctgccttgtgtgggactgagaggcaagagttgttcctgcccttccctttgtgacttgaagaaccctgactttgtttctgcaaaggcacctgcatgtgtctgtgttcgtgtaggcataatgtgaggaggtggggagaccaccccacccccatgtccaccatgaccctcttcccacgctgacctgtgctccctccccaatcatctttcctgttccagagaggtggggctgaggtgtctccatctctgtctcaacttcatggtgcactgagctgtaacttcttccttccctattaaaattagaaccttagtataaatttactttctcaaattcttgccatgagaggttgatgagttaattaaaggagaagattcctaaaatttgagagacaaaataaatggaagacatgagaaccttccagagtcca

SEQ ID NO: 13297 - protein, 244 aa, Homo sapiens; identical to SEQ ID NO: 13279

SEQ ID NO: 13298 - DNA, 2045 bp, Homo sapiens
ggccaggttctcacaccatccagataatgtatggctgcgacgtggggtcggacgggcgcttcctccgcgggtaccggcaggacgcctacgacggcaaggattacatcgccctgaacgaggacctgcgctcttggaccgcggcggacatggcggctcagatcaccaagcgcaagtgggaggcggcccatgaggcggagcagttgagagcctacctggatggcacgtgcgtggagtggctccgcagatacctggagaacgggaaggagacgctgcagcgcacggacccccccaagacacatatgacccaccaccccatctctgaccatgaggccaccctgaggtgctgggccctgggcttctaccctgcggagatcacactgacctggcagcgggatggggaggaccagacccaggacacggagctcgtggagaccaggcctgcaggggatggaaccttccagaagtgggcggctgtggtggtgccttctggagaggagcagagatacacctgccatgtgcagcatgagggtctgcccaagcccctcaccctgagatggggtaaggagggagatgggggtgtcatgtctcttagggaaagcaggagcctctctggagacctttagcagggtcagggcccctcaccttcccctcttttcccagagctgtcttcccagcccaccatccccatcgtgggcatcattgctggcctggttctccttggagctgtgatcactggagctgtggtcgctgccgtgatgtggaggaggaagagctcaggtggagaaggggtgaagggtggggtctgagatttcttgtctcactgagggttccaagccccagctagaaatgtgccctgtctcattactgggaagcaccgtccacaatcatgggcctacccagtctgggccctgtgtgccagcacttactcttttgtaaagcacctgttaaaatgaaggacagatttatcaccttgattacggcggtgatgggacctgatcccagcagtcacaagtcacaggggaaggtccctgaggacagacctcaggagggctattggtccaggacccacacctgctttcttcatgtttcctgatcccgccctgggtctgcagtcacacatttctggaaacttctctggggtccaagactaggaggttcctctaggaccttaaggccctggctcctttctggtatctcacaggacattttcttctcacagatagaaaaggagggagttacactcaggctgcaagtaagtatgaaggaggctgatgcctgaggtccttgggatattgtgtttgggagcccatgggggagcccacccacctcacaattcctcctctagccacatcttctgtgggatctgaccaggttctgtttttgttctaccccaggcagtgacagtgcccagggctctgatgtgtccctcacagcttgtaaaggtgagagcttggaggacctaatgtgtgttgggtgttgggcggaacagtggacacagctgtgctatggggtttctttgcattggatgtattgagcatgcgatgggctgtttaaggtgtgacccctcactgtgatggatatgaatttgttcatgaatatttttttctatagtgtgagacagctgccttgtgtgggactgagaggcaagagttgttcctgcccttccctttgtgacttgaagaaccctgactttgtttctgcaaaggcacctgcatgtgtctgtgttcgtgtaggcataatgtgaggaggtggggagaccaccccacccccatgtccaccatgaccctcttcccacgctgacctgtgctccctccccaatcatctttcctgttccagagaggtggggctgaggtgtctccatctctgtctcaacttcatggtgcactgagctgtaacttcttccttccctattaaaattagaaccttagtataaatttactttctcaaattcttgccatgagaggttgatgagttaattaaaggagaagattcctaaaatttgagagacaaaataaatggaagacatgagaaccttccagagtcca

SEQ ID NO: 13299 - protein, 198 aa, Homo sapiens; identical to SEQ ID NO: 13237

SEQ ID NO: 13300 - DNA, 898 bp, Homo sapiens
ggccaggttctcacaccatccagataatgtatggctgcgacgtggggtcggacgggcgcttcctccgcgggtaccggcaggacgcctacgacggcaaggattacatcgccctgaacgaggacctgcgctcttggaccgcggcggacatggcggctcagatcaccaagcgcaagtgggaggcggcccatgaggcggagcagttgagagcctacctggatggcacgtgcgtggagtggctccgcagatacctggagaacgggaaggagacgctgcagcgcacggacccccccaagacacatatgacccaccaccccatctctgaccatgaggccaccctgaggtgctgggccctgggcttctaccctgtggagaaggggtgaaggatagaaaaggagggagttacactcaggctgcaagcagtgacagtgcccagggctctgatgtgtccctcacagcttgtaaagtgtgagacagctgccttgtgtgggactgagaggcaagagttgttcctgcccttccctttgtgacttgaagaaccctgactttgtttctgcaaaggcacctgcatgtgtctgtgttcgtgtaggcataatgtgaggaggtggggagaccaccccacccccatgtccaccatgaccctcttcccacgctgacctgtgctccctccccaatcatctttcctgttccagagaggtggggctgaggtgtctccatctctgtctcaacttcatggtgcactgagctgtaacttcttccttccctattaaaattagaaccttagtataaatttactttctcaaattcttgccatgagaggttgatgagttaattaaaggagaagattcctaaaatttgagagacaaaataaatggaagacatgagaaccttccagagtcca

SEQ ID NO: 13301 - protein, 117 aa, Homo sapiens; identical to SEQ ID NO: 13285

SEQ ID NO: 13302 - DNA, 894 bp, Homo sapiens
ggccaggttctcacaccatccagataatgtatggctgcgacgtggggtcggacgggcgcttcctccgcgggtaccggcaggacgcctacgacggcaaggattacatcgccctgaacgaggacctgcgctcttggaccgcggcggacatggcggctcagatcaccaagcgcaagtgggaggcggcccatgaggcggagcagttgagagcctacctggatggcacgtgcgtggagtggctccgcagatacctggagaacgggaaggagacgctgcagcgcacggacccccccaagacacatcattgctggcctggttctccttggagctgtgatcactggagctgtggtcgctgccgtgatgtggaggaggaagagctcagatagaaaaggagggagttacactcaggctgcaagcagtgacagtgcccagggctctgatgtgtccctcacagcttgtaaagtgtgagacagctgccttgtgtgggactgagaggcaagagttgttcctgcccttccctttgtgacttgaagaaccctgactttgtttctgcaaaggcacctgcatgtgtctgtgttcgtgtaggcataatgtgaggaggtggggagaccaccccacccccatgtccaccatgaccctcttcccacgctgacctgtgctccctccccaatcatctttcctgttccagagaggtggggctgaggtgtctccatctctgtctcaacttcatggtgcactgagctgtaacttcttccttccctattaaaattagaaccttagtataaatttactttctcaaattcttgccatgagaggttgatgagttaattaaaggagaagattcctaaaatttgagagacaaaataaatggaagacatgagaaccttccagagtcca

SEQ ID NO: 13303 - protein, 118 aa, Homo sapiens; identical to SEQ ID NO: 13287

SEQ ID NO: 13304 - DNA, 781 bp, Homo sapiens
tccgcgggtaccggcaggacgcctacgacggcaaggattacatcgccctgaacgaggacctgcgctcttggaccgcggcggacatggcggctcagatcacactgacctggcagcgggatggggaggaccagacccaggacacggagctcgtggagaccaggcctgcaggggatggaaccttccagaagtgggcggctgtggtggtgccttctggagaggagcagagatacacctgccatgtgcagcatgagggtctgcccaagcccctcaccctgagatgggagctgtcttcccagcccaccatccccatcgtgggcatcattgctggcctggttctccttggagctgtgatcactggagctgtggtcgctgccgtgatgtggaggaggaagagctcaggcagtgacagtgcccagggctctgatgtgtccctcacagcttgtaaagtgtgagacagctgccttgtgtgggactgagaggcaagagttgttcctgcccttccctttgtgacttgaagaaccctgactttgtttctgcaaaggcacctgcatgtgtctgtgttcgtgtaggcataatgtgaggaggtggggagaccaccccacccccatgtccaccatgaccctcttcccacgctgacctgtgctccctccccaatcatctttcctgttccagagaggtggggctgaggtgtctccatctctgtctcaacttcatggtgcactgagctgtaacttcttccttccctattaaaattagaaccttagtataaatttactttctc

SEQ ID NO: 13305 - protein, 122 aa, Homo sapiens
MAAQITLTWQRDGEDQTQDTELVETRPAGDGTFQKWAAVVVPSGEEQRYTCHVQHEGLPKPLTLRWELSSQPTIPIVGIIAGLVLLGAVITGAVVAAVMWRRKSSGSDSAQGSDVSLTACKV

SEQ ID NO: 13306 - DNA, 830 bp, Homo sapiens
tccgcgggtaccggcaggacgcctacgacggcaaggattacatcgccctgaacgaggacctgcgctcttggaccgcggcggacatggcggctcagatcacactgacctggcagcgggatggggaggaccagacccaggacacggagctcgtggagaccaggcctgcaggggatggaaccttccagaagtgggcggctgtggtggtgccttctggagaggagcagagatacacctgccatgtgcagcatgagggtctgcccaagcccctcaccctgagatgggagctgtcttcccagcccaccatccccatcgtgggcatcattgctggcctggttctccttggagctgtgatcactggagctgtggtcgctgccgtgatgtggaggaggaagagctcaggcagtgacagtgcccagggctctgatgtgtccctcacagcttgtaaagtgtgagacagctgccttgtgtgggactgagaggcaagagttgttcctgcccttccctttgtgacttgaagaaccctgactttgtttctgcaaaggcacctgcatgtgtctgtgttcgtgtaggcataatgtgaggaggtggggagaccaccccacccccatgtccaccatgaccctcttcccacgctgacctgtgctccctccccaatcatctttcctgttccagagaggtggggctgaggtgtctccatctctgtctcaacttcatggtgcactgagctgtaacttcttccttccctattaaaattagaaccttagtataaatttactttctcaaattcttgccatgagaggttgatgagttaattaaaggagaagattcct

SEQ ID NO: 13307 - protein, 122 aa, Homo sapiens; identical to SEQ ID NO: 13305

SEQ ID NO: 13308 - DNA, 881 bp, Homo sapiens
tccgcgggtaccggcaggacgcctacgacggcaaggattacatcgccctgaacgaggacctgcgctcttggaccgcggcggacatggcggctcagatcacactgacctggcagcgggatggggaggaccagacccaggacacggagctcgtggagaccaggcctgcaggggatggaaccttccagaagtgggcggctgtggtggtgccttctggagaggagcagagatacacctgccatgtgcagcatgagggtctgcccaagcccctcaccctgagatgggagctgtcttcccagcccaccatccccatcgtgggcatcattgctggcctggttctccttggagctgtgatcactggagctgtggtcgctgccgtgatgtggaggaggaagagctcaggcagtgacagtgcccagggctctgatgtgtccctcacagcttgtaaagtgtgagacagctgccttgtgtgggactgagaggcaagagttgttcctgcccttccctttgtgacttgaagaaccctgactttgtttctgcaaaggcacctgcatgtgtctgtgttcgtgtaggcataatgtgaggaggtggggagaccaccccacccccatgtccaccatgaccctcttcccacgctgacctgtgctccctccccaatcatctttcctgttccagagaggtggggctgaggtgtctccatctctgtctcaacttcatggtgcactgagctgtaacttcttccttccctattaaaattagaaccttagtataaatttactttctcaaattcttgccatgagaggttgatgagttaattaaaggagaagattcctaaaatttgagagacaaaataaatggaagacatgagaaccttccagagtcca

SEQ ID NO: 13309 - protein, 122 aa, Homo sapiens; identical to SEQ ID NO: 13305

SEQ ID NO: 13310 - DNA, 861 bp, Homo sapiens
tccttcattttaacaggtgctttacaaaagagtaagtgctggcacacagggcccagactgggtaggcccatgattgtggacggtgcttcccagtaatgagacagggcacatttctagctggggcttggaaccctcagtgagacaagaaatctcagaccccacccttcaccccttctccacctgagctcttcctcctccacatcacggcagcgaccacagctccagtgatcacagctccaaggagaaccaggccagcaatgatgcccacgatggggatggtgggctgggaagacagctctgggaaaagaggggaaggtgaggggccctgaccctgctaaaggtctccagagaggctcctgctttccctaagagacatgacacccccatctccctccttaccccatctcagggtgaggggcttgggcagaccctcatgctgcacatggcaggtgtatctctgctcctctccagaaggcaccaccacagccgcccacttctggaaggttccatcccctgcaggcctggtctccacgagctccgtgtcctgggtctggtcctcctgagtggaggctgagggactcagaagtgctggactcagacccccacacacattgagtgtgaagcagagaacaaggcctgagaggaaaagtcacgggcccaaggctgctgccggtgtcaaagggaaccactcatcagtattcgagggatcgtcttcccgtcactccttcagagattttatcccttaattgtgtcagagagcagggcggaacctcagagtcactctctggtacaggatctggaacccaggaggattcctctccctcaggaccagagggagggtgatattctagtgttggtccc

SEQ ID NO: 13311 - protein, 62 aa, Homo sapiens
MTPPSPSLPHLRVRGLGRPSCCTWQVYLCSSPEGTTTAAHFWKVPSPAGLVSTSSVSWVWSS

SEQ ID NO: 13312 - DNA, 809 bp, Homo sapiens
gacccccccaagacacatatgacccaccaccccatctctgaccatgaggccaccctgaggtgctgggccctgggcttctaccctgcggagatcacactgacctggcagcgggatggggaggaccagacccaggacacggagctcgtggagaccaggcctgcaggggatggaaccttccagaagtgggcggctgtggtggtgccttctggagaggagcagagatacacctgccatgtgcagcatgagggtctgcccaagcccctcaccctgagatgggagctgtcttcccagcccaccatccccatcgtgggcatcattgctggcctggttctccttggagctgtgatcactggagctgtggtcgctgccgtgatgtggaggaggaagagctcagatagaaaaggagggagttacactcaggctgcaagcagtgacagtgcccagggctctgatgtgtccctcacagcttgtaaagtgtgagacagctgccttgtgtgggactgagaggcaagagttgttcctgcccttccctttgtgacttgaagaaccctgactttgtttctgcaaaggcacctgcatgtgtctgtgttcgtgtaggcataatgtgaggaggtggggagaccaccccacccccatgtccaccatgaccctcttcccacgctgacctgtgctccctccccaatcatctttcctgttccagagaggtggggctgaggtgtctccatctctgtctcaacttcatggtgcactgagctgtaacttcttccttccctattaaaattagaaccttagtataaatttactttctc

SEQ ID NO: 13313 - protein, 153 aa, Homo sapiens
MTHHPISDHEATLRCWALGFYPAEITLTWQRDGEDQTQDTELVETRPAGDGTFQKWAAVVVPSGEEQRYTCHVQHEGLPKPLTLRWELSSQPTIPIVGIIAGLVLLGAVITGAVVAAVMWRRKSSDRKGGSYTQAASSDSAQGSDVSLTACKV

SEQ ID NO: 13314 - DNA, 1562 bp, Homo sapiens
gacccccccaagacacatatgacccaccaccccatctctgaccatgaggccaccctgaggtgctgggccctgggcttctaccctgcggagatcacactgacctggcagcgggatggggaggaccagacccaggacacggagctcgtggagaccaggcctgcaggggatggaaccttccagaagtgggcggctgtggtggtgccttctggagaggagcagagatacacctgccatgtgcagcatgagggtctgcccaagcccctcaccctgagatgggagctgtcttcccagcccaccatccccatcgtgggcatcattgctggcctggttctccttggagctgtgatcactggagctgtggtcgctgccgtgatgtggaggaggaagagctcaggtggagaaggggtgaagggtggggtctgagatttcttgtctcactgagggttccaagccccagctagaaatgtgccctgtctcattactgggaagcaccgtccacaatcatgggcctacccagtctgggccctgtgtgccagcacttactcttttgtaaagcacctgttaaaatgaaggacagatttatcaccttgattacggcggtgatgggacctgatcccagcagtcacaagtcacaggggaaggtccctgaggacagacctcaggagggctattggtccaggacccacacctgctttcttcatgtttcctgatcccgccctgggtctgcagtcacacatttctggaaacttctctggggtccaagactaggaggttcctctaggaccttaaggccctggctcctttctggtatctcacaggacattttcttctcacagatagaaaaggagggagttacactcaggctgcaagtaagtatgaaggaggctgatgcctgaggtccttgggatattgtgtttgggagcccatgggggagcccacccacctcacaattcctcctctagccacatcttctgtgggatctgaccaggttctgtttttgttctaccccaggcagtgacagtgcccagggctctgatgtgtccctcacagcttgtaaaggtgagagcttggaggacctaatgtgtgttgggtgttgggcggaacagtggacacagctgtgctatggggtttctttgcattggatgtattgagcatgcgatgggctgtttaaggtgtgacccctcactgtgatggatatgaatttgttcatgaatatttttttctatagtgtgagacagctgccttgtgtgggactgagaggcaagagttgttcctgcccttccctttgtgacttgaagaaccctgactttgtttctgcaaaggcacctgcatgtgtctgtgttcgtgtaggcataatgtgaggaggtggggagaccaccccacccccatgtccaccatgaccctcttcccacgctgacctgtgctccctccccaatcatctttcctgttccagagaggtggggctgaggtgtctccatctctgtctcaacttcatggtgcactgagctgtaacttcttccttccctattaaaattagaaccttagtataaatttactttctc

SEQ ID NO: 13315 - protein, 134 aa, Homo sapiens; identical to SEQ ID NO: 13235

SEQ ID NO: 13316 - DNA, 858 bp, Homo sapiens
gacccccccaagacacatatgacccaccaccccatctctgaccatgaggccaccctgaggtgctgggccctgggcttctaccctgcggagatcacactgacctggcagcgggatggggaggaccagacccaggacacggagctcgtggagaccaggcctgcaggggatggaaccttccagaagtgggcggctgtggtggtgccttctggagaggagcagagatacacctgccatgtgcagcatgagggtctgcccaagcccctcaccctgagatgggagctgtcttcccagcccaccatccccatcgtgggcatcattgctggcctggttctccttggagctgtgatcactggagctgtggtcgctgccgtgatgtggaggaggaagagctcagatagaaaaggagggagttacactcaggctgcaagcagtgacagtgcccagggctctgatgtgtccctcacagcttgtaaagtgtgagacagctgccttgtgtgggactgagaggcaagagttgttcctgcccttccctttgtgacttgaagaaccctgactttgtttctgcaaaggcacctgcatgtgtctgtgttcgtgtaggcataatgtgaggaggtggggagaccaccccacccccatgtccaccatgaccctcttcccacgctgacctgtgctccctccccaatcatctttcctgttccagagaggtggggctgaggtgtctccatctctgtctcaacttcatggtgcactgagctgtaacttcttccttccctattaaaattagaaccttagtataaatttactttctcaaattcttgccatgagaggttgatgagttaattaaaggagaagattcct

SEQ ID NO: 13317 - protein, 153 aa, Homo sapiens; identical to SEQ ID NO: 13313

SEQ ID NO: 13318 - DNA, 1611 bp, Homo sapiens
gacccccccaagacacatatgacccaccaccccatctctgaccatgaggccaccctgaggtgctgggccctgggcttctaccctgcggagatcacactgacctggcagcgggatggggaggaccagacccaggacacggagctcgtggagaccaggcctgcaggggatggaaccttccagaagtgggcggctgtggtggtgccttctggagaggagcagagatacacctgccatgtgcagcatgagggtctgcccaagcccctcaccctgagatgggagctgtcttcccagcccaccatccccatcgtgggcatcattgctggcctggttctccttggagctgtgatcactggagctgtggtcgctgccgtgatgtggaggaggaagagctcaggtggagaaggggtgaagggtggggtctgagatttcttgtctcactgagggttccaagccccagctagaaatgtgccctgtctcattactgggaagcaccgtccacaatcatgggcctacccagtctgggccctgtgtgccagcacttactcttttgtaaagcacctgttaaaatgaaggacagatttatcaccttgattacggcggtgatgggacctgatcccagcagtcacaagtcacaggggaaggtccctgaggacagacctcaggagggctattggtccaggacccacacctgctttcttcatgtttcctgatcccgccctgggtctgcagtcacacatttctggaaacttctctggggtccaagactaggaggttcctctaggaccttaaggccctggctcctttctggtatctcacaggacattttcttctcacagatagaaaaggagggagttacactcaggctgcaagtaagtatgaaggaggctgatgcctgaggtccttgggatattgtgtttgggagcccatgggggagcccacccacctcacaattcctcctctagccacatcttctgtgggatctgaccaggttctgtttttgttctaccccaggcagtgacagtgcccagggctctgatgtgtccctcacagcttgtaaaggtgagagcttggaggacctaatgtgtgttgggtgttgggcggaacagtggacacagctgtgctatggggtttctttgcattggatgtattgagcatgcgatgggctgtttaaggtgtgacccctcactgtgatggatatgaatttgttcatgaatatttttttctatagtgtgagacagctgccttgtgtgggactgagaggcaagagttgttcctgcccttccctttgtgacttgaagaaccctgactttgtttctgcaaaggcacctgcatgtgtctgtgttcgtgtaggcataatgtgaggaggtggggagaccaccccacccccatgtccaccatgaccctcttcccacgctgacctgtgctccctccccaatcatctttcctgttccagagaggtggggctgaggtgtctccatctctgtctcaacttcatggtgcactgagctgtaacttcttccttccctattaaaattagaaccttagtataaatttactttctcaaattcttgccatgagaggttgatgagttaattaaaggagaagattcct

SEQ ID NO: 13319 - protein, 134 aa, Homo sapiens; identical to SEQ ID NO: 13235

SEQ ID NO: 13320 - DNA, 909 bp, Homo sapiens
gacccccccaagacacatatgacccaccaccccatctctgaccatgaggccaccctgaggtgctgggccctgggcttctaccctgcggagatcacactgacctggcagcgggatggggaggaccagacccaggacacggagctcgtggagaccaggcctgcaggggatggaaccttccagaagtgggcggctgtggtggtgccttctggagaggagcagagatacacctgccatgtgcagcatgagggtctgcccaagcccctcaccctgagatgggagctgtcttcccagcccaccatccccatcgtgggcatcattgctggcctggttctccttggagctgtgatcactggagctgtggtcgctgccgtgatgtggaggaggaagagctcagatagaaaaggagggagttacactcaggctgcaagcagtgacagtgcccagggctctgatgtgtccctcacagcttgtaaagtgtgagacagctgccttgtgtgggactgagaggcaagagttgttcctgcccttccctttgtgacttgaagaaccctgactttgtttctgcaaaggcacctgcatgtgtctgtgttcgtgtaggcataatgtgaggaggtggggagaccaccccacccccatgtccaccatgaccctcttcccacgctgacctgtgctccctccccaatcatctttcctgttccagagaggtggggctgaggtgtctccatctctgtctcaacttcatggtgcactgagctgtaacttcttccttccctattaaaattagaaccttagtataaatttactttctcaaattcttgccatgagaggttgatgagttaattaaaggagaagattcctaaaatttgagagacaaaataaatggaagacatgagaaccttccagagtcca

SEQ ID NO: 13321 - protein, 153 aa, Homo sapiens; identical to SEQ ID NO: 13313

SEQ ID NO: 13322 - DNA, 1662 bp, Homo sapiens
gacccccccaagacacatatgacccaccaccccatctctgaccatgaggccaccctgaggtgctgggccctgggcttctaccctgcggagatcacactgacctggcagcgggatggggaggaccagacccaggacacggagctcgtggagaccaggcctgcaggggatggaaccttccagaagtgggcggctgtggtggtgccttctggagaggagcagagatacacctgccatgtgcagcatgagggtctgcccaagcccctcaccctgagatgggagctgtcttcccagcccaccatccccatcgtgggcatcattgctggcctggttctccttggagctgtgatcactggagctgtggtcgctgccgtgatgtggaggaggaagagctcaggtggagaaggggtgaagggtggggtctgagatttcttgtctcactgagggttccaagccccagctagaaatgtgccctgtctcattactgggaagcaccgtccacaatcatgggcctacccagtctgggccctgtgtgccagcacttactcttttgtaaagcacctgttaaaatgaaggacagatttatcaccttgattacggcggtgatgggacctgatcccagcagtcacaagtcacaggggaaggtccctgaggacagacctcaggagggctattggtccaggacccacacctgctttcttcatgtttcctgatcccgccctgggtctgcagtcacacatttctggaaacttctctggggtccaagactaggaggttcctctaggaccttaaggccctggctcctttctggtatctcacaggacattttcttctcacagatagaaaaggagggagttacactcaggctgcaagtaagtatgaaggaggctgatgcctgaggtccttgggatattgtgtttgggagcccatgggggagcccacccacctcacaattcctcctctagccacatcttctgtgggatctgaccaggttctgtttttgttctaccccaggcagtgacagtgcccagggctctgatgtgtccctcacagcttgtaaaggtgagagcttggaggacctaatgtgtgttgggtgttgggcggaacagtggacacagctgtgctatggggtttctttgcattggatgtattgagcatgcgatgggctgtttaaggtgtgacccctcactgtgatggatatgaatttgttcatgaatatttttttctatagtgtgagacagctgccttgtgtgggactgagaggcaagagttgttcctgcccttccctttgtgacttgaagaaccctgactttgtttctgcaaaggcacctgcatgtgtctgtgttcgtgtaggcataatgtgaggaggtggggagaccaccccacccccatgtccaccatgaccctcttcccacgctgacctgtgctccctccccaatcatctttcctgttccagagaggtggggctgaggtgtctccatctctgtctcaacttcatggtgcactgagctgtaacttcttccttccctattaaaattagaaccttagtataaatttactttctcaaattcttgccatgagaggttgatgagttaattaaaggagaagattcctaaaatttgagagacaaaataaatggaagacatgagaaccttccagagtcca

SEQ ID NO: 13323 - protein, 134 aa, Homo sapiens; identical to SEQ ID NO: 13235

SEQ ID NO: 13324 - DNA, 1037 bp, Homo sapiens
cccatctctgaccatgaggccaccctgaggtgctgggccctgggcttctaccctgcggagatcacactgacctggcagcgggatggggaggaccagacccaggacacggagctcgtggagaccaggcctgcaggggatggaaccttccagaagtgggcggctgtggtggtgccttctggagaggagcagagatacacctgccatgtgcagcatgagggtctgcccaagcccctcaccctgagatggggtaaggagggagatgggggtgtcatgtctcttagggaaagcaggagcctctctggagacctttagcagggtcagggcccctcaccttcccctcttttcccagagctgtcttcccagcccaccatccccatcgtgggcatcattgctggcctggttctccttggagctgtgatcactggagctgtggtcgctgccgtgatgtggaggaggaagagctcagtcacacatttctggaaacttctctggggtccaagactaggaggttcctctaggaccttaaggccctggctcctttctggtatctcacaggacattttcttctcacagatagaaaaggagggagttacactcaggctgcaagcagtgacagtgcccagggctctgatgtgtccctcacagcttgtaaagtgtgagacagctgccttgtgtgggactgagaggcaagagttgttcctgcccttccctttgtgacttgaagaaccctgactttgtttctgcaaaggcacctgcatgtgtctgtgttcgtgtaggcataatgtgaggaggtggggagaccaccccacccccatgtccaccatgaccctcttcccacgctgacctgtgctccctccccaatcatctttcctgttccagagaggtggggctgaggtgtctccatctctgtctcaacttcatggtgcactgagctgtaacttcttccttccctattaaaattagaaccttagtataaatttactttctcaaattcttgccatgagaggttgatgagttaattaaaggagaagattcct

SEQ ID NO: 13325 - protein, 90 aa, Homo sapiens
MWRRKSSVTHFWKLLWGPRLGGSSRTLRPWLLSGISQDIFFSQIEKEGVTLRLQAVTVPRALMCPSQLVKCETAALCGTERQELFLPFPL

SEQ ID NO: 13326 - DNA, 1088 bp, Homo sapiens
cccatctctgaccatgaggccaccctgaggtgctgggccctgggcttctaccctgcggagatcacactgacctggcagcgggatggggaggaccagacccaggacacggagctcgtggagaccaggcctgcaggggatggaaccttccagaagtgggcggctgtggtggtgccttctggagaggagcagagatacacctgccatgtgcagcatgagggtctgcccaagcccctcaccctgagatggggtaaggagggagatgggggtgtcatgtctcttagggaaagcaggagcctctctggagacctttagcagggtcagggcccctcaccttcccctcttttcccagagctgtcttcccagcccaccatccccatcgtgggcatcattgctggcctggttctccttggagctgtgatcactggagctgtggtcgctgccgtgatgtggaggaggaagagctcagtcacacatttctggaaacttctctggggtccaagactaggaggttcctctaggaccttaaggccctggctcctttctggtatctcacaggacattttcttctcacagatagaaaaggagggagttacactcaggctgcaagcagtgacagtgcccagggctctgatgtgtccctcacagcttgtaaagtgtgagacagctgccttgtgtgggactgagaggcaagagttgttcctgcccttccctttgtgacttgaagaaccctgactttgtttctgcaaaggcacctgcatgtgtctgtgttcgtgtaggcataatgtgaggaggtggggagaccaccccacccccatgtccaccatgaccctcttcccacgctgacctgtgctccctccccaatcatctttcctgttccagagaggtggggctgaggtgtctccatctctgtctcaacttcatggtgcactgagctgtaacttcttccttccctattaaaattagaaccttagtataaatttactttctcaaattcttgccatgagaggttgatgagttaattaaaggagaagattcctaaaatttgagagacaaaataaatggaagacatgagaaccttccagagtcca

SEQ ID NO: 13327 - protein, 90 aa, Homo sapiens; identical to SEQ ID NO: 13325

SEQ ID NO: 13328 - DNA, 785 bp, Homo sapiens
tctctgaccatgaggccaccctgaggtgctgggccctgggcttctaccctgcggagatcacactgacctggcagcgggatggggaggaccagacccaggacacggagctcgtggagaccaggcctgcaggggatggaaccttccagaagtgggcggctgtggtggtgccttctggagaggagcagagatacaccctgagatgggagctgtcttcccagcccaccatccccatcgtgggcatcattgctggcctggttctccttggagctgtgatcactggagctgtggtcgctgccgtgatgtggaggaggaagagctcagatagaaaaggagggagttacactcaggctgcaagcagtgacagtgcccagggctctgatgtgtccctcacagcttgtaaagtgtgagacagctgccttgtgtgggactgagaggcaagagttgttcctgcccttccctttgtgacttgaagaaccctgactttgtttctgcaaaggcacctgcatgtgtctgtgttcgtgtaggcataatgtgaggaggtggggagaccaccccacccccatgtccaccatgaccctcttcccacgctgacctgtgctccctccccaatcatctttcctgttccagagaggtggggctgaggtgtctccatctctgtctcaacttcatggtgcactgagctgtaacttcttccttccctattaaaattagaaccttagtataaatttactttctcaaattcttgccatgagaggttgatgagttaattaaaggagaagattcct

SEQ ID NO: 13329 - protein, 41 aa, Homo sapiens
MGAVFPAHHPHRGHHCWPGSPWSCDHWSCGRCRDVEEEELR

SEQ ID NO: 13330 - DNA, 836 bp, Homo sapiens
tctctgaccatgaggccaccctgaggtgctgggccctgggcttctaccctgcggagatcacactgacctggcagcgggatggggaggaccagacccaggacacggagctcgtggagaccaggcctgcaggggatggaaccttccagaagtgggcggctgtggtggtgccttctggagaggagcagagatacaccctgagatgggagctgtcttcccagcccaccatccccatcgtgggcatcattgctggcctggttctccttggagctgtgatcactggagctgtggtcgctgccgtgatgtggaggaggaagagctcagatagaaaaggagggagttacactcaggctgcaagcagtgacagtgcccagggctctgatgtgtccctcacagcttgtaaagtgtgagacagctgccttgtgtgggactgagaggcaagagttgttcctgcccttccctttgtgacttgaagaaccctgactttgtttctgcaaaggcacctgcatgtgtctgtgttcgtgtaggcataatgtgaggaggtggggagaccaccccacccccatgtccaccatgaccctcttcccacgctgacctgtgctccctccccaatcatctttcctgttccagagaggtggggctgaggtgtctccatctctgtctcaacttcatggtgcactgagctgtaacttcttccttccctattaaaattagaaccttagtataaatttactttctcaaattcttgccatgagaggttgatgagttaattaaaggagaagattcctaaaatttgagagacaaaataaatggaagacatgagaaccttccagagtcca

SEQ ID NO: 13331 - protein, 41 aa, Homo sapiens; identical to SEQ ID NO: 13329

SEQ ID NO: 13332 - DNA, 502 bp, Homo sapiens
ctctggggtccaagactaggaggttcctctaggaccttaaggccctggctcctttctggtatctcacaggacattttcttctcacagatagaaaaggagggagttacactcaggctgcaagcagtgacagtgcccagggctctgatgtgtccctcacagcttgtaaagtgtgagacagctgccttgtgtgggactgagaggcaagagttgttcctgcccttccctttgtgacttgaagaaccctgactttgtttctgcaaaggcacctgcatgtgtctgtgttcgtgtaggcataatgtgaggaggtggggagaccaccccacccccatgtccaccatgaccctcttcccacgctgacctgtgctccctccccaatcatctttcctgttccagagaggtggggctgaggtgtctccatctctgtctcaacttcatggtgcactgagctgtaacttcttccttccctattaaaattagaaccttagtataaatttactttctc

SEQ ID NO: 13333 - protein, 46 aa, Homo sapiens
DLKALAPFWYLTGHFLLTDRKGGSYTQAASSDSAQGSDVSLTACKV

SEQ ID NO: 13334 - DNA, 822 bp, Homo sapiens
atgattgtaaaggcattattatacggcaccagtcgtgggactctttggtctagctactgtattttctcaactttcttgcaactcatcaaagagaacattaatattaaaggcatttgcaaaaaaaatctgagatattgttgtatctccattctctgtctcaaagttttattcattactttacaaaagataattttaaagtattaaagaaaattagtcagatacaagaagtatttgatttacaaaatcctgaaacaataatgttaattgtggtgccagctacttgggaggctgaaggaggagcattgatggcatgagcccaggaggttgaggcttcagtgaatcatgagcatgccactgcattccagccagggcaacagagtgttactttgtctaaaaataactaactagctaactaactaactaaataaataaataatggaggcagtgcacgagccctggtgaagggcactttggctgcattgagcacttgcagatttgaggtgattacattctgtacgttacttaacatgcatactgtacatacttaacatgcatataaattctttgatactcctccttgcagaggtgcagcttcattcccttcctgtgagtgtggcctgaacttaatgactcacttacagactgatagagtaatgttgagataatagtttgtgactctgggtgtggtggtgcatgcctgtaatcccagttgctcaggaggctgaggcaggagaatcacttgaacctggaagtcggaggttgcagtgagccaagatccagccactgcattccagcctgggtgacagggtgagactctgtctc

SEQ ID NO: 13335 - protein, 67 aa, Homo sapiens [sequence omitted]

SEQ ID NO: 13336 - DNA, 646 bp, Homo sapiens
cagagaggaaagaaccctgggaacgggaggcgaagggataatgagctggggatgggagcagtcgcaggaagaatcctctgcctggagccggcaggctccaacccctcagcttgagagtcaggagccccatagtccccacagcaataggaagcaccagctcctggtcccgaaaaaaggagggccccaactccagggactgcggcccgccctggagctgagaacacgcggactccagggagaggacagggcttcagggacccgagagccgctctgagcaccgggggatgtgactgcctcagcggcagagctggaagggccctcgaatgccattcacaggaacagcccaggaacccagggacttcagaagggctggtttgtccgaaaagtgagaggaggcggaggagagagcctgcgaggtcaagctgcagagaacatgagcttctacctccagatgtgccagggtgcatctcaataaacttggattttggccaggcgcggtggctcaggcctgtaatcccagctctggaagctgaaggatagcttgagcccaggagttcgaggctgcagtgagctatgatctcaccactacactccagcctgggtgacagcaagagatcttgtctcagaaataaataaataaaattta

SEQ ID NO: 13337 - protein, 77 aa, Homo sapiens; identical to SEQ ID NO: 1383

SEQ ID NO: 13338 - DNA, 3269 bp, Homo sapiens
aacgtcttccaagggagattgcgtctccactttcaccctggtactgagaggttgagcacaaaattggtaaccaatgctgcgcttccagcaaattttcccaccagcacccaatcctgggatatttattctctttgtctcacatcctacaggaacgcagtcgcggggtatatccccctgaaaaccattggcctggggtacatcatctaaagatcctaggattgctgcaggtcagcagtctccactggaaaaaaagatcttgcatgtatttcaagtcctctgatgaatcatgtgatctactagaccctgaagatacagtgaagagcaaaagaacacagatgaaatgagaaacaaaaacgatggagaaaaccaaaaaaggggacacatgggatccaggcaataggagagccagcataagagagagccagagggatgcccaggatgaggtgaagacgatcttggaaatcagcccagatgtgcatgcaccagtccacgtgtggcaggaccaagggaagtgtcttcacaaagatgaggctttgatttgttggagaaactgttaccagaaaaacaggtcccgatcccgaccccaaaagagtattcttggatcttgcacaggaaggaattaaagggaagtaagaagttacagctcagtgcaccatgaagttgagacagagatggagacatcccagcaccacttctctggaacaggaaaggtgatcggggaaggaatgtagcctgagagtagctccctccttttctatctgcgggaagaaaacgtcctgtgagaggccaggaaggtagcagggccatgaggtcctagaggaacctcctagtcttggaaccttgagaagtttccagaaatgtgtgactgcaaaccaagggcaggatcaggaaaaacaaggaaagcagatgtgggtcctggaccaactgccctcctaaggtctgtcctcagcagggaccttcccctgacctgtgattactggggtcagatccccatcactacaatcatcaagcagtgaccacagctccagtgaccacagctccaaggagaaccagcccgggagatctacaggagatcgagcaggctccccatggcccctggtacccgcgcgctgcagcgtctccttcccgttctccaggtgtctgcggagccactccatgcaggtgccctccaggcatactgctcatacccgcggaggagacgcccgtcgggccccaggtcgcagccaaacattccctggaggatgtgataccctggcccagttcccgcggtcagccccgcccaccgagccctggcccggcccctagcaacctgcggagattttggcctcaactgaagatgaaaccagtttccaatgatcagaaatccaggagaggtttccctgagtgcttctggctcagggcctctcacaaggttgcagtccagttgtcagcctaggcctgcatcatctgaggacttcactgagcaaggccatagaggagtcctcgagctacaattggccatcagaggagtcccctgtctcctaggaatgtcctgccttagtgtcactggggtacactcctttggaaaccagaacctcgtatcctgcacagcccagtgttgggagataaaatatgcgaaataccccattgagtgaatctaagagattggacatggagccaaacctgcttccgccttttgatttctggacacacatgttcttcctattgagaacacagaactctagagacgtctctgattcaaacaatgcactgtgtcctgaaagatggcacccacccctcagagtgcttcctccaggctggcactgagttgtgcctgtagaagacctgtccagccttccttgtggctggcagctcctgggtagtgcagatggtgataggattagtggaacccacagccgtggaaacactgaaactttccctgcaaagtgggtccttcaggcagataatgggctaggagcactgcctagcctgcagaccaggaatgtcaacagcacccagagagtggtgctggctgtgtctgagagcaggacaggaaaacccacccatagaatcggtacctaaccctgtgaagatgaaactctggcccttccaggttggaagtagctaaatgtagtcaacttgttacttagtgggtagtcatgtaaagaaatagtgccccactagggcacatcatgggcctcaattgctgatgagttggacattcagaggtggcagcagctggatctgccttggtgtggggaagtcagtgctgctggccccttacggagcctcatgcctgccactgtggttgctccattcatgcactcatcctaccaggcctgggctgacccatggtgaaagctggctaactgccatttgtctgtttggtagttcagtgccacttcagacttgggtgttttctgtgggtgtcagcaagggattcaagctcaacccaggtggactgttttcacctgatgatgaatgctgttgggcctgtaccatctatgactttgtgggtcacacaggcacttggaaccccgtagttgcttggtatcccgtggtcaaacattctattgaatcaggacaaggaacactaaaagttgcttctaacagggggcatgtgtctctgctgtggatgacatgatcttactccagaatcccaggccctccactgtgactctcccactggtgcttggttcagctccatcctgtgtctttccccaccactggcaccaccagccccaggggtctgagggatggtggctgcttgtaccatggcctggatctgctgcagggtcctttcctgtgtaggccccacttgaagctggcatcctcctatgtcacctagactgtgggccaaagcaaaatgtctagatgtggaatgtggtgttgttataattcaaagaggctcaccaagcagtgtgcttccttgcttctggtgaggatgcaagatgcaacagtttttcttttaccttggaggggacacacctgcattcccctaaacacttggcacttgttcacccataaaacttcacttcagtgcccacctttgaagctgtataaggtttatcttcaccttgtggggtgcgtgtgttttgcaaaggactacagtgcactttcttcctgctgctcatctactccagtcaacatgaagttgtcaatgaaatgtgctgatttaatatcctaaaggatatgcagtatgtccagtacagtcttaagcctatactatagagggcacaggtgttacaatagccctgaggcaaacaataaataaatgtgtcgttgattcc

SEQ ID NO: 13339 - protein, 93 aa, Homo sapiens
MIRNPGEVSLSASGSGPLTRLQSSCQPRPASSEDFTEQGHRGVLELQLAIRGVPCLLGMSCLSVTGVHSFGNQNLVSCTAQCWEIKYAKYPIE

SEQ ID NO: 13340 - DNA, 2429 bp, Homo sapiens
aattgcgaaccgtgtctcgggagcgttagagatggagactaacgtcttccaagggagattgcgtctccactttcaccctggtactgagaggttgagcacaaaattggaacgcagtcgcggggtatatccccctgaaaaccgtacgttgccaaataatgatttctttggattagagaactacaactcccctgggtcctgagccggtatttcccttttgcggctgcaccgtagttaaaaacaaagctaagtgttctgggacgtatagttctagcgttccttgggtcccgctggcgagcgtgggctttctgcagctcgcaaccggcctcgtgctttgcggacggttcactgcgcttggaaagggattggcctggggtacatcatctaaagatcctaggattgctgcaggtcagcagtctccactggaaaaaaagatcttgcatgtatttcaagtcctctgatgaatcatgtgatctactagaccctgaagatacagtgaagagcaaaagaacacagatgaaatgagaaacaaaaacgatggagaaaaccaaaaaaggggacacatgggatccaggcaataggagagccagcataagagagagccagagggatgcccaggatgaggtgaagacgatcttggaaatcagcccagatgtgcatgcaccagtccacgtgtggcaggaccaagggaagtgtcttcacaaagatgaggggtacactcctttggaaaccagaacctcgtatcctgcacagcccagtgttgggagataaaatatgcgaaataccccattgagtgaatctaagagattggacatggagccaaacctgcttccgccttttgatttctggacacacatgttcttcctattgagaacacagaactctagagacgtctctgattcaaacaatgcactgtgtcctgaaagatggcacccacccctcagagtgcttcctccaggctggcactgagttgtgcctgtagaagacctgtccagccttccttgtggctggcagctcctgggtagtgcagatggtgataggattagtggaacccacagccgtggaaacactgaaactttccctgcaaagtgggtccttcaggcagataatgggctaggagcactgcctagcctgcagaccaggaatgtcaacagcacccagagagtggtgctggctgtgtctgagagcaggacaggaaaacccacccatagaatcggtacctaaccctgtgaagatgaaactctggcccttccaggttggaagtagctaaatgtagtcaacttgttacttagtgggtagtcatgtaaagaaatagtgccccactagggcacatcatgggcctcaattgctgatgagttggacattcagaggtggcagcagctggatctgccttggtgtggggaagtcagtgctgctggccccttacggagcctcatgcctgccactgtggttgctccattcatgcactcatcctaccaggcctgggctgacccatggtgaaagctggctaactgccatttgtctgtttggtagttcagtgccacttcagacttgggtgttttctgtgggtgtcagcaagggattcaagctcaacccaggtggactgttttcacctgatgatgaatgctgttgggcctgtaccatctatgactttgtgggtcacacaggcacttggaaccccgtagttgcttggtatcccgtggtcaaacattctattgaatcaggacaaggaacactaaaagttgcttctaacagggggcatgtgtctctgctgtggatgacatgatcttactccagaatcccaggccctccactgtgactctcccactggtgcttggttcagctccatcctgtgtctttccccaccactggcaccaccagccccaggggtctgagggatggtggctgcttgtaccatggcctggatctgctgcagggtcctttcctgtgtaggccccacttgaagctggcatcctcctatgtcacctagactgtgggccaaagcaaaatgtctagatgtggaatgtggtgttgttataattcaaagaggctcaccaagcagtgtgcttccttgcttctggtgaggatgcaagatgcaacagtttttcttttaccttggaggggacacacctgcattcccctaaacacttggcacttgttcacccataaaacttcacttcagtgcccacctttgaagctgtataaggtttatcttcaccttgtggggtgcgtgtgttttgcaaaggactacagtgcactttcttcctgctgctcatctactccagtcaacatgaagttgtcaatgaaatgtgctgatttaatatcctaaaggatatgcagtatgtccagtacagtcttaagcctatactatagagggcacaggtgttacaatagccctgaggcaaacaataaataaatgtgtcgttgattcc

SEQ ID NO: 13341 - protein, 77 aa, Homo sapiens
MEKTKKGDTWDPGNRRASIRESQRDAQDEVKTILEISPDVHAPVHVWQDQGKCLHKDEGYTPLETRTSYPAQPSVGR

SEQ ID NO: 13342 - DNA, 1175 bp, Homo sapiens
acgtcttccaagggagattgcgtctccactttcaccctggtactgagaggttgagcacaaaattggtaaccaatgctgcgcttccagcaaattttcccaccagcacccaatcctgggatatttattctctttgtctcacatcctacaggaacgcagtcgcggggtatatccccctgaaaaccgtacgttgccaaataatgatttctttggattagagaactacaactcccctgggtcctgagccggtatttcccttttgcggctgcaccgtagttaaaaacaaagctaagtgttctgggacgtatagttctagcgttccttgggtcccgctggcgagcgtgggctttctgcagctcgcaaccggcctcgtgctttgcggacggttcactgcgcttggaaagggattggcctggggtacatcatctaaagatcctaggattgctgcaggtcagcagtctccactggaaaaaaagatcttggctttgatttgttggagaaactgttaccagaaaaacaggtcccgatcccgaccccaaaagagtattcttggatcttgcacaggaaggaattaaaggggtacactcctttggaaaccagaacctcgtatcctgcacagcccagtgttgggagataaaatatgcgaaataccccattgagtgaatctaagagattggacatggagccaaacctgcttccgccttttgatttctggacacacatgttcttcctattgagaacacagaactctagagacgtctctgattcaaacaatgcactgtgtcctgaaagatggcacccacccctcagagtgcttcctccaggctggcactgagttgtgcctgtagaagacctgtccagccttccttgtggctggcagctcctgggtagtgcagatggtgataggattagtggaacccacagccgtggaaacactgaaactttccctgcaaagtgggtccttcaggcagataatgggctaggagcactgcctagcctgcagaccaggaatgtcaacagcacccagagagtggtgctggctgtgtctgagagcaggacaggaaaacccacccatagaatcggtacctaaccctgtgaagatgaaactctggcccttccaggttggaagtagctaaatgtagtcaacttgttacttagtgggtagtcatgtaaagaaa

SEQ ID NO: 13343 - protein, 64 aa, Homo sapiens
MRNTPLSESKRLDMEPNLLPPFDFWTHMFFLLRTQNSRDVSDSNNALCPERWHPPLRVLPPGWH

SEQ ID NO: 13344 - DNA, 806 bp, Homo sapiens
agaactacaactcccctgggtcctgagccggtatttcccttttgcggctgcaccgtagttaaaaacaaagctaagtgttctgggacgtatagttctagcgttccttgggtcccgctggcgagcgtgggctttctgcagctcgcaaccggcctcgtgctttgcggacggttcactgcgcttggaaagggattggcctggggtacatcatctaaagatcctaggattgctgcaggtcagcagtctccactggaaaaaaagatcttggggtacactcctttggaaaccagaacctcgtatcctgcacagcccagtgttgggagataaaatatgcgaaataccccattgagtgaatctaagagattggacatggagccaaacctgcttccgccttttgatttctggacacacatgttcttcctattgagaacacagaactctagagacgtctctgattcaaacaatgcactgtgtcctgaaagatggcacccacccctcagagtgcttcctccaggctggcactgagttgtgcctgtagaagacctgtccagccttccttgtggctggcagctcctgggtagtgcagatggtgataggattagtggaacccacagccgtggaaacactgaaactttccctgcaaagtgggtccttcaggcagataatgggctaggagcactgcctagcctgcagaccaggaatgtcaacagcacccagagagtggtgctggctgtgtctgagagcaggacaggaaaacccacccatagaatcggtacctaaccctgtgaagatgaaactctggcccttcc

SEQ ID NO: 13345 - protein, 64 aa, Homo sapiens; identical to SEQ ID NO: 13343

SEQ ID NO: 13346 - DNA, 1308 bp, Homo sapiens
ccccagacgccgacgatggggtcatggcgccccgaaccctcctcctgctgctctcggggaccctggccctggccgagacctgggcgggctcccactccatgaggtatttcagcaccgccgtttcctggccgggccgcggggagcccagcttcattgccgtgggctacgtggacgacacgcagttcgtgcgggtcgacagtgacgccgtgagtctgaggatgaagacgcgggcgcggtgggtggagcaggaggggccggagtattgggacctacagacactgggcgccaaggcccaggcacagactgaccgagtgaacctgcggaccctgctccgctactacaaccagagcgaggcggaccccccccaagacacacgtgacccacccccctctctgaacatgaggcataacgaggtcctgggttctgggcttctaccctgcggagatcacattgacctggcagcgggatggggaggaccagacccaggacatggagctcgtggagaccaggcccacaggggatggaaccttccagaagtgggcggttgtggtagtgccttctggagaggaacagagatacacatgccatgtgcagcacaaggggctgcccaagcccctcatcctgagatgggagccctctccccagcccaccatccccattgtgggtatcattgctggcctggttctccttggagctgtggtcactggagctgtggtcactgctgtgatgtggaggaagaagagctcagtcacacatttctggaaacttctcaaggttccaagactaggaggttcctctaggacctcatggccctgctaccttcctggcctctcacaggacgttttcttcccgcagatagaaaaggagggagctactctcaggctgcaatgtgagacagctgccttgtgtgggactgagaggcaagatttgttcatgccttccctttgtgacttcaagaaccctgacttctctttctgcaaaggcatctgaatgtgtctgtgtccctataggcataatgtgaggtggtggggagaccagcccacacccgtgtccaccatgaccctgttccccacactgacctacattccttccccgatcacctttcctgttccagagaagtggtgctgggatgtctccatctctgtctcaacttcatggtgcactgagctgtaacttcttacttccctattaaaattagaatctgagtataaatttacttttttcaaattatttccatgacgggttgatgggttaattaaaggagaagattcctaaaatttgagagacaaaataaatggaagacatgag

SEQ ID NO: 13347 - protein, 258 aa, Homo sapiens
MAPRTLLLLLSGTLALAETWAGSHSMRYFSTAVSWPGRGEPSFIAVGYVDDTQFVRVDSDAVSLRMKTRARWVEQEGPEYWDLQTLGAKAQAQTDRVNLRTLLRYYNQSEADPPQDTRDPPPSLNMRHNEVLGSGLLPCGDHIDLAAGWGGPDPGHGARGDQAHRGWNLPEVGGCGSAFWRGTEIHMPCAAQGAAQAPHPEMGALSPAHHPHCGYHCWPGSPWSCGHWSCGHCCDVEEEELSHTFLETSQGSKTRRFL

SEQ ID NO: 13348 - DNA, 857 bp, Homo sapiens
cgatggggtcatggcgccccgaaccctcctcctgctgctctcggggaccctggccctggccgagacctgggcggaccccccccaagacacacgtgacccacccccctctctgaacatgaggcataacgaggtcctgggttctgggcttctaccctgcggagatcacattgacctggcagcgggatggggaggaccagacccaggacatggagctcgtggagaccaggcccacaggggatggaaccttccagaagtgggcggttgtggtagtgccttctggagaggaacagagatacacatgccatgtgcagcacaaggggctgcccaagcccctcatcctgagatgggtcacacatttctggaaacttctcaaggttccaagactaggaggttcctctaggacctcatggccctgctaccttcctggcctctcacaggacgttttcttcccgcagatagaaaaggagggagctactctcaggctgcaagcagccaaagtgcccagggctctgatgtgtctctcacggcttgtaaagtgtgagacagctgccttgtgtgggactgagaggcaagatttgttcatgccttccctttgtgacttcaagaaccctgacttctctttctgcaaaggcatctgaatgtgtctgtgtccctataggcataatgtgaggtggtggggagaccagcccacacccgtgtccaccatgaccctgttccccacactgacctacattccttccccgatcacctttcctgttccagagaagtggtgctgggatgtctccatctctgtctcaacttcatggtgcactgagctgtaacttcttacttccctattaaaattagaatctgagtat

SEQ ID NO: 13349 - protein, 143 aa, Homo sapiens
MELVETRPTGDGTFQKWAVVVVPSGEEQRYTCHVQHKGLPKPLILRWVTHFWKLLKVPRLGGSSRTSWPCYLPGLSQDVFFPQIEKEGATLRLQAAKVPRALMCLSRLVKCETAALCGTERQDLFMPSLCDFKNPDFSFCKGI

SEQ ID NO: 13350 - DNA, 2095 bp, Homo sapiens
tatagcttcaatgatttcacctgggccaagattttggttttttttgatgttatttgtttgaactgctgcctggggcttagaaaagtgacttggatattttgtcaaaatggattttctttgatggaatgtgaaatccgtaaacactctgctttcctgctgtatccccagagcaggttgagtaccttgcacttcttctcagcacttcgctagaagtggtagaagatttggagttagggcctccctcaatccctaccctttctttaattcagaggatcacaaactgttgggagaagagtggtatcttgggcctctagctgatctgatgaatattaatatccaatgtcctgtagtgaagtcatgtgtgcgtgtaacatcacttcttcacgcagtgtcataggaaagtgggttcctggaccccaggttaagagcctaagcactaaaggcacagagctagagctctaggaggggagggatggctggggtggaacctcgtcttgtcatttagtcctggggccttttcactccttacatggtgggtggtgggcgtctggcaggtgccgatgttgatggagtcaagggagggaactagccgggacagggaaaaacagggttggagagataattaaggtggacgttattttttctgagcgtaagtcgtggctggaaatctggagagcctgaaagagtatccccctacccaaacctgttttttccttttccctcaagcctcatttggccacaggcccagtgtcaacaccagggggcgccacagaccatgaaggcaccgtgcagctgggattgtttgtggtcggctactgggtccctcagtttcttaatctgtgaaatggtgaggacattacagcatttacctctggggcgggtttctcaacagcagcactattaacaatttgggacagagaatcttgtggagtggtctgtcctgtgcattgtgggaggtttgccagcaacaccccactcaccccctcccaccaatccccatgtgacaaccgaaaatgtcccaggatttttaggtctcccttgggtctagaagctgcacttaggcattttcccacctgacacttgagttcatctctgctttggtccacataaggccactttaaaaaaatgttgtttctttaaagattctaaccatcttttaaacaaatccattttcttcctctatttctgcattcagttaatccttccaaaccctttgtttagtatatcttgaaatgtatcaattcctgttctagtaattaacatatgtgacttgcatgatatctgctatgacccttagtagagctctgattcctttagcacagggaatgtgttctcgattctgctctggatgatgtaaatcaatttattttactttacttgtctgggatgttgctcctcatctgtaagatgtaaatgtggatatggcttggattactaagtggttttatttcttaattcacctgacatttgttgtgtgcctgctgcaagtcaaatacatggcatggtattgtttccttgttcacaccacagcaaatgagaaaatgagacattatagccaggtgtggcggcacaggcttgtggtcctagctactcggaaggctgaggcaggagaattgctccagcccaggagtttgaggttacagtaaggtatgatatcaccattgcatttcaacctgggcaacagaccctgtctctgaaaaaagggaaaaagaccttgtgagctgtctacgtgtactctatgtctcaggagactcatatcctgtaatttttctaaatggcgtctccatgtggtctttcatgaatgtttgtctggtattctctatccttttactttcaacttttctttaccttctactgaaattatgtcttttgtaaacagcccatgattatttatttagttatttatttttacccccctgcactatttgtcttgtaattggagtgtctgagtccattatgtttaatgtaattattgacctcattgggtttaagtctgtccattgtcatttgctgccttctaatattatctctttcttgctcaactatttttcttatgttaccttctttagatgaataaaaacctttgcattattgt

SEQ ID NO: 13351 - protein, 42 aa, Homo sapiens
MKAPCSWDCLWSATGSLSFLICEMVRTLQHLPLGRVSQQQHY

SEQ ID NO: 13352 - DNA, 3215 bp, Homo sapiens
tatatccccctgaaaaccgtacgttgccaaataatgatttctttggattagagaactacaactcccctgggtcctgagccggtatttcccttttgcggctgcaccgtagttaaaaacaaagctaagtgttctgggacgtatagttctagcgttccttgggtcccgctggcgagcgtgggctttctgcagctcgcaaccggcctcgtgctttgcggacggttcactgcgcttggaaaggggtgagtcggctttttgagggacagcaagtggtgagagtgaaggcccgaggaatgcttagtcccacgggacgaaaggaagcagggatgaagtggtacacttgagaaggggttcaggactttggaggtggtggaacagaggagcttggggcttcctctccttcgactcctgccagataagtgaggctagcagtagtcaagaaagctcattaagtaggatttcataagacttaggtcgagtttggcttttagttgtgcctgccgcctatcgaactcttaattcattatgtcatccgttaagtggacagctgacatttccctgatcttttataaaacatgagaataagtatctttgggaaatctttctattttcattaatctgtaacttatattccaagtagaaactttccctgaaggggcagcttgtagttgtttactagtttcctgctagccctcccaccaccatccactctgatagctgtgctaagttcattcatataaaagttctggagccatcactgttttctcctatgaaggacacaagctgtagtcttttcgctgggagaggctcccatctgcctttctctgtaataatggagagaacgccatagtgaaagggttaaaactcagcaaactgctgaagagtgacaagccctatcatttaactgtgaaattgcttgttattctgtcttacaaagggagacgtgttgttgagctgattgtcgtagacagtttttattctcacttatctgtgtgtctcctttgaaaatggaacttgaaattctaccctcctcagttttctgtttttaatttgaaaaacagccaacatcccctgtgaattgcagtaaaggaacaaagcattaaaaggcatatccttttcccaacaaaagctcacagtctaatcagtaaagatttattgagcaactatgccaggttttgagctgaggctgagcctgcaaagttgaaatctgtgttctctgacctcaaggaacatgaatgaataattagaatataataaaactgtgctagtaggtacaaaatgtgagagcccagaacatgcatataaaggaaacatatctgtaaacttcaaggaagactgggaaatggcttaataaaaatagatacaatgttatggcagatatttaaaaaagatgctcagatattatgtgtcaaggatcatcagcaatcagcaaatcattaattttgagaacttgggatcacagactctaatgttaagtattgtgctagaagccatgtacagagaagtaaaagtaagatgatcatacgtttacaatctcaaaataagcttacgtagacaaataagaatgttcctaagaggtcagtgagaccaaatatttgatatcagatcctttccaacaatatagaggcatcatatttgtagatataaattacagttttcattccttatgagcctaaatttcagcatcaaaatgttaaaagtgatatgtgaatacagatatcacagtgtaaaccacgattaattttcaaatgagttgtagaattaaaatatgtcaagtatttagaggaagggaagatcactgacagagtagactggaaagactttataatcaggagcttgacctgtgaaggacagatagatagaatttattgagaacttaccaagctctttacatctaattcatatttgttctttataaccctgagaggcagatttttgtcttacatctccattttatagatgagaaagctgacagaagttacttgccctgagtcacacacctaggaagtggtagaattagatttcagatctagctctgtcagactgtaaagaccatcctttgaactctaaatggtataaaagacatacagaggaaatgccaggcatcctcagtggcttaaatacgacatcacagtaaactcaggctagaccagggatgacacataaaagatgatagttttcatttgtgttgccatcagcctcctctataaataaacccagagtaaccacaaattgccatcctgaggggttcaacagggaatagtctcataatggatttagagtgaaggatgattggcattgttagtcaggcaagcagagggctgagcagtcaaataacagaatttcagaacaaaagattagagggcagaaatgctgtatgtgctgatagagtcagagagggcccggatcaagaaactgcaggaagagaaaactagaaacctagaatcgtctagaaaactagaacctacaatcgtctcagaacacaaaggaggcttgaggactgagcagactgacatagatgtacttggacaacacctcaccaaggagcatgtctcttcccactcacaatccccaatacgagattcacagtggttcacgctgagtccacaggaaaaattggcctggggtacatcatctaaagatcctaggattgctgcaggtcagcagtctccactggaaaaaaagatcttgcatgtatttcaagtcctctgatgaatcatgtgatctactagaccctgaagatacagtgaagagcaaaagaacacagatgaaatgagaaacaaaaacgatggagaaaaccaaaaaaggggacacatgggatccaggcaataggagagccagcataagagagagccagagggatgcccaggatgaggtgaagacgatcttggaaatcagcccagatgtgcatgcaccagtccacgtgtggcaggaccaagggaagtgtcttcacaaagatgaggctttgatttgttggagaaactgttaccagaaaaacaggtcccgatcccgaccccaaaagagtattcttggatcttgcacaggaaggaattaaaggtctagctctgtctcctcagcacatgttctaggctctgactgcaagtgctgacttgggctcccagccccacacagaccctctgttccatgaaagggccatctatgcaaagtgccccccaaatgccaaaggagccaataaaccaaggaacaagacagacaaa

SEQ ID NO: 13353 - protein, 113 aa, Homo sapiens
MLYVLIESERARIKKLQEEKTRNLESSRKLEPTIVSEHKGGLRTEQTDIDVLGQHLTKEHVSSHSQSPIRDSQWFTLSPQEKLAWGTSSKDPRIAAGQQSPLEKKILHVFQVL

SEQ ID NO: 13354 - DNA, 1503 bp, Homo sapiens
atacaggtgaccgtatcctgagccccgggcagaggcaggaccgagccgcaatctgaacagaaatccaggtccgactgaaagctggagcaagtattggcgaggtccatgacagacatgcggtcgggtctgaggagggagttggaagtttattaacaaaagagagaagagttcctgtcccagaggtcgtaactattctgtcccaggacctaggagtatataacccgaaccctcctgccacgcacgcctcctgcctctgcgaccaaggagccgaaacgcccggaattcccagacagcgtcgggtactaaaggacttggaaccctttccaggggccggtgagaggagttaaccaactccgtgggctagagcgccagctctgcgcccgcggcggggcagcgagatagagccggctagagcgtcaggctttcgcgttgacgattggctgtgacgtcataattaattgcgaaccgtgtctcgggagcgttagagatggagactaacgtcttccaagggagattgcgtctccactttcaccctggtactgagaggttgagcacaaaattggtaaccaatgctgcgcttccagcaaattttcccaccagcacccaatcctgggatatttattctctttgtctcacatcctacaggaacgcagtcgcggggtatatccccctgaaaaccgtacgttgccaaataatgatttctttggattagagaactacaactcccctgggtcctgagccggtatttcccttttgcggctgcaccgtagttaaaaacaaagctaagtgttctgggacgtatagttctagcgttccttgggtcccgctggcgagcgtgggctttctgcagctcgcaaccggcctcgtgctttgcggacggttcactgcgcttggaaagggattggcctggggtacatcatctaaagatcctaggattgctgcaggtcagcagtctccactggaaaaaaagatcttgcatgtatttcaagtcctctgatgaatcatgtgatctactagaccctgaagatacagtgaagagcaaaagaacacagatgaaatgagaaacaaaaacgatggagaaaaccaaaaaaggggacacatgggatccaggcaataggagagccagcataagagagagccagagggatgcccaggatgaggtgaagacgatcttggaaatcagcccagatgtgcatgcaccagtccacgtgtggcaggaccaagggaagtgtcttcacaaagatgaggctttgatttgttggagaaactgttaccagaaaaacaggtcccgatcccgaccccaaaagagtattcttggatcttgcacaggaaggaattaaaggtctagctctgtctcctcagcacatgttctaggctctgactgcaagtgctgacttgggctcccagccccacacagaccctctgttccatgaaagggccatctatgcaaagtgccccccaaatgccaaaggagccaataaaccaaggaacaagacagacaaa

SEQ ID NO: 13355 - protein, 88 aa, Homo sapiens
MEKTKKGDTWDPGNRRASIRESQRDAQDEVKTILEISPDVHAPVHVWQDQGKCLHKDEALICWRNCYQKNRSRSRPQKSILGSCTGRN

SEQ ID NO: 13356 - DNA, 1706 bp, Homo sapiens
taattaattgcgaaccgtgtctcgggagcgttagagatggagactaacgtcttccaagggagattgcgtctccactttcaccctggtactgagaggttgagcacaaaattggtaaccaatgctgcgcttccagcaaattttcccaccagcacccaatcctgggatatttattctctttgtctcacatcctacaggaacgcagtcgcggggtatatccccctgaaaaccgtacgttgccaaataatgatttctttggattagagaactacaactcccctgggtcctgagccggtatttcccttttgcggctgcaccgtagttaaaaacaaagctaagtgttctgggacgtatagttctagcgttccttgggtcccgctggcgagcgtgggctttctgcagctcgcaaccggcctcgtgctttgcggacggttcactgcgcttggaaagggattggcctggggtacatcatctaaagatcctaggattgctgcaggtcagcagtctccactggaaaaaaagatcttgaatctaggtggtgtgcatacaacagcagcaagacagttgataatgcagaaatatcaggaggagtgtgaaatactctgtagggagcaagctgtttctcttgactactggcttgccaaagcagagtcttattataataaaataatagtggaaatgatgaaagaagagacaggcaatgaaatctagaaaaaaatggaggagaaaacaacccagagcgtagaaggactaaaacagtactgtttggtacctgagagagagatgaaacacatagaaaggcacatacatcaaacaggaaaggctggagaatttaagaacaaaccatttagacaagtactacaaccccccaatgaaacaaaattaccaaaaattatgccagaagggcatggcatccagaacgcacagagaagaaagcaggtaaatgagagggaacagatgcagactaaggatcaccaggaacgcatgattcgagggagagaacttgcagaacaaagactcaaggagagaatcttgagaagaagccagagccagctacttacatatgagaagcatgagagagtaaaagagataaaggagtttgaaagagttattgcgtatcttcttttccaaccatgcagtagaagtcggattaaacatgtatttcaagtcctctgatgaatcatgtgatctactagaccctgaagatacagtgaagagcaaaagtaagatgctggcaatttgatgtttgcactgtcatgaaggagatgcacatttagcagaacttacaaagagaaatataaaattactgctgagctaagtgtggtgaagaaaagttcatggtaccatgaaagcagataaccaggagatctaacaggtccactaccactattctcaataatacctaaaagaaataataagatatggcatttataaatgatgaataggattttataaaattatatacaatcagagaaccaaaaagcactcttggaaatcaaaaagtgatcatttaaataagtatttcaatagatcacttggaagagtaaatttgtactaccactaaatattaaaaatggaaaaacaatgtcaagaaagacagaaaaactatacgaatactaggctatcagtcaaggatttcctgcaacttaataatacaaattctaaaagaatggaaagatagaaattatttaaaataaaaaaatttctcc

SEQ ID NO: 13357 - protein, 152 aa, Homo sapiens [sequence omitted]

SEQ ID NO: 13358 - DNA, 3293 bp, Homo sapiens
cgaaccgtgtctcgggagcgttagagatggagactaacgtcttccaagggagattgcgtctccactttcaccctggtactgagaggttgagcacaaaattgattggcctggggtacatcatctaaagatcctaggattgctgcaggtcagcagtctccactggaaaaaaagatcttgaatctaggtggtgtgcatacaacagcagcaagacagttgataatgcagaaatatcaggaggagtgtgaaatactctgtagggagcaagctgtttctcttgactactggcttgccaaagcagagtcttattataataaaataatagtggaaatgatgaaagaagagacaggcaatgaaatctagaaaaaaatggaggagaaaacaacccagagcgtagaaggactaaaacagtactgtttggtacctgagagagagatgaaacacatagaaaggcacatacatcaaacaggaaaggctggagaatttaagaacaaaccatttagacaagtactacaaccccccaatgaaacaaaattaccaaaaattatgccagaagggcatggcatccagaacgcacagagaagaaagcaggtaaatgagagggaacagatgcagactaaggatcaccaggaacgcatgattcgagggagagaacttgcagaacaaagactcaaggagagaatcttgagaagaagccagagccagctacttacatatgagaagcatgagagagtaaaagagataaaggagtttgaaagagttattgcgtatcttcttttccaaccatgcagtagaagtcggattaaagtgagtattcttatggataagtctcagaatggagagaaggtgaatacaattgtgaaaccatatcaaagaaaattcttggcaatgccaccctttttaagaagtcaaataggaaaaataagagattaaagtttcaatgctgttatgataaaatcatatctcttaagtgaacccttttttttttcaaatgctcgttctctccagggttcagtgaatattcccatttgtatcagatacagatagatagttctgcacttgaaaattagcttaacttttttagttgacttgcatttgttcaagttgcatatcctttctagtgttcagtgtcctcatctttaaaatggcaataatatttgatggcatttatggaaggactgttttttttgtgaagtgtaggtatgtattagttgtttcataaatgttagtttccccacttggaaagaccggggttgggcaatggtggtgaataaagaattgttctaatcttcttctcttattctccctgttcccagccctccaaggttattttgatgagattgctatagtttagtatatggtctttaatatcataccttcatcagataactactagccagcccctaaaagtgtaacttgctctgtacaatttatttgaatgagaaacttaattttgagagcctcctacatgctaggcattatgttagttactgaaggtgaataaagagaagtctctgcccttgaataattttcaactaatggcatagatcactctataaacagataatgtagtaaataaaggttacaatagaaaggtacagggtgctttacaaaggacggattctaacctggcccaggtgagcagggtgaaaaggaggaaggttagggaagggagtattatagtctgtcatgtttcttccagctttttttgtcacttcctatcacccacttaagcaagaccttcctaatgcttggatccactcagggataatcaaactcagcctttctcaaactcatgtttttggcgctcattgataaatcagaaagcaaatttataaatttagtgagaattacagttgtcaagcagaatgaaatttgtgttttctagtcagtttattttcttcccagataccagaaagttgggaaagcaggggttcagagttggtaagcagagaagcaaataaatggaaatagatgccctcaggaatattatgcttaagttgtgataattctgatgcccaccttgctttactagcagaacaccctttaccctggatactgctaggtcagccactgatacaaatgttctgtgtctgtgctcctcagtacagtagcccttgctacacgtggctgttgaggcatttaaaatgtggctggtgcagctgtggaatggaatgtttaattgaatttcatttaaatttaaattgccacatgtggcaagtgactaccctgttgcacagtgtagcactggataaacataacttctgtgttctagattccagtcccaccattagctttctgtttttgacagtgtttgctggtatgataggtcactgttcattttacattactatcagtttagtttcctttgcatttcagaggctccctaatcccttaaagagatttaaaaatcaatgtagaccacttctgtgtgaaaataagatgactgaatttgctttgattggaattaggaactgacctctctttgctagttctggaatttggccaggatgcacatcaaaatctcattcctaccctcctgatttgcctcatggaaacttcgttgctgtgtctgttctctggtcctctattgctatgtctcagctttagattctatgttttgcatagaaatggatcatcagaatgcaacaggcagaagacttagaagtgcaaatcagtagggtaatgacaagccctttgagctgagtgggactgaaaagtaacctaacatataacctattagtaattgtttaccatgaaggttttcagtgctggacacataaattgctgagttcaactgccctctttcccctccaaatctagcataaaagcaactggtgctctcagggcaatttcacacctaatacggctaagaataaaagtctatgtttcaggaactcagtttgtccaaacctgcatccatcatctacctcaaattatatccaccttttcatttctttgcactgtgtctgcttaaatcttgagtcacacttaatgttttttttttggtcttttttctttttaatgtgaaatagaatatacaatacacaaatgaaaatgtatatttagaagaacaataataaatgtccaggtgcccgttgctcagactgagaaatggaacattactacatcccaggagcctcgtatgctctcattcatatctctctcccctgcagccagaggcaaccactatcctgaattttgtataactgtcacctagcttttatagattttactgtctgtgtatccctaacagttgcttatttatagcctttatataaatagaattatactgt

SEQ ID NO: 13359 - protein, 32 aa, Homo sapiens
METNVFQGRLRLHFHPGTERLSTKLIGLGYII

SEQ ID NO: 13360 - DNA, 3649 bp, Homo sapiens
tatatccccctgaaaaccgtacgttgccaaataatgatttctttggattagagaactacaactcccctgggtcctgagccggtatttcccttttgcggctgcaccgtagttaaaaacaaagctaagtgttctgggacgtatagttctagcgttccttgggtcccgctggcgagcgtgggctttctgcagctcgcaaccggcctcgtgctttgcggacggttcactgcgcttggaaaggggtgagtcggctttttgagggacagcaagtggtgagagtgaaggcccgaggaatgcttagtcccacgggacgaaaggaagcagggatgaagtggtacacttgagaaggggttcaggactttggaggtggtggaacagaggagcttggggcttcctctccttcgactcctgccagataagtgaggctagcagtagtcaagaaagctcattaagtaggatttcataagacttaggtcgagtttggcttttagttgtgcctgccgcctatcgaactcttaattcattatgtcatccgttaagtggacagctgacatttccctgatcttttataaaacatgagaataagtatctttgggaaatctttctattttcattaatctgtaacttatattccaagtagaaactttccctgaaggggcagcttgtagttgtttactagtttcctgctagccctcccaccaccatccactctgatagctgtgctaagttcattcatataaaagttctggagccatcactgttttctcctatgaaggacacaagctgtagtcttttcgctgggagaggctcccatctgcctttctctgtaataatggagagaacgccatagtgaaagggttaaaactcagcaaactgctgaagagtgacaagccctatcatttaactgtgaaattgcttgttattctgtcttacaaagggagacgtgttgttgagctgattgtcgtagacagtttttattctcacttatctgtgtgtctcctttgaaaatggaacttgaaattctaccctcctcagttttctgtttttaatttgaaaaacagccaacatcccctgtgaattgcagtaaaggaacaaagcattaaaaggcatatccttttcccaacaaaagctcacagtctaatcagtaaagatttattgagcaactatgccaggttttgagctgaggctgagcctgcaaagttgaaatctgtgttctctgacctcaaggaacatgaatgaataattagaatataataaaactgtgctagtaggtacaaaatgtgagagcccagaacatgcatataaaggaaacatatctgtaaacttcaaggaagactgggaaatggcttaataaaaatagatacaatgttatggcagatatttaaaaaagatgctcagatattatgtgtcaaggatcatcagcaatcagcaaatcattaattttgagaacttgggatcacagactctaatgttaagtattgtgctagaagccatgtacagagaagtaaaagtaagatgatcatacgtttacaatctcaaaataagcttacgtagacaaataagaatgttcctaagaggtcagtgagaccaaatatttgatatcagatcctttccaacaatatagaggcatcatatttgtagatataaattacagttttcattccttatgagcctaaatttcagcatcaaaatgttaaaagtgatatgtgaatacagatatcacagtgtaaaccacgattaattttcaaatgagttgtagaattaaaatatgtcaagtatttagaggaagggaagatcactgacagagtagactggaaagactttataatcaggagcttgacctgtgaaggacagatagatagaatttattgagaacttaccaagctctttacatctaattcatatttgttctttataaccctgagaggcagatttttgtcttacatctccattttatagatgagaaagctgacagaagttacttgccctgagtcacacacctaggaagtggtagaattagatttcagatctagctctgtcagactgtaaagaccatcctttgaactctaaatggtataaaagacatacagaggaaatgccaggcatcctcagtggcttaaatacgacatcacagtaaactcaggctagaccagggatgacacataaaagatgatagttttcatttgtgttgccatcagcctcctctataaataaacccagagtaaccacaaattgccatcctgaggggttcaacagggaatagtctcataatggatttagagtgaaggatgattggcattgttagtcaggcaagcagagggctgagcagtcaaataacagaatttcagaacaaaagattagagggcagaaatgctgtatgtgctgatagagtcagagagggcccggatcaagaaactgcaggaagagaaaactagaaacctagaatcgtctagaaaactagaacctacaatcgtctcagaacacaaaggaggcttgaggactgagcagactgacatagatgtacttggacaacacctcaccaaggagcatgtctcttcccactcacaatccccaatacgagattcacagtggttcacgctgagtccacaggaaaaattggcctggggtacatcatctaaagatcctaggattgctgcaggtcagcagtctccactggaaaaaaagatcttgaatctaggtggtgtgcatacaacagcagcaagacagttgataatgcagaaatatcaggaggagtgtgaaatactctgtagggagcaagctgtttctcttgactactggcttgccaaagcagagtcttattataataaaataatagtggaaatgatgaaagaagagacaggcaatgaaatctagaaaaaaatggaggagaaaacaacccagagcgtagaaggactaaaacagtactgtttggtacctgagagagagatgaaacacatagaaaggcacatacatcaaacaggaaaggctggagaatttaagaacaaaccatttagacaagtactacaaccccccaatgaaacaaaattaccaaaaattatgccagaagggcatggcatccagaacgcacagagaagaaagcaggtaaatgagagggaacagatgcagactaaggatcaccaggaacgcatgattcgagggagagaacttgcagaacaaagactcaaggagagaatcttgagaagaagccagagccagctacttacatatgagaagcatgagagagtaaaagagataaaggagtttgaaagagttattgcgtatcttcttttccaaccatgcagtagaagtcggattaaagtgagtattcttatggataagtctcagaatggagagaaggtgaatacaattgtgaaaccatatcaaagaaaattcttggcaatgccaccctttttaagaagtcaaataggaaaaataagagattaaagtttcaatgctgttatgataaaatcatatctcttaagtgaacccttttttttttcaaatgctcgttctctccagggttcagtgaatattcccatttgtatcagatacagatagatagttctgcacttgaaaattagcttaacttttttagttgacttgcatttgttcaagttgcatatcctttctagtgttcagtgtcctcatcttt

SEQ ID NO: 13361 - protein, 167 aa, Homo sapiens [sequence omitted]

SEQ ID NO: 13362 - DNA, 1209 bp, Homo sapiens
caacagggaatagtctcataatggatttagagtgaaggatgattggcattgttagtcaggcaagcagagggctgagcagtcaaataacagaatttcagaacaaaagattagagggcagaaatgctgtatgtgctgatagagtcagagagggcccggatcaagaaactgcaggaagagaaaactagaaacctagaatcgtctagaaaactagaacctacaatcgtctcagaacacaaaggaggcttgaggactgagcagactgacatagatgtacttggacaacacctcaccaaggagcatgtctcttcccactcacaatccccaatacgagattcacagtggttcacgctgagtccacaggaaaaattggcctggggtacatcatctaaagatcctaggattgctgcaggtcagcagtctccactggaaaaaaagatcttgaatctaggtggtgtgcatacaacagcagcaagacagttgataatgcagaaatatcaggaggagtgtgaaatactctgtagggagcaagctgtttctcttgactactggcttgccaaagcagagtcttattataataaaataatagtggaaatgatgaaagaagagacaggcaatgaaatctagaaaaaaatggaggagaaaacaacccagagcgtagaaggactaaaacagtactgtttggtacctgagagagagatgaaacacatagaaaggcacatacatcaaacaggaaaggctggagaatttaagaacaaaccatttagacaagtactacaaccccccaatgaaacaaaattaccaaaaattatgccagaagggcatggcatccagaacgcacagagaagaaagcaggtaaatgagagggaacagatgcagactaaggatcaccaggaacgcatgattcgagggagagaacttgcagaacaaagactcaaggagagaatcttgagaagaagccagagccagctacttacatatgagaagcatgagagagtaaaagagataaaggagtttgaaagagttattgcgtatcttcttttccaaccatgcagtagaagtcggattaaagtgagtattcttatggataagtctcagaatggagagaaggtgaatacaattgtgaaaccatatcaaagaaaattcttggcaatgccaccctttttaagaagtcaaataggaaaaataagagattaaagtttcaatgctgtt

SEQ ID NO: 13363 - protein, 167 aa, Homo sapiens [sequence omitted]

SEQ ID NO: 13364 - DNA, 3670 bp, Homo sapiens
gtcttttataccatttagagttcaaaggatggtctttacagtctgacagagctagatctgaaatctaattctaccacttcctaggtgtgtgactcagggcaagtaacttctgtcagctttctcatctataaaatggagatgtaagacaaaaatctgcctctcagggttataaagaacaaatatgaattagatgtaaagagcttggtaagttctcaataaattctatctatctgtccttcacaggtcaagctcctgattataaagtctttccagtctactctgtcagtgatcttcccttcctctaaatacttgacatattttaattctacaactcatttgaaaattaatcgtggtttacactgtgatatctgtattcacatatcacttttaacattttgatgctgaaatttaggctcataaggaatgaaaactgtaatttatatctacaaatatgatgcctctatattgttggaaaggatctgatatcaaatatttggtctcactgacctcttaggaacattcttatttgtctacgtaagcttattttgagattgtaaacgtatgatcatcttacttttacttctctgtacatggcttctagcacaatacttaacattagagtctgtgatcccaagttctcaaaattaatgatttgctgattgctgatgatccttgacacataatatctgagcatcttttttaaatatctgccataacattgtatctatttttattaagccatttcccagtcttccttgaagtttacagatatgtttcctttatatgcatgttctgggctctcacattttgtacctactagcacagttttattatattctaattattcattcatgttccttgaggtcagagaacacagatttcaactttgcaggctcagcctcagctcaaaacctggcatagttgctcaataaatctttactgattagactgtgagcttttgttgggaaaaggatatgccttttaatgctttgttcctttactgcaattcacaggggatgttggctgtttttcaaattaaaaacagaaaactgaggagggtagaatttcaagttccattttcaaaggagacacacagataagtgagaataaaaactgtctacgacaatcagctcaacaacacgtctccctttgtaagacagaataacaagcaatttcacagttaaatgatagggcttgtcactcttcagcagtttgctgagttttaaccctttcactatggcgttctctccattattacagagaaaggcagatgggagcctctcccagcgaaaagactacagcttgtgtccttcataggagaaaacagtgatggctccagaacttttatatgaatgaacttagcacagctatcagagtggatggtggtgggagggctagcaggaaactagtaaacaactacaagctgccccttcagggaaagtttctacttggaatataagttacagattaatgaaaatagaaagatttcccaaagatacttattctcatgttttataaaagatcagggaaatgtcagctgtccacttaacggatgacataatgaattaagagttcgataggcggcaggcacaactaaaagccaaactcgacctaagtcttatgaaatcctacttaatgagctttcttgactactgctagcctcacttatctggcaggagtcgaaggagaggaagccccaagctcctctgttccaccacctccaaagtcctgaaccccttctcaagtgtaccacttcatccctgcttcctttcgtcccgtgggactaagcattcctcgggccttcactctcaccacttgctgtccctcaaaaagccgactcacccctttccaagcgcagtgaaccgtccgcaaagcacgaggccggttgcgagctgcagaaagcccacgctcgccagcgggacccaaggaacgctagaactatacgtcccagaacacttagctttgtttttaactacggtgcagccgcaaaagggaaataccggctcaggacccaggggagttgtagttctctaatccaaagaaatcattatttggcaacgtacggttttcagggggatataccccgcgactgcgttcctgtaggatgtgagacaaagagaataaatatcccaggattgggtgctggtgggaaaatttgctggaagcgcagcattggttaccaattttgtgctcaacctctcagtaccagggtgaaagtggagacgcaatctcccttggaagacgttagtctccatctctaacgctcccgagacacggttcgcaattaattatgacgtcacagccaatcgtcaacgcgaaagcctgacgctctagccggctctatctcgctgccccgccgcgggcgcagagctggcgctctagcccacggagttggttaactcctctcaccggcccctggaaagggttccaagtcctttagtacccgacgctgtctgggaattccgggcgtttcggctccttggtcgcagaggcaggaggcgtgcgtggcaggagggttcgggttatatactcctaggtcctgggacagaatagttacgacctctgggacaggaactcttctctcttttgttaataaacttccaactccctcctcagacccgaccgcatgtctgtcatggacctcgccaatacttgctccagctttcagtcggacctggatttctgttcagattgcggctcggtcctgcctctgcccggggctcaggatacggtcacctgtattcgctgtggcttcaacatcaacgttcggggtgagaggcttgtacgcaggggtcctggcggagggcgcagggtcggaagcttggggaactcaagatcggttgggttgaggaggggatcctagagcaggacatcaggcggttgtacatttggtctagcgatgaaaactgagggaaaggatgtagggcctcctggcctaaccagccaggggaaaggggaggtttccggtgtcagctctctctggttgtctccataaccagttcttacttgcctgtgcagactttgaggggaaggttgtgaagacttcggttgtgttccaccaactggggacagccatgcctatgtcggtggaggaagggcctgagtgccagggacctgtggtaagctaatgagatcaagaactggctccataaggtgggtaggaaagaaatggaggagtgattgcaaagctctggagagttttgtgcccaattccaagagggaaaagagatgtaaaccatcgacgtttgagaggcgtgatcgcctgattcctgtgggaagtaaggggatatgaccaggcctccctaacccaccagtttcttcccaggttgacaggcgctgccctcgatgtggtcatgaaggaatggcataccacaccagacagatgcgttcagccgatgaagggcaaactgtcttctacacctgtaccaactgcaagttccaggagaaggaagactcttgacctttttcctgggcaactctacagtccctccctcctttcggaaggtgaaggatactgggtttttagatgccttgtccatcctgtctggttgcaatgttttgctcccagaagagaatcagatcatcatgtggggattaccattgttcctggagtactcctacccttagttgaatttccttattaaagttatatttttctataagaccctga

SEQ ID NO: 13365 - protein, 96 aa, Homo sapiens
MKEWHTTPDRCVQPMKGKLSSTPVPTASSRRRKTLDLFPGQLYSPSLLSEGEGYWVFRCLVHPVWLQCFAPRRESDHHVGITIVPGVLLPLVEFPY

SEQ ID NO: 13366 - DNA, 249 bp, Homo sapiens
aattctaccacttcctaggtgtgtgactcagggcaagtaacttctgtcagctttctcatctataaaatggagatgtaagacaaaaatctgcctctcagggttataaagaacaaatatgaattagatgtaaagagcttggggatgttggctgtttttcaaattaaaaacagaaaactgaggagggtagaatttcaagttccattttcaaaggagacacacagataagtgagaataaaaactgtctacgac

SEQ ID NO: 13367 - DNA, 864 bp, Homo sapiens
gccgcgggcgcagagctggcgctctagcccacggagttggttaactcctctcaccggcccctggaaagggttccaagtcctttagtacccgacgctgtctgggaattccgggcgtttcggctccttggtcgcagaggcaggaggcgtgcgtggcaggagggttcgggttatatactcctaggtcctgggacagaatagttacgacctctgggacaggaactcttctctcttttgttaataaacttccaactccctcctcagacccgaccgcatgtctgtcatggacctcgccaatacttgctccagctttcagtcggacctggatttctgttcagattgcggctcggtcctgcctctgcccggggctcaggatacggtcacctgtattcgctgtggcttcaacatcaacgttcgggactttgaggggaaggttgtgaagacttcggttgtgttccaccaactggggacagccatgcctatgtcggtggaggaagggcctgagtgccagggacctgtggttgacaggcgctgccctcgatgtggtcatgaaggaatggcataccacaccagacagatgcgttcagccgatgaagggcaaactgtcttctacacctgtaccaactgcaagttccaggagaaggaagactcttgacctttttcctgggcaactctacagtccctccctcctttcggaaggtgaaggatactgggtttttagatgccttgtccatcctgtctggttgcaatgttttgctcccagaagagaatcagatcatcatgtggggattaccattgttcctggagtactcctacccttagttgaatttccttattaaagttatatttttctataagaccctgaca

SEQ ID NO: 13368 - protein, 126 aa, Homo sapiens; identical to SEQ ID NO: 1385

SEQ ID NO: 13369 - DNA, 745 bp, Homo sapiens
gcgggcgcagagctggcgctctagcccacggagttggttaactcctctcaccggcccctggaaagggttccaagtcctttagtacccgacgctgtctgggaattccgggcgtttcggctccttggtcgcagaggcaggaggcacccgaccgcatgtctgtcatggacctcgccaatacttgctccagctttcagtcggacctggatttctgttcagattgcggctcggtcctgcctctgcccggggctcaggatacggtcacctgtattcgctgtggcttcaacatcaacgttcgggactttgaggggaaggttgtgaagacttcggttgtgttccaccaactggggacagccatgcctatgtcggtggaggaagggcctgagtgccagggacctgtggttgacaggcgctgccctcgatgtggtcatgaaggaatggcataccacaccagacagatgcgttcagccgatgaagggcaaactgtcttctacacctgtaccaactgcaagttccaggagaaggaagactcttgacctttttcctgggcaactctacagtccctccctcctttcggaaggtgaaggatactgggtttttagatgccttgtccatcctgtctggttgcaatgttttgctcccagaagagaatcagatcatcatgtggggattaccattgttcctggagtactcctacccttagttgaatttccttattaaagttatatttttctataagaccctgaca

SEQ ID NO: 13370 - protein, 126 aa, Homo sapiens; identical to SEQ ID NO: 1385

SEQ ID NO: 13371 - DNA, 592 bp, Homo sapiens
ggcccctggaaagggttccaagtcctttagtacccgacgctgtctgggaattccgggcgtttcggctccttggtcgcagaggcaggaggcacccgaccgcatgtctgtcatggacctcgccaatacttgctccagctttcagtcggacctggatttctgttcagattgcggctcggtcctgcctctgcccggggctcaggatacggtcacctgtattcgctgtggcttcaacatcaacgttcggggttgacaggcgctgccctcgatgtggtcatgaaggaatggcataccacaccagacagatgcgttcagccgatgaagggcaaactgtcttctacacctgtaccaactgcaagttccaggagaaggaagactcttgacctttttcctgggcaactctacagtccctccctcctttcggaaggtgaaggatactgggtttttagatgccttgtccatcctgtctggttgcaatgttttgctcccagaagagaatcagatcatcatgtggggattaccattgttcctggagtactcctacccttagttgaatttccttattaaagttatatttttctataagaccctgaca

SEQ ID NO: 13372 - protein, 96 aa, Homo sapiens; identical to SEQ ID NO: 13365

SEQ ID NO: 13373 - DNA, 1649 bp, Homo sapiens
ctacaggcacagggcgaggggtagaaccacatcgcttgactcttaagtgtgtttccaactgctcccacttcccgttttctttagagaaacccagaccaaacaaggaaagggaaataggccacggtagggtcattactattgctccttaagcttcctcgccggtccacctacccagacaaggcaaacggaaatctgcagcaggactcagcttggtgcacacaactccgccctcgccacacccactctgcagcgtctggcccggcaatacccatctgggcgcccctcctgcttcctctaggctgagaaccggagccttaccatcaaacttcggaaacggaagccagagaaaaaggtagaatggacaagtgacactgtggacaatgaacacatgggccgccgctcatccaaatgctgctgtatttatgagaaacctcgggcctttggcgagagctccacggaaagtgatgaggaggaagaagagggctgtggtcatacacactgtgtacgtggccaccgcaaaggacggcgtcgtgcaaccctaggaccgacccccaccacccctccccagcctcctgacccttcccagccccctccagggccaatgcagcactaaatccctctctcctccagcattcctgtgtctgtctggccctaaatgtatccatgtggctacttctccagccccctccttccctctcttctgcctgatagagggaagaggaagaggaggacgaacagagatcctgaaattctgacttgctgctattccagaacccagcctcctgggtttccccagtcctcatttttcctcccaatacccacccttctctctcgagggatctaggcaccttggtcccagtgtcttccttttgttctcactgccaaactgcctgtcctgggatctagttatcttggccctgcactctcaacatgagtagcgaacacttaaattgggttttcaacagtcccagctttcactgccagggtcccagtcagattccaggaatttgcgccctaactttgcttgctaatcctggtttagagctatcccactaaaatatttaatcctaattcttagtccttgcctgtgagatatgaggtcttacaggagacctcagagctcccagcccttctcctcctgctaacccttctcacaccctcaagaggagttagaaaagaggtccttgtcattctcacctcttatggaaaatggaataagaaataatcatatcctttcttcccacccttctcctgttatttaggatttctgacaaagctggcttgagattggtcacttagagccgactgtctcctctgccttttgtttttcagcttcagagacagatccaatatagtcccagggacctgggtctctgggagaggaaggaagagggagggagcaaagagattggggtatgtcccctgtagtacactcttacctcttacttcctagactttgatttctccggcagcccagatgttcagttctcttggcccctctctaccccttactgggatccggttttcattttccggtccttttgccatacacagttacagagatcagtcaaatccataccaccactgagatctcatttattgccacagatgcacaaaataaataacccaaaatcacaaaatgtgttaaa

SEQ ID NO: 13374 - protein, 74 aa, Homo sapiens
MGRRSSKCCCIYEKPRAFGESSTESDEEEEEGCGHTHCVRGHRKGRRRATLGPTPTTPPQPPDPSQPPPGPMQH

SEQ ID NO: 13375 - DNA, 1732 bp, Homo sapiens
cagcgcctgcgcgctgtcacgttacggcggaactaatccagcgacgcctgcgctttgacgcatttggtgccgtggaagggaaaaagggggactgcagtatgcgtcacacccggaagcggcgagccggaagtggggttagccaggttatccccaggggtggagaagcggaggcccaggaggagggggaataaagaaggtggaggatcctggctaccactctgaatccgataccgcttctcttagacctcagcgacagaaaaagggaagggtgtctcatcccccttcctcctctcctccctgtcctgagccttagccatggccgaggcaggggctgggctgagcgagaccgtcactgagacaacggttaccgtgacaaccgagcccgagaaccggagccttaccatcaaacttcggaaacggaagccagagaaaaaggtagaatggacaagtgacactgtggacaatgaacacatgggccgccgctcatccaaatgctgctgtatttatgagaaacctcgggcctttggcgagagctccacggaaagtgatgaggaggaagaagagggctgtggtcatacacactgtgtacgtggccaccgcaaaggacggcgtcgtgcaaccctaggaccgacccccaccacccctccccagcctcctgacccttcccagccccctccagggccaatgcagcactaaatccctctctcctccagcattcctgtgtctgtctggccctaaatgtatccatgtggctacttctccagccccctccttccctctcttctgcctgatagagggaagaggaagaggaggacgaacagagatcctgaaattctgacttgctgctattccagaacccagcctcctgggtttccccagtcctcatttttcctcccaatacccacccttctctctcgagggatctaggcaccttggtcccagtgtcttccttttgttctcactgccaaactgcctgtcctgggatctagttatcttggccctgcactctcaacatgagtagcgaacacttaaattgggttttcaacagtcccagctttcactgccagggtcccagtcagattccaggaatttgcgccctaactttgcttgctaatcctggtttagagctatcccactaaaatatttaatcctaattcttagtccttgcctgtgagatatgaggtcttacaggagacctcagagctcccagcccttctcctcctgctaacccttctcacaccctcaagaggagttagaaaagaggtccttgtcattctcacctcttatggaaaatggaataagaaataatcatatcctttcttcccacccttctcctgttatttaggatttctgacaaagctggcttgagattggtcacttagagccgactgtctcctctgccttttgtttttcagcttcagagacagatccaatatagtcccagggacctgggtctctgggagaggaaggaagagggagggagcaaagagattggggtatgtcccctgtagtacactcttacctcttacttcctagactttgatttctccggcagcccagatgttcagttctcttggcccctctctaccccttactgggatccggttttcattttccggtccttttgccatacacagttacagagatcagtcaaatccataccaccactgagatctcatttattgccacagatgcacaaaataaataacccaaaatcacaaaatgtgttaaa

SEQ ID NO: 13376 - protein, 126 aa, Homo sapiens; identical to SEQ ID NO: 1389

SEQ ID NO: 13377 - DNA, 1572 bp, Homo sapiens
cagcgcctgcgcgctgtcacgttacggcggaactaatccagcgacgcctgcgctttgacgcatttggtgccgtggaagggaaaaagggggactgcagtatgcgtcacacccggaagcggcgagccggaagtggggttagccaggttatccccaggggtggagaagcggaggcccaggaggagggggaataaagaaggtggaggatcctggctaccactctgaatccgataccgcttctcttagacctcagcgacagaaaaagggaagggtgtctcatcccccttcctcctctcctccctgtcctgagccttagccatggccgaggcaggggctgggctgagcgagaccgtcactgagacaacggttaccgtgacaaccgagcccgagaaccggagccttaccatcaaacttcggaaacggaagccagagaaaaaggtagaatggacaagtgacactgtggacaatgaacacatgggccgccgctcatccaaatgctgctgtatttatgagaaacctcggggccaatgcagcactaaatccctctctcctccagcattcctgtgtctgtctggccctaaatgtatccatgtggctacttctccagccccctccttccctctcttctgcctgatagagggaagaggaagaggaggacgaacagagatcctgaaattctgacttgctgctattccagaacccagcctcctgggtttccccagtcctcatttttcctcccaatacccacccttctctctcgagggatctaggcaccttggtcccagtgtcttccttttgttctcactgccaaactgcctgtcctgggatctagttatcttggccctgcactctcaacatgagtagcgaacacttaaattgggttttcaacagtcccagctttcactgccagggtcccagtcagattccaggaatttgcgccctaactttgcttgctaatcctggtttagagctatcccactaaaatatttaatcctaattcttagtccttgcctgtgagatatgaggtcttacaggagacctcagagctcccagcccttctcctcctgctaacccttctcacaccctcaagaggagttagaaaagaggtccttgtcattctcacctcttatggaaaatggaataagaaataatcatatcctttcttcccacccttctcctgttatttaggatttctgacaaagctggcttgagattggtcacttagagccgactgtctcctctgccttttgtttttcagcttcagagacagatccaatatagtcccagggacctgggtctctgggagaggaaggaagagggagggagcaaagagattggggtatgtcccctgtagtacactcttacctcttacttcctagactttgatttctccggcagcccagatgttcagttctcttggcccctctctaccccttactgggatccggttttcattttccggtccttttgccatacacagttacagagatcagtcaaatccataccaccactgagatctcatttattgccacagatgcacaaaataaataacccaaaatcacaaaatgtgttaaa

SEQ ID NO: 13378 - protein, 120 aa, Homo sapiens
MAEAGAGLSETVTETTVTVTTEPENRSLTIKLRKRKPEKKVEWTSDTVDNEHMGRRSSKCCCIYEKPRGQCSTKSLSPPAFLCLSGPKCIHVATSPAPSFPLFCLIEGRGRGGRTEILKF

SEQ ID NO: 13379 - DNA, 1433 bp, Homo sapiens
ggaagcggcgagccggaagtggggttagccaggttatccccaggggtggagaagcggaggcccaggaggagggggaataaagaaggagaaccggagccttaccatcaaacttcggaaacggaagccagagaaaaaggtagaatggacaagtgacactgtggacaatgaacacatgggccgccgctcatccaaatgctgctgtatttatgagaaacctcgggcctttggcgagagctccacggaaagtgatgaggaggaagaagagggctgtggtcatacacactgtgtacgtggccaccgcaaaggacggcgtcgtgcaaccctaggaccgacccccaccacccctccccagcctcctgacccttcccagccccctccagggccaatgcagcactaaatccctctctcctccagcattcctgtgtctgtctggccctaaatgtatccatgtggctacttctccagccccctccttccctctcttctgcctgatagagggaagaggaagaggaggacgaacagagatcctgaaattctgacttgctgctattccagaacccagcctcctgggtttccccagtcctcatttttcctcccaatacccacccttctctctcgagggatctaggcaccttggtcccagtgtcttccttttgttctcactgccaaactgcctgtcctgggatctagttatcttggccctgcactctcaacatgagtagcgaacacttaaattgggttttcaacagtcccagctttcactgccagggtcccagtcagattccaggaatttgcgccctaactttgcttgctaatcctggtttagagctatcccactaaaatatttaatcctaattcttagtccttgcctgtgagatatgaggtcttacaggagacctcagagctcccagcccttctcctcctgctaacccttctcacaccctcaagaggagttagaaaagaggtccttgtcattctcacctcttatggaaaatggaataagaaataatcatatcctttcttcccacccttctcctgttatttaggatttctgacaaagctggcttgagattggtcacttagagccgactgtctcctctgccttttgtttttcagcttcagagacagatccaatatagtcccagggacctgggtctctgggagaggaaggaagagggagggagcaaagagattggggtatgtcccctgtagtacactcttacctcttacttcctagactttgatttctccggcagcccagatgttcagttctcttggcccctctctaccccttactgggatccggttttcattttccggtccttttgccatacacagttacagagatcagtcaaatccataccaccactgagatctcatttattgccacagatgcacaaaataaataacccaaaatcacaaaatgtgttaaa

SEQ ID NO: 13380 - protein, 74 aa, Homo sapiens; identical to SEQ ID NO: 13374

SEQ ID NO: 13381 - DNA, 1691 bp, Homo sapiens
cggcgagccggaagtggggttagccaggttatccccaggggtggagaagcggaggcccaggaggagggggaataaagaaggtggaggatcctggctaccactctgaatccgataccgcttctcttagacctcagcgacagaaaaagggaagggtgtctcatcccccttcctcctctcctccctgtcctgagccttagccatggccgaggcaggggctgggctgagcgagaccgtcactgagacaacggttaccgtgacaaccgagcccgatgatttggggaggaagacggagaaacagcaaggattatattttcctttgaagagttgctgggacctttcctaggagaaccggagccttaccatcaaacttcggaaacggaagccagagaaaaaggtagaatggacaagtgacactgtggacaatgaacacatgggccgccgctcatccaaatgctgctgtatttatgagaaacctcgggcctttggcgagagctccacggaaagtgatgaggaggaagaagagggctgtggtcatacacactgtgtacgtggccaccgcaaaggacggcgtcgtgcaaccctaggaccgacccccaccacccctccccagcctcctgacccttcccagccccctccagggccaatgcagcactaaatccctctctcctccagcattcctgtgtctgtctggccctaaatgtatccatgtggctacttctccagccccctccttccctctcttctgcctgatagagggaagaggaagaggaggacgaacagagatcctgaaattctgacttgctgctattccagaacccagcctcctgggtttccccagtcctcatttttcctcccaatacccacccttctctctcgagggatctaggcaccttggtcccagtgtcttccttttgttctcactgccaaactgcctgtcctgggatctagttatcttggccctgcactctcaacatgagtagcgaacacttaaattgggttttcaacagtcccagctttcactgccagggtcccagtcagattccaggaatttgcgccctaactttgcttgctaatcctggtttagagctatcccactaaaatatttaatcctaattcttagtccttgcctgtgagatatgaggtcttacaggagacctcagagctcccagcccttctcctcctgctaacccttctcacaccctcaagaggagttagaaaagaggtccttgtcattctcacctcttatggaaaatggaataagaaataatcatatcctttcttcccacccttctcctgttatttaggatttctgacaaagctggcttgagattggtcacttagagccgactgtctcctctgccttttgtttttcagcttcagagacagatccaatatagtcccagggacctgggtctctgggagaggaaggaagagggagggagcaaagagattggggtatgtcccctgtagtacactcttacctcttacttcctagactttgatttctccggcagcccagatgttcagttctcttggcccctctctaccccttactgggatccggttttcattttccggtccttttgccatacacagttacagagatcagtcaaatccataccaccactgagatctcatttattgccacagatgcacaaaataaataacccaaaatcacaaaatgtgttaaa

SEQ ID NO: 13382 - protein, 74 aa, Homo sapiens; identical to SEQ ID NO: 13374

SEQ ID NO: 13383 - DNA, 472 bp, Homo sapiens
ggggttagccaggttatccccaggggtggagaagcggaggcccaggaggagggggaataaagaaggtggaggatcctggctaccactctgaatccgataccgcttctcttagacctcagcgacagaaaaagggaagggtgtctcatcccccttcctcctctcctccctgtcctgagccttagccatggccgaggcaggggctgggctgagcgagaccgtcactgagacaacggttaccgtgacaaccgagcccgagaaccggagctcttacctcttacttcctagactttgatttctccggcagcccagatgttcagttctcttggcccctctctaccccttactgggatccggttttcattttccggtccttttgccatacacagttacagagatcagtcaaatccataccaccactgagatctcatttattgccacagatgcacaaaataaataacccaaaatcacaaaa

SEQ ID NO: 13384 - protein, 35 aa, Homo sapiens
MAEAGAGLSETVTETTVTVTTEPENRSSYLLLPRL

SEQ ID NO: 13385 - DNA, 460 bp, Homo sapiens
ggggttagccaggttatccccaggggtggagaagcggaggcccaggaggagggggaataaagaaggtggaggatcctggctaccactctgaatccgataccgcttctcttagacctcagcgacagaaaaagggaagggtgtctcatcccccttcctcctctcctccctgtcctgagccttagccatggccgaggcaggggctgggctgagcgagaccgtcactgagacaacggttaccgtgacaaccgagcccgagaaccggagccttaccatcaaacttcggaaacggaagccagaatgttcagttctcttggcccctctctaccccttactgggatccggttttcattttccggtccttttgccatacacagttacagagatcagtcaaatccataccaccactgagatctcatttattgccacagatgcacaaaataaataacccaaaatcacaaaa

SEQ ID NO: 13386 - protein, 86 aa, Homo sapiens
MAEAGAGLSETVTETTVTVTTEPENRSLTIKLRKRKPECSVLLAPLYPLLGSGFHFPVLLPYTVTEISQIHTTTEISFIATDAQNK

SEQ ID NO: 13387 - DNA, 1258 bp, Homo sapiens
cccaggggtggagaagcggaggcccaggaggaggggaaacctcgggcctttggcgagagctccacggaaagtgatgaggaggaagaagagggctgtggtcatacacactgtgtacgtggccaccgcaaaggacggcgtcgtgcaaccctaggaccgacccccaccacccctccccagcctcctgacccttcccagccccctccagggccaatgcagcactaaatccctctctcctccagcattcctgtgtctgtctggccctaaatgtatccatgtggctacttctccagccccctccttccctctcttctgcctgatagagggaagaggaagaggaggacgaacagagatcctgaaattctgacttgctgctattccagaacccagcctcctgggtttccccagtcctcatttttcctcccaatacccacccttctctctcgagggatctaggcaccttggtcccagtgtcttccttttgttctcactgccaaactgcctgtcctgggatctagttatcttggccctgcactctcaacatgagtagcgaacacttaaattgggttttcaacagtcccagctttcactgccagggtcccagtcagattccaggaatttgcgccctaactttgcttgctaatcctggtttagagctatcccactaaaatatttaatcctaattcttagtccttgcctgtgagatatgaggtcttacaggagacctcagagctcccagcccttctcctcctgctaacccttctcacaccctcaagaggagttagaaaagaggtccttgtcattctcacctcttatggaaaatggaataagaaataatcatatcctttcttcccacccttctcctgttatttaggatttctgacaaagctggcttgagattggtcacttagagccgactgtctcctctgccttttgtttttcagcttcagagacagatccaatatagtcccagggacctgggtctctgggagaggaaggaagagggagggagcaaagagattggggtatgtcccctgtagtacactcttacctcttacttcctagactttgatttctccggcagcccagatgttcagttctcttggcccctctctaccccttactgggatccggttttcattttccggtccttttgccatacacagttacagagatcagtcaaatccataccaccactgagatctcatttattgccacagatgcacaaaataaataacccaaaatcacaaaatgtgttaaa

SEQ ID NO: 13388 - protein, 62 aa, Homo sapiens
MYPCGYFSSPLLPSLLPDRGKRKRRTNRDPEILTCCYSRTQPPGFPQSSFFLPIPTLLSRGI

SEQ ID NO: 13389 - DNA, 2248 bp, Homo sapiens
gggaggggacagggattagaagagttgttggaggagctaggcctagggatatgggaggtgtggggttgaatatctagggctgggagaatcggaaggtattggagctatttggagtggcagagatggtgcaggaggcaggtcaaggaacttgtaatagggaggtacagttaggatataggtgttgctgcttggggtggttatgtgtgtaagtaataaacgaaagggaaattgaggattaaggagccaggaagatgttgggaggaaatcaaaggtagtgtaagaaagcatggttggaggccaacttatcaatattatcaatattgatattcgaataaatatttattgaatggatgaatgtaaaaggaagtggcaggaatgaggaaacaagaaaaggagatgaaaagaggtattttgagaaatcagagagcaaagatgtaaatggagaaacaagaagtatttatccaaaaacatgttaagttgccttcaaagggagaaggttgcattgggcttaatactcttggattaaaggaagtttagtaattaatagattagtaatacttgctactagagatgccaggatgccagagaataggtggataagaggtagggagggctggagcttgagaatgagagaggttttgtttgtttttttaagagaaaaagaataggggatctggaaaaaggaagggagatcaaagattaggtgctggggactgaaaaataattttcatgtattaatactaccaaggatgatttggggaggaagacggagaaacagcaaggattatattttcctttgaagagttgctgggacctttcctaggttaggaattgtgtcttctcttatactggtggtataagaacaggaaataatacttattcctcaagggactatctgaggagaaccggagccttaccatcaaacttcggaaacggaagccagagaaaaaggtagaatggacaagtgacactgtggacaatgaacacatgggccgccgctcatccaaatgctgctgtatttatgagaaacctcgggcctttggcgagagctccacggaaagtgatgaggaggaagaagagggctgtggtcatacacactgtgtacgtggccaccgcaaaggacggcgtcgtgcaaccctaggaccgacccccaccacccctccccagcctcctgacccttcccagccccctccagggccaatgcagcactaaatccctctctcctccagcattcctgtgtctgtctggccctaaatgtatccatgtggctacttctccagccccctccttccctctcttctgcctgatagagggaagaggaagaggaggacgaacagagatcctgaaattctgacttgctgctattccagaacccagcctcctgggtttccccagtcctcatttttcctcccaatacccacccttctctctcgagggatctaggcaccttggtcccagtgtcttccttttgttctcactgccaaactgcctgtcctgggatctagttatcttggccctgcactctcaacatgagtagcgaacacttaaattgggttttcaacagtcccagctttcactgccagggtcccagtcagattccaggaatttgcgccctaactttgcttgctaatcctggtttagagctatcccactaaaatatttaatcctaattcttagtccttgcctgtgagatatgaggtcttacaggagacctcagagctcccagcccttctcctcctgctaacccttctcacaccctcaagaggagttagaaaagaggtccttgtcattctcacctcttatggaaaatggaataagaaataatcatatcctttcttcccacccttctcctgttatttaggatttctgacaaagctggcttgagattggtcacttagagccgactgtctcctctgccttttgtttttcagcttcagagacagatccaatatagtcccagggacctgggtctctgggagaggaaggaagagggagggagcaaagagattggggtatgtcccctgtagtacactcttacctcttacttcctagactttgatttctccggcagcccagatgttcagttctcttggcccctctctaccccttactgggatccggttttcattttccggtccttttgccatacacagttacagagatcagtcaaatccataccaccactgagatctcatttattgccacagatgcacaaaataaataacccaaaatcacaaaatgtgttaaa

SEQ ID NO: 13390 - protein, 74 aa, Homo sapiens; identical to SEQ ID NO: 13374

SEQ ID NO: 13391 - DNA, 1545 bp, Homo sapiens
ggattagaagagttgttggaggagctaggcctagggatatgggaggtgtggggttgaatatctagggctgggagaatcggaaggtattggagctatttggagtggcagagatggtgcaggaggatgatttggggaggaagacggagaaacagcaaggattatattttcctttgaagagttgctgggacctttcctaggagaaccggagccttaccatcaaacttcggaaacggaagccagagaaaaaggtagaatggacaagtgacactgtggacaatgaacacatgggccgccgctcatccaaatgctgctgtatttatgagaaacctcgggcctttggcgagagctccacggaaagtgatgaggaggaagaagagggctgtggtcatacacactgtgtacgtggccaccgcaaaggacggcgtcgtgcaaccctaggaccgacccccaccacccctccccagcctcctgacccttcccagccccctccagggccaatgcagcactaaatccctctctcctccagcattcctgtgtctgtctggccctaaatgtatccatgtggctacttctccagccccctccttccctctcttctgcctgatagagggaagaggaagaggaggacgaacagagatcctgaaattctgacttgctgctattccagaacccagcctcctgggtttccccagtcctcatttttcctcccaatacccacccttctctctcgagggatctaggcaccttggtcccagtgtcttccttttgttctcactgccaaactgcctgtcctgggatctagttatcttggccctgcactctcaacatgagtagcgaacacttaaattgggttttcaacagtcccagctttcactgccagggtcccagtcagattccaggaatttgcgccctaactttgcttgctaatcctggtttagagctatcccactaaaatatttaatcctaattcttagtccttgcctgtgagatatgaggtcttacaggagacctcagagctcccagcccttctcctcctgctaacccttctcacaccctcaagaggagttagaaaagaggtccttgtcattctcacctcttatggaaaatggaataagaaataatcatatcctttcttcccacccttctcctgttatttaggatttctgacaaagctggcttgagattggtcacttagagccgactgtctcctctgccttttgtttttcagcttcagagacagatccaatatagtcccagggacctgggtctctgggagaggaaggaagagggagggagcaaagagattggggtatgtcccctgtagtacactcttacctcttacttcctagactttgatttctccggcagcccagatgttcagttctcttggcccctctctaccccttactgggatccggttttcattttccggtccttttgccatacacagttacagagatcagtcaaatccataccaccactgagatctcatttattgccacagatgcacaaaataaataacccaaaatcacaaaatgtgttaaa

SEQ ID NO: 13392 - protein, 74 aa, Homo sapiens; identical to SEQ ID NO: 13374

SEQ ID NO: 13393 - DNA, 2387 bp, Homo sapiens
agagttgttggaggagctaggcctagggatatgggaggtgtggggttgaatatctagggctgggagaatcggaaggtattggagctatttggagtggcagagatggtgcaggaggcaggtcaaggaacttgtaatagggaggtacagttaggatataggtgttgctgcttggggtggttatgtgtgtaagtaataaacgaaagggaaattgaggattaaggagccaggaagatgttgggaggaaatcaaaggtagtgtaagaaagcatggttggaggccaacttatcaatattatcaatattgatattcgaataaatatttattgaatggatgaatgtaaaaggaagtggcaggaatgaggaaacaagaaaaggagatgaaaagaggtattttgagaaatcagagagcaaagatgtaaatggagaaacaagaagtatttatccaaaaacatgttaagttgccttcaaagggagaaggttgcattgggcttaatactcttggattaaaggaagtttagtaattaatagattagtaatacttgctactagagatgccaggatgccagagaataggtggataagaggtagggagggctggagcttgagaatgagagaggttttgtttgtttttttaagagaaaaagaataggggatctggaaaaaggaagggagatcaaagattaggtgctggggactgaaaaataattttcatgtattaatactaccaaggatgatttggggaggaagacggagaaacagcaaggattatattttcctttgaagagttgctgggacctttcctaggttaggaattgtgtcttctcttatactggtggtataagaacaggaaataatacttattcctcaagggactatctgaggtaaaagacctgttctgttttatcttctgtcagctcctctggtgctatgcctatggtactgattgagctaaagaagaaaagagaggaggttccctgggagggagtgggaaaggttagtaagaggggactagataggtatgctcatccttaaccttctaggagaaccggagccttaccatcaaacttcggaaacggaagccagagaaaaaggtagaatggacaagtgacactgtggacaatgaacacatgggccgccgctcatccaaatgctgctgtatttatgagaaacctcgggcctttggcgagagctccacggaaagtgatgaggaggaagaagagggctgtggtcatacacactgtgtacgtggccaccgcaaaggacggcgtcgtgcaaccctaggaccgacccccaccacccctccccagcctcctgacccttcccagccccctccagggccaatgcagcactaaatccctctctcctccagcattcctgtgtctgtctggccctaaatgtatccatgtggctacttctccagccccctccttccctctcttctgcctgatagagggaagaggaagaggaggacgaacagagatcctgaaattctgacttgctgctattccagaacccagcctcctgggtttccccagtcctcatttttcctcccaatacccacccttctctctcgagggatctaggcaccttggtcccagtgtcttccttttgttctcactgccaaactgcctgtcctgggatctagttatcttggccctgcactctcaacatgagtagcgaacacttaaattgggttttcaacagtcccagctttcactgccagggtcccagtcagattccaggaatttgcgccctaactttgcttgctaatcctggtttagagctatcccactaaaatatttaatcctaattcttagtccttgcctgtgagatatgaggtcttacaggagacctcagagctcccagcccttctcctcctgctaacccttctcacaccctcaagaggagttagaaaagaggtccttgtcattctcacctcttatggaaaatggaataagaaataatcatatcctttcttcccacccttctcctgttatttaggatttctgacaaagctggcttgagattggtcacttagagccgactgtctcctctgccttttgtttttcagcttcagagacagatccaatatagtcccagggacctgggtctctgggagaggaaggaagagggagggagcaaagagattggggtatgtcccctgtagtacactcttacctcttacttcctagactttgatttctccggcagcccagatgttcagttctcttggcccctctctaccccttactgggatccggttttcattttccggtccttttgccatacacagttacagagatcagtcaaatccataccaccactgagatctcatttattgccacagatgcacaaaataaataacccaaaatcacaaaatgtgttaaa

SEQ ID NO: 13394 - protein, 74 aa, Homo sapiens; identical to SEQ ID NO: 13374

SEQ ID NO: 13395 - DNA, 1473 bp, Homo sapiens
gggatatgggaggtgtggggttgaatatctagggctgggagaatcggaaggatgatttggggaggaagacggagaaacagcaaggattatattttcctttgaagagttgctgggacctttcctaggagaaccggagccttaccatcaaacttcggaaacggaagccagagaaaaaggtagaatggacaagtgacactgtggacaatgaacacatgggccgccgctcatccaaatgctgctgtatttatgagaaacctcgggcctttggcgagagctccacggaaagtgatgaggaggaagaagagggctgtggtcatacacactgtgtacgtggccaccgcaaaggacggcgtcgtgcaaccctaggaccgacccccaccacccctccccagcctcctgacccttcccagccccctccagggccaatgcagcactaaatccctctctcctccagcattcctgtgtctgtctggccctaaatgtatccatgtggctacttctccagccccctccttccctctcttctgcctgatagagggaagaggaagaggaggacgaacagagatcctgaaattctgacttgctgctattccagaacccagcctcctgggtttccccagtcctcatttttcctcccaatacccacccttctctctcgagggatctaggcaccttggtcccagtgtcttccttttgttctcactgccaaactgcctgtcctgggatctagttatcttggccctgcactctcaacatgagtagcgaacacttaaattgggttttcaacagtcccagctttcactgccagggtcccagtcagattccaggaatttgcgccctaactttgcttgctaatcctggtttagagctatcccactaaaatatttaatcctaattcttagtccttgcctgtgagatatgaggtcttacaggagacctcagagctcccagcccttctcctcctgctaacccttctcacaccctcaagaggagttagaaaagaggtccttgtcattctcacctcttatggaaaatggaataagaaataatcatatcctttcttcccacccttctcctgttatttaggatttctgacaaagctggcttgagattggtcacttagagccgactgtctcctctgccttttgtttttcagcttcagagacagatccaatatagtcccagggacctgggtctctgggagaggaaggaagagggagggagcaaagagattggggtatgtcccctgtagtacactcttacctcttacttcctagactttgatttctccggcagcccagatgttcagttctcttggcccctctctaccccttactgggatccggttttcattttccggtccttttgccatacacagttacagagatcagtcaaatccataccaccactgagatctcatttattgccacagatgcacaaaataaataacccaaaatcacaaaatgtgttaaa

SEQ ID NO: 13396 - protein, 74 aa, Homo sapiens; identical to SEQ ID NO: 13374

SEQ ID NO: 13397 - DNA, 512 bp, Homo sapiens
gcctgagtcccagagggtgggcctggggaagctggatcctggaaggtaggagaaaataggaattctcacctcttatggaaaatggaataagaaataatcatatcctttcttcccacccttctcctgttatttaggatttctgacaaagctggcttgagattggtcacttagagccgactgtctcctctgccttttgtttttcagcttcagagacagatccaatatagtcccagggacctgggtctctgggagaggaaggaagagggagggagcaaagagattggggtatgtcccctgtagtacactcttacctcttacttcctagactttgatttctccggcagcccagatgttcagttctcttggcccctctctaccccttactgggatccggttttcattttccggtccttttgccatacacagttacagagatcagtcaaatccataccaccactgagatctcatttattgccacagatgcacaaaataaataacccaaaatcacaaaa

SEQ ID NO: 13398 - protein, 36 aa, Homo sapiens
MFSSLGPSLPLTGIRFSFSGPFAIHSYRDQSNPYHH

SEQ ID NO: 13399 - DNA, 2482 bp, Homo sapiens
ggcgttacgcaaggcctggtgtttacctcccgtgggagcctcctccctccctataaagcctgatgtggtggagagatttgacgagactgagactctggttgaagagagaggcaatcccaggagaggggcggaaagcggcaaaagttaatgcgggagtcggagagaagggcatctacacagcaagcagcaggggcggcccgccatctgcgcgctcgaaggcggtcacggtggtcgcggaaggggcggcgtccagatcctggctttccatggatgcgcccgagctgggcccggggctggtggagcgtctggagcagctggcgacgtgtcctctgtgcgggggctccttcgaggacccggtgcttctggcgtgcgagcacagcttctgccgcgcgtgtctggcccgccgctgggggactccgccggcgaccggcaccgaggcttcccccaccgcctgtccctgctgcggcctgccgtgtccccgccgcagcctgaggtctaatgtgcggctggcggtggaggtgcgaatcagccgcgagagctgctttttgggggtggaattccccactcatttctgggaacacattcacacgcccattgcaggagtattaatagcaacccacattttcgccccaaaataatgagacctcacctggtctccacgtttccacgtccctgctcaaaaccaaatccattcctgccttctggctctcagaatcttctctcccctacagctactacagtacttcctgacttctcccattcaaaccattctaggcctgcaatggggaacaggccctccccatcagtattggtaaagtgaccatgattcctacatagaggctctgctggtcaaatacttgactcccactcttgccactcctagctccagaagggctcagggccttccccacagatctaaggactgggctaccctgcctgtccactgaggtttctcctaaaacaagaggcttgactctggtctgggccctgtggccctctgggaagctttgtacctcttttgcaggatctgggggtggggagggacaagctagttccccaacctcctatgactgctttctatgctcacagccttttttccataagaaccttcttgaaacttctccccgcacatactcacggaaaggaaccaatggtgctatttcccctctctcctcctcaacctgggaatacttcagacatctccaaactcatccttgtgtatagtctcacacccttccccataagtataaatgggcccatatttaacacattttgtgattttgggttatttattttgtgcatctgtggcaataaatgagatctcagtggtggtatggatttgactgatctctgtaactgtgtatggcaaaaggaccggaaaatgaaaaccggatcccagtaaggggtagagaggggccaagagaactgaacatctgggctgccggagaaatcaaagtctaggaagtaagaggtaagagtgtactacaggggacataccccaatctctttgctccctccctcttccttcctctcccagagacccaggtccctgggactatattggatctgtctctgaagctgaaaaacaaaaggcagaggagacagtcggctctaagtgaccaatctcaagccagctttgtcagaaatcctaaataacaggagaagggtgggaagaaaggatatgattatttcttattccattttccataagaggtgagaatgacaaggacctcttttctaactcctcttgagggtgtgagaagggttagcaggaggagaagggctgggagctctgaggtctcctgtaagacctcatatctcacaggcaaggactaagaattaggattaaatattttagtgggatagctctaaaccaggattagcaagcaaagttagggcgcaaattcctggaatctgactgggaccctggcagtgaaagctgggactgttgaaaacccaatttaagtgttcgctactcatgttgagagtgcagggccaagataactagatcccaggacaggcagtttggcagtgagaacaaaaggaagacactgggaccaaggtgcctagatccctcgagagagaagggtgggtattgggaggaaaaatgaggactggggaaacccaggaggctgggttctggaatagcagcaagtcagaatttcaggatctctgttcgtcctcctcttcctcttccctctatcaggcagaagagagggaaggagggggctggagaagtagccacatggatacatttagggccagacagacacaggaatgctggaggagagagggatttagtgctgcattggccctggagggggctgggaagggtcaggaggctggggaggggtggtgggggtcggtcctagggttgcacgacgccgtcctttgcggtggccacgtacacagtgtgtatgaccacagccctcttcttcctcctcatcactttccgtggagctctcgccaaaggcccgaggtt

SEQ ID NO: 13400 - protein, 191 aa, Homo sapiens
MWWRDLTRLRLWLKREAIPGEGRKAAKVNAGVGEKGIYTASSRGGPPSARSKAVTVVAEGAASRSWLSMDAPELGPGLVERLEQLATCPLCGGSFEDPVLLACEHSFCRACLARRWGTPPATGTEASPTACPCCGLPCPRRSLRSNVRLAVEVRISRESCFLGVEFPTHFWEHIHTPIAGVLIATHIFAPK

SEQ ID NO: 13401 - DNA, 3350 bp, Homo sapiens
cccaaaccttacccgggaagcaggagaaccagatgaggcgttacgcaaggcctggtgtttacctcccgtgggagcctcctccctccctataaagcctgatgtggtggagagatttgacgagactgagactctggttgaagagagaggcaatcccaggagaggggcggaaagcggcaaaagttaatgcgggagtcggagagaagggcatctacacagcaagcagcaggggcggcccgccatctgcgcgctcgaaggcggtcacggtggtcgcggaaggggcggcgtccagatcctggctttccatggatgcgcccgagctgggcccggggctggtggagcgtctggagcagctggcgacgtgtcctctgtgcgggggctccttcgaggacccggtgcttctggcgtgcgagcacagcttctgccgcgcgtgtctggcccgccgctgggggactccgccggcgaccggcaccgaggcttcccccaccgcctgtccctgctgcggcctgccgtgtccccgccgcagcctgaggtctaatgtgcggctggcggtggaggtgcgaatcagccgcgagctgcgagagaagctggctgagcctggggcccgtgcggggagacgccgaggggggcgcatccccaccatgggctgcctggacctgcccggagaggatatgaggaagacatggagacgatttgaagtcccaacatccaagtcatctaattcagaggatgatctccctgaagattatccagtggtcaaaaaaatgcttcatagactgacagccgacctgaccctggaccctgggaccgcacaccgccgcctgctcatctccgccgaccgccgcagcgtacaactggccccaccagggacgcccgcgccccctgacggccccaagcgcttcgatcagctcccagctgtgctgggtgcgcagggcttcggggccggccgccactgctgggaggtggagactgcggacgccgcctcctgcagagactcttctggggaggatgcggacgacgaggagagccactatgcagtgggcgcggccggggaatcagtgcaacgcaagggctgcgtaaggctgtgccctgcgggggccgtgtgggccgtggagggccgcggcggccgcctgtgggccctcacggcacccgaacccaccctgctgggcggtgttgagcccccgccgcggcgcattcgcgtggacctggactgggagcggggccgcgtggccttctacgacggccgctcactcgacctgctttacgccttccaggcgcctggccccctgggggagcgcatcttcccgctgttctgcacctgcgaccctcgtgctccgctccgcattgtaccagcggaaagctgagtctcgtctccaactagaagtttggcccggccactggccctgcagctgctttttgggggtggaattccccactcatttctgggaacacattcacacgcccattgcaggagtattaatagcaacccacattttcgccccaaaataatgagacctcacctggtctccacgtttccacgtccctgctcaaaaccaaatccattcctgccttctggctctcagaatcttctctcccctacagctactacagtacttcctgacttctcccattcaaaccattctaggcctgcaatggggaacaggccctccccatcagtattggtaaagtgaccatgattcctacatagaggctctgctggtcaaatacttgactcccactcttgccactcctagctccagaagggctcagggccttccccacagatctaaggactgggctaccctgcctgtccactgaggtttctcctaaaacaagaggcttgactctggtctgggccctgtggccctctgggaagctttgtacctcttttgcaggatctgggggtggggagggacaagctagttccccaacctcctatgactgctttctatgctcacagccttttttccataagaaccttcttgaaacttctccccgcacatactcacggaaaggaaccaatggtgctatttcccctctctcctcctcaacctgggaatacttcagacatctccaaactcatccttgtgtatagtctcacacccttccccataagtataaatgggcccatatttaacacattttgtgattttgggttatttattttgtgcatctgtggcaataaatgagatctcagtggtggtatggatttgactgatctctgtaactgtgtatggcaaaaggaccggaaaatgaaaaccggatcccagtaaggggtagagaggggccaagagaactgaacatctgggctgccggagaaatcaaagtctaggaagtaagaggtaagagtgtactacaggggacataccccaatctctttgctccctccctcttccttcctctcccagagacccaggtccctgggactatattggatctgtctctgaagctgaaaaacaaaaggcagaggagacagtcggctctaagtgaccaatctcaagccagctttgtcagaaatcctaaataacaggagaagggtgggaagaaaggatatgattatttcttattccattttccataagaggtgagaatgacaaggacctcttttctaactcctcttgagggtgtgagaagggttagcaggaggagaagggctgggagctctgaggtctcctgtaagacctcatatctcacaggcaaggactaagaattaggattaaatattttagtgggatagctctaaaccaggattagcaagcaaagttagggcgcaaattcctggaatctgactgggaccctggcagtgaaagctgggactgttgaaaacccaatttaagtgttcgctactcatgttgagagtgcagggccaagataactagatcccaggacaggcagtttggcagtgagaacaaaaggaagacactgggaccaaggtgcctagatccctcgagagagaagggtgggtattgggaggaaaaatgaggactggggaaacccaggaggctgggttctggaatagcagcaagtcagaatttcaggatctctgttcgtcctcctcttcctcttccctctatcaggcagaagagagggaaggagggggctggagaagtagccacatggatacatttagggccagacagacacaggaatgctggaggagagagggatttagtgctgcattggccctggagggggctgggaagggtcaggaggctggggaggggtggtgggggtcggtcctagggttgcacgacgccgtcctttgcggtggccacgtacacagtgtgtatgaccacagccctcttcttcctcctcatcactttccgtggagctctcgccaaaggcccgaggtt

SEQ ID NO: 13402 - protein, 420 aa, Homo sapiens
MWWRDLTRLRLWLKREAIPGEGRKAAKVNAGVGEKGIYTASSRGGPPSARSKAVTVVAEGAASRSWLSMDAPELGPGLVERLEQLATCPLCGGSFEDPVLLACEHSFCRACLARRWGTPPATGTEASPTACPCCGLPCPRRSLRSNVRLAVEVRISRELREKLAEPGARAGRRRGGRIPTMGCLDLPGEDMRKTWRRFEVPTSKSSNSEDDLPEDYPVVKKMLHRLTADLTLDPGTAHRRLLISADRRSVQLAPPGTPAPPDGPKRFDQLPAVLGAQGFGAGRHCWEVETADAASCRDSSGEDADDEESHYAVGAAGESVQRKGCVRLCPAGAVWAVEGRGGRLWALTAPEPTLLGGVEPPPRRIRVDLDWERGRVAFYDGRSLDLLYAFQAPGPLGERIFPLFCTCDPRAPLRIVPAES

SEQ ID NO: 13403 - DNA, 3152 bp, Homo sapiens
cccaaaccttacccgggaagcaggagaaccagatgaggcgttacgcaaggcctggtgtttacctcccgtgggagcctcctccctccctataaagcctgatgtggtggagagatttgacgagactgagactctggttgaagagagaggcaatcccaggagaggggcggaaagcggcaaaagttaatgcgggagtcggagagaagggcatctacacagcaagcagcaggggcggcccgccatctgcgcgctcgaaggcggtcacggtggtcgcggaaggggcggcgtccagatcctggctttccatggatgcgcccgagctgggcccggggctggtggagcgtctggagcagctggcgacgtgtcctctgtgcgggggctccttcgaggacccggtgcttctggcgtgcgagcacagcttctgccgcgcgtgtctggcccgccgctgggggactccgccggcgaccggcaccgaggcttcccccaccgcctgtccctgctgcggcctgccgtgtccccgccgcagcctgaggtctaatgtgcggctggcggtggaggtgcgaatcagccgcgagctgcgagagaagctggctgagcctggggcccgtgcggggagacgccgaggggggcgcatccccaccatgggctgcctggacctgcccggagaggatatgaggaagacatggagacgatttgaagtcccaacatccaagtcatctaattcagaggatgatctccctgaagattatccagtggtcaaaaaaatgcttcatagactgacagccgacctgaccctggaccctgggaccgcacaccgccgcctgctcatctccgccgaccgccgcagcgtacaactggccccaccagggacgcccgcgccccctgacggccccaagcgcttcgatcagctcccagctgtgctgggtgcgcagggcttcggggccggccgccactgctgggaggtggagactgcggacgccgcctcctgcagagactcttctggggaggatgcggacgacgaggagagccactatgcagtgggcgcggccggggaatcagtgcaacgcaagggctgcgcgcctggccccctgggggagcgcatcttcccgctgttctgcacctgcgaccctcgtgctccgctccgcattgtaccagcggaaagctgagtctcgtctccaactagaagtttggcccggccactggccctgcagctgctttttgggggtggaattccccactcatttctgggaacacattcacacgcccattgcaggagtattaatagcaacccacattttcgccccaaaataatgagacctcacctggtctccacgtttccacgtccctgctcaaaaccaaatccattcctgccttctggctctcagaatcttctctcccctacagctactacagtacttcctgacttctcccattcaaaccattctaggcctgcaatggggaacaggccctccccatcagtattggtaaagtgaccatgattcctacatagaggctctgctggtcaaatacttgactcccactcttgccactcctagctccagaagggctcagggccttccccacagatctaaggactgggctaccctgcctgtccactgaggtttctcctaaaacaagaggcttgactctggtctgggccctgtggccctctgggaagctttgtacctcttttgcaggatctgggggtggggagggacaagctagttccccaacctcctatgactgctttctatgctcacagccttttttccataagaaccttcttgaaacttctccccgcacatactcacggaaaggaaccaatggtgctatttcccctctctcctcctcaacctgggaatacttcagacatctccaaactcatccttgtgtatagtctcacacccttccccataagtataaatgggcccatatttaacacattttgtgattttgggttatttattttgtgcatctgtggcaataaatgagatctcagtggtggtatggatttgactgatctctgtaactgtgtatggcaaaaggaccggaaaatgaaaaccggatcccagtaaggggtagagaggggccaagagaactgaacatctgggctgccggagaaatcaaagtctaggaagtaagaggtaagagtgtactacaggggacataccccaatctctttgctccctccctcttccttcctctcccagagacccaggtccctgggactatattggatctgtctctgaagctgaaaaacaaaaggcagaggagacagtcggctctaagtgaccaatctcaagccagctttgtcagaaatcctaaataacaggagaagggtgggaagaaaggatatgattatttcttattccattttccataagaggtgagaatgacaaggacctcttttctaactcctcttgagggtgtgagaagggttagcaggaggagaagggctgggagctctgaggtctcctgtaagacctcatatctcacaggcaaggactaagaattaggattaaatattttagtgggatagctctaaaccaggattagcaagcaaagttagggcgcaaattcctggaatctgactgggaccctggcagtgaaagctgggactgttgaaaacccaatttaagtgttcgctactcatgttgagagtgcagggccaagataactagatcccaggacaggcagtttggcagtgagaacaaaaggaagacactgggaccaaggtgcctagatccctcgagagagaagggtgggtattgggaggaaaaatgaggactggggaaacccaggaggctgggttctggaatagcagcaagtcagaatttcaggatctctgttcgtcctcctcttcctcttccctctatcaggcagaagagagggaaggagggggctggagaagtagccacatggatacatttagggccagacagacacaggaatgctggaggagagagggatttagtgctgcattggccctggagggggctgggaagggtcaggaggctggggaggggtggtgggggtcggtcctagggttgcacgacgccgtcctttgcggtggccacgtacacagtgtgtatgaccacagccctcttcttcctcctcatcactttccgtggagctctcgccaaaggcccgaggtt

SEQ ID NO: 13404 - protein, 354 aa, Homo sapiens
MWWRDLTRLRLWLKREAIPGEGRKAAKVNAGVGEKGIYTASSRGGPPSARSKAVTVVAEGAASRSWLSMDAPELGPGLVERLEQLATCPLCGGSFEDPVLLACEHSFCRACLARRWGTPPATGTEASPTACPCCGLPCPRRSLRSNVRLAVEVRISRELREKLAEPGARAGRRRGGRIPTMGCLDLPGEDMRKTWRRFEVPTSKSSNSEDDLPEDYPVVKKMLHRLTADLTLDPGTAHRRLLISADRRSVQLAPPGTPAPPDGPKRFDQLPAVLGAQGFGAGRHCWEVETADAASCRDSSGEDADDEESHYAVGAAGESVQRKGCAPGPLGERIFPLFCTCDPRAPLRIVPAES

SEQ ID NO: 13405 - DNA, 874 bp, Homo sapiens
ggaggaagaagagggctgtggtcatacacactgtgtacgtggccaccgcaaaggacggcgtcgtgcaaccctaggaccgacccccaccacccctccccagcctcctgacccttcccagccccctccagggccaatgcagcactaaatccctctctcctccagcattcctgtgtctgtctggccctaaatgtatccatgtggctacttctccagccccctccttccctctcttctgcctgatagagggaagaggaagaggaggacgaacagagatcctgaaattctgacttgctgctattccagaacccagcctcctgggtttccccagtcctcatttttcctcccaatacccacccttctctcctgctaacccttctcacaccctcaagaggagttagaaaagaggtccttgtcattctcacctcttatggaaaatggaataagaaataatcatatcctttcttcccacccttctcctgttatttaggatttctgacaaagctggcttgagattggtcacttagagccgactgtctcctctgccttttgtttttcagcttcagagacagatccaatatagtcccagggacctgggtctctgggagaggaaggaagagggagggagcaaagagattggggtatgtcccctgtagtacactcttacctcttacttcctagactttgatttctccggcagcccagatgttcagttctcttggcccctctctaccccttactgggatccggttttcattttccggtccttttgccatacacagttacagagatcagtcaaatccataccaccactgagatctcatttattgccacagatgcacaaaataaataacccaaaatcacaaaatgtgttaaa

SEQ ID NO: 13406 - protein, 60 aa, Homo sapiens
MYPCGYFSSPLLPSLLPDRGKRKRRTNRDPEILTCCYSRTQPPGFPQSSFFLPIPTLLSC

SEQ ID NO: 13407 - DNA, 1337 bp, Homo sapiens
ggcgttacgcaaggcctggtgtttacctcccgtgggagcctcctccctccctataaagcctgatgtggtggagagatttgacgagactgagactctggttgaagagagaggcaatcccaggagaggggcggaaagcggcaaaagttaatgcgggagtcggagagaagggcatctacacagcaagcagcaggggcggcccgccatctgcgcgctcgaaggcggtcacggtggtcgcggaaggggcggcgtccagatcctggctttccatggatgcgcccgagctgggcccggggctggtggagcgtctggagcagctggcgacgtgtcctctgtgcgggggctccttcgaggacccggtgcttctggcgtgcgagcacagcttctgccgcgcgtgtctggcccgccgctgggggactccgccggcgaccggcaccgaggcttcccccaccgcctgtccctgctgcggcctgccgtgtccccgccgcagcctgaggtctaatgtgcggctggcggtggaggtgcgaatcagccgcgagagctgctttttgggggtggaattccccactcatttctgggaacacattcacacgcccattgcaggagtattaatagcaacccacattttcgccccaaaataatgagacctcacctggtctccacgtttccacgtccctgctcaaaaccaaatccattcctgccttctggctctcagaatcttctctcccctacagctactacagtacttcctgacttctcccattcaaaccattctaggcctgcaatggggaacaggccctccccatcagtattggtaaagtgaccatgattcctacatagaggctctgctggtcaaatacttgactcccactcttgccactcctagctccagaagggctcagggccttccccacagatctaaggactgggctaccctgcctgtccactgaggtttctcctaaaacaagaggcttgactctggtctgggccctgtggccctctgggaagctttgtacctcttttgcaggatctgggggtggggagggacaagctagttccccaacctcctatgactgctttctatgctcacagccttttttccataagaaccttcttgaaacttctccccgcacatactcacggaaaggaaccaatggtgctatttcccctctctcctcctcaacctgggaatacttcagacatctccaaactcatccttgtgtatagtctcacacccttccccataagtataaatgggcccatatttaacacattttgtgattttgggttatttattttgtgcatctgtggcaataaatgagatctcagtggtggtatgg

SEQ ID NO: 13408 - protein, 191 aa, Homo sapiens; identical to SEQ ID NO: 13400

SEQ ID NO: 13409 - DNA, 2205 bp, Homo sapiens
cccaaaccttacccgggaagcaggagaaccagatgaggcgttacgcaaggcctggtgtttacctcccgtgggagcctcctccctccctataaagcctgatgtggtggagagatttgacgagactgagactctggttgaagagagaggcaatcccaggagaggggcggaaagcggcaaaagttaatgcgggagtcggagagaagggcatctacacagcaagcagcaggggcggcccgccatctgcgcgctcgaaggcggtcacggtggtcgcggaaggggcggcgtccagatcctggctttccatggatgcgcccgagctgggcccggggctggtggagcgtctggagcagctggcgacgtgtcctctgtgcgggggctccttcgaggacccggtgcttctggcgtgcgagcacagcttctgccgcgcgtgtctggcccgccgctgggggactccgccggcgaccggcaccgaggcttcccccaccgcctgtccctgctgcggcctgccgtgtccccgccgcagcctgaggtctaatgtgcggctggcggtggaggtgcgaatcagccgcgagctgcgagagaagctggctgagcctggggcccgtgcggggagacgccgaggggggcgcatccccaccatgggctgcctggacctgcccggagaggatatgaggaagacatggagacgatttgaagtcccaacatccaagtcatctaattcagaggatgatctccctgaagattatccagtggtcaaaaaaatgcttcatagactgacagccgacctgaccctggaccctgggaccgcacaccgccgcctgctcatctccgccgaccgccgcagcgtacaactggccccaccagggacgcccgcgccccctgacggccccaagcgcttcgatcagctcccagctgtgctgggtgcgcagggcttcggggccggccgccactgctgggaggtggagactgcggacgccgcctcctgcagagactcttctggggaggatgcggacgacgaggagagccactatgcagtgggcgcggccggggaatcagtgcaacgcaagggctgcgtaaggctgtgccctgcgggggccgtgtgggccgtggagggccgcggcggccgcctgtgggccctcacggcacccgaacccaccctgctgggcggtgttgagcccccgccgcggcgcattcgcgtggacctggactgggagcggggccgcgtggccttctacgacggccgctcactcgacctgctttacgccttccaggcgcctggccccctgggggagcgcatcttcccgctgttctgcacctgcgaccctcgtgctccgctccgcattgtaccagcggaaagctgagtctcgtctccaactagaagtttggcccggccactggccctgcagctgctttttgggggtggaattccccactcatttctgggaacacattcacacgcccattgcaggagtattaatagcaacccacattttcgccccaaaataatgagacctcacctggtctccacgtttccacgtccctgctcaaaaccaaatccattcctgccttctggctctcagaatcttctctcccctacagctactacagtacttcctgacttctcccattcaaaccattctaggcctgcaatggggaacaggccctccccatcagtattggtaaagtgaccatgattcctacatagaggctctgctggtcaaatacttgactcccactcttgccactcctagctccagaagggctcagggccttccccacagatctaaggactgggctaccctgcctgtccactgaggtttctcctaaaacaagaggcttgactctggtctgggccctgtggccctctgggaagctttgtacctcttttgcaggatctgggggtggggagggacaagctagttccccaacctcctatgactgctttctatgctcacagccttttttccataagaaccttcttgaaacttctccccgcacatactcacggaaaggaaccaatggtgctatttcccctctctcctcctcaacctgggaatacttcagacatctccaaactcatccttgtgtatagtctcacacccttccccataagtataaatgggcccatatttaacacattttgtgattttgggttatttattttgtgcatctgtggcaataaatgagatctcagtggtggtatgg

SEQ ID NO: 13410 - protein, 420 aa, Homo sapiens; identical to SEQ ID NO: 13402

SEQ ID NO: 13411 - DNA, 2007 bp, Homo sapiens
cccaaaccttacccgggaagcaggagaaccagatgaggcgttacgcaaggcctggtgtttacctcccgtgggagcctcctccctccctataaagcctgatgtggtggagagatttgacgagactgagactctggttgaagagagaggcaatcccaggagaggggcggaaagcggcaaaagttaatgcgggagtcggagagaagggcatctacacagcaagcagcaggggcggcccgccatctgcgcgctcgaaggcggtcacggtggtcgcggaaggggcggcgtccagatcctggctttccatggatgcgcccgagctgggcccggggctggtggagcgtctggagcagctggcgacgtgtcctctgtgcgggggctccttcgaggacccggtgcttctggcgtgcgagcacagcttctgccgcgcgtgtctggcccgccgctgggggactccgccggcgaccggcaccgaggcttcccccaccgcctgtccctgctgcggcctgccgtgtccccgccgcagcctgaggtctaatgtgcggctggcggtggaggtgcgaatcagccgcgagctgcgagagaagctggctgagcctggggcccgtgcggggagacgccgaggggggcgcatccccaccatgggctgcctggacctgcccggagaggatatgaggaagacatggagacgatttgaagtcccaacatccaagtcatctaattcagaggatgatctccctgaagattatccagtggtcaaaaaaatgcttcatagactgacagccgacctgaccctggaccctgggaccgcacaccgccgcctgctcatctccgccgaccgccgcagcgtacaactggccccaccagggacgcccgcgccccctgacggccccaagcgcttcgatcagctcccagctgtgctgggtgcgcagggcttcggggccggccgccactgctgggaggtggagactgcggacgccgcctcctgcagagactcttctggggaggatgcggacgacgaggagagccactatgcagtgggcgcggccggggaatcagtgcaacgcaagggctgcgcgcctggccccctgggggagcgcatcttcccgctgttctgcacctgcgaccctcgtgctccgctccgcattgtaccagcggaaagctgagtctcgtctccaactagaagtttggcccggccactggccctgcagctgctttttgggggtggaattccccactcatttctgggaacacattcacacgcccattgcaggagtattaatagcaacccacattttcgccccaaaataatgagacctcacctggtctccacgtttccacgtccctgctcaaaaccaaatccattcctgccttctggctctcagaatcttctctcccctacagctactacagtacttcctgacttctcccattcaaaccattctaggcctgcaatggggaacaggccctccccatcagtattggtaaagtgaccatgattcctacatagaggctctgctggtcaaatacttgactcccactcttgccactcctagctccagaagggctcagggccttccccacagatctaaggactgggctaccctgcctgtccactgaggtttctcctaaaacaagaggcttgactctggtctgggccctgtggccctctgggaagctttgtacctcttttgcaggatctgggggtggggagggacaagctagttccccaacctcctatgactgctttctatgctcacagccttttttccataagaaccttcttgaaacttctccccgcacatactcacggaaaggaaccaatggtgctatttcccctctctcctcctcaacctgggaatacttcagacatctccaaactcatccttgtgtatagtctcacacccttccccataagtataaatgggcccatatttaacacattttgtgattttgggttatttattttgtgcatctgtggcaataaatgagatctcagtggtggtatgg

SEQ ID NO: 13412 - protein, 354 aa, Homo sapiens; identical to SEQ ID NO: 13404

SEQ ID NO: 13413 - DNA, 736 bp, Homo sapiens
atcaaaaaggacctgatcactttttagggctaaaaggaagaaaatctaacacagactttcattcaattcccttccctcccttcttctttccttacctgtcagtctatgaagcatttttttgaccactggataatcttcagggagatcatcctctgaattagatgacttggatgttgggacttcaaatctacacagatgaggggaagggtcaggaaatcagccctctgatcctaatgcccccacgcataccccactcacatctctggaggaagaagggatgagactataccccagaaaacctgcctattaatgggaacaaaggtgtgggcccagtgagaacgtgatggctatggcagctggtgagaaaaggagggaacagaaaagtggaactcaccgtctccatgtcttcctcatatcctaggatgggcagaaacaaacatggatgtgagctctgggcttcattccctggggcatccttccctatctctcccctcctcaggtgagttctgtctgagttagcagtgtccctcctcacctttcagagtgatctcacctctttacacactgtgctcctttccctctcattctcctccttcacctttcatgatccctccttcctctcaccccatcacttttccctcatcctccatcacacagaccaaacacacacccagagccctcgggctaagagttggtatataaaagccttacaataaagctgcttcccctcttgcaa

SEQ ID NO: 13414 - protein, 32 aa, Homo sapiens
MIPPSSHPITFPSSSITQTKHTPRALGLRVGI

SEQ ID NO: 13415 - DNA, 2042 bp, Homo sapiens
attacacattcaaagtatccatttgttctcaagaggtagcaagaaacagtatccacagtggactccggggctcctacagacttggcacagcttcctacagtcttgaaacagccctgttgttctgtcatggccagtgggcagtttgtgaacaaactgcaagaggaagtgatctgccccatctgcctggacattctgcagaaacctgtcaccatcgactgtgggcacaatttctgcctcaaatgcatcactcagattggggaaacatcatgtggatttttcaaatgtcccctctgcaaaacttccgtaaggaagaacgcaatcaggttcaactcgctgttgcggaatctggtggagaaaatccaagctctacaagcctctgaggtgcagtccaaaaggaaagaggctacatgcccgaggcaccaggagatgttccactatttctgcgaggatgatgggaagttcctctgttttgtgtgtcgtgaatccaaggaccacaaatcccataatgtcagcttgatcgaagaagctgcccagaattatcaggggcagattcaagagcagatccaagtcttgcagcaaaaggagaaggagacagtacaagtgaaggcacaaggtgtacacagggtcgatgtcttcacggaccaggtagaacatgagaagcaaaggatcctcacagaatttgaactcctgcatcaagtcctagaggaggagaagaatttcctgctatcacggatttactggctgggtcatgagggaacggaagcggggaaacactatgttgcctccactgagccacagttgaacgatctcaagaagctcgttgattccctgaagaccaagcagaacatgccacccaggcagctgctggaggatatcaaagtcgtcttgtgcagaagtgaagagtttcagtttctcaacccaacccctgttcctctggaactggagaaaaaactcagtgaagcaaaatcaagacatgactccatcacagggagcctaaaaaaattcaaagaccaactccaggctgataggaaaaaagatgaaaacagattcttcaaaagcatgaataaaaatgacatgaagagctggggcttgttacagaaaaataatcataaaatgaacaaaacctcagagcccgggtcatcttctgcaggcggcagaactacatcggggccaccaaatcaccactcttcagccccatcccactccctgtttcgggcctcgtctgctgggaaagtcacttttccagtatgtctcctggcctcttatgatgagatttctggtcaaggagcgagctctcaggatacgaagacatttgacgttgcgctgtccgaggagctccatgcggcactgagtgagtggctgacagcgatccgggcttggttttgtgaggttccttcaagctaagccagctcagagaacacggggagcggtggtgctacacggacttcggagcatagagtggcgctgagtgagtggctgagaccgaccacggttcttgacttagtggaattgggtcgaaggagtggagaatgggagggctcgggctactgagagtggagatgggggcgggggtggtggtgaagagagttggagaaggaatggacgaattcttgagcaaaaggaggggaagagacaatctccagccacccgccccacgcttgacttcttatcactttggctgtggtgccgcctagtggaaaaaggaagtccctgcagcagtccccgcactctttaagcagctgtttaccgaaggcaccagttcagccaggagtgaaatccggagaggagcaacgccagcctgggtcacagtccatcaaaccccatgagcccgaccactctcgctcttccttacattcccacgtcccccttctctcccaacccctcatatcagcaagggaaattaattaatgagatttgataaatcagtagatagaatgaggtccccattctgaaatatttagcagactggaaccaccacgcaagcctctgtagggggtggatggagacacttctaactttaataaactgcgactgaacgtgga

SEQ ID NO: 13416 - protein, 425 aa, Homo sapiens; identical to SEQ ID NO: 1397

SEQ ID NO: 13417 - DNA, 1975 bp, Homo sapiens
attacacattcaaagtatccatttgttctcaagaggtagcaagaaacagtatccacagtggactccggggctcctacagacttggcacagcttcctacagtcttgaaacagccctgttgttctgtcatggccagtgggcagtttgtgaacaaactgcaagaggaagtgatctgccccatctgcctggacattctgcagaaacctgtcaccatcgactgtgggcacaatttctgcctcaaatgcatcactcagattggggaaacatcatgtggatttttcaaatgtcccctctgcaaaacttccgtaaggaagaacgcaatcaggttcaactcgctgttgcggaatctggtggagaaaatccaagctctacaagcctctgaggtgcagtccaaaaggaaagaggctacatgcccgaggcaccaggagatgttccactatttctgcgaggatgatgggaagttcctctgttttgtgtgtcgtgaatccaaggaccacaaatcccataatgtcagcttgatcgaagaagctgcccagaattatcaggggcagattcaagagcagatccaagtcttgcagcaaaaggagaaggagacagtacaagtgaaggcacaaggtgtacacagggtcgatgtcttcacggaccaggtagaacatgagaagcaaaggatcctcacagaatttgaactcctgcatcaagtcctagaggaggagaagaatttcctgctatcacggatttactggctgggtcatgagggaacggaagcggggaaacactatgttgcctccactgagccacagttgaacgatctcaagaagctcgttgattccctgaagaccaagcagaacatgccacccaggcagctgctggagaactggagaaaaaactcagtgaagcaaaatcaagacatgactccatcacagggagcctaaaaaaattcaaagaccaactccaggctgataggaaaaaagatgaaaacagattcttcaaaagcatgaataaaaatgacatgaagagctggggcttgttacagaaaaataatcataaaatgaacaaaacctcagagcccgggtcatcttctgcaggcggcagaactacatcggggccaccaaatcaccactcttcagccccatcccactccctgtttcgggcctcgtctgctgggaaagtcacttttccagtatgtctcctggcctcttatgatgagatttctggtcaaggagcgagctctcaggatacgaagacatttgacgttgcgctgtccgaggagctccatgcggcactgagtgagtggctgacagcgatccgggcttggttttgtgaggttccttcaagctaagccagctcagagaacacggggagcggtggtgctacacggacttcggagcatagagtggcgctgagtgagtggctgagaccgaccacggttcttgacttagtggaattgggtcgaaggagtggagaatgggagggctcgggctactgagagtggagatgggggcgggggtggtggtgaagagagttggagaaggaatggacgaattcttgagcaaaaggaggggaagagacaatctccagccacccgccccacgcttgacttcttatcactttggctgtggtgccgcctagtggaaaaaggaagtccctgcagcagtccccgcactctttaagcagctgtttaccgaaggcaccagttcagccaggagtgaaatccggagaggagcaacgccagcctgggtcacagtccatcaaaccccatgagcccgaccactctcgctcttccttacattcccacgtcccccttctctcccaacccctcatatcagcaagggaaattaattaatgagatttgataaatcagtagatagaatgaggtccccattctgaaatatttagcagactggaaccaccacgcaagcctctgtagggggtggatggagacacttctaactttaataaactgcgactgaacgtgga

SEQ ID NO: 13418 - protein, 267 aa, Homo sapiens; identical to SEQ ID NO: 1399

SEQ ID NO: 13419 - DNA, 1217 bp, Homo sapiens
gtaaaaagagactgtaaaagatagcaataatttttataatacatgttgaaataacattttgagaatattgagttaaataaaatatataattaaagttaattttactagtttctttctactttttaaatgtgactactagaaaatttaaaaatatataagtggctcacattcgtgactcagattacattcatcattcatactggacagtgctgggctaggcagtcaccacaggaaatcagaaagggcatctctcaagggttgcataccttcctggtccaataagaatatgagagtcaaatgcagcttctacttctcccaggcatttcaaattagtgccttgctgtgtgatagtgagttctttgctcaacccctctggactctcaccatttcatcccattctttattccccagaccaactccaggctgataggaaaaaagatgaaaacagattcttcaaaagcatgaataaaaatgacatgaagagctggggcttgttacagaaaaataatcataaaatgaacaaaacctcagagcccgggtcatcttctgcaggcggcagaactacatcggggccaccaaatcaccactcttcagccccatcccactccctgtttcgggcctcgtctgctgggaaagtcacttttccagtatgtctcctggcctcttatgatgagatttctggtcaaggagcgagctctcaggatacgaagacatttgacgttgcgctgtccgaggagctccatgcggcactgagtgagtggctgacagcgatccgggcttggttttgtgaggttccttcaagctaagccagctcagagaacacggggagcggtggtgctacacggacttcggagcatagagtggcgctgatggaaaaaggaagtccctgcagcagtccccgcactctttaagcagctgtttaccgaaggcaccagttcagccaggagtgaaatccggagaggagcaacgccagcctgggtcacagtccatcaaaccccatgagcccgaccactctcgctcttccttacattcccacgtcccccttctctcccaacccctcatatcagcaagggaaattaattaatgagatttgataaatcagtagatagaatgaggtccccattctgaaatatttagcagactggaaccaccacgcaagcctctgtagggggtggatggagacacttctaactttaataaactgcgactgaacgtgg

SEQ ID NO: 13420 - protein, 114 aa, Homo sapiens
MNKNDMKSWGLLQKNNHKMNKTSEPGSSSAGGRTTSGPPNHHSSAPSHSLFRASSAGKVTFPVCLLASYDEISGQGASSQDTKTFDVALSEELHAALSEWLTAIRAWFCEVPSS

SEQ ID NO: 13421 - DNA, 362 bp, Homo sapiens
aggctgtcaggcctctctgcgcacgaaacccatcacagcacctgggccagcagccagtgccgggctgtcctcttcccaccccaaggcggtcctcttgagtcttcacaccgcctccttcggatccctccagtccatcaaaccccatgagcccgaccactctcgctcttccttacattcccacgtcccccttctctcccaacccctcatatcagcaagggaaattaattaatgagatttgataaatcagtagatagaatgaggtccccattctgaaatatttagcagactggaaccaccacgcaagcctctgtagggggtggatggagacacttctaactttaataaactgcgactgaacgtgg

SEQ ID NO: 13422 - protein, 31 aa, Homo sapiens
MSPTTLALPYIPTSPFSPNPSYQQGKLINEI

SEQ ID NO: 13423 - DNA, 507 bp, Homo sapiens
ctcaccaaccagctcaaccacatcttcctagaagtgaagagtttcagtttctcaacccaacccctgttcctctggaactggagaaaaaactcagtgaagcaaaatcaagacatgactccatcacagggagcctaaaaaaattcaaagaccaactccaggctgataggaaaaaagatgaaaacagattcttcaaaagcatgaataaaaatgacatgaagagctggggcttgttacagaaaaataatcataaaatgaacaaaacctcagagcccgggtcatcttctgcaggtaagagtcctgtctctgaatactaagggacctctaagtctacaggtggtcaaaatgctgtatccacccaattccactaaatggaataaatgaataaatgaatgaattcatttattccatttcctcagttcctccccaaattacacctctgccaggaaacagagggcgctccgacttgttcaggtgtactttcttgagtttcacctccatccctcctgc

SEQ ID NO: 13424 - protein, 38 aa, Homo sapiens
MNKNDMKSWGLLQKNNHKMNKTSEPGSSSAGKSPVSEY

SEQ ID NO: 13425 - DNA, 495 bp, Homo sapiens
gctaggcagtcaccacaggaaatcagaaagggcatctctcaagggttgcataccttcctggtccaataagaatatgagagtcaaatgcagcttctacttctcccaggcatttcaaattagtgccttgctgtgtgatagtgagttctttgctcaacccctctggactctcaccatttcatcccattctttattccccagaccaactccaggctgataggaaaaaagatgaaaacagattcttcaaaagcatgaataaaaatgacatgaagagctggggcttgttacagaaaaataatcataaaatgaacaaaacctcagagcccgggtcatcttctgcaggtaagagtcctgtctctgaatactaagggacctctaagtctacaggtggtcaaaatgctgtatccacccaattccactaaatggaataaatgaataaatgaatgaattcatttattccatttcctcagttcctccccaaattacacctctgccagg

SEQ ID NO: 13426 - protein, 38 aa, Homo sapiens; identical to SEQ ID NO: 13424

SEQ ID NO: 13427 - DNA, 921 bp, Homo sapiens
aaatactacagaggtggagctgcctccttcttgtcccactttttcctccctgtctctaggagtgaagaaatacatttgtaattttctattacttctgaatacttcaaagtttgggattagtgactgttttgtgagttacctgagtttaaaataataaaacaaccatatgcctgttctctcaattggctgaggaatcggcattcacttatatctggccttcatgtaatcatagagacacaattcttccccttttctcactttccccaaatggcagaagcaaccaaccatcatttctcacttacagctcttcatgtcatttttattcatgcttttgaagaatctgttttcatcttttttcctatcagcctggagttggtctggggaataaagaatgggatgaaatggtgagagtccagaggggttgagcaaagaactcactatcacacagcaaggcactaatttgaaatgcctgggagaagtagaagctgcatttgactctcatattcttattggaccaggaaggcaggaggagacaccagtgtgcaccagagaaggagaagtcagagatgacagtccctgcctgaggccatctctggtccaccagacaactcatcaccaacttcccaacagccactgctctaggccagacttggatctgctcttgaatctgcccctgcggaaagagggccgtttggacaggctgtgcctggagatttctggcctcataaaatcctcctggtctcttaggagagctggtgacactctccaggtccttggtggagcctgatgattgacatcttaagcaaattctctggagaagtcgatgctcctgatggaggctcacacattgataacccctggtttagagacactactaattgttccagctcatccagctaataaatgacagatctcagactt

SEQ ID NO: 13428 - protein, 46 aa, Homo sapiens [sequence omitted]

SEQ ID NO: 13429 - DNA, 1960 bp, Homo sapiens
ataagaaccactcatctgctggccatctctccaggtctggagccagagaagatgatctgaaattgtagcaggagaaattgaggtgtatgaaaaataatttcaagtttaacaaacacaaggaaaccgcagggtccatgtcaaagctgatgagctatttctgaaactcgtgcagaattgtggtttgtgtggtctatgtcacggcacccttgagggagagtgggcaattgcctgaacttggaggctgtgtcctgtccccaggctgctccagggctgcctccttccgactgggccttcttatctgggactgttgagggcaacaggccttccgaagaccagtgaagaaggaggccctgcaaacaggaggctgacagggtaggaacgaggccatgatccctttgcagaaggacaaccaggaggagggtgtctgccccatctgccaggagagcctgaaggaggccgtgagcaccaactgcggacatctcttctgtcgagtgtgcctgacacagcatgtggagaaggcctcagcctctggggtcttctgctgccccctctgccggaagccctgttctgaggaggtgctagggacaggctatatctgccccaaccaccagaagagggtgtgcaggttctgtgaggagagcagacttcttctatgtgtggaatgcctggtgtcccctgaacacatgtctcatcatgaactgaccattgaaaatgccctcagccactacaaggaacgactcaatcgccggagcaggaagctcagaaaggacattgcagaacttcagcggctcaaggctcagcaggagaagaaactgcaggctctgcagcagtggctgggccagctggagcacatgccagcagaagcggccagaatccttgacatctccagggcagtaacacagctcagaagcctggtcattgatctggaaaggacggccaaggaattagacaccaacacactgaagaatgctggtgacttactgaacaggagtgctccacagaaattagaggttatttatccccagttggagaaaggagtcagtgaattgcttcttcagccccctcagaagctctgacctgttcatccctgggacacctcacttcaggctcacctcagcctcctctctctccttcctccaacctgtccaggcccccactgggtctacccagtgcatcttcgggcctgccagctcctgaacatgtcaccatttcttcatgtccacagtcatcacctgatgcctgaccctctgactcttggacgatagccagcctccttccaggacaggctcatgcttggggctgccactgtggaggtcggggcccatggtctccaggagcatttgtgaaatctccattttgcctgtaaactgatggtagtgcccatctctcacaatctcattcaaataggatcctccaggcctctgaatggcccgagctcatcagcagtgacaccacctcacatgtggagcccagctgagttcctgcagtacttgttgtctgtaccactcacctggcacttatttattattgttgtggaagacagactcaaagacagcctcccttcatgatcctcacctcttggaattcatgcccttgtttggtcccctccccttgagtgtaagtgggatctgtgacttgcttctaatgaatggaataaggcaaaggtgatagggtgtcactctggcaactgtgttgcattgtatagaactcctccttgctggcccacccttttagagcccctcctaggagccaagagcagcttccagccaacaacaagcagaggccctcagtcttgtggctgcaagaacctgaattctgccaacaacccgagtgagcttggaagcagattcttccccaactgagccggataagaacctagtccagccaacaccttgattatagtcttgtgagtacctaagctgaggacccagtgaagctgtgccaaaatttcccacccaca

SEQ ID NO: 13430 - protein, 229 aa, Homo sapiens; identical to SEQ ID NO: 1401

SEQ ID NO: 13431 - DNA, 2086 bp, Homo sapiens
ataagaaccactcatctgctggccatctctccaggtctggagccagagaagatgatctgaaattgtagcaggagaaattgaggtgtatgaaaaataatttcaagtttaacaaacacaaggaaaccgcagggtccatgtcaaagctgatgagctatttctgaaactcgtgcagaattgtggtttgtgtggtctatgtcacggcacccttgagggagagtgggcaattgcctgaacttggaggctgtgtcctgtccccaggctgctccagggctgcctccttccgactgggccttcttatctgggactgttgagggcaacaggccttccgaagaccagtgaagaaggaggccctgcaaacaggaggctgacagggtaggaacgaggccatgatccctttgcagaaggacaaccaggaggagggtgtctgccccatctgccaggagagcctgaaggaggccgtgagcaccaactgcggacatctcttctgtcgagtgtgcctgacacagcatgtggagaaggcctcagcctctggggtcttctgctgccccctctgccggaagccctgttctgaggaggtgctagggacaggctatatctgccccaaccaccagaagagggtgtgcaggttctgtgaggagagcagacttcttctatgtgtggaatgcctggtgtcccctgaacacatgtctcatcatgaactgaccattgaaaatgccctcagccactacaaggaacgactcaatcgccggagcaggaagctcagaaaggacattgcagaacttcagcggctcaaggctcagcaggagaagaaactgcaggctctgcagtttcaggtagaccacgggaaccacaggctggaggctgggccggagagccagcaccaaaccagggaacagctgggtgccctccctcagcagtggctgggccagctggagcacatgccagcagaagcggccagaatccttgacatctccagggcagtaacacagctcagaagcctggtcattgatctggaaaggacggccaaggaattagacaccaacacactgaagaatgctggtgacttactgaacaggagtgctccacagaaattagaggttatttatccccagttggagaaaggagtcagtgaattgcttcttcagccccctcagaagctctgacctgttcatccctgggacacctcacttcaggctcacctcagcctcctctctctccttcctccaacctgtccaggcccccactgggtctacccagtgcatcttcgggcctgccagctcctgaacatgtcaccatttcttcatgtccacagtcatcacctgatgcctgaccctctgactcttggacgatagccagcctccttccaggacaggctcatgcttggggctgccactgtggaggtcggggcccatggtctccaggagcatttgtgaaatctccattttgcctgtaaactgatggtagtgcccatctctcacaatctcattcaaataggatcctccaggcctctgaatggcccgagctcatcagcagtgacaccacctcacatgtggagcccagctgagttcctgcagtacttgttgtctgtaccactcacctggcacttatttattattgttgtggaagacagactcaaagacagcctcccttcatgatcctcacctcttggaattcatgcccttgtttggtcccctccccttgagtgtaagtgggatctgtgacttgcttctaatgaatggaataaggcaaaggtgatagggtgtcactctggcaactgtgttgcattgtatagaactcctccttgctggcccacccttttagagcccctcctaggagccaagagcagcttccagccaacaacaagcagaggccctcagtcttgtggctgcaagaacctgaattctgccaacaacccgagtgagcttggaagcagattcttccccaactgagccggataagaacctagtccagccaacaccttgattatagtcttgtgagtacctaagctgaggacccagtgaagctgtgccaaaatttcccacccacagaaacagtgtgacaataaatgtgtgtgtgtttttttgtt

SEQ ID NO: 13432 - protein, 258 aa, Homo sapiens
MIPLQKDNQEEGVCPICQESLKEAVSTNCGHLFCRVCLTQHVEKASASGVFCCPLCRKPCSEEVLGTGYICPNHQKRVCRFCEESRLLLCVECLVSPEHMSHHELTIENALSHYKERLNRRSRKLRKDIAELQRLKAQQEKKLQALQFQVDHGNHRLEAGPESQHQTREQLGALPQQWLGQLEHMPAEAARILDISRAVTQLRSLVIDLERTAKELDTNTLKNAGDLLNRSAPQKLEVIYPQLEKGVSELLLQPPQKL

SEQ ID NO: 13433 - DNA, 2341 bp, Homo sapiens
ctccaggtctggagccagagaagatgatctgaaattgtagcaggagaaattgaggtaggatactaagaaagcttttcaggagtggggctaggcaagaggtgcagcatgagggaataagagtgaatcctcagtatctaagggaggtggcaggtggcgggggacttctttctttgggtcatctttggtggtgatttgacaggaaggaacaaagtggcttcaaacattatacaagtctctagtctgttctgtgtcctgttttctttctcattctttcagtgtggaatctatatgaccctgggagggatgttggttggaagaatgaccagctgatggagatgctgctgtaattattggtggtaataatgggcagcagtgagccacccggtgtgacagtgtaggagaaaacagtccaaactcctgccaaactctctctactgatggcaaatcagaggagactcaaattgtgtatgaaaaataatttcaagtttaacaaacacaaggaaaccgcagggtccatgtcaaagctgatgagctatttctgaaactcgtgcagaattgtggtttgtgtggtctatgtcacggcacccttgagggagagtgggcaattgcctgaacttggaggctgtgtcctgtccccaggctgctccagggctgcctccttccgactgggccttcttatctgggactgttgagggcaacaggccttccgaagaccagtgaagaaggaggccctgcaaacaggaggctgacagggtaggaacgaggccatgatccctttgcagaaggacaaccaggaggagggtgtctgccccatctgccaggagagcctgaaggaggccgtgagcaccaactgcggacatctcttctgtcgagtgtgcctgacacagcatgtggagaaggcctcagcctctggggtcttctgctgccccctctgccggaagccctgttctgaggaggtgctagggacaggctatatctgccccaaccaccagaagagggtgtgcaggttctgtgaggagagcagacttcttctatgtgtggaatgcctggtgtcccctgaacacatgtctcatcatgaactgaccattgaaaatgccctcagccactacaaggaacgactcaatcgccggagcaggaagctcagaaaggacattgcagaacttcagcggctcaaggctcagcaggagaagaaactgcaggctctgcagcagtggctgggccagctggagcacatgccagcagaagcggccagaatccttgacatctccagggcagtaacacagctcagaagcctggtcattgatctggaaaggacggccaaggaattagacaccaacacactgaagaatgctggtgacttactgaacaggagtgctccacagaaattagaggttatttatccccagttggagaaaggagtcagtgaattgcttcttcagccccctcagaagctctgacctgttcatccctgggacacctcacttcaggctcacctcagcctcctctctctccttcctccaacctgtccaggcccccactgggtctacccagtgcatcttcgggcctgccagctcctgaacatgtcaccatttcttcatgtccacagtcatcacctgatgcctgaccctctgactcttggacgatagccagcctccttccaggacaggctcatgcttggggctgccactgtggaggtcggggcccatggtctccaggagcatttgtgaaatctccattttgcctgtaaactgatggtagtgcccatctctcacaatctcattcaaataggatcctccaggcctctgaatggcccgagctcatcagcagtgacaccacctcacatgtggagcccagctgagttcctgcagtacttgttgtctgtaccactcacctggcacttatttattattgttgtggaagacagactcaaagacagcctcccttcatgatcctcacctcttggaattcatgcccttgtttggtcccctccccttgagtgtaagtgggatctgtgacttgcttctaatgaatggaataaggcaaaggtgatagggtgtcactctggcaactgtgttgcattgtatagaactcctccttgctggcccacccttttagagcccctcctaggagccaagagcagcttccagccaacaacaagcagaggccctcagtcttgtggctgcaagaacctgaattctgccaacaacccgagtgagcttggaagcagattcttccccaactgagccggataagaacctagtccagccaacaccttgattatagtcttgtgagtacctaagctgaggacccagtgaagctgtgccaaaatttcccacccaca

SEQ ID NO: 13434 - protein, 229 aa, Homo sapiens; identical to SEQ ID NO: 1401

SEQ ID NO: 13435 - DNA, 3291 bp, Homo sapiens
aatatttcttctgacagtggacagctgacatatcaccactttccttctactgtgagtgtctctggatgggcagaaaggaatggccagcccctggttatggtcatctaaggtcacctctgaaatgctgtgagcccctcttccttcctctcctctgctatttcccatctctgctgttggcaggagaatagaaccctggctgccagagatgcaagtgtgtgacgatatgggtgctggtgcatatttagtatgtgcctgtgtccagccatgtgcatgtgtgggtgtgtgagtgtgtgacccagcccttcccccgtggccaagcagagagagtggccttgaggaagccatagcagcaggaccagcatggcctctgctgcctctgtgaccagcctggcagatgaagtcaactgccccatctgtcagggtaccctgagggagccggtcactatcgactgcggccacaacttctgccgggcctgccttacccgctactgtgagataccaggcccagacctggaggagtcccctacttgcccactctgcaaagaacccttccgtcctgggagcttccggcccaactggcagctggctaacgtggtggagaacattgagcgcctccagctggtgtccacactgggtttgggagaggaggatgtctgccaagagcacggagagaagatctacttcttctgtgaggatgatgagatgcagttgtgcgtggtgtgccgggaggctggggagcacgctacccacaccatgcgcttcctggaggatgcagcggctccctatagggaacaaatccataagtgtcttaaatgtctaagaaaagagagagaggagattcaagaaatccagtcaagagaaaataaaaggatgcaagtcctcctgactcaggtgtccaccaagagacaacaggtgatttctgagttcgcacacctgaggaagtttctagaggaacagcagagcatcctcttagcacaattggagagccaggatggggacatcttgaggcaacgggatgaatttgatttgctggttgctggggagatctgccggtttagtgctcttattgaagaactggaggagaagaatgagaggccagcaagggagctcctgacggacatcagaagcactctaataagatgtgaaaccagaaagtgccggaaaccggtggctgtgtcgccagagctgggccagaggattcgggactttccccagcaggccctcccgctgcagagggagatgaagatgtttctggaaaaactatgctttgagttggactatgagccagctcacatttctctagaccctcagacttcccaccccaagctcctcttgtccgaggaccaccagcgagctcagttctcctacaaatggcagaactcaccagacaacccccaacgttttgaccgggccacctgtgttctggcccacactggcatcacaggggggagacacacgtgggtgtggatggccagggtacctggggactcaggctgctgccagttctgctcaccaccatccgtgcttggcacagaagtagctgcatagaaagggcactggatttgaagtcagaagacctgggttcttgaaccagcctgtcaaccagttgtatgactttaaacaaggcatctcacctcttttcatcttgttttcttccaataatgttagagttcatgtaatcacattctctagaaccatttagtttgtgttaactatgaaccaagcagtgtggtggccactggtgacttgaaaatatagagaaaaaaaaaacctgctctatatctgaaagagctcttgggaagacagagaaacataaagaggaaattacagcacagtgtggtgggtgttacgggaagtccaaccccagcattatgggagttcaggggaaggggcatagcccagcctggaaggagagggtgagtgggggatggctttctgaaaagggtggtctaaaggatgcctatggtcaatagggaaaagaggggaagaagcatcttaagaagaggaaacagcagagaactggctggatgacctgtgactctggagcactgggttgtctccattgtcattatgggcagatgtgtgccatccccagccgacgccactcactgcctccttcctcctggtgttgccacttctgggtgagattaaggtgcagggcctgggggcaggaggacataaggtatagccataaatcataacccagggaccacactcaaccctagggaaattgtcttcctgatcagttgattaccatctgaggtcaagaaatgagatagtgggagcaaatgggtcacaaatagctcagctgtgggctcagaaactgctaggtaaaagaattccagaaggaggccagggcataagttggatgacctatgaactttagtctaaagaattgagactaccgtaattgagactactgtagtgacatctgagaaatgggatggaagagtgaccatgttttattttcttgttcttgtcactattgtattttattttgcataatcatgcccttcactgacagtctccttaacatcatctgtttactctgctcagtgtaaactacaatgctctgtcatctccctactgggtctcctgggaggaggggagccatccagggtgcaaactcaaaggcagagggcacagcgtgcttaggcccaagcttagaattcaattgagaagttctgttgttcatccttacctcagcaggtagaaaagaggtggagatcagaagccagggattagagattgaattgctttccctgggagtgtgcagtatctcattaaaatgttgtatattcaaaaaaatacagacacacacaagtgcctatataatgataaaacatatccaaagcacccaaacctgtgattccagaaaagtagatcctatttttgtttatttttattggctttagctgtgtcttttgaaaggactattatcctctaaaatgtatgtgtatgaagatcctggcttgcagctcgggagctttacacaccttgtgtcactttatcttggtaacgagccaagatcatgcaaccagttcatccatgtctgacccaagagctcttaactgctatgctgcactgcctcattcagagatagatgcctgcatgggtcctggcgattattttaatgctggctacacccccacaggtgacttggattcagaaatacaatttatatttcttctttttaaattgttttattttatttttcttttaatagttatatgtcagtgagaacaatttatatgtcttacactgagaaataaaactgctcataagtgaaaa

SEQ ID NO: 13436 - protein, 395 aa, Homo sapiens
MASAASVTSLADEVNCPICQGTLREPVTIDCGHNFCRACLTRYCEIPGPDLEESPTCPLCKEPFRPGSFRPNWQLANVVENIERLQLVSTLGLGEEDVCQEHGEKIYFFCEDDEMQLCVVCREAGEHATHTMRFLEDAAAPYREQIHKCLKCLRKEREEIQEIQSRENKRMQVLLTQVSTKRQQVISEFAHLRKFLEEQQSILLAQLESQDGDILRQRDEFDLLVAGEICRFSALIEELEEKNERPARELLTDIRSTLIRCETRKCRKPVAVSPELGQRIRDFPQQALPLQREMKMFLEKLCFELDYEPAHISLDPQTSHPKLLLSEDHQRAQFSYKWQNSPDNPQRFDRATCVLAHTGITGGRHTWVWMARVPGDSGCCQFCSPPSVLGTEVAA

SEQ ID NO: 13437 - DNA, 3830 bp, Homo sapiens
aatatttcttctgacagtggacagctgacatatcaccactttccttctactgtgagtgtctctggatgggcagaaaggaatggccagcccctggttatggtcatctaaggtcacctctgaaatgctgtgagcccctcttccttcctctcctctgctatttcccatctctgctgttggcaggagaatagaaccctggctgccagagatgcaagtgtgtgacgatatgggtgctggtgcatatttagtatgtgcctgtgtccagccatgtgcatgtgtgggtgtgtgagtgtgtgacccagcccttcccccgtggccaagcagagagagtggccttgaggaagccatagcagcaggaccagcatggcctctgctgcctctgtgaccagcctggcagatgaagtcaactgccccatctgtcagggtaccctgagggagccggtcactatcgactgcggccacaacttctgccgggcctgccttacccgctactgtgagataccaggcccagacctggaggagtcccctacttgcccactctgcaaagaacccttccgtcctgggagcttccggcccaactggcagctggctaacgtggtggagaacattgagcgcctccagctggtgtccacactgggtttgggagaggaggatgtctgccaagagcacggagagaagatctacttcttctgtgaggatgatgagatgcagttgtgcgtggtgtgccgggaggctggggagcacgctacccacaccatgcgcttcctggaggatgcagcggctccctatagggaacaaatccataagtgtcttaaatgtctaagaaaagagagagaggagattcaagaaatccagtcaagagaaaataaaaggatgcaagtcctcctgactcaggtgtccaccaagagacaacaggtgatttctgagttcgcacacctgaggaagtttctagaggaacagcagagcatcctcttagcacaattggagagccaggatggggacatcttgaggcaacgggatgaatttgatttgctggttgctggggagatctgccggtttagtgctcttattgaagaactggaggagaagaatgagaggccagcaagggagctcctgacggacatcagaagcactctaataagatgtgaaaccagaaagtgccggaaaccggtggctgtgtcgccagagctgggccagaggattcgggactttccccagcaggccctcccgctgcagagggagatgaagatgtttctggaaaaactatgctttgagttggactatgagccagctcacatttctctagaccctcagacttcccaccccaagctcctcttgtccgaggaccaccagcgagctcagttctcctacaaatggcagaactcaccagacaacccccaacgttttgaccgggccacctgtgttctggcccacactggcatcacaggggggagacacacgtgggtggtgagtatagacctggcccatgggggcagctgcaccgtgggcgtggtgagcgaggatgtgcagcggaagggggagcttcggctgcggccagaggagggggtgtgggctgtgaggctggcttggggcttcgtctcggctctgggctccttccccacacggctgaccctgaaggagcagccccggcaggtgagggtgtctcttgactatgaggtgggctgggtgaccttcaccaacgctgtcacccgagagcccatctacaccttcactgcctccttcactaggaaggtcattcccttctttgggctctggggccgagggtccagtttctccctgagctcctgagaaggagcagttacctactctcctctaagtacaggactcatatcaacccaagtaccatgtggacttgatccctggctgaatcacctggatgacttggaatagaaatgactgctttagaagatgggatggggccgggtggtaagggatagaagagaggactctcaatctactgatcaagtcctttccccaatgcccagtggatggccagggtacctggggactcaggctgctgccagttctgctcaccaccatccgtgcttggcacagaagtagctgcatagaaagggcactggatttgaagtcagaagacctgggttcttgaaccagcctgtcaaccagttgtatgactttaaacaaggcatctcacctcttttcatcttgttttcttccaataatgttagagttcatgtaatcacattctctagaaccatttagtttgtgttaactatgaaccaagcagtgtggtggccactggtgacttgaaaatatagagaaaaaaaaaacctgctctatatctgaaagagctcttgggaagacagagaaacataaagaggaaattacagcacagtgtggtgggtgttacgggaagtccaaccccagcattatgggagttcaggggaaggggcatagcccagcctggaaggagagggtgagtgggggatggctttctgaaaagggtggtctaaaggatgcctatggtcaatagggaaaagaggggaagaagcatcttaagaagaggaaacagcagagaactggctggatgacctgtgactctggagcactgggttgtctccattgtcattatgggcagatgtgtgccatccccagccgacgccactcactgcctccttcctcctggtgttgccacttctgggtgagattaaggtgcagggcctgggggcaggaggacataaggtatagccataaatcataacccagggaccacactcaaccctagggaaattgtcttcctgatcagttgattaccatctgaggtcaagaaatgagatagtgggagcaaatgggtcacaaatagctcagctgtgggctcagaaactgctaggtaaaagaattccagaaggaggccagggcataagttggatgacctatgaactttagtctaaagaattgagactaccgtaattgagactactgtagtgacatctgagaaatgggatggaagagtgaccatgttttattttcttgttcttgtcactattgtattttattttgcataatcatgcccttcactgacagtctccttaacatcatctgtttactctgctcagtgtaaactacaatgctctgtcatctccctactgggtctcctgggaggaggggagccatccagggtgcaaactcaaaggcagagggcacagcgtgcttaggcccaagcttagaattcaattgagaagttctgttgttcatccttacctcagcaggtagaaaagaggtggagatcagaagccagggattagagattgaattgctttccctgggagtgtgcagtatctcattaaaatgttgtatattcaaaaaaatacagacacacacaagtgcctatataatgataaaacatatccaaagcacccaaacctgtgattccagaaaagtagatcctatttttgtttatttttattggctttagctgtgtcttttgaaaggactattatcctctaaaatgtatgtgtatgaagatcctggcttgcagctcgggagctttacacaccttgtgtcactttatcttggtaacgagccaagatcatgcaaccagttcatccatgtctgacccaagagctcttaactgctatgctgcactgcctcattcagagatagatgcctgcatgggtcctggcgattattttaatgctggctacacccccacaggtgacttggattcagaaatacaatttatatttcttctttttaaattgttttattttatttttcttttaatagttatatgtcagtgagaacaatttatatgtcttacactgagaaataaaactgctcataagtgaaaa

SEQ ID NO: 13438 - protein, 481 aa, Homo sapiens
MASAASVTSLADEVNCPICQGTLREPVTIDCGHNFCRACLTRYCEIPGPDLEESPTCPLCKEPFRPGSFRPNWQLANVVENIERLQLVSTLGLGEEDVCQEHGEKIYFFCEDDEMQLCVVCREAGEHATHTMRFLEDAAAPYREQIHKCLKCLRKEREEIQEIQSRENKRMQVLLTQVSTKRQQVISEFAHLRKFLEEQQSILLAQLESQDGDILRQRDEFDLLVAGEICRFSALIEELEEKNERPARELLTDIRSTLIRCETRKCRKPVAVSPELGQRIRDFPQQALPLQREMKMFLEKLCFELDYEPAHISLDPQTSHPKLLLSEDHQRAQFSYKWQNSPDNPQRFDRATCVLAHTGITGGRHTWVVSIDLAHGGSCTVGVVSEDVQRKGELRLRPEEGVWAVRLAWGFVSALGSFPTRLTLKEQPRQVRVSLDYEVGWVTFTNAVTREPIYTFTASFTRKVIPFFGLWGRGSSFSLSS

SEQ ID NO: 13439 - DNA, 643 bp, Homo sapiens
agataattgatttcagtaacaagggagggttgttatttacacatgttcctttgggatgagtcggaaactcagaatgatttcagtgcggggcatatcaaactcagtacagaccccagataccacttacccgaagcaaaacacaatagaatatgaccagctgagtctggagacattattaaggatgataattcccagacccagccatttctgtgcccctagatgtgaaaccagaaagtgccggaaaccggtggctgtgtcgccagagctgggccagaggattcgggactttccccagcaggccctcccgctgcagagggagatgaagatgtttctgggtaagagaaccccaggcctccacagagcgcaggtggccatgaagcctgggtttaggagtggcctccacgctccactgctgaaaggtgtgactttggcaagccttattccttcctgtgccttgatttccttatttgcagatttttataaaatctgcctattaggatattgtgacaatgaagaaagagaataaaggtgaatatttctggtgaaaaagttaaactgattttaaaataattcaacaaatctgattagtggtcattaagcaatatgaaagataatgattaacaatatatcattcttaataagt

SEQ ID NO: 13440 - protein, 156 aa, Homo sapiens [sequence omitted]

SEQ ID NO: 13441 - DNA, 2226 bp, Homo sapiens
gctgtgggcacgcctcagagccagaagtttatggctcccacctgctcaatctgacaggaagcttctgctccccagttctccccagccactgtggtctacagattccaggaaacccatccccctgtgacctcatggtgtgctctgttctccaccctagggaccagaaggagccaggagtaaagaactggcttacttggccgccactgggaaattctgggtaattcgagacgccctggaatttggacccactccgctgataggtggtggccagggttctagggaacacaagaggcggagccaggtggcttccctgtgctggcattcttgcctctctctctctttctctctctctgtctcttagccttgcagccgtttccctctgcgattcatgtaagtgtgactcgatttcagggaaagggaactcgcgtgggctgaggagaccggagtggacgggctggggaaggcaccgtgatgcccgcaaccccgtccctgaaggtggtccatgagctgcctgcctgtaccctctgtgcggggccgctggaggatgcggtgaccattccctgtggacacaccttctgccggctctgcctccccgcgctctcccagatgggggcccaatcctcgggcaagatcctgctctgcccgctctgccaagaggaggagcaggcagagactcccatggcccctgtgcccctgggcccgctgggagaaacttactgcgaggagcacggcgagaagatctacttcttctgcgagaacgatgccgagttcctctgtgtgttctgcagggagggtcccacgcaccaggcgcacaccgtggggttcctggacgaggccattcagccctaccgggatcgtctcaggagtcgactggaagctctgagcacggagagagatgagattgaggatgtaaagtgtcaagaagaccagaagcttcaagtgctgctgactcagatcgaaagcaagaagcatcaggtggaaacagcttttgagaggctgcagcaggagctggagcagcagcgatgtctcctgctggccaggctgagggagctggagcagcagatttggaaggagagggatgaatatatcacaaaggtctctgaggaagtcacccggcttggagcccaggtcaaggagctggaggagaagtgtcagcagccagcaagtgagcttctacaagatgtcagagtcaaccagagcaggtgtgagatgaagacttttgtgagtcctgaggccatttctcctgaccttgtcaagaagatccgtgatttccacaggaaaatactcaccctcccagagatgatgaggatgttctcagaaaacttggcgcatcatctggaaatagattcaggggtcatcactctggaccctcagaccgccagccggagcctggttctctcggaagacaggaagtcagtgaggtacacccggcagaagaagagcctgccagacagccccctgcgcttcgacggcctcccggcggttctgggcttcccgggcttctcctccgggcgccaccgctggcaggttgacctgcagctgggcgacggcggcggctgcacggtgggggtggccggggagggggtgaggaggaagggagagatgggactcagcgccgaggacggcgtctgggccgtgatcatctcgcaccagcagtgctgggccagcacctccccgggcaccgacctgccgctgagcgagatcccgcgcggcgtgagagtcgccctggactacgaggcggggcaggtgaccctccacaacgcccagacccaggagcccatcttcaccttcactgcctctttctccggcaaagtcttccctttctttgccgtctggaaaaaaggttcctgccttacgctgaaaggctgaagtggggcgcgcgaagggcggcgaagcggagacggcggctctccgggatccagctccgcccctggccagtgtgcggcccgggggctccctgtgcccgcgtgaggcgagagaacaggggacttgagtctcgaacagcggttgtttttactttatttatcttaggccctcagctccctgacgtcctgagcctccctgtgacgctctggccttctctgtacctcagagtgcagaaccacagacggcttcggctgtgcctagggcaacagccaacctaggagccagcgggctttcggggaaaaaaaagaaaaagacatctaaaataaaatgtttaaactgtttcaaaataattatcttggg

SEQ ID NO: 13442 - protein, 465 aa, Homo sapiens [sequence omitted]

SEQ ID NO: 13443 - DNA, 2355 bp, Homo sapiens
gcctctctctctctttctctctctctgtctcttagccttgcagccgtttccctctgcgattcatgtaagtgtgactcgatttcagggaaagggaactcgcgtgggctgaggagaccggagtggacgggctggggaaggcaccgtgatgcccgcaaccccgtccctgaaggtggtccatgagctgcctgcctgtaccctctgtgcggggccgctggaggatgcggtgaccattccctgtggacacaccttctgccggctctgcctccccgcgctctcccagatgggggcccaatcctcgggcaagatcctgctctgcccgctctgccaagaggaggagcaggcagagactcccatggcccctgtgcccctgggcccgctgggagaaacttactgcgaggagcacggcgagaagatctacttcttctgcgagaacgatgccgagttcctctgtgtgttctgcagggagggtcccacgcaccaggcgcacaccgtggggttcctggacgaggccattcagccctaccgggatcgtctcaggagtcgactggaagctctgagcacggagagagatgagattgaggatgtaaagtgtcaagaagaccagaagcttcaagtgctgctgactcagatcgaaagcaagaagcatcaggtggaaacagcttttgagaggctgcagcaggagctggagcagcagcgatgtctcctgctggccaggctgagggagctggagcagcagatttggaaggagagggatgaatatatcacaaaggtctctgaggaagtcacccggcttggagcccaggtcaaggagctggaggagaagtgtcagcagccagcaagtgagcttctacaagatgtcagagtcaaccagagcaggtgtgagatgaagacttttgtgagtcctgaggccatttctcctgaccttgtcaagaagatccgtgatttccacaggaaaatactcaccctcccagagatgatgaggatgttctcagaaaacttggcgcatcatctggaaatagattcaggggtcatcactctggaccctcagaccgccagccggagcctggttctctcggaagacaggaagtcagtgaggtacacccggcagaagaagagcctgccagacagccccctgcgcttcgacggcctcccggcggttctgggcttcccgggcttctcctccgggcgccaccgctggcaggttgacctgcagctgggcgacggcggcggctgcacggtgggggtggccggggagggggtgaggaggaagggagagatgggactcagcgccgaggacggcgtctgggccgtgatcatctcgcaccagcagtgctgggccagcacctccccgggcaccgacctgccgctgagcgagatcccgcgcggcgtgagagtcgccctggactacgaggcggggcaggtgaccctccacaacgcccagacccaggagcccatcttcaccttcactgcctctttctccggcaaagtcttccctttctttgccgtctggaaaaaaggttcctgccttacgctgaaaggctgaagtggggcgcgcgaagggcggcgaagcggagacggcggctctccgggatccagctccgcccctggccagtgtgcggcccgggggctccctgtgcccgcgtgaggcgagagaacaggggacttgagtctcgaacagcggttgtttttactttatttatcttaggccctcagctccctgacgtcctgagcctccctgtgacgctctggccttctctgtacctcagagtgcagaaccacagacggcttcggctgtgcctagggcaacagccaacctaggagccagcgggctttcggggaaaaaaaagaaaaagacatctaaaataaaatgtttaaactgtttcaaaataattatcttgggaaaaatcagggttttgctggacttgcactaatttgtacagttaacttcgtactttgacacacacctgaagatgcctccacctttgtagggcttagggcctttttatcagccctgggtggaccccagggccccttcctttcccttcccttctggtcatttctctggacttgtagagaatgtcctaagaaagtgtgactcacagacctctggattccatgtgtccaattagcgctgatgggactggagaaaggcttaaatccaatgggatctgcctgtgttggcaatttagggccgagatggctcgagggagtagatgcagagaggaagggtgatgatccctctgtgaccaagacacaatcctgtcccttcttttagtcaggatatccctgatgacagacagtgggacaatcaccaggccccattgtttaagaaaacgaggcttttgctcaggtcta

SEQ ID NO: 13444 - protein, 465 aa, Homo sapiens [sequence omitted]

SEQ ID NO: 13445 - DNA, 431 bp, Homo sapiens
atgcccgcaaccccgtccctgaaggtggtccatgagctgcctgcctgtaccctctgtgcggggccgctggaggatgcggtgaccattccctgtggacacaccttctgccggctctgcctccccgcgctctcccagatgggggcccaatcctcgggcaagatcctgctctgcccgctctgccaagaggaggagcaggcagagactcccatggcccctgtgcccctgggcccgctgggagaaacttactgcgaggagcacggcgagaagatctacttcttctgcgagaacgatgccgagttccttctgtacctcagagtgcagaaccacagacggcttcggctgtgcctagggcaacagccaacctaggagccagcgggctttcggggaaaaaaaagaaaaagacatctaaaataaaatgtttaaactgtttc

SEQ ID NO: 13446 - protein, 121 aa, Homo sapiens
MPATPSLKVVHELPACTLCAGPLEDAVTIPCGHTFCRLCLPALSQMGAQSSGKILLCPLCQEEEQAETPMAPVPLGPLGETYCEEHGEKIYFFCENDAEFLLYLRVQNHRRLRLCLGQQPT

SEQ ID NO: 13447 - DNA, 903 bp, Homo sapiens
atgcccgcaaccccgtccctgaaggtggtccatgagctgcctgcctgtaccctctgtgcggggccgctggaggatgcggtgaccattccctgtggacacaccttctgccggctctgcctccccgcgctctcccagatgggggcccaatcctcgggcaagatcctgctctgcccgctctgccaagaggaggagcaggcagagactcccatggcccctgtgcccctgggcccgctgggagaaacttactgcgaggagcacggcgagaagatctacttcttctgcgagaacgatgccgagttccttctgtacctcagagtgcagaaccacagacggcttcggctgtgcctagggcaacagccaacctaggagccagcgggctttcggggaaaaaaaagaaaaagacatctaaaataaaatgtttaaactgtttcaaaataattatcttgggaaaaatcagggttttgctggacttgcactaatttgtacagttaacttcgtactttgacacacacctgaagatgcctccacctttgtagggcttagggcctttttatcagccctgggtggaccccagggccccttcctttcccttcccttctggtcatttctctggacttgtagagaatgtcctaagaaagtgtgactcacagacctctggattccatgtgtccaattagcgctgatgggactggagaaaggcttaaatccaatgggatctgcctgtgttggcaatttagggccgagatggctcgagggagtagatgcagagaggaagggtgatgatccctctgtgaccaagacacaatcctgtcccttcttttagtcaggatatccctgatgacagacagtgggacaatcaccaggccccattgtttaagaaaacgaggcttttgctcaggtcta

SEQ ID NO: 13448 - protein, 121 aa, Homo sapiens; identical to SEQ ID NO: 13446

SEQ ID NO: 13449 - DNA, 910 bp, Homo sapiens
cccacgcaccaggcgcacaccgtggggttcctggacgaggccattcagccctaccgggatcgtctcaggagtcgactggaagctctgagcacggagagagatgagattgaggatgtaaagtgtcaagaagaccagaacagccagcaagtgagcttctacaagtgagatgtgcggcccgggggctccctgtgcccgcgtgaggcgagagaacaggggacttgagtctcgaacagcggttgtttttactttatttatcttaggccctcagctccctgacgtcctgagcctccctgtgacgctctggccttctctgtacctcagagtgcagaaccacagacggcttcggctgtgcctagggcaacagccaacctaggagccagcgggctttcggggaaaaaaaagaaaaagacatctaaaataaaatgtttaaactgtttcaaaataattatcttgggaaaaatcagggttttgctggacttgcactaatttgtacagttaacttcgtactttgacacacacctgaagatgcctccacctttgtagggcttagggcctttttatcagccctgggtggaccccagggccccttcctttcccttcccttctggtcatttctctggacttgtagagaatgtcctaagaaagtgtgactcacagacctctggattccatgtgtccaattagcgctgatgggactggagaaaggcttaaatccaatgggatctgcctgtgttggcaatttagggccgagatggctcgagggagtagatgcagagaggaagggtgatgatccctctgtgaccaagacacaatcctgtcccttcttttagtcaggatatccctgatgacagacagtgggacaatcaccaggccccattgtttaagaaaacgaggcttttgctcaggtcta

SEQ ID NO: 13450 - protein, 68 aa, Homo sapiens
MCGPGAPCARVRRENRGLESRTAVVFTLFILGPQLPDVLSLPVTLWPSLYLRVQNHRRLRLCLGQQPT

SEQ ID NO: 13451 - DNA, 426 bp, Homo sapiens
ggtttaactgaaatgcctactattttagtaactacacatttccagcaaaagtaaagaaatgatactcaatttcattattcaccacagacgccaagatcattctttagtctgattttagcctcacgtggtctcacccgaacatttgtttttggaatttggacctaactggttaccaaacctgtctgcaggtgtgagatgaagacttttgtgagtcctgaggccatttctcctgaccttgtcaagaagatccgtgatttccacaggaaaatactcaccctcccagagatgatgaggatgttctcagaaaacttggcgcatcatctggaaatagattcaggtaaacagcttgggatttggggagtcattcttccattcatccattcaatccatggcagcaaacagagcaataaaatgcatgaattctgg

SEQ ID NO: 13452 - protein, 76 aa, Homo sapiens
MKTFVSPEAISPDLVKKIRDFHRKILTLPEMMRMFSENLAHHLEIDSGKQLGIWGVILPFIHSIHGSKQSNKMHEF

SEQ ID NO: 13453 - DNA, 1737 bp, Homo sapiens
ctatggggatggatatgacgactgggaaacggacgaagatgaggaatcgttgggcgatgaagaggaagaagaggaggaggaagaggaggaagttctggaaagctgcatggtgggggtggctagagactctgtgaagaggaagggagacctctccctgcggccagaggatggcgtgtgggcgctgcgcctctcctcctccggcatctgggccaacaccagccccgaggctgagcttttcccagcactgcggccccggagagtgggcatcgccctggattatgaagggggcaccgtgactttcaccaacgcagagtcacaggaactcatctacaccttcactgccaccttcacccggcgcctggtccccttcctgtggctcaagtggccaggaacacgcctcctgctaagaccctgagccctgacatctgcccccagccccaaccctcagatgcttcacttctttggaattccaggactctcaatggggggacgggatgcctggcctaagcacctggagcaggggaccccatatccactggtagccacctccccattgctgtggccccctgaaatctcactcagtgctgttgctccatctactgccctaatggggctcttttcccacctcctgctggtttcccgagggaacttctgaccctggagtccatgagggctcctttcctttttgaccacgaccttggccccagctctgcactctctggaataagggcccgatgcagcattttcttgcccagtgtggcaagacctcagaaaaaccagtcaattacgcctaagatcattttgctgtccttaaaccccccaggttccttcttgcacaaatccactctgctgcccaccttccctggcattttaaacagacctaccccaccccaactcagagttaagcatacatggcaatgctgaaaataaacaaaatccactgaggcttcccaggccatttaaagcctggagtaccagcgcatatcatctcatggggtccagagtggagtccaggcttctctgaaaccagggctgagcatatttccatagccaaggaggtgggactccctggagctatctgtggtcttagggaaggatccagacatacacggctttggggtacaagctgtgatcactgatcaataaattatctctagattggtccttgtgaggggagttttaagaatccagaacatcttgctcttgatcagcacatccaaaaacaccaagacaaacatccagtggagcagaacctctcctgcctcgggagttctgaccgggttccccagcagggtgttaagcctctgtctctggccctaccagcatccaggttccactttcctaggagagagtggagatgggaagacagggaaaggaaggcagcaggaggccacaagcccaccagccaaattgatctcccagtcttgtccttacccattccaagtgctctgccagcccctgttcatccaagttttaagtcctccaccctgttctaagagactgttccaacggctctgggcctcagtggtcacttgaccaccattgtctcagagctgcccactttgtgtgtgtcacatgctgcctgagtcacatgtacatcttatttctgcctctagttttgtaagctcctggagggcggataacatcttatactactcttgtattctcatggcacctagtgcagtgctgggcacagagtaggtgctcaataaagacttgttgaatgaacagcctgga

SEQ ID NO: 13454 - protein, 102 aa, Homo sapiens [sequence omitted]

SEQ ID NO: 13455 - DNA, 1106 bp, Homo sapiens
acagtgagcgtcaccctggacccacagtcggccagtgggtacctgcagctgtcagaggactggaagtgcgtgacctacaccagcctgtacaagagtgcctacctgcacccccagcagtttgactgtgagcctggggtgctaggcagcaagggcttcacctggggcaaggtctactgggaagtggaagtggagagggagggctggtctgaggatgaagaagagggggatgaggaggaagagggagaagaggaggaggaggaagaggaggccggctatggggatggatatgacgactgggaaacggacgaagatgaggaatcgttgggcgatgaagaggaagaagaggaggaggaagaggaggaagttctggaaagctgcatggtgggggtggctagagactctgtgaagaggaagggagacctctccctgcggccagaggatggcgtgtgggcgctgcgcctctcctcctccggcatctgggccaacaccagccccgaggctgagcttttcccagcactgcggccccggagagtgggcatcgccctggattatgaagggggcaccgtgactttcaccaacgcagagtcacaggaactcatctacaccttcactgccaccttcacccggcgcctggtccccttcctgtggctcaagtggccaggaacacgcctcctgctaagaccctgagccctgacatctgcccccagccccaaccctcagatgcttcacttctttggaattccaggactctcaatggggggacgggatgcctggccaaattgatctcccagtcttgtccttacccattccaagtgctctgccagcccctgttcatccaagttttaagtcctccaccctgttctaagagactgttccaacggctctgggcctcagtggtcacttgaccaccattgtctcagagctgcccactttgtgtgtgtcacatgctgcctgagtcacatgtacatcttatttctgcctctagttttgtaagctcctggagggcggataacatcttatactactcttgtattctcatggcacctagtgcagtgctgggcacagagtaggtgctcaataaagacttgttgaatgaacagcctgga

SEQ ID NO: 13456 - protein, 32 aa, Homo sapiens
MPGQIDLPVLSLPIPSALPAPVHPSFKSSTLF

SEQ ID NO: 13457 - DNA, 3123 bp, Homo sapiens
catgcatatccagccctgcgcagtctggcctctgccgttctcaccaagccctttcctgttttaccttacctctcttcatccggccagtacttcttatccgtcaattctctgcgcaggtatctcccagagaggttgcccatgtcatctcccagccattgtggcttctgtcattgtgccgattttgtttgttttcttgttgttttatgcagtgaccccactggaatgtcagctccataaaaaagggaccacatttgttttgttcactgatatgtcccatctctgctacagtgttgggtgcagatgcattgaagtcttatttgattcatattgatacttgtgcttttttctttcccttctaggacacgagagacttcctaaacaggtaaaagagtctcctctccatggcgtacctcatcccccttgtttatgttcccccgcttctgaccaggtgcatttgaattcatggggagtggtatggtgccagaggtactcacatcccatggttcatcctgatgcccttctgaggagcaggacacatcattgagaactggagacttgctctcctccttatggttctctgtgtagccccagctccttggcccactggccttatttgaggtgggacagagcagagaggttagaaacatggcttagtagacagagcgccctggatgtggagtctactgatgttctgaagccctggttcagctggtgtctttgggccactgtttttctgtcacttgtttggggataatcatacctttcctctccccttcataattgccatgaggattgagagataagtatgaaggaaagtaagaagagctgagtaacagcttgttatgtatgtcatcttcttaggtatccacggaagaagttctgggttgggaaacccattgctcgagtggttaaaaaaaagaccggagaattctcagataaactcctctctctgcaacgaggcctgagggaattccaggggaagctgctgagagacttggaatataagacagtgagcgtcaccctggacccacagtcggccagtgggtacctgcagctgtcagaggactggaagtgcgtgacctacaccagcctgtacaagagtgcctacctgcacccccagcagtttgactgtgagcctggggtgctaggcagcaagggcttcacctggggcaaggtctactgggaagtggaagtggagagggagggctggtctgaggatgaagaagagggggatgaggaggaagagggagaagaggaggaggaggaagaggaggccggctatggggatggatatgacgactgggaaacggacgaagatgaggaatcgttgggcgatgaagaggaagaagaggaggaggaagaggaggaagttctggaaagctgcatggtgggggtggctagagactctgtgaagaggaagggagacctctccctgcggccagaggatggcgtgtgggcgctgcgcctctcctcctccggcatctgggccaacaccagccccgaggctgagcttttcccagcactgcggccccggagagtgggcatcgccctggattatgaagggggcaccgtgactttcaccaacgcagagtcacaggaactcatctacaccttcactgccaccttcacccggcgcctggtccccttcctgtggctcaagtggccaggaacacgcctcctgctaagaccctgagccctgacatctgcccccagccccaaccctcagatgcttcacttctttggaattccaggactctcaatggggggacgggatgcctggcctaagcacctggagcaggggaccccatatccactggtagccacctccccattgctgtggccccctgaaatctcactcagtgctgttgctccatctactgccctaatggggctcttttcccacctcctgctggtttcccgagggaacttctgaccctggagtccatgagggctcctttcctttttgaccacgaccttggccccagctctgcactctctggaataagggcccgatgcagcattttcttgcccagtgtggcaagacctcagaaaaaccagtcaattacgcctaagatcattttgctgtccttaaaccccccaggttccttcttgcacaaatccactctgctgcccaccttccctggcattttaaacagacctaccccaccccaactcagagttaagcatacatggcaatgctgaaaataaacaaaatccactgaggcttcccaggccatttaaagcctggagtaccagcgcatatcatctcatggggtccagagtggagtccaggcttctctgaaaccagggctgagcatatttccatagccaaggaggtgggactccctggagctatctgtggtcttagggaaggatccagacatacacggctttggggtacaagctgtgatcactgatcaataaattatctctagattggtccttgtgaggggagttttaagaatccagaacatcttgctcttgatcagcacatccaaaaacaccaagacaaacatccagtggagcagaacctctcctgcctcgggagttctgaccgggttccccagcagggtgttaagcctctgtctctggccctaccagcatccaggttccactttcctaggagagagtggagatgggaagacagggaaaggaaggcagcaggaggccacaagcccaccaggtcttcatgtcaagagagggagtaacatgtcttctcattgcccacggacccaacctctgtccaggtgcccctcatcatcacagtttaacacaagctcccctgctccagccaaattgatctcccagtcttgtccttacccattccaagtgctctgccagcccctgttcatccaagttttaagtcctccaccctgttctaagagactgttccaacggctctgggcctcagtggtcacttgaccaccattgtctcagagctgcccactttgtgtgtgtcacatgctgcctgagtcacatgtacatcttatttctgcctctagttttgtaagctcctggagggcggataacatcttatactactcttgtattctcatggcacctagtgcagtgctgggcacagagtaggtgctcaataaagacttgttgaatgaacagcctgga

SEQ ID NO: 13458 - protein, 109 aa, Homo sapiens
MHIQPCAVWPLPFSPSPFLFYLTSLHPASTSYPSILCAGISQRGCPCHLPAIVASVIVPILFVFLLFYAVTPLECQLHKKGTTFVLFTDMSHLCYSVGCRCIEVLFDSY

SEQ ID NO: 13459 - DNA, 3260 bp, Homo sapiens
ggagtcaggaatggagagaagggtaatggttttacctcttattgtggaaacctgttgagatcacagagaatatactgacggcataaaagggcagaaccatagcagggtgcgcgctgctgtagttgccttccatggatctataggagagcaagtcctccaggagaagaagtcctcaccagtgaacggagacctctctgaactaaggataccatggccacgtcagccccactacggagcctggaagaggaggtgacctgctccatctgtcttgattacctgcgggaccctgtgaccattgactgtggccacgtcttctgccgcagctgcaccacagacgtccgccccatctcagggagccgccccgtctgcccactctgcaagaagccttttaagaaggagaacatccgacccgtgtggcaactggccagcctggtggagaacattgagcggctgaaggtggacaagggcaggcagccgggagaggtgacccgggagcagcaggatgcaaagttgtgcgagcgacaccgagagaagctgcactactactgtgaggacgacgggaagctgctgtgcgtgatgtgccgggagtcccgggagcacaggccccacacggccgtcctcatggagaaggccgcccagccccacagggaaaaaatcctgaaccacctgagtaccctaaggagggacagagacaaaattcagggcttccaggcaaagggagaagctgatatcctggccgcgctgaagaagctccaggaccagaggcagtacattgtggctgagtttgagcagggtcatcagttcctgagggagcgggaggaacacctgctggaacagctggcgaagctggagcaggagctcacggagggcagggagaagttcaagagccggggcgtcggggagcttgcccggctggccctggtcatctccgaactggagggcaaggcgcagcagccagctgcagagctcatgcaggacacgagagacttcctaaacaggtatccacggaagaagttctgggttgggaaacccattgctcgagtggttaaaaaaaagaccggagaattctcagataaactcctctctctgcaacgaggcctgagggaattccaggggaagctgctgagagacttggaatataagacagtgagcgtcaccctggacccacagtcggccagtgggtacctgcagctgtcagaggactggaagtgcgtgacctacaccagcctgtacaagagtgcctacctgcacccccagcagtttgactgtgagcctggggtgctaggcagcaagggcttcacctggggcaaggtctactgggaagtggaagtggagagggagggctggtctgaggatgaagaagagggggatgaggaggaagagggagaagaggaggaggaggaagaggaggccggctatggggatggatatgacgactgggaaacggacgaagatgaggaatcgttgggcgatgaagaggaagaagaggaggaggaagaggaggaagttctggaaagctgcatggtgggggtggctagagactctgtgaagaggaagggagacctctccctgcggccagaggatggcgtgtgggcgctgcgcctctcctcctccggcatctgggccaacaccagccccgaggctgagcttttcccagcactgcggccccggagagtgggcatcgccctggattatgaagggggcaccgtgactttcaccaacgcagagtcacaggaactcatctacaccttcactgccaccttcacccggcgcctggtccccttcctgtggctcaagtggccaggaacacgcctcctgctaagaccctgagccctgacatctgcccccagccccaaccctcagatgcttcacttctttggaattccaggactctcaatggggggacgggatgcctggcctaagcacctggagcaggggaccccatatccactggtagccacctccccattgctgtggccccctgaaatctcactcagtgctgttgctccatctactgccctaatggggctcttttcccacctcctgctggtttcccgagggaacttctgaccctggagtccatgagggctcctttcctttttgaccacgaccttggccccagctctgcactctctggaataagggcccgatgcagcattttcttgcccagtgtggcaagacctcagaaaaaccagtcaattacgcctaagatcattttgctgtccttaaaccccccaggttccttcttgcacaaatccactctgctgcccaccttccctggcattttaaacagacctaccccaccccaactcagagttaagcatacatggcaatgctgaaaataaacaaaatccactgaggcttcccaggccatttaaagcctggagtaccagcgcatatcatctcatggggtccagagtggagtccaggcttctctgaaaccagggctgagcatatttccatagccaaggaggtgggactccctggagctatctgtggtcttagggaaggatccagacatacacggctttggggtacaagctgtgatcactgatcaataaattatctctagattggtccttgtgaggggagttttaagaatccagaacatcttgctcttgatcagcacatccaaaaacaccaagacaaacatccagtggagcagaacctctcctgcctcgggagttctgaccgggttccccagcagggtgttaagcctctgtctctggccctaccagcatccaggttccactttcctaggagagagtggagatgggaagacagggaaaggaaggcagcaggaggccacaagcccaccaggtcttcatgtcaagagagggagtaacatgtcttctcattgcccacggacccaacctctgtccaggtgcccctcatcatcacagtttaacacaagctcccctgctccagccaaattgatctcccagtcttgtccttacccattccaagtgctctgccagcccctgttcatccaagttttaagtcctccaccctgttctaagagactgttccaacggctctgggcctcagtggtcacttgaccaccattgtctcagagctgcccactttgtgtgtgtcacatgctgcctgagtcacatgtacatcttatttctgcctctagttttgtaagctcctggagggcggataacatcttatactactcttgtattctcatggcacctagtgcagtgctgggcacagagtaggtgctcaataaagacttgttgaatgaacagcctgga

SEQ ID NO: 13460 - protein, 539 aa, Homo sapiens; identical to SEQ ID NO: 1411

SEQ ID NO: 13461 - DNA, 3242 bp, Homo sapiens
ggtgccggccgggattcgcggcccggagctcgggaccggttgcttcattccagcctcgcagtcacctctgtgccctgctggttgtcttcccagcgctgctgtagttgccttccatggatctataggagagcaagtcctccaggagaagaagtcctcaccagtgaacggagacctctctgaactaaggataccatggccacgtcagccccactacggagcctggaagaggaggtgacctgctccatctgtcttgattacctgcgggaccctgtgaccattgactgtggccacgtcttctgccgcagctgcaccacagacgtccgccccatctcagggagccgccccgtctgcccactctgcaagaagccttttaagaaggagaacatccgacccgtgtggcaactggccagcctggtggagaacattgagcggctgaaggtggacaagggcaggcagccgggagaggtgacccgggagcagcaggatgcaaagttgtgcgagcgacaccgagagaagctgcactactactgtgaggacgacgggaagctgctgtgcgtgatgtgccgggagtcccgggagcacaggccccacacggccgtcctcatggagaaggccgcccagccccacagggaaaaaatcctgaaccacctgagtaccctaaggagggacagagacaaaattcagggcttccaggcaaagggagaagctgatatcctggccgcgctgaagaagctccaggaccagaggcagtacattgtggctgagtttgagcagggtcatcagttcctgagggagcgggaggaacacctgctggaacagctggcgaagctggagcaggagctcacggagggcagggagaagttcaagagccggggcgtcggggagcttgcccggctggccctggtcatctccgaactggagggcaaggcgcagcagccagctgcagagctcatgcaggacacgagagacttcctaaacaggtatccacggaagaagttctgggttgggaaacccattgctcgagtggttaaaaaaaagaccggagaattctcagataaactcctctctctgcaacgaggcctgagggaattccaggggaagctgctgagagacttggaatataagacagtgagcgtcaccctggacccacagtcggccagtgggtacctgcagctgtcagaggactggaagtgcgtgacctacaccagcctgtacaagagtgcctacctgcacccccagcagtttgactgtgagcctggggtgctaggcagcaagggcttcacctggggcaaggtctactgggaagtggaagtggagagggagggctggtctgaggatgaagaagagggggatgaggaggaagagggagaagaggaggaggaggaagaggaggccggctatggggatggatatgacgactgggaaacggacgaagatgaggaatcgttgggcgatgaagaggaagaagaggaggaggaagaggaggaagttctggaaagctgcatggtgggggtggctagagactctgtgaagaggaagggagacctctccctgcggccagaggatggcgtgtgggcgctgcgcctctcctcctccggcatctgggccaacaccagccccgaggctgagcttttcccagcactgcggccccggagagtgggcatcgccctggattatgaagggggcaccgtgactttcaccaacgcagagtcacaggaactcatctacaccttcactgccaccttcacccggcgcctggtccccttcctgtggctcaagtggccaggaacacgcctcctgctaagaccctgagccctgacatctgcccccagccccaaccctcagatgcttcacttctttggaattccaggactctcaatggggggacgggatgcctggcctaagcacctggagcaggggaccccatatccactggtagccacctccccattgctgtggccccctgaaatctcactcagtgctgttgctccatctactgccctaatggggctcttttcccacctcctgctggtttcccgagggaacttctgaccctggagtccatgagggctcctttcctttttgaccacgaccttggccccagctctgcactctctggaataagggcccgatgcagcattttcttgcccagtgtggcaagacctcagaaaaaccagtcaattacgcctaagatcattttgctgtccttaaaccccccaggttccttcttgcacaaatccactctgctgcccaccttccctggcattttaaacagacctaccccaccccaactcagagttaagcatacatggcaatgctgaaaataaacaaaatccactgaggcttcccaggccatttaaagcctggagtaccagcgcatatcatctcatggggtccagagtggagtccaggcttctctgaaaccagggctgagcatatttccatagccaaggaggtgggactccctggagctatctgtggtcttagggaaggatccagacatacacggctttggggtacaagctgtgatcactgatcaataaattatctctagattggtccttgtgaggggagttttaagaatccagaacatcttgctcttgatcagcacatccaaaaacaccaagacaaacatccagtggagcagaacctctcctgcctcgggagttctgaccgggttccccagcagggtgttaagcctctgtctctggccctaccagcatccaggttccactttcctaggagagagtggagatgggaagacagggaaaggaaggcagcaggaggccacaagcccaccaggtcttcatgtcaagagagggagtaacatgtcttctcattgcccacggacccaacctctgtccaggtgcccctcatcatcacagtttaacacaagctcccctgctccagccaaattgatctcccagtcttgtccttacccattccaagtgctctgccagcccctgttcatccaagttttaagtcctccaccctgttctaagagactgttccaacggctctgggcctcagtggtcacttgaccaccattgtctcagagctgcccactttgtgtgtgtcacatgctgcctgagtcacatgtacatcttatttctgcctctagttttgtaagctcctggagggcggataacatcttatactactcttgtattctcatggcacctagtgcagtgctgggcacagagtaggtgctcaataaagacttgttgaatgaacagcctgga

SEQ ID NO: 13462 - protein, 539 aa, Homo sapiens; identical to SEQ ID NO: 1411

SEQ ID NO: 13463 - DNA, 3469 bp, Homo sapiens
aggaggggtgccggccgggattcgcggcccggagctcgggaccggagtcaggaatggagagaagggtaatggttttacctcttattgtggaaacctgttgagatcacagagaatatactgacggcataaaagggcagaaccatagcagggtgcggttgcttcattccagcctcgcagtcacctctgtgccctgctggttgtcttcccagcgctgctgtagttgccttccatggatctataggagagcaagtcctccaggagctggtggtgtctgtcgattgactgagtgctggagctggcagccctgtgcaggctgccacctttgcccctttactgtgcttgctcctgactctatgtcgcgtctccaaggagaagaagtcctcaccagtgaacggagacctctctgaactaaggataccatggccacgtcagccccactacggagcctggaagaggaggtgacctgctccatctgtcttgattacctgcgggaccctgtgaccattgactgtggccacgtcttctgccgcagctgcaccacagacgtccgccccatctcagggagccgccccgtctgcccactctgcaagaagccttttaagaaggagaacatccgacccgtgtggcaactggccagcctggtggagaacattgagcggctgaaggtggacaagggcaggcagccgggagaggtgacccgggagcagcaggatgcaaagttgtgcgagcgacaccgagagaagctgcactactactgtgaggacgacgggaagctgctgtgcgtgatgtgccgggagtcccgggagcacaggccccacacggccgtcctcatggagaaggccgcccagccccacagggaaaaaatcctgaaccacctgagtaccctaaggagggacagagacaaaattcagggcttccaggcaaagggagaagctgatatcctggccgcgctgaagaagctccaggaccagaggcagtacattgtggctgagtttgagcagggtcatcagttcctgagggagcgggaggaacacctgctggaacagctggcgaagctggagcaggagctcacggagggcagggagaagttcaagagccggggcgtcggggagcttgcccggctggccctggtcatctccgaactggagggcaaggcgcagcagccagctgcagagctcatgcaggacacgagagacttcctaaacaggtatccacggaagaagttctgggttgggaaacccattgctcgagtggttaaaaaaaagaccggagaattctcagataaactcctctctctgcaacgaggcctgagggaattccaggggaagctgctgagagacttggaatataagacagtgagcgtcaccctggacccacagtcggccagtgggtacctgcagctgtcagaggactggaagtgcgtgacctacaccagcctgtacaagagtgcctacctgcacccccagcagtttgactgtgagcctggggtgctaggcagcaagggcttcacctggggcaaggtctactgggaagtggaagtggagagggagggctggtctgaggatgaagaagagggggatgaggaggaagagggagaagaggaggaggaggaagaggaggccggctatggggatggatatgacgactgggaaacggacgaagatgaggaatcgttgggcgatgaagaggaagaagaggaggaggaagaggaggaagttctggaaagctgcatggtgggggtggctagagactctgtgaagaggaagggagacctctccctgcggccagaggatggcgtgtgggcgctgcgcctctcctcctccggcatctgggccaacaccagccccgaggctgagcttttcccagcactgcggccccggagagtgggcatcgccctggattatgaagggggcaccgtgactttcaccaacgcagagtcacaggaactcatctacaccttcactgccaccttcacccggcgcctggtccccttcctgtggctcaagtggccaggaacacgcctcctgctaagaccctgagccctgacatctgcccccagccccaaccctcagatgcttcacttctttggaattccaggactctcaatggggggacgggatgcctggcctaagcacctggagcaggggaccccatatccactggtagccacctccccattgctgtggccccctgaaatctcactcagtgctgttgctccatctactgccctaatggggctcttttcccacctcctgctggtttcccgagggaacttctgaccctggagtccatgagggctcctttcctttttgaccacgaccttggccccagctctgcactctctggaataagggcccgatgcagcattttcttgcccagtgtggcaagacctcagaaaaaccagtcaattacgcctaagatcattttgctgtccttaaaccccccaggttccttcttgcacaaatccactctgctgcccaccttccctggcattttaaacagacctaccccaccccaactcagagttaagcatacatggcaatgctgaaaataaacaaaatccactgaggcttcccaggccatttaaagcctggagtaccagcgcatatcatctcatggggtccagagtggagtccaggcttctctgaaaccagggctgagcatatttccatagccaaggaggtgggactccctggagctatctgtggtcttagggaaggatccagacatacacggctttggggtacaagctgtgatcactgatcaataaattatctctagattggtccttgtgaggggagttttaagaatccagaacatcttgctcttgatcagcacatccaaaaacaccaagacaaacatccagtggagcagaacctctcctgcctcgggagttctgaccgggttccccagcagggtgttaagcctctgtctctggccctaccagcatccaggttccactttcctaggagagagtggagatgggaagacagggaaaggaaggcagcaggaggccacaagcccaccaggtcttcatgtcaagagagggagtaacatgtcttctcattgcccacggacccaacctctgtccaggtgcccctcatcatcacagtttaacacaagctcccctgctccagccaaattgatctcccagtcttgtccttacccattccaagtgctctgccagcccctgttcatccaagttttaagtcctccaccctgttctaagagactgttccaacggctctgggcctcagtggtcacttgaccaccattgtctcagagctgcccactttgtgtgtgtcacatgctgcctgagtcacatgtacatcttatttctgcctctagttttgtaagctcctggagggcggataacatcttatactactcttgtattctcatggcacctagtgcagtgctgggcacagagtaggtgctcaataaagacttgttgaatgaacagcctgga

SEQ ID NO: 13464 - protein, 539 aa, Homo sapiens; identical to SEQ ID NO: 1411

SEQ ID NO: 13465 - DNA, 1180 bp, Homo sapiens
ggggatgaggaggaagagggagaagaggaggaggaggaagaggaggccggctatggggatggatatgacgactgggaaacggacgaagatgaggaatcgttgggcgatgaagaggaagaagaggaggaggaagaggaggaagttctggaaagctgcatggtgggggtggctagagactctgtgaagaggaagggagacctctccctgcggccagaggatggcgtgtgggcgctgcgcctctcctcctccggcatctgggccaacaccagccccgaggctgagcttttcccagcactgcggccccggagagtgggcatcgccctggattatgaagggggcaccgtgactttcaccaacgcagagtcacaggaactcatctacaccttcactgccaccttcacccggcgcctggtccccttcctgtggctcaagtggccaggaacacgcctcctgctaagaccctgagccctgacatctgcccccagccccaaccctcagatgcttcacttctttggaattccaggactctcaatggggggacgggatgcctggcctaagcacctggagcaggggaccccatatccactggtagccacctccccattgctgtggccccctgaaatctcactcagtgctgttgctccatctactgccctaatggggctcttttcccacctcctgctggtttcccgagggaacttctgaccctggagtccatgagggctcctttcctttttgaccacgaccttggccccagctctgcactctctggaataagggcccgatgcagcattttcttgcccagtgtggcaagacctcagaaaaaccagtcaattacgcctaagatcattttgctgtccttaaaccccccagtcttgtccttacccattccaagtgctctgccagcccctgttcatccaagttttaagtcctccaccctgttctaagagactgttccaacggctctgggcctcagtggtcacttgaccaccattgtctcagagctgcccactttgtgtgtgtcacatgctgcctgagtcacatgtacatcttatttctgcctctagttttgtaagctcctggagggcggataacatcttatactactcttgtattctcatggcacctagtgcagtgctgggcacagagtaggtgctcaataaagacttgttgaatgaac

SEQ ID NO: 13466 - protein, 76 aa, Homo sapiens
MRAPFLFDHDLGPSSALSGIRARCSIFLPSVARPQKNQSITPKIILLSLNPPVLSLPIPSALPAPVHPSFKSSTLF

SEQ ID NO: 13467 - DNA, 980 bp, Homo sapiens
acagtgagcgtcaccctggacccacagtcggccagtgggtacctgcagctgtcagaggactggaagtgcgtgacctacaccagcctgtacaagagtgcctacctgcacccccagcagtttgactgtgagcctggggtgctaggcagcaagggcttcacctggggcaaggtctactgggaagtggaagtggagagggagggctggtctgaggatgaagaagagggggatgaggaggaagagggagaagaggaggaggaggaagaggaggccggctatggggatggatatgacgactgggaaacggacgaagatgaggaatcgttgggcgatgaagaggaagaagaggaggaggaagaggaggaagttctggaaagctgcatggtgggggtggctagagactctgtgaagaggaagggagacctctccctgcggccagaggatggcgtgtgggcgctgcgcctctcctcctccggcatctgggccaacaccagccccgaggctgagcttttcccagcactgcggccccggagagtgggcatcgccctggattatgaagggggcaccgtgactttcaccaacgcagagtcacaggaactcatctacaccttcactgccaccttcacccggcgcctggtccccttcctgtggctcaagtggccaggaacacgcctcctgctaagaccctgagccctgacatctgcccccacccctgttcatccaagttttaagtcctccaccctgttctaagagactgttccaacggctctgggcctcagtggtcacttgaccaccattgtctcagagctgcccactttgtgtgtgtcacatgctgcctgagtcacatgtacatcttatttctgcctctagttttgtaagctcctggagggcggataacatcttatactactcttgtattctcatggcacctagtgcagtgctgggcacagagtaggtgctcaataaagacttgttgaatgaac

SEQ ID NO: 13468 - protein, 102 aa, Homo sapiens [sequence omitted]

SEQ ID NO: 13469 - DNA, 297 bp, Homo sapiens
ggagtcaggaatggagagaagggtaatggttttacctcttattgtggaaacctgttgagatcacagagaatatactgacggcataaaagggcagaaccatagcagggtgcggttgcttcattccagcctcgcagtcacctctgtgccctgctggttgtcttcccagcgctgctgtagttgccttccatggatctataggagaggcggataacatcttatactactcttgtattctcatggcacctagtgcagtgctgggcacagagtaggtgctcaataaagacttgttgaatgaac

SEQ ID NO: 13470 - protein, 50 aa, Homo sapiens
DHREYTDGIKGQNHSRVRLLHSSLAVTSVPCWLSSQRCCSCLPWIYRRGG

SEQ ID NO: 13471 - DNA, 469 bp, Homo sapiens
gattcgcggcccggagctcgggaccggagtcaggaatggagagaagggtaatggttttacctcttattgtggaaacctgttgagatcacagagaatatactgacggcataaaagggcagaaccatagcagggtgcggttgcttcattccagcctcgcagtcacctctgtgccctgctggttgtcttcccagcgctgctgtagttgccttccatggatctataggagagcaagtcctccagagactgttccaacggctctgggcctcagtggtcacttgaccaccattgtctcagagctgcccactttgtgtgtgtcacatgctgcctgagtcacatgtacatcttatttctgcctctagttttgtaagctcctggagggcggataacatcttatactactcttgtattctcatggcacctagtgcagtgctgggcacagagtaggtgctcaataaagacttgttgaatg

SEQ ID NO: 13472 - protein, 41 aa, Homo sapiens
MLPESHVHLISASSFVSSWRADNILYYSCILMAPSAVLGTE

SEQ ID NO: 13473 - DNA, 596 bp, Homo sapiens
acagaccgccgtgagagaggaggggtgccggccgggattcgcggcccggagctcgggaccggagtcaggaatggagagaagggtaatggttttacctcttattgtggaaacctgttgagatcacagagaatatactgacggcataaaagggcagaaccatagcagggtgcggttgcttcattccagcctcgcagtcacctctgtgccctgctggttgtcttcccagcgctgctgtagttgccttccatggatctataggagagcaagtcctccagctgcaccacagacgtccgccccatctcagggagccgccccgtctgcccactctgcaagaagccttttaagaaggagaacatccgacccgtgtggcaactggccagcctggtggagaacattgagcggctgaaggtggacaagggcaggcagccgggagaggtgacccgggagcagcaggatgcaaagttgtgcgagcgacaccgagagaagctgcactactactgtgaggacgacgggaagctgctgtgcgtgatgtgccgggagtcccgggagcacaggccccacacggccgtcctcatggagaaggccgcccagcccca

SEQ ID NO: 13474 - protein, 95 aa, Homo sapiens
DHREYTDGIKGQNHSRVRLLHSSLAVTSVPCWLSSQRCCSCLPWIYRRASPPAAPQTSAPSQGAAPSAHSARSLLRRRTSDPCGNWPAWWRTLSG

SEQ ID NO: 13475 - DNA, 276 bp, Homo sapiens
cgggacccggaacagaccgccgtgagagaggaggggtgccggccgggattcgcggcccggagctcgggaccggagaagaagtcctcaccagtgaacggagacctctctgaactaaggataccatggccacgtcagccccactacggagcctggaagaggaggtgacctgctccatctgtcttgattacctgcgggaccctgtgaccattgactgtggccacgtcttctgccgcagctgcaccacagacgtccgccccatctcagggagccgccccg

SEQ ID NO: 13476 - protein, 50 aa, Homo sapiens
MATSAPLRSLEEEVTCSICLDYLRDPVTIDCGHVFCRSCTTDVRPISGSR

SEQ ID NO: 13477 - DNA, 619 bp, Homo sapiens
ccaggagcccttaaatggagtacccacagggaatggagctctaggctaagtgctttgggattacaggtgctttgctcttgtttggaggtccagacatatgcttgagaagcagcttgggatactcaagagaggcctgaactggtaccctggaggccaggatgaaaacccaggcctctccatttactttcttgggccccagagtccacatttgggattcactgtctaccagggcacctctctgggtggcatctaggagccggaggcaggccagagtttcacccaggctggagtgcagtggcgcagtcatggctgtctgcagcctcaacttcccgggctcggcagtcctcctgccttagcctcccacagtgctggaattacaggcacaagcccccgtgcccggctttcagctagtttttgtagctcatagtgattattcttggagccaataatcgtgcatgcatccacatcttgaaattacatggtgtcaccttgaccagtctgttgacatatgcagattaggtatttatgagatccagagacttataggggaggggtggatttcagggaaaagggaacctcttagagaaaggtagggagtgtctgcagttctgcctgtgag

SEQ ID NO: 13478 - protein, 65 aa, Homo sapiens [sequence omitted]

SEQ ID NO: 13479 - DNA, 732 bp, Homo sapiens
gttctttccacttctggggctgtgacttgagtttctccgcaggagcagatagtgtttgtgtagggactgcggacttttgcattacagcctccctgctttgcccgcctgctgctggaagcttagcagatacatttcatcaatgaagccttctggacctggagtttcctatatgagaaggattttgattacacattcaatttctacaatcaatatatgactggccacattttctatctcttctcaggccacaccgtagtcatagagcaagaggactcagatacagtttggttggtcctttaccttcaaaagttcaagtgctggctgccgagacttctccaactcagtgatcagggtcccaagctggaccacctcctcagaacccttgatgacacggctgttcctccttttgagacacttactgatgcaaaggagactgaacagtgaaggatctcactcagaatcctgtccacaatctgtccagtttacaccttaccccaaagagaggtagcctgttatacaacgttcttcacctcattctctcacttcacaatatatcttggagatcttaccaaaagcacacagagacctcctgcgttgtgattagattttcattgcataatattccattgttcgtgtgtgtgtgagtgtttagttagtctcaaattgataggtgcatgaatttttccaatcttttgttaaggcaagcagtattgaataaacttgtacataata

SEQ ID NO: 13480 - protein, 76 aa, Homo sapiens [sequence omitted]

SEQ ID NO: 13481 - DNA, 744 bp, Homo sapiens
taagaagacatgaagaaaacaaagaagttgtgagtttaatgaacatcaaaatggaacccatgagaaaatagtttttatgttcaaactgctcccaaccttttttctcaaaatccaaagtcccttccagagcactactcagaacacgttctggcttgcagtgttagatgaatgttaattttaggcagctagctctgctgtaagcatttcaaagggtgctcatatatgtaatttttttttcctgggcgacagagccagactccgtcacaaaagaagagaaaagaaaagaatgcactaggttcatccacaggtctgttattcatacactgcctgagaaatctcttcatcatggtttaaactaatttttttcaaacatgttttgaaacatcacagtaaaaaagtcactcatgtcccagtctaatatacatgcatatgcacacacagacacacacacacacacattttgttgggtaccatttttctttattatttgtaatatattctgatttttaaattacagtccgttttaaaaatgctggttataacctgcaaaattggtttcatgacagtaggtatcacctacattttgaaaaacaaatcaaaccacaactttatcactaacagtgacctctacctacagatgcaaactctggggagctaccaaggcctactgaaccaccacttgaatcttgcaccttaaactcacacatccaaatccactatctctctcattcttcctattcctca

SEQ ID NO: 13482 - protein, 55 aa, Homo sapiens [sequence omitted]

SEQ ID NO: 13483 - DNA, 4926 bp, Homo sapiens
gagacctgggccgcgactccgtgagtccgaggatggagcggcgggcgccgtgggtggagcaggaggggctggagtattgggaccaggagacacggaacgccaagggccacgcgcagatttaccgagtgaacctgcggaccctgctccgctattacaaccagagcgaggccggtatgaacagttcgcctacgatggcaaggattacatcgccctgaacgaggacctgcactcctggaccgccgcgaacacagcggctcagatctcccagcacaagtgggaagcggacaaatactcagagcaggtcagggcctacctgagggcaagtgcatggagtggctccgcagacacctggagaacgggaaggagacgctgcagcacgcggatcccccaaaggcacatgtgacccagcaccccatctctgaccatgaggccaccctgaggtgctgggccctgggcctctaccctgcggagatcacactgacctggcagcaggatggggaggaccagacccaggacacggagcttgtggagaccaggcctgcaggggacggaaccttccagaagtgggtggctgtagtggtgccttccggagaggagcagagatacatgtgccatgtgcagcatgaggggctgccagagcccctcaccctgagatgggagccgtcttctcagcccaccatccccatcgtgggcatcgttgctggcctgtttctccttggagctgtggtcactggagctgtggttgctgctgcgatgtggaggaagaaaagctcaggcagcaattgtgctcagtactctgatgcatctcatgatacttgtaaagaggactatgcctgttcctgttctggtgtctgcgttctgatctctttctcccctgggtgtccctcatctctgacagcagcaggagtcatttttcctgtcattaaccccacaaggtggaaggcagcccctgcacacagaagtctgtggtattaagagatgaattttcaagcccgtgcagcttttaccctatttccagggctctttcttggattgtattttctatcttttccccaacctttttaaaggaactagattctgaaattagcagagaagagggatgccacaagttctcatcttaggtaactttctagtggaactcctcttctgctcagctctcctacccactctcccttccctgagttgtagtaatcctagcactggctctaatgcaaactcatggatctataaagcaaagtctaacttagatttatatttgtttggaaattgggattcatagtcaaagattgttctttcctaagagggaaatataattgcatgctgcagtgtgcagagggttggtgtgaaggagggatgcagggaggaagggagggaggacacacaagcagcactgctgggaaaagcacaggcggcctggatgtcagtgtgaggggaccttgtgctgtcgttgctgcaaaaccgcatttggcctgaggctatgttaataaagatactgcctttagaataggaggtgctctacagtgatgattcattcagccgacatttgctgtctgccagacatatgacagaatgtttttgcatctggggaaagtcattgaagtaaaatcagaaaaatctctagccttgtggagcatgtgttccagtgggaagaggcagacggtacatacactctaatatatgcagagtaaatgaggaaagtgttagaaggtgataagtgctgtggaacaggtgatcagagtatgggttgtgggacagagaaggtagctattgtgccggggttgtcagcgtgggccttgttgggaaggtgacctttgatgaaatatttgaaggacataaaggaatttgtcatgagggtatctggaagaagttttttctagggagtaggaaccttcagtgtcagtgtaccagggcaggatcatgtctgtgtgttctgggaagaacacgggatcgggtatggctagagcagagagtcactgagataaggtcaggggtttggtcagatcatgtgggcatagggctcaagtatgtgggaaggattttgattttgaatgagatagttttaagcagaataaagacatgccacaacttctcttttaaaaggatcactgtagctgctctgctgagaacagaatccaaaggccggcgatgagcaaggcaggtgggaaaactgtaggaaatgagtgcagtatttcaggctggagatgtcggttacttcaactggggtgtgagcagtggaaatagtgggacgtgattggattcctactatttccaatcactttataccgcattttctaatggactaaatctggggtatgagaaagaagagtaaaggataccaaaaatgtcagactgtgactaaaaagagttgccatcagctgagaatgagaagactagcaggagcatatgagaggaggggacgtcgcaggcagtcactatgggagacgtgggatctgagatgccgctgagaaataccagtgaggtagtcgggttggcagttggacagatgaatctggagacatttaggagaaatagacttgggaggtgatgtcatataacagttatttaaagccttgagtctgaatgacgtctccaagggagtgattggctgtagaagagaacaggaacaaggactgaacactaggcctctgttgctaaaggatctgatcagacaacacacctagatcagactgcacagtcctgaccccacatctagaaggtacatagaccagggagttctagactttcctgtggacaggaatcacctggacatcaccttaagtctaagctgatctggaatcgagaatgagatttcctacttatataatgttgctgttggcgctgatgctgctggtcttcagatcccacttttggtagcaagaacacagaccaggattcctaggctatgcatcagcctcgcctgtgaggcttgttaataagcaattcctgcactccatgcgcaacattctgacacaggggcatctgtggagaggcctgagtattctacaacaagcccacagcaaacctggtgctcagccagatttgatatcactgagatcagtagttggagaatgcccaggatggggaggggtctcagacccacatttaagtgttgctttattctgggttttttatttatttatttatttatttttaaggaggatgtgtttctttaattataagacaggatgctgagagataaatgtcattttctctatcatggggtatagccagatggaagattgagaagtggctcacagctcagcagaatgaaaaaatatctgaatgctgctttctgaaactactctccagaatgatttcacactcactccttggagcaaacaatgacttgcaaatttttctaatttaaacataaaggagtgtacatattggtattagtattcattttattttggggaagggcactgtattagtccatagtccgttttcacactgccgataaagacatacccaacattgggaagaaaaagaggtttaattggacttacagttccatttggctggggaggcctcagaatcatggtgggaggcgaaaggcacttcttacatggtggtggcaagagaaaatgaggaagaagcaaatgccaaaacccctgataaacacattggatctcaggagacttattcattatcatgagaatagcatgggaaagactggcccccatgattcaattacctccccctgggtccctcccacaacatgtgggaattctgggagatacaattcaagttgagatttgggtggggacacagccaaaccacattggacacagaaccaggtttgaagctacacagccaggaacataatccacagccaccctaattcagatctctcataggaaccactgtccctgctcctgagcacagatgctactgcatatacctctgataccctgatggccgacactgggccctgtggcaaagactgctatcactgctgctcctgagaactgctccactactgctcctcagccatctttaccaaaatgcagtatttactgtcccagcctctctgtgtcatctcatcctgattagaagcccacatgtggttatctaaattgtgcagccaaagcctcttgcagtgtttaactgcaataatgttggggaaagtgaatttttctcctttgtagaaggaggtagtccctgccttctaataagactcttcaacataggaagagaattcagttgctggaggtagaggggtgagggatggaaaaagaatgacaaatttcaattcctagaatcatgttctgagactagaactttatctagtacattgcaggcacctgggtttggttgagtgtataataaatgacatagttcaacttattcccttgacagtttgttttggggtccagcttttgtctaccccagttttcacacacagatacgtggagaagcattgtgtgatggtaaaatgtttacttgaaagcctttttccctatctttgtctcttgctaggattaaaaacccgtatctgtaagacatcagaggatccatgtatacactgacattttatataaatttttaatattttgttctatctgcacatgctcctagggagagttatctatacattcaccagttttaatgtgactgctcacagaagcctaaaaaaccatcctaatttagatgccattttactcaaactattgtatgaacagctgataaccatactgtttttagaagacccagtgacatggtataaatgctcatcttttgcttgactgttactagtctgggatgagataaagtagaggtttacttgcatagttcactcacaatttctatatgtatagtattgtgggctgctaacaaacagtccacagaccagtgctagcccacagactgcactttgagagtagcattggtctagatgtacttgtattccagcatctacctcggtgt

SEQ ID NO: 13484 - protein, 215 aa, Homo sapiens; identical to SEQ ID NO: 1413

SEQ ID NO: 13485 - DNA, 3136 bp, Homo sapiens
ggaagccgcgccgaggctcgtgtcagtggaagctggggtgtcggcgggcggccgcggccgggtctagcggtgcctgcggaagaaggaggaggagggctggcgatgagaagcagcagggggaatcaagggcaagaagggacccagaggggcaggtggctgagatgctggcgtccaggtgacccgaggaatcctctggagatacaggcccgcgcatgcgcgtgctcgagcgctgaagcccattgcccgcagggcgctggactggcgccccggccggcgaggctgtctagtccaggctccaggccccggctctggccaggcgccgccgcctcccggtgcagctgaaagtcgacgaagagggcggggcgggggcggcttgtggacttccacacttttcctctcttcgggccagtctggggagagggtggctagctgtggcggcggccaattacgtggcggacctgcggggctaagctggcacgtcacttccgactagtggagtttttagccttttaacattcaaggattaggtaagttctccccgcggtagacttcaaatactctttgtcctgcccctgcttggcgaaatttaccgaaattatctacctatcccgctggagtgggagccgggggagagctggaaccgcgtctctgctgctcacctttgtgtccttagctccttcgcatggggtccgaccgcaacacgtgcgctggataaacgcttgttaactggagctccctctttgcccactagcagggcattagctggtgctgaagacagtggctgcttggcgagcctggatctccaagtgaccccctcagcaactcctgatgaacaggactgaagccaatattaaagcaagtcaaccaaaggttctctggtgtagacaagacagcaaaaggacagactaccttgtggaacctagcattgttctccttctgcagcactaagtaacatttgttctccgttaagatctttgcaaaccacacacaagaattgctggtcatcctgccaatagatgctgctcacagaaccaaatttcctgtgctgaattgtcactcatgggcttgagagtaggagactggagaccaaggtggctagaatccagttgggcctgatgtctccctgttgaaagggctccttgtggaatgaatagcacatggctcctgtggtggatctgatagtggcatagcaccaagtgatgcaggcctgccaggggccacagacacagaagatgctcccggggtcccccatgtactccagacacactgcaggccacctctcccagcaggttgccagtcatgggccccatcatcatgacttctgtccaaggtactgtgtgcagaaatgtgattgagattcaagtcagggcctctctgcccttttccctccagaaacaaaaccaagataatttatcctgaacacggtgaaaaaaggaagggagggaggagaaaaagtccgggtctcacctgggattctctgtctcctgcaacatgaaggatttagcctgggaggaggtggtgagaactctgggagagaaaaaagaaggaaagaatagttttacccatgctgaagttaatttaaaccttcacctagagaagcaaaaaaaaaaaacccacactttcccattttgtgcctcccttcctagagttttagccaaaggtttagctaagtaattggttttaccagcgcactcactcctcctatcccaagtctgtttgactccctccccatcatcctcctcacctcttttcaggcagggtggggatagcagcaggaggagattttgggagcctggcaactcctgcaaggaccgcaggacagcccctctgtggggatgcgtggtgccccatctgccgcccttctgaagaatgcactgccttcactttttactgtgttagagtccatccagactgttctatccaaaaaagtttctttttcccccacaggcaatcaggaaatgattcctttcccgactgcttctgtctagtgcctgggaatcttgagtcaatccctcagtaagtcagtgactagggaaatccctctctgagcctcccagttcatgttgcttagggaacctgatattttcgtgaaacctgcctacacatgggcagcccaacagcagaacaaatggtggtgaccaaagtgaacaaagaagtatagttgtgccagcttcgtagttgcccatgtggacaagtcagcaggatcaggacacgaggaagagtaaatgtgagacagtcaatgtgacttctgcgataaacagatttttaaaccccgaaattttgcaaaattttggtgaaacctgaactttcttcgttgcatatactggcactatctgtaccatcatacaactgtctcacattaaagctatttttcttgggcactgatgagtaaggttggtataagttcctcagatcaacaaaaacccattttcctgtaagtcttacatttagtatttaaggaactaaaacttaaatacattttgtgaaatggttgacacttcactgataatgatttattgcttggattaataaattttccaaaagttgtcttatgtagaatatggtttgcaaccagcagaaccattaatctatactgcaatgatatgcactatgtataattgtttaaaagcctctacttaatgatgtaaaatgctctatttaattacacatttgggtaaactgtatactaacatctgatggcatttttccactgtttgttgcttttttcaaatactttattgtacaaagctgttcttaatatttttcaagtttttttctttgaattttgctaatgttttccttgaattatgagcactgacagaatgtgcttagcacttttggctattcacacagcttttgagcatgatttgcatccaatatttacattgctagcaataataagccatctgtgagttttgtcaaaagttattggggattttttaaattttagaaatgcaaattattgtttctttgaactaactcttatgcagttgcaaaggcatttccagttgttatagtttgtgtacaatatcaggtgttccagattatgattcattattaatatcattgcttccttgttccctctgaggtccagaagattcatgtttacaatatttagaaacaatgttaaaaaggt

SEQ ID NO: 13486 - protein, 51 aa, Homo sapiens
MQACQGPQTQKMLPGSPMYSRHTAGHLSQQVASHGPHHHDFCPRYCVQKCD

SEQ ID NO: 13487 - DNA, 5007 bp, Homo sapiens
ggaagccgcgccgaggctcgtgtcagtggaagctggggtgtcggcgggcggccgcggccgggtctagcggtgcctgcggaagaaggaggaggagggctggcgatgagaagcagcagggggaatcaagggcaagaagggacccagaggggcaggtggctgagatgctggcgtccaggtgacccgaggaatcctctggagatacaggcccgcgcatgcgcgtgctcgagcgctgaagcccattgcccgcagggcgctggactggcgccccggccggcgaggctgtctagtccaggctccaggccccggctctggccaggcgccgccgcctcccggtgcagctgaaagtcgacgaagagggcggggcgggggcggcttgtggacttccacacttttcctctcttcgggccagtctggggagagggtggctagctgtggcggcggccaattacgtggcggacctgcggggctaagctggcacgtcacttccgactagtggagtttttagccttttaacattcaaggattaggtaagttctccccgcggtagacttcaaatactctttgtcctgcccctgcttggcgaaatttaccgaaattatctacctatcccgctggagtgggagccgggggagagctggaaccgcgtctctgctgctcacctttgtgtccttagctccttcgcatggggtccgaccgcaacacgtgcgctggataaacgcttgttaactggagctccctctttgcccactagcagggcattagctggtgctgaagacagtggctgcttggcgagcctggatctccaagtgaccccctcagcaactcctgatgaacaggactgaagccaatattaaagcaagtcaaccaaaggttctctggtgtagacaagacagcaaaaggacagactaccttgtggaacctagcattgttctccttctgcagcactaagtaacatttgttctccgttaagatctttgcaaaccacacacaagaattgctggtcatcctgccaatagatgctgctcacagaaccaaatttcctgtgctgaattgtcactcatgggcttgagagtaggagactggagaccaaggtggctagaatccagttgggcctgatgtctccctgttgaaagggctccttgtggaatgaatagcacatggctcctgtggtggatctgatagtggcatagcaccaagtgatgcaggcctgccaggggccacagacacagaagatgctcccggggtcccccatgtactccagacacactgcaggccacctctcccagcaggttgccagtcatgggccccatcatcatgacttctgtccaaggtgtgctcggaaatctcttccttaactgtgactttctgacaggtggaggatgtggtcaggagtgggaaaaggattcgagacgggaagagggaggggttcaggatgaagagagataatctgtgccacagatgctggccctgcagttagctcccacctagtccgtgcacacacattctaatcccctcccattcctttacatgctgcggccagagaggcctttctcaaagtggaagtctcatcctcacttctctggttacagtgctgggccatggtaacttacaaggcttagcaggaactgtctgcgcactcccccttcctgcccactaccttgtttccctccagttgcgagagaaaacattgattgagcattaactatgtgccaggcttgtcctaagtcctttgcatgtattcactcaaacaatcctcacaacattcctatcacatctcccatttcacagtgagggttctaaagcacgtagtgggtgaggaacttgtccagggtcacacaactaagtgggggtggagaaacatcaaatctaggtggtccaggtggtggccagaacccatcagcacctcactacagctgcctccagtttctcgctctaggaaatactcttccctgtcaactcctgttgtcctctgggctcagttgacatgtcatctccttgaggaggacatcctgagatgctccccgactagggtgggcacccacttccacactccaaatgcctatttgacctgtgtatcgctgcatccccactgcctggcagatagcaggcccctaataaatatgatttgagcaaataaatatagttcttcaaaaaatagggaggacttcttgcttcaggtaatggtaggctaggacatttggaccaaccctcctgcagaaaatagccatttattttgatgcaatatatctggctatgactagagatttcaaatatttggagggctattatgtgaagaactaaacttactctttgtgacatagaggtcagaaattggtcgtttccatagagtatgagagagacagaattgtgctcatcataagtatcttttttaaaagttagacttaataaaatgggctgccttggtaggtggtgagttctctgtcacgaaagagattcagccacttgctctgagaaagcatggagaatatcaacattgtaagggtcgaccacctcatctctgaggccccctcctcacttaggttgccattgcaggtggaacactgggctgagtgtcaaagaacctgggttccacaagctgtgcgaccatggctggttgttttggatctcattcctaatatctgttagttaagctgacccgtcaatactgacccacttcacagagttatgaagggattaaattaggtattacatgtaaatctgttttgtttgctttttgttgttcttttttgttttgcttttttctttgcattatgaaatcccaagtcaactttttccattcttttatttttttaaaaattgacatcatcattataaccacaaaataatttttaaaatggaaaaaaaaaactcacctgcaaccccacaatctaatacaataatcatacttttttccctttattctcctttattgtgaccaaggatgactttgggcattgctgtgaggaactatttcgtttaacaccctactacctgaacatgatgcgtactcagcctttcaccaccccccaagtagctacacatgatgtgataatagtattggtggtggttttagagagttggagagaaaactgaagttggatttgggtaaaagaaaaaagagtgggaattattttttctccattctaaagcccataaagcaatgttaattgttcccacccctctgctattctgtctcctcaggtactgtgtgcagaaatgtgattgagattcaagtcagggcctctctgcccttttccctccagaaacaaaaccaagataatttatcctgaacacggtgaaaaaaggaagggagggaggagaaaaagtccgggtctcacctgggattctctgtctcctgcaacatgaaggatttagcctgggaggaggtggtgagaactctgggagagaaaaaagaaggaaagaatagttttacccatgctgaagttaatttaaaccttcacctagagaagcaaaaaaaaaaaacccacactttcccattttgtgcctcccttcctagagttttagccaaaggtttagctaagtaattggttttaccagcgcactcactcctcctatcccaagtctgtttgactccctccccatcatcctcctcacctcttttcaggcagggtggggatagcagcaggaggagattttgggagcctggcaactcctgcaaggaccgcaggacagcccctctgtggggatgcgtggtgccccatctgccgcccttctgaagaatgcactgccttcactttttactgtgttagagtccatccagactgttctatccaaaaaagtttctttttcccccacaggcaatcaggaaatgattcctttcccgactgcttctgtctagtgcctgggaatcttgagtcaatccctcagtaagtcagtgactagggaaatccctctctgagcctcccagttcatgttgcttagggaacctgatattttcgtgaaacctgcctacacatgggcagcccaacagcagaacaaatggtggtgaccaaagtgaacaaagaagtatagttgtgccagcttcgtagttgcccatgtggacaagtcagcaggatcaggacacgaggaagagtaaatgtgagacagtcaatgtgacttctgcgataaacagatttttaaaccccgaaattttgcaaaattttggtgaaacctgaactttcttcgttgcatatactggcactatctgtaccatcatacaactgtctcacattaaagctatttttcttgggcactgatgagtaaggttggtataagttcctcagatcaacaaaaacccattttcctgtaagtcttacatttagtatttaaggaactaaaacttaaatacattttgtgaaatggttgacacttcactgataatgatttattgcttggattaataaattttccaaaagttgtcttatgtagaatatggtttgcaaccagcagaaccattaatctatactgcaatgatatgcactatgtataattgtttaaaagcctctacttaatgatgtaaaatgctctatttaattacacatttgggtaaactgtatactaacatctgatggcatttttccactgtttgttgcttttttcaaatactttattgtacaaagctgttcttaatatttttcaagtttttttctttgaattttgctaatgttttccttgaattatgagcactgacagaatgtgcttagcacttttggctattcacacagcttttgagcatgatttgcatccaatatttacattgctagcaataataagccatctgtgagttttgtcaaaagttattggggattttttaaattttagaaatgcaaattattgtttctttgaactaactcttatgcagttgcaaaggcatttccagttgttatagtttgtgtacaatatcaggtgttccagattatgattcattattaatatcattgcttccttgttccctctgaggtccagaagattcatgtttacaatatttagaaacaatgttaaaaaggt

SEQ ID NO: 13488 - protein, 39 aa, Homo sapiens
MNRTEANIKASQPKVLWCRQDSKRTDYLVEPSIVLLLQH

SEQ ID NO: 13489 - DNA, 2715 bp, Homo sapiens
cggggcggcaaaacgtccgcccgggcccgaggcgggcggaggcagctgtggttacgtgcggggggccggtgacgcagtcgcggggcgctgggacgcggcttgcggagccggccggcgagcgcaggccccaggctcgggcgcggcggcgggacagcacctaccttcccggcttcgggtccgggagtgcggggcgcggagccgccggagcgctgcctccctccttcctcctcccctcgcccccgccccgcggcgcgacacacaatactcgccggaagcggaagccgcgccgaggctcgtgtcagtggaagctggggtgtcggcgggcggccgcggccgggtctagcggtgcctgcggaagaaggaggaggagggctggcgatgagaagcagcagggggaatcaagggcaagaagggacccagaggggcaggtggctgagatgctggcgtccaggtgacccgaggaatcctctggagatacaggcccgcgcatgcgcgtgctcgagcgctgaagcccattgcccgcagggcgctggactggcgccccggccggcgaggctgtctagtccaggctccaggccccggctctggccaggcgccgccgcctcccggtgcagctgaaagtcgacgaagagggcggggcgggggcggcttgtggacttccacacttttcctctcttcgggccagtctggggagagggtggctagctgtggcggcggccaattacgtggcggacctgcggggctaagctggcacgtcacttccgactagtggagtttttagccttttaacattcaaggattagagctccctctttgcccactagcagggcattagctggtgctgaagacagtggctgcttggcgagcctggatctccaagtgaccccctcagcaactcctgatgaacaggtactgtgtgcagaaatgtgattgagattcaagtcagggcctctctgcccttttccctccagaaacaaaaccaagataatttatcctgaacacggtgaaaaaaggaagggagggaggagaaaaagtccgggtctcacctgggattctctgtctcctgcaacatgaaggatttagcctgggaggaggtggtgagaactctgggagagaaaaaagaaggaaagaatagttttacccatgctgaagttaatttaaaccttcacctagagaagcaaaaaaaaaaaacccacactttcccattttgtgcctcccttcctagagttttagccaaaggtttagctaagtaattggttttaccagcgcactcactcctcctatcccaagtctgtttgactccctccccatcatcctcctcacctcttttcaggcagggtggggatagcagcaggaggagattttgggagcctggcaactcctgcaaggaccgcaggacagcccctctgtggggatgcgtggtgccccatctgccgcccttctgaagaatgcactgccttcactttttactgtgttagagtccatccagactgttctatccaaaaaagtttctttttcccccacaggcaatcaggaaatgattcctttcccgactgcttctgtctagtgcctgggaatcttgagtcaatccctcagtaagtcagtgactagggaaatccctctctgagcctcccagttcatgttgcttagggaacctgatattttcgtgaaacctgcctacacatgggcagcccaacagcagaacaaatggtggtgaccaaagtgaacaaagaagtatagttgtgccagcttcgtagttgcccatgtggacaagtcagcaggatcaggacacgaggaagagtaaatgtgagacagtcaatgtgacttctgcgataaacagatttttaaaccccgaaattttgcaaaattttggtgaaacctgaactttcttcgttgcatatactggcactatctgtaccatcatacaactgtctcacattaaagctatttttcttgggcactgatgagtaaggttggtataagttcctcagatcaacaaaaacccattttcctgtaagtcttacatttagtatttaaggaactaaaacttaaatacattttgtgaaatggttgacacttcactgataatgatttattgcttggattaataaattttccaaaagttgtcttatgtagaatatggtttgcaaccagcagaaccattaatctatactgcaatgatatgcactatgtataattgtttaaaagcctctacttaatgatgtaaaatgctctatttaattacacatttgggtaaactgtatactaacatctgatggcatttttccactgtttgttgcttttttcaaatactttattgtacaaagctgttcttaatatttttcaagtttttttctttgaattttgctaatgttttccttgaattatgagcactgacagaatgtgcttagcacttttggctattcacacagcttttgagcatgatttgcatccaatatttacattgctagcaataataagccatctgtgagttttgtcaaaagttattggggattttttaaattttagaaatgcaaattattgtttctttgaactaactcttatgcagttgcaaaggcatttccagttgttatagtttgtgtacaatatcaggtgttccagattatgattcattattaatatcattgcttccttgttccctctgaggtccagaagattcatgtttacaatatttagaaacaatgttaaaaaggt

SEQ ID NO: 13490 - protein, 79 aa, Homo sapiens [sequence omitted]

SEQ ID NO: 13491 - DNA, 3209 bp, Homo sapiens
cggggcggcaaaacgtccgcccgggcccgaggcgggcggaggcagctgtggttacgtgcggggggccggtgacgcagtcgcggggcgctgggacgcggcttgcggagccggccggcgagcgcaggccccaggctcgggcgcggcggcgggacagcacctaccttcccggcttcgggtccgggagtgcggggcgcggagccgccggagcgctgcctccctccttcctcctcccctcgcccccgccccgcggcgcgacacacaatactcgccggaagcggaagccgcgccgaggctcgtgtcagtggaagctggggtgtcggcgggcggccgcggccgggtctagcggtgcctgcggaagaaggaggaggagggctggcgatgagaagcagcagggggaatcaagggcaagaagggacccagaggggcaggtggctgagatgctggcgtccaggtgacccgaggaatcctctggagatacaggcccgcgcatgcgcgtgctcgagcgctgaagcccattgcccgcagggcgctggactggcgccccggccggcgaggctgtctagtccaggctccaggccccggctctggccaggcgccgccgcctcccggtgcagctgaaagtcgacgaagagggcggggcgggggcggcttgtggacttccacacttttcctctcttcgggccagtctggggagagggtggctagctgtggcggcggccaattacgtggcggacctgcggggctaagctggcacgtcacttccgactagtggagtttttagccttttaacattcaaggattagagctccctctttgcccactagcagggcattagctggtgctgaagacagtggctgcttggcgagcctggatctccaagtgaccccctcagcaactcctgatgaacaggactgaagccaatattaaagcaagtcaaccaaaggttctctggtgtagacaagacagcaaaaggacagactaccttgtggaacctagcattgttctccttctgcagcactaagtaacatttgttctccgttaagatctttgcaaaccacacacaagaattgctggtcatcctgccaatagatgctgctcacagaaccaaatttcctgtgctgaattgtcactcatgggcttgagagtaggagactggagaccaaggtggctagaatccagttgggcctgatgtctccctgttgaaagggctccttgtggaatgaatagcacatggctcctgtggtggatctgatagtggcatagcaccaagtgatgcaggcctgccaggggccacagacacagaagatgctcccggggtcccccatgtactccagacacactgcaggccacctctcccagcaggttgccagtcatgggccccatcatcatgacttctgtccaaggtactgtgtgcagaaatgtgattgagattcaagtcagggcctctctgcccttttccctccagaaacaaaaccaagataatttatcctgaacacggtgaaaaaaggaagggagggaggagaaaaagtccgggtctcacctgggattctctgtctcctgcaacatgaaggatttagcctgggaggaggtggtgagaactctgggagagaaaaaagaaggaaagaatagttttacccatgctgaagttaatttaaaccttcacctagagaagcaaaaaaaaaaaacccacactttcccattttgtgcctcccttcctagagttttagccaaaggtttagctaagtaattggttttaccagcgcactcactcctcctatcccaagtctgtttgactccctccccatcatcctcctcacctcttttcaggcagggtggggatagcagcaggaggagattttgggagcctggcaactcctgcaaggaccgcaggacagcccctctgtggggatgcgtggtgccccatctgccgcccttctgaagaatgcactgccttcactttttactgtgttagagtccatccagactgttctatccaaaaaagtttctttttcccccacaggcaatcaggaaatgattcctttcccgactgcttctgtctagtgcctgggaatcttgagtcaatccctcagtaagtcagtgactagggaaatccctctctgagcctcccagttcatgttgcttagggaacctgatattttcgtgaaacctgcctacacatgggcagcccaacagcagaacaaatggtggtgaccaaagtgaacaaagaagtatagttgtgccagcttcgtagttgcccatgtggacaagtcagcaggatcaggacacgaggaagagtaaatgtgagacagtcaatgtgacttctgcgataaacagatttttaaaccccgaaattttgcaaaattttggtgaaacctgaactttcttcgttgcatatactggcactatctgtaccatcatacaactgtctcacattaaagctatttttcttgggcactgatgagtaaggttggtataagttcctcagatcaacaaaaacccattttcctgtaagtcttacatttagtatttaaggaactaaaacttaaatacattttgtgaaatggttgacacttcactgataatgatttattgcttggattaataaattttccaaaagttgtcttatgtagaatatggtttgcaaccagcagaaccattaatctatactgcaatgatatgcactatgtataattgtttaaaagcctctacttaatgatgtaaaatgctctatttaattacacatttgggtaaactgtatactaacatctgatggcatttttccactgtttgttgcttttttcaaatactttattgtacaaagctgttcttaatatttttcaagtttttttctttgaattttgctaatgttttccttgaattatgagcactgacagaatgtgcttagcacttttggctattcacacagcttttgagcatgatttgcatccaatatttacattgctagcaataataagccatctgtgagttttgtcaaaagttattggggattttttaaattttagaaatgcaaattattgtttctttgaactaactcttatgcagttgcaaaggcatttccagttgttatagtttgtgtacaatatcaggtgttccagattatgattcattattaatatcattgcttccttgttccctctgaggtccagaagattcatgtttacaatatttagaaacaatgttaaaaaggt

SEQ ID NO: 13492 - protein, 51 aa, Homo sapiens; identical to SEQ ID NO: 13486

SEQ ID NO: 13493 - DNA, 3202 bp, Homo sapiens
gatctggggctggggcattggagaggggaaagaggaaacgtcgtggctggcaggcggaagccgcgccgaggctcgtgtcagtggaagctggggtgtcggcgggcggccgcggccgggtctagcggtgcctgcggaagaaggaggaggagggctggcgatgagaagcagcagggggaatcaagggcaagaagggacccagaggggcaggtggctgagatgctggcgtccaggtgacccgaggaatcctctggagatacaggcccgcgcatgcgcgtgctcgagcgctgaagcccattgcccgcagggcgctggactggcgccccggccggcgaggctgtctagtccaggctccaggccccggctctggccaggcgccgccgcctcccggtgcagctgaaagtcgacgaagagggcggggcgggggcggcttgtggacttccacacttttcctctcttcgggccagtctggggagagggtggctagctgtggcggcggccaattacgtggcggacctgcggggctaagctggcacgtcacttccgactagtggagtttttagccttttaacattcaaggattaggtaaaagtcttgcagtgaaaaacccgaggacccttaccgcaagtgtcttttgctcccagctactgatactggattccactcgtgattctccctttcttagcgcattcatgatatagacatcagtctctgagctggaggaggacaaaggcagcggtcctgtgaattctatgctctagcttgggttaagggatttggaattgcacttgtttcagagagctccctctttgcccactagcagggcattagctggtgctgaagacagtggctgcttggcgagcctggatctccaagtgaccccctcagcaactcctgatgaacaggactgaagccaatattaaagcaagtcaaccaaaggttctctggtgtagacaagacagcaaaaggacagactaccttgtggaacctagcattgttctccttctgcagcactaagtaacatttgttctccgttaagatctttgcaaaccacacacaagaattgctggtcatcctgccaatagatgctgctcacagaaccaaatttcctgtgctgaattgtcactcatgggcttgagagtaggagactggagaccaaggtggctagaatccagttgggcctgatgtctccctgttgaaagggctccttgtggaatgaatagcacatggctcctgtggtggatctgatagtggcatagcaccaagtgatgcaggcctgccaggggccacagacacagaagatgctcccggggtcccccatgtactccagacacactgcaggccacctctcccagcaggttgccagtcatgggccccatcatcatgacttctgtccaaggtactgtgtgcagaaatgtgattgagattcaagtcagggcctctctgcccttttccctccagaaacaaaaccaagataatttatcctgaacacggtgaaaaaaggaagggagggaggagaaaaagtccgggtctcacctgggattctctgtctcctgcaacatgaaggatttagcctgggaggaggtggtgagaactctgggagagaaaaaagaaggaaagaatagttttacccatgctgaagttaatttaaaccttcacctagagaagcaaaaaaaaaaaacccacactttcccattttgtgcctcccttcctagagttttagccaaaggtttagctaagtaattggttttaccagcgcactcactcctcctatcccaagtctgtttgactccctccccatcatcctcctcacctcttttcaggcagggtggggatagcagcaggaggagattttgggagcctggcaactcctgcaaggaccgcaggacagcccctctgtggggatgcgtggtgccccatctgccgcccttctgaagaatgcactgccttcactttttactgtgttagagtccatccagactgttctatccaaaaaagtttctttttcccccacaggcaatcaggaaatgattcctttcccgactgcttctgtctagtgcctgggaatcttgagtcaatccctcagtaagtcagtgactagggaaatccctctctgagcctcccagttcatgttgcttagggaacctgatattttcgtgaaacctgcctacacatgggcagcccaacagcagaacaaatggtggtgaccaaagtgaacaaagaagtatagttgtgccagcttcgtagttgcccatgtggacaagtcagcaggatcaggacacgaggaagagtaaatgtgagacagtcaatgtgacttctgcgataaacagatttttaaaccccgaaattttgcaaaattttggtgaaacctgaactttcttcgttgcatatactggcactatctgtaccatcatacaactgtctcacattaaagctatttttcttgggcactgatgagtaaggttggtataagttcctcagatcaacaaaaacccattttcctgtaagtcttacatttagtatttaaggaactaaaacttaaatacattttgtgaaatggttgacacttcactgataatgatttattgcttggattaataaattttccaaaagttgtcttatgtagaatatggtttgcaaccagcagaaccattaatctatactgcaatgatatgcactatgtataattgtttaaaagcctctacttaatgatgtaaaatgctctatttaattacacatttgggtaaactgtatactaacatctgatggcatttttccactgtttgttgcttttttcaaatactttattgtacaaagctgttcttaatatttttcaagtttttttctttgaattttgctaatgttttccttgaattatgagcactgacagaatgtgcttagcacttttggctattcacacagcttttgagcatgatttgcatccaatatttacattgctagcaataataagccatctgtgagttttgtcaaaagttattggggattttttaaattttagaaatgcaaattattgtttctttgaactaactcttatgcagttgcaaaggcatttccagttgttatagtttgtgtacaatatcaggtgttccagattatgattcattattaatatcattgcttccttgttccctctgaggtccagaagattcatgtttacaatatttagaaacaatgttaaaaaggt

SEQ ID NO: 13494 - protein, 51 aa, Homo sapiens; identical to SEQ ID NO: 13486

SEQ ID NO: 13495 - DNA, 2380 bp, Homo sapiens
ggaagccgcgccgaggctcgtgtcagtggaagctggggtgtcggcgggcggccgcggccgggtctagcggtgcctgcggaagaaggaggaggagggctggcgatgagaagcagcagggggaatcaagggcaagaagggacccagaggggcaggtggctgagatgctggcgtccaggtgacccgaggaatcctctggagatacaggcccgcgcatgcgcgtgctcgagcgctgaagcccattgcccgcagggcgctggactggcgccccggccggcgaggctgtctagtccaggctccaggccccggctctggccaggcgccgccgcctcccggtgcagctgaaagtcgacgaagagggcggggcgggggcggcttgtggacttccacacttttcctctcttcgggccagtctggggagagggtggctagctgtggcggcggccaattacgtggcggacctgcggggctaagctggcacgtcacttccgactagtggagtttttagccttttaacattcaaggattaggtaagttctccccgcggtagacttcaaatactctttgtcctgcccctgcttggcgaaatttaccgaaattatctacctatcccgctggagtgggagccgggggagagctggaaccgcgtctctgctgctcacctttgtgtccttagctccttcgcatggggtccgaccgcaacacgtgcgctggataaacgcttgttaactggagctccctctttgcccactagcagggcattagctggtgctgaagacagtggctgcttggcgagcctggatctccaagtgaccccctcagcaactcctgatgaacaggactgaagccaatattaaagcaagtcaaccaaaggttctctggtgtagacaagacagcaaaaggacagactaccttgtggaacctagcattgttctccttctgcagcactaagtaacatttgttctccgttaagatctttgcaaaccacacacaagaattgctggtcatcctgccaatagatgctgctcacagaaccaaatttcctgtgctgaattgtcactcatgggcttgagagtaggagactggagaccaaggtggctagaatccagttgggcctgatgtctccctgttgaaagggctccttgtggaatgaatagcacatggctcctgtggtggatctgatagtggcatagcaccaagtgatgcaggcctgccaggggccacagacacagaagatgctcccggggtcccccatgtactccagacacactgcaggccacctctcccagcaggttgccagtcatgggccccatcatcatgacttctgtccaaggtactgtgtgcagaaatgtgattgagattcaagtcagggcctctctgcccttttccctccagaaacaaaaccaagataatttatcctgaacacggtgaaaaaaggaagggagggaggagaaaaagtccgggtctcacctgggattctctgtctcctgcaacatgaaggatttagcctgggaggaggtggtgagaactctgggagagaaaaaagaaggaaagaatagttttacccatgctgaagttaatttaaaccttcacctagagaagcaaaaaaaaaaaacccacactttcccattttgtgcctcccttcctagagttttagccaaaggtttagctaagtaattggttttaccagcgcactcactcctcctatcccaagtctgtttgactccctccccatcatcctcctcacctcttttcaggcagggtggggatagcagcaggaggagattttgggagcctggcaactcctgcaaggaccgcaggacagcccctctgtggggatgcgtggtgccccatctgccgcccttctgaagaatgcactgccttcactttttactgtgttagagtccatccagactgttctatccaaaaaagtttctttttcccccacaggcaatcaggaaatgattcctttcccgactgcttctgtctagtgcctgggaatcttgagtcaatccctcagtaagtcagtgactagggaaatccctctctgagcctcccagttcatgttgcttagggaacctgatattttcgtgaaacctgcctacacatgggcagcccaacagcagaacaaatggtggtgaccaaagtgaacaaagaagtatagttgtgccagcttcgtagttgcccatgtggacaagtcagcaggatcaggacacgaggaagagtaaatgtgagacagtcaatgtgacttctgcgataaacagatttttaaaccccgaaattttgcaaaattttggtgaaacctgaactttcttcgttgcatatactggcactatctgtaccatcatacaactgtctcacattaaagctatttttcttgggc

SEQ ID NO: 13496 - protein, 51 aa, Homo sapiens; identical to SEQ ID NO: 13486

SEQ ID NO: 13497 - DNA, 4251 bp, Homo sapiens
ggaagccgcgccgaggctcgtgtcagtggaagctggggtgtcggcgggcggccgcggccgggtctagcggtgcctgcggaagaaggaggaggagggctggcgatgagaagcagcagggggaatcaagggcaagaagggacccagaggggcaggtggctgagatgctggcgtccaggtgacccgaggaatcctctggagatacaggcccgcgcatgcgcgtgctcgagcgctgaagcccattgcccgcagggcgctggactggcgccccggccggcgaggctgtctagtccaggctccaggccccggctctggccaggcgccgccgcctcccggtgcagctgaaagtcgacgaagagggcggggcgggggcggcttgtggacttccacacttttcctctcttcgggccagtctggggagagggtggctagctgtggcggcggccaattacgtggcggacctgcggggctaagctggcacgtcacttccgactagtggagtttttagccttttaacattcaaggattaggtaagttctccccgcggtagacttcaaatactctttgtcctgcccctgcttggcgaaatttaccgaaattatctacctatcccgctggagtgggagccgggggagagctggaaccgcgtctctgctgctcacctttgtgtccttagctccttcgcatggggtccgaccgcaacacgtgcgctggataaacgcttgttaactggagctccctctttgcccactagcagggcattagctggtgctgaagacagtggctgcttggcgagcctggatctccaagtgaccccctcagcaactcctgatgaacaggactgaagccaatattaaagcaagtcaaccaaaggttctctggtgtagacaagacagcaaaaggacagactaccttgtggaacctagcattgttctccttctgcagcactaagtaacatttgttctccgttaagatctttgcaaaccacacacaagaattgctggtcatcctgccaatagatgctgctcacagaaccaaatttcctgtgctgaattgtcactcatgggcttgagagtaggagactggagaccaaggtggctagaatccagttgggcctgatgtctccctgttgaaagggctccttgtggaatgaatagcacatggctcctgtggtggatctgatagtggcatagcaccaagtgatgcaggcctgccaggggccacagacacagaagatgctcccggggtcccccatgtactccagacacactgcaggccacctctcccagcaggttgccagtcatgggccccatcatcatgacttctgtccaaggtgtgctcggaaatctcttccttaactgtgactttctgacaggtggaggatgtggtcaggagtgggaaaaggattcgagacgggaagagggaggggttcaggatgaagagagataatctgtgccacagatgctggccctgcagttagctcccacctagtccgtgcacacacattctaatcccctcccattcctttacatgctgcggccagagaggcctttctcaaagtggaagtctcatcctcacttctctggttacagtgctgggccatggtaacttacaaggcttagcaggaactgtctgcgcactcccccttcctgcccactaccttgtttccctccagttgcgagagaaaacattgattgagcattaactatgtgccaggcttgtcctaagtcctttgcatgtattcactcaaacaatcctcacaacattcctatcacatctcccatttcacagtgagggttctaaagcacgtagtgggtgaggaacttgtccagggtcacacaactaagtgggggtggagaaacatcaaatctaggtggtccaggtggtggccagaacccatcagcacctcactacagctgcctccagtttctcgctctaggaaatactcttccctgtcaactcctgttgtcctctgggctcagttgacatgtcatctccttgaggaggacatcctgagatgctccccgactagggtgggcacccacttccacactccaaatgcctatttgacctgtgtatcgctgcatccccactgcctggcagatagcaggcccctaataaatatgatttgagcaaataaatatagttcttcaaaaaatagggaggacttcttgcttcaggtaatggtaggctaggacatttggaccaaccctcctgcagaaaatagccatttattttgatgcaatatatctggctatgactagagatttcaaatatttggagggctattatgtgaagaactaaacttactctttgtgacatagaggtcagaaattggtcgtttccatagagtatgagagagacagaattgtgctcatcataagtatcttttttaaaagttagacttaataaaatgggctgccttggtaggtggtgagttctctgtcacgaaagagattcagccacttgctctgagaaagcatggagaatatcaacattgtaagggtcgaccacctcatctctgaggccccctcctcacttaggttgccattgcaggtggaacactgggctgagtgtcaaagaacctgggttccacaagctgtgcgaccatggctggttgttttggatctcattcctaatatctgttagttaagctgacccgtcaatactgacccacttcacagagttatgaagggattaaattaggtattacatgtaaatctgttttgtttgctttttgttgttcttttttgttttgcttttttctttgcattatgaaatcccaagtcaactttttccattcttttatttttttaaaaattgacatcatcattataaccacaaaataatttttaaaatggaaaaaaaaaactcacctgcaaccccacaatctaatacaataatcatacttttttccctttattctcctttattgtgaccaaggatgactttgggcattgctgtgaggaactatttcgtttaacaccctactacctgaacatgatgcgtactcagcctttcaccaccccccaagtagctacacatgatgtgataatagtattggtggtggttttagagagttggagagaaaactgaagttggatttgggtaaaagaaaaaagagtgggaattattttttctccattctaaagcccataaagcaatgttaattgttcccacccctctgctattctgtctcctcaggtactgtgtgcagaaatgtgattgagattcaagtcagggcctctctgcccttttccctccagaaacaaaaccaagataatttatcctgaacacggtgaaaaaaggaagggagggaggagaaaaagtccgggtctcacctgggattctctgtctcctgcaacatgaaggatttagcctgggaggaggtggtgagaactctgggagagaaaaaagaaggaaagaatagttttacccatgctgaagttaatttaaaccttcacctagagaagcaaaaaaaaaaaacccacactttcccattttgtgcctcccttcctagagttttagccaaaggtttagctaagtaattggttttaccagcgcactcactcctcctatcccaagtctgtttgactccctccccatcatcctcctcacctcttttcaggcagggtggggatagcagcaggaggagattttgggagcctggcaactcctgcaaggaccgcaggacagcccctctgtggggatgcgtggtgccccatctgccgcccttctgaagaatgcactgccttcactttttactgtgttagagtccatccagactgttctatccaaaaaagtttctttttcccccacaggcaatcaggaaatgattcctttcccgactgcttctgtctagtgcctgggaatcttgagtcaatccctcagtaagtcagtgactagggaaatccctctctgagcctcccagttcatgttgcttagggaacctgatattttcgtgaaacctgcctacacatgggcagcccaacagcagaacaaatggtggtgaccaaagtgaacaaagaagtatagttgtgccagcttcgtagttgcccatgtggacaagtcagcaggatcaggacacgaggaagagtaaatgtgagacagtcaatgtgacttctgcgataaacagatttttaaaccccgaaattttgcaaaattttggtgaaacctgaactttcttcgttgcatatactggcactatctgtaccatcatacaactgtctcacattaaagctatttttcttgggc

SEQ ID NO: 13498 - protein, 39 aa, Homo sapiens; identical to SEQ ID NO: 13488

SEQ ID NO: 13499 - DNA, 2453 bp, Homo sapiens
cggggcggcaaaacgtccgcccgggcccgaggcgggcggaggcagctgtggttacgtgcggggggccggtgacgcagtcgcggggcgctgggacgcggcttgcggagccggccggcgagcgcaggccccaggctcgggcgcggcggcgggacagcacctaccttcccggcttcgggtccgggagtgcggggcgcggagccgccggagcgctgcctccctccttcctcctcccctcgcccccgccccgcggcgcgacacacaatactcgccggaagcggaagccgcgccgaggctcgtgtcagtggaagctggggtgtcggcgggcggccgcggccgggtctagcggtgcctgcggaagaaggaggaggagggctggcgatgagaagcagcagggggaatcaagggcaagaagggacccagaggggcaggtggctgagatgctggcgtccaggtgacccgaggaatcctctggagatacaggcccgcgcatgcgcgtgctcgagcgctgaagcccattgcccgcagggcgctggactggcgccccggccggcgaggctgtctagtccaggctccaggccccggctctggccaggcgccgccgcctcccggtgcagctgaaagtcgacgaagagggcggggcgggggcggcttgtggacttccacacttttcctctcttcgggccagtctggggagagggtggctagctgtggcggcggccaattacgtggcggacctgcggggctaagctggcacgtcacttccgactagtggagtttttagccttttaacattcaaggattagagctccctctttgcccactagcagggcattagctggtgctgaagacagtggctgcttggcgagcctggatctccaagtgaccccctcagcaactcctgatgaacaggactgaagccaatattaaagcaagtcaaccaaaggttctctggtgtagacaagacagcaaaaggacagactaccttgtggaacctagcattgttctccttctgcagcactaagtaacatttgttctccgttaagatctttgcaaaccacacacaagaattgctggtcatcctgccaatagatgctgctcacagaaccaaatttcctgtgctgaattgtcactcatgggcttgagagtaggagactggagaccaaggtggctagaatccagttgggcctgatgtctccctgttgaaagggctccttgtggaatgaatagcacatggctcctgtggtggatctgatagtggcatagcaccaagtgatgcaggcctgccaggggccacagacacagaagatgctcccggggtcccccatgtactccagacacactgcaggccacctctcccagcaggttgccagtcatgggccccatcatcatgacttctgtccaaggtactgtgtgcagaaatgtgattgagattcaagtcagggcctctctgcccttttccctccagaaacaaaaccaagataatttatcctgaacacggtgaaaaaaggaagggagggaggagaaaaagtccgggtctcacctgggattctctgtctcctgcaacatgaaggatttagcctgggaggaggtggtgagaactctgggagagaaaaaagaaggaaagaatagttttacccatgctgaagttaatttaaaccttcacctagagaagcaaaaaaaaaaaacccacactttcccattttgtgcctcccttcctagagttttagccaaaggtttagctaagtaattggttttaccagcgcactcactcctcctatcccaagtctgtttgactccctccccatcatcctcctcacctcttttcaggcagggtggggatagcagcaggaggagattttgggagcctggcaactcctgcaaggaccgcaggacagcccctctgtggggatgcgtggtgccccatctgccgcccttctgaagaatgcactgccttcactttttactgtgttagagtccatccagactgttctatccaaaaaagtttctttttcccccacaggcaatcaggaaatgattcctttcccgactgcttctgtctagtgcctgggaatcttgagtcaatccctcagtaagtcagtgactagggaaatccctctctgagcctcccagttcatgttgcttagggaacctgatattttcgtgaaacctgcctacacatgggcagcccaacagcagaacaaatggtggtgaccaaagtgaacaaagaagtatagttgtgccagcttcgtagttgcccatgtggacaagtcagcaggatcaggacacgaggaagagtaaatgtgagacagtcaatgtgacttctgcgataaacagatttttaaaccccgaaattttgcaaaattttggtgaaacctgaactttcttcgttgcatatactggcactatctgtaccatcatacaactgtctcacattaaagctatttttcttgggc

SEQ ID NO: 13500 - protein, 51 aa, Homo sapiens; identical to SEQ ID NO: 13486

SEQ ID NO: 13501 - DNA, 1959 bp, Homo sapiens
cggggcggcaaaacgtccgcccgggcccgaggcgggcggaggcagctgtggttacgtgcggggggccggtgacgcagtcgcggggcgctgggacgcggcttgcggagccggccggcgagcgcaggccccaggctcgggcgcggcggcgggacagcacctaccttcccggcttcgggtccgggagtgcggggcgcggagccgccggagcgctgcctccctccttcctcctcccctcgcccccgccccgcggcgcgacacacaatactcgccggaagcggaagccgcgccgaggctcgtgtcagtggaagctggggtgtcggcgggcggccgcggccgggtctagcggtgcctgcggaagaaggaggaggagggctggcgatgagaagcagcagggggaatcaagggcaagaagggacccagaggggcaggtggctgagatgctggcgtccaggtgacccgaggaatcctctggagatacaggcccgcgcatgcgcgtgctcgagcgctgaagcccattgcccgcagggcgctggactggcgccccggccggcgaggctgtctagtccaggctccaggccccggctctggccaggcgccgccgcctcccggtgcagctgaaagtcgacgaagagggcggggcgggggcggcttgtggacttccacacttttcctctcttcgggccagtctggggagagggtggctagctgtggcggcggccaattacgtggcggacctgcggggctaagctggcacgtcacttccgactagtggagtttttagccttttaacattcaaggattagagctccctctttgcccactagcagggcattagctggtgctgaagacagtggctgcttggcgagcctggatctccaagtgaccccctcagcaactcctgatgaacaggtactgtgtgcagaaatgtgattgagattcaagtcagggcctctctgcccttttccctccagaaacaaaaccaagataatttatcctgaacacggtgaaaaaaggaagggagggaggagaaaaagtccgggtctcacctgggattctctgtctcctgcaacatgaaggatttagcctgggaggaggtggtgagaactctgggagagaaaaaagaaggaaagaatagttttacccatgctgaagttaatttaaaccttcacctagagaagcaaaaaaaaaaaacccacactttcccattttgtgcctcccttcctagagttttagccaaaggtttagctaagtaattggttttaccagcgcactcactcctcctatcccaagtctgtttgactccctccccatcatcctcctcacctcttttcaggcagggtggggatagcagcaggaggagattttgggagcctggcaactcctgcaaggaccgcaggacagcccctctgtggggatgcgtggtgccccatctgccgcccttctgaagaatgcactgccttcactttttactgtgttagagtccatccagactgttctatccaaaaaagtttctttttcccccacaggcaatcaggaaatgattcctttcccgactgcttctgtctagtgcctgggaatcttgagtcaatccctcagtaagtcagtgactagggaaatccctctctgagcctcccagttcatgttgcttagggaacctgatattttcgtgaaacctgcctacacatgggcagcccaacagcagaacaaatggtggtgaccaaagtgaacaaagaagtatagttgtgccagcttcgtagttgcccatgtggacaagtcagcaggatcaggacacgaggaagagtaaatgtgagacagtcaatgtgacttctgcgataaacagatttttaaaccccgaaattttgcaaaattttggtgaaacctgaactttcttcgttgcatatactggcactatctgtaccatcatacaactgtctcacattaaagctatttttcttgggc

SEQ ID NO: 13502 - protein, 79 aa, Homo sapiens [sequence omitted]

SEQ ID NO: 13503 - DNA, 2222 bp, Homo sapiens
cggggcggcaaaacgtccgcccgggcccgaggcgggcggaggcagctgtggttacgtgcggggggccggtgacgcagtcgcggggcgctgggacgcggcttgcggagccggccggcgagcgcaggccccaggctcgggcgcggcggcgggacagcacctaccttcccggcttcgggtccgggagtgcggggcgcggagccgccggagcgctgcctccctccttcctcctcccctcgcccccgccccgcggcgcgacacacaatactcgccggaagcggaagccgcgccgaggctcgtgtcagtggaagctggggtgtcggcgggcggccgcggccgggtctagcggtgcctgcggaagaaggaggaggagggctggcgatgagaagcagcagggggaatcaagggcaagaagggacccagaggggcaggtggctgagatgctggcgtccaggtgacccgaggaatcctctggagatacaggcccgcgcatgcgcgtgctcgagcgctgaagcccattgcccgcagggcgctggactggcgccccggccggcgaggctgtctagtccaggctccaggccccggctctggccaggcgccgccgcctcccggtgcagctgaaagtcgacgaagagggcggggcgggggcggcttgtggacttccacacttttcctctcttcgggccagtctggggagagggtggctagctgtggcggcggccaattacgtggcggacctgcggggctaagctggcacgtcacttccgactagtggagtttttagccttttaacattcaaggattagagctccctctttgcccactagcagggcattagctggtgctgaagacagtggctgcttggcgagcctggatctccaagtgaccccctcagcaactcctgatgaacaggactgaagccaatattaaagcaagtcaaccaaaggttctctggtgtagacaagacagcaaaaggacagactaccttgtggaacctagcattgttctccttctgcagcactaagtaacatttgttctccgttaagatctttgcaaaccacacacaagaattgctggtcatcctgccaatagatgctgctcacagaaccaaatttcctgtgctgaattgtcactcatgggcttgagagtaggagactggagaccaaggtggctagaatccagttgggcctgatgtctccctgttgaaagggctccttgtggaatgaatagcacatggctcctgtggtggatctgatagtggcatagcaccaagtgatgcaggcctgccaggggccacagacacagaagatgctcccggggtcccccatgtactccagacacactgcaggccacctctcccagcaggttgccagtcatgggccccatcatcatgacttctgtccaaggtgtgctcggaaatctcttccttaactgtgactttctgacaggtggaggatgtggtcaggagtgggaaaaggattcgagacgggaagagggaggggttcaggatgaagagagataatctgtgccacagatgctggccctgcagttagctcccacctagtccgtgcacacacattctaatcccctcccattcctttacatgctgcggccagagaggcctttctcaaagtggaagtctcatcctcacttctctggttacagtgctgggccatggtaacttacaaggcttagcaggaactgtctgcgcactcccccttcctgcccactaccttgtttccctccagttgcgagagaaaacattgattgagcattaactatgtgccaggcttgtcctaagtcctttgcatgtattcactcaaacaatcctcacaacattcctatcacatctcccatttcacagtgagggttctaaagcacgtagtgggtgaggaacttgtccagggtcacacaactaagtgggggtggagaaacatcaaatctaggtggtccaggtggtggccagaacccatcagcacctcactacagctgcctccagtttctcgctctaggaaatactcttccctgtcaactcctgttgtcctctgggctcagttgacatgtcatctccttgaggaggacatcctgagatgctccccgactagggtgggcacccacttccacactccaaatgcctatttgacctgtgtatcgctgcatccccactgcctggcagatagcaggcccctaataaatatgatttgagcaaataaatatagttcttc

SEQ ID NO: 13504 - protein, 39 aa, Homo sapiens; identical to SEQ ID NO: 13488

SEQ ID NO: 13505 - DNA, 327 bp, Homo sapiens
cctgttctttccacttctggggctgtgacttgagtttctccgcaggagcagatagtgtttgtgtagggactgcggacttttgcattacagcctccctgctttgcccgcctgctgctggaagcttagcaggtgaggaaagaggacttcctgtatatctctatccttttgtttccattactcactttctgtggctgctgctgcagaagccactgctgactgatgtggatacctcaatctttggtttacaaaaagcctaggtgtcttttggcctctctccaggttgatagccatggctcctgaaagaaataaaagatgatcatctttcta

SEQ ID NO: 13506 - protein, 84 aa, Homo sapiens
CSFHFWGCDLSFSAGADSVCVGTADFCITASLLCPPAAGSLAGEERGLPVYLYPFVSITHFLWLLLQKPLLTDVDTSIFGLQKA

SEQ ID NO: 13507 - DNA, 3621 bp, Homo sapiens
agcgtcatagcggcgggcatcccatctgcacgtcacacctctttctcacctggacacgcatcccttcctaccctgccagccacgacgtttcctctttcccctctccaatgccccagccccagatctggcggaagaagatggagaacgggggtgggacagagttgtggacaacctctcaggagagggtcgcaaggtgggaccctgaacagtggtagaaacaaaatgagattgtccctgaagtttgcccttcagctgagacacaaggagtagaggaagaggaaggactaacgcagaggcactcaaggtctcactatgactgtagttgagagtcctctcccttcttccctaaccctttccccatttctctcaccacttctttgccagtctagatccgtcctggtgccttactgtgcatacagttctactcgtctcagattcctttcttgtctgttagaaacgtatgtcaaacgaggatacagtgtctggaactattggttctaagatataagtggaatgagcctggatcaggagaagtatgctgagctagagttgaaggaagcttctctttctaacaagagaaagcagagttaaattatggcagagacaagtctgttagaggctggggcctctgcagcctctacagctgcggctttggagaacttacaggtggaggcgagctgctctgtgtgcctggagtatctgaaggaacctgtcatcattgagtgtgggcacaacttctgcaaagcttgcatcacccgctggtgggaggacctagagagggacttcccttgtcctgtctgtcgaaagacatcccgctaccgcagtctccgacctaatcggcaactaggcagtatggtggaaattgccaagcagctccaggccgtcaagcggaagatccgggatgagagcctctgcccccaacaccatgaggccctcagccttttctgttatgaggaccaggaggctgtatgcttgatatgtgcaatttcccacacccaccgggcccacaccgttgtgccactggacgatgctacacaggagtacaaggaaaaactgcagaagtgtctggagcccctggaacagaagctgcaggagatcactcgctgcaagtcctctgaggagaagaagcctggtgagctcaagagactagtggaaagtcgccgacagcagatcttgagggagtttgaagagcttcataggcggctggatgaagagcagcaggtgttgctttcacgactggaagaagaggaacaggacattctgcagcgactccgagaaaatgctgctcaccttggggacaagcgccgggacctggcccacttggctgccgaggtggagggcaagtgcttacagtcaggcttcgagatgcttaaggatgtcaaaagtaccctggaaaagaatattcctagaaagttcggaggctcactctcaacgatctgtccacgggatcataaggctctccttggattagtaaaagaaatcaacagatgtgaaaaggtgaagaccatggaggtgacttcagtatccatagagctggaaaagaacttcagcaattttccccgacagtactttgccctaaggaaaatccttaaacagctaattgcggatgtgaccctggaccctgagacagctcatcctaacctagtcctgtcagaggatcgtaagagcgtcaagttcgtggagacaagactccgggatctccctgacacaccaaggcgtttcaccttctacccttgcgtcctggctactgagggtttcacctcaggtcgacactactgggaggtggaggtgggcgacaagacccactgggcagtgggtgtatgccgggactccgtgagccgaaagggcgagttgactccactccctgagactggctactggcgggtgcggctatggaatggggacaaatatgcagccaccaccacaccttttacccctttgcacatcaaggtgaaacccaagcgggtaggcatattcctagactatgaggccggcacactgtctttctacaatgtcacagaccgctctcatatctacaccttcactgatacttttactgagaaactttggcccctcttctacccaggcatccgggctggacggaagaatgctgcaccacttaccatcaggcccccaacagattgggagtgacaggttgggatgtgggaatgactggggtgaggcagggtcaagtgctacgggcctccttcccgtgtcctgctggaacgtcttcgtgtccacctgggtccagtcctgaatcatcttggagaaacaccttggtttctaggatggttttgtgtggagggggaggtaggactgggctggatgagagagcacagctgtgacttcctcctaactgtcagggtggggagctggttcccagaggattgtctaccctgaagtccatcaggttttctgttgcacaaggacgggtcaggaaggaaggagaggcttttccagaaacaaaaaatctgtgagggtctgacttgctcaaaccagaggaggaaacagaaacccctgcacatctttttagggggttctttgacccaggatagtcttgcttcttgaggtagatcacaggggtctgtgtacctctgaattcatgagagatgaatgacagatgctctcatgggtctagatattgaggagtttttctgagggcagagattggacatcaacaaggctagaagggtcagggaagtgggctaaaggaacagattcctagagattaatgaagaggagggaggtttctttggtcttctattccaagggtaaggttgcgattatgggtaagattggccagaggtaggaatgtggggagaaggagaggctgaaaagaaagcagaggagaacccaggtccctgcctcagccttcagcagagttggcttattgcctgcctctataccaataagtcagtcaccttgctcctctccagaggcaaagtggaagagatcctgcaagacacatctatcctttcacagtgttcccaagggaacttggaaaggagagtcaggtattagaggaaagagaagggtatttgtatacaaagccctggccttaaagaatgttacttagtagctactcccaaattgtcagccttcttacctggccaaggtgtccaagccagaaaggaaaaaaggttatggagtctttctcaccctaaggacagggtggaagagggtggtatatagggaagggccagataggcaacttcatttggcttgtgtgcatctggcctggaactggtgttaagccaggcttttgcttgtttgttgccatccctcaccctttgccatttcccttttcagagaatgtaaatgattttcatgttaggccaaaataaacaacttatagggtacatatgttgtcataaaaggtaaaagtgatgcatgccaaaccaaactaaaccaatttggattatctgctattcgggtaatcttcacagaaatgactgagagaagaatctgcagtttactgagggcatttcagttcctcctaccacctcaacaggactttgtccagactctcctcctcttacctttgtgccttgactgtggttctttgtggcaagatactttggttggttaaaataatatggaacaaaggatccactgaagtga

SEQ ID NO: 13508 - protein, 518 aa, Homo sapiens; identical to SEQ ID NO: 1415

SEQ ID NO: 13509 - DNA, 3531 bp, Homo sapiens
agcgtcatagcggcgggcatcccatctgcacgtcacacctctttctcacctggacacgcatcccttcctaccctgccagccacgacgtttcctctttcccctctccaatgccccagccccagatctggcggaagaagatggagaacgggggtgggacagagttgtggacaacctctcaggagagggtcgcaaggtgggaccctgaacagtggtagaaacaaaatgagattgtccctgaagtttgcccttcagctgagacacaaggagtagaggaagaggaaggactaacgcagaggcactcaaggtctcactatgactgtagttgagagtcctctcccttcttccctaaccctttccccatttctctcaccacttctttgccagtctagatccgtcctggtgccttactgtgcatacagttctactcgtctcagattcctttcttgtctgttagaaacgtatgtcaaacgaggatacagtgtctggaactattggttctaagatataagtggaatgagcctggatcaggagaagtatgctgagctagagttgaaggaagcttctctttctaacaagagaaagcagagttaaattatggcagagacaagtctgttagaggctggggcctctgcagcctctacagctgcggctttggagaacttacaggtggaggcgagctgctctgtgtgcctggagtatctgaaggaacctgtcatcattgagtgtgggcacaacttctgcaaagcttgcatcacccgctggtgggaggacctagagagggacttcccttgtcctgtctgtcgaaagacatcccgctaccgcagtctccgacctaatcggcaactaggcagtatggtggaaattgccaagcagctccaggccgtcaagcggaagatccgggatgagagcctctgcccccaacaccatgaggccctcagccttttctgttatgaggaccaggaggctgtatgcttgatatgtgcaatttcccacacccaccgggcccacaccgttgtgccactggacgatgctacacaggagtacaaggaaaaactgcagaagtgtctggagcccctggaacagaagctgcaggagatcactcgctgcaagtcctctgaggagaagaagcctggtgagctcaagagactagtggaaagtcgccgacagcagatcttgagggagtttgaagagcttcataggcggctggatgaagagcagcaggtgttgctttcacgactggaagaagaggaacaggacattctgcagcgactccgagaaaatgctgctcaccttggggacaagcgccgggacctggcccacttggctgccgaggtggagggcaagtgcttacagtcaggcttcgagatgcttaaggatgtcaaaagtaccctggaaaaatgtgaaaaggtgaagaccatggaggtgacttcagtatccatagagctggaaaagaacttcagcaattttccccgacagtactttgccctaaggaaaatccttaaacagctaattgcggatgtgaccctggaccctgagacagctcatcctaacctagtcctgtcagaggatcgtaagagcgtcaagttcgtggagacaagactccgggatctccctgacacaccaaggcgtttcaccttctacccttgcgtcctggctactgagggtttcacctcaggtcgacactactgggaggtggaggtgggcgacaagacccactgggcagtgggtgtatgccgggactccgtgagccgaaagggcgagttgactccactccctgagactggctactggcgggtgcggctatggaatggggacaaatatgcagccaccaccacaccttttacccctttgcacatcaaggtgaaacccaagcgggtaggcatattcctagactatgaggccggcacactgtctttctacaatgtcacagaccgctctcatatctacaccttcactgatacttttactgagaaactttggcccctcttctacccaggcatccgggctggacggaagaatgctgcaccacttaccatcaggcccccaacagattgggagtgacaggttgggatgtgggaatgactggggtgaggcagggtcaagtgctacgggcctccttcccgtgtcctgctggaacgtcttcgtgtccacctgggtccagtcctgaatcatcttggagaaacaccttggtttctaggatggttttgtgtggagggggaggtaggactgggctggatgagagagcacagctgtgacttcctcctaactgtcagggtggggagctggttcccagaggattgtctaccctgaagtccatcaggttttctgttgcacaaggacgggtcaggaaggaaggagaggcttttccagaaacaaaaaatctgtgagggtctgacttgctcaaaccagaggaggaaacagaaacccctgcacatctttttagggggttctttgacccaggatagtcttgcttcttgaggtagatcacaggggtctgtgtacctctgaattcatgagagatgaatgacagatgctctcatgggtctagatattgaggagtttttctgagggcagagattggacatcaacaaggctagaagggtcagggaagtgggctaaaggaacagattcctagagattaatgaagaggagggaggtttctttggtcttctattccaagggtaaggttgcgattatgggtaagattggccagaggtaggaatgtggggagaaggagaggctgaaaagaaagcagaggagaacccaggtccctgcctcagccttcagcagagttggcttattgcctgcctctataccaataagtcagtcaccttgctcctctccagaggcaaagtggaagagatcctgcaagacacatctatcctttcacagtgttcccaagggaacttggaaaggagagtcaggtattagaggaaagagaagggtatttgtatacaaagccctggccttaaagaatgttacttagtagctactcccaaattgtcagccttcttacctggccaaggtgtccaagccagaaaggaaaaaaggttatggagtctttctcaccctaaggacagggtggaagagggtggtatatagggaagggccagataggcaacttcatttggcttgtgtgcatctggcctggaactggtgttaagccaggcttttgcttgtttgttgccatccctcaccctttgccatttcccttttcagagaatgtaaatgattttcatgttaggccaaaataaacaacttatagggtacatatgttgtcataaaaggtaaaagtgatgcatgccaaaccaaactaaaccaatttggattatctgctattcgggtaatcttcacagaaatgactgagagaagaatctgcagtttactgagggcatttcagttcctcctaccacctcaacaggactttgtccagactctcctcctcttacctttgtgccttgactgtggttctttgtggcaagatactttggttggttaaaataatatggaacaaaggatccactgaagtga

SEQ ID NO: 13510 - protein, 488 aa, Homo sapiens; identical to SEQ ID NO: 1417

SEQ ID NO: 13511 - DNA, 552 bp, Homo sapiens
gcgaggggtggggctgcgggaggccctggagcgcggcggtgatggcggggccggtgaaggaccgcgaggccttccagaggctcaacttcctgtaccaggccgcccattgtgtccttgcccaggaccccgagaaccaggcgctggcgaggttttactgctacactgagaggaccattgcgaagcggctcgtcttgcggcgggatccctcggtgaagaggactctctgtcgaggctgctcttccctcctcgtcccgggcctcacctgcacccagcgccagagacgctgcaggggacagcgctggaccgtacagacctgcctaacatgccagcgcagccaacgcttcctcaatgatcccgggcatttactctggggagacaggcctgaggcccagctcgggagccaagcagattccaaaccactacaacccttgccaaacacagcccactccatttcagaccgccttcctgaggagaaaatgcagactcagggttccagtaaccagtgatggattcaccccatctcccaaataaagtttacttgttttacattcc

SEQ ID NO: 13512 - protein, 154 aa, Homo sapiens; identical to SEQ ID NO: 1419

SEQ ID NO: 13513 - DNA, 589 bp, Homo sapiens
gcgaggggtggggctgcgggaggccctggagcgcggcggtgatggcggggccggtgaaggaccgcgaggccttccagaggctcaacttcctgtaccaggccgcccattgtgtccttgcccaggaccccgagaaccaggcgctggcgaggttttactgctacactgagaggaccattgcgaagcggctcgtcttgcggcgggatccctcggtgaagaggactctctgtcgaggctgctcttccctcctcgtcccgggcctcacctgcacccagcgccagagacgctgcaggggacagcgctggaccgtacagacctgcctaacatgccagcgcagccaacgcttcctcaatgatcccgggcatttactctggggagacaggcctgaggcccagctcgggagccaagcagattccaaaccactacaacccttgccaaacacagcccactccatttcagaccgccttcctgaggagaaaatgcagactcagggttccagtaaccagtgatggattcaccccatctcccaaataaagtttacttgttttacattccatgattctgttctgtgggtatttcaactcttaattcc

SEQ ID NO: 13514 - protein, 154 aa, Homo sapiens; identical to SEQ ID NO: 1419

SEQ ID NO: 13515 - DNA, 1092 bp, Homo sapiens
ggctgcgggaggccctggagcgcggcggtgatggcggggccggtgaaggaccgcgaggccttccagaggctcaacttcctgtaccaggccgcccattgtgtccttgcccaggaccccgagaaccaggcgctggcgaggttttactgctacactgagaggaccattgcgaagcggctcgtcttgcggcggtgagacagccacggggcgggcggcgggcgggacgcgggaggaacgcgagagggagcgcgggcgccagaccactatcctcctccgcccccagggatccctcggtgaagaggactctctgtcgaggctgctcttccctcctcgtcccgggcctcacctgcacccagcgccagagacgtgagtgctccaacggaggtggaagactgcggagcattgggggcgcggaggggggcggggtggggggcgggcactggaggccaacagcgcctttctcactgtagatggatgttgggtgtgggattcgcaggagtcttccttcttcgggtttggattaagttcctaacgccacttgcacaaactagggtttgggctcggctgttttttttttttttcttccagtgtgggcaataaataataacttttaagaggcaaccccacccatgcacaataatagatgttgttcggctttgtggaggacgattcccatcaccattcatttattaagcaaatacttattttctaaaatgtgtcaggtactgtgctagattcattattctcattgaaattacggtctgatgggacagactaagaaacaaaatggtgtagaaaaagattaactgggggagtagaatgctcacttactcatgccagtggtggcgaagtttatgataagcaaagggagtgagagatggaaattctaggcatgtgtgcagactctgagacaagagagcttgtggtgctgtcaaagaaatgagagttcaggaggctggagtttgaggtaggagggcaaaacatgagactggagggggaaacaggccagttcttgaagtcttgttagggagtttgaactttatcttaaagagttccaggaaatcgatggagcttatgccgaggcctgacaccatc

SEQ ID NO: 13516 - protein, 53 aa, Homo sapiens
MAGPVKDREAFQRLNFLYQAAHCVLAQDPENQALARFYCYTERTIAKRLVLRR

SEQ ID NO: 13517 - DNA, 450 bp, Homo sapiens
aggccctggagcgcggcggtgatggcggggccggtgaaggaccgcgaggccttccagaggctcaacttcctgtaccaggccgcccattgtgtccttgcccaggaccccgagaaccaggcgctggcgaggttttactgctacactgagaggaccattgcgaagcggctcgtcttgcggcggctgcaggggacagcgctggaccgtacagacctgcctaacatgccagcgcagccaacgcttcctcaatgatcccgggcatttactctggggagacaggcctgaggcccagctcgggagccaagcagattccaaaccactacaacccttgccaaacacagcccactccatttcagaccgccttcctgaggagaaaatgcagactcagggttccagtaaccagtgatggattcaccccatctcccaaataaagtttacttgttttacattcca

SEQ ID NO: 13518 - protein, 75 aa, Homo sapiens
MAGPVKDREAFQRLNFLYQAAHCVLAQDPENQALARFYCYTERTIAKRLVLRRLQGTALDRTDLPNMPAQPTLPQ

SEQ ID NO: 13519 - DNA, 621 bp, Homo sapiens
cctggagcgcggcggtgatggcggggccggtgaaggaccgcgaggccttccagaggctcaacttcctgtaccaggccgcccattgtgtccttgcccaggaccccgagaaccaggcgctggcgaggttttactgctacactgagaggaccattgcgaagcggctcgtcttgcggcggtgagacagccacggggcgggcggcgggcgggacgcgggaggaacgcgagagggagcgcgggcgccagaccactatcctcctccgcccccagggatccctcggtgaagaggactctctgtcgaggctgctcttccctcctcgtcccgggcctcacctgcacccagcgccagagacgctgcaggggacagcgctggaccgtacagacctgcctaacatgccagcgcagccaacgcttcctcaatgatcccgggcatttactctggggagacaggcctgaggcccagctcgggagccaagcagattccaaaccactacaacccttgccaaacacagcccactccatttcagaccgccttcctgaggagaaaatgcagactcagggttccagtaaccagtgatggattcaccccatctcccaaataaagtttacttgttttacattcca

SEQ ID NO: 13520 - protein, 60 aa, Homo sapiens
MIPGIYSGETGLRPSSGAKQIPNHYNPCQTQPTPFQTAFLRRKCRLRVPVTSDGFTPSPK

SEQ ID NO: 13521 - DNA, 595 bp, Homo sapiens
ggagcgcggcggtgatggcggggccggtgaaggaccgcgaggccttccagaggctcaacttcctgtaccaggtgagtctgcgacaagggccccacggggacggtgctcggcgtcccagagtgactgctcccctcccgcaggccgcccattgtgtccttgcccaggaccccgagaaccaggcgctggcgaggttttactgctacactgagaggaccattgcgaagcggctcgtcttgcggcgggatccctcggtgaagaggactctctgtcgaggctgctcttccctcctcgtcccgggcctcacctgcacccagcgccagagacgctgcaggggacagcgctggaccgtacagacctgcctaacatgccagcgcagccaacgcttcctcaatgatcccgggcatttactctggggagacaggcctgaggcccagctcgggagccaagcagattccaaaccactacaacccttgccaaacacagcccactccatttcagaccgccttcctgaggagaaaatgcagactcagggttccagtaaccagtgatggattcaccccatctcccaaataaagtttacttgttttacattcca

SEQ ID NO: 13522 - protein, 177 aa, Homo sapiens
MAGPVKDREAFQRLNFLYQVSLRQGPHGDGARRPRVTAPLPQAAHCVLAQDPENQALARFYCYTERTIAKRLVLRRDPSVKRTLCRGCSSLLVPGLTCTQRQRRCRGQRWTVQTCLTCQRSQRFLNDPGHLLWGDRPEAQLGSQADSKPLQPLPNTAHSISDRLPEEKMQTQGSSNQ

SEQ ID NO: 13523 - DNA, 914 bp, Homo sapiens
cttccagtgtgggcaataaataataacttttaagaggcaaccccacccatgcacaataatagatgttgttcggctttgtggaggacgattcccatcaccattcatttattaagcaaatacttattttctaaaatgtgtcaggtactgtgctagattcattattctcattgaaattacggtctgatgggacagactaagaaacaaaatggtgtagaaaaagattaactgggggagtagaatgctcacttactcatgccagtggtggcgaagtttatgataagcaaagggagtgagagatggaaattctaggcatgtgtgcagactctgagacaagagagcttgtggtgctgtcaaagaaatgagagttcaggaggctggagtttgaggtaggagggcaaaacatgagactggagggggaaacaggccagttcttgaagtcttgttagggagtttgaactttatcttaaagagttccaggaaatcgatggagcttatgccgaggcctgacaccatcaaatgtgcattcaaattgggggtgtggtgggggagcggggatacctactgaaaaacactggaggcaaaactggcagcaagagaccgttacttctaaacgtggacagtctttttcccatgttcaccctaggctgcaggggacagcgctggaccgtacagacctgcctaacatgccagcgcagccaacgcttcctcaatgatcccgggcatttactctggggagacaggcctgaggcccagctcgggagccaagcagattccaaaccactacaacccttgccaaacacagcccactccatttcagaccgccttcctgaggagaaaatgcagactcagggttccagtaaccagtgatggattcaccccatctcccaaataaagtttacttgttttacattcca

SEQ ID NO: 13524 - protein, 116 aa, Homo sapiens [sequence omitted]

SEQ ID NO: 13525 - DNA, 951 bp, Homo sapiens
acgactcccgactataaagtccccatccggactcaagaagttctcaggactcagaggctgggatcatggtagatggaaccctccttttactcctctcggaggccctggcccttacccagacctgggcgggctcccactccttgaagtatttccacacttccgtgtcccggcccggccgcggggagccccgcttcatctctgtgggctacgtggacgacacccagttcgtgcgcttcgacaacgacgccgcgagtccgaggatggtgccgcgggcgccgtggatggagcaggaggggtcagagtattgggaccgggagacacggagcgccagggacaccgcacagattttccgagtgaatctgcggacgctgcgcggctactacaatcagagcgaggccgggtctcacaccctgcagtggatgcatggctgcgagctggggcccgacgggcgcttcctccgcgggtatgaacagttcgcctacgacggcaaggattatctcaccctgaatgaggacctgcgctcctggaccgcggtggacacggcggctcagatctccgagcaaaagtcaaatgatgcctctgaggcggagcaccagagagcctacctggaagacacatgcgtggagtggctccacaaatacctggagaaggggaaggagacgctgcttcacctggagcccccaaagacacacgtgactcaccaccccatctctgaccatgaggccaccctgaggtgctgggccctgggcttctaccctgcggagatcacactgacctggcagcaggatggggagggccatacccaggacacggagctcgtggagaccaggcctgcaggggatggaaccttccagaagtgggcagctgtggtggtgccttctggagaggagcagagatacacgtgccatgtgcagcatgaggggctacccgagcccgtcaccctgagatgga

SEQ ID NO: 13526 - protein, 294 aa, Homo sapiens
MVDGTLLLLLSEALALTQTWAGSHSLKYFHTSVSRPGRGEPRFISVGYVDDTQFVRFDNDAASPRMVPRAPWMEQEGSEYWDRETRSARDTAQIFRVNLRTLRGYYNQSEAGSHTLQWMHGCELGPDGRFLRGYEQFAYDGKDYLTLNEDLRSWTAVDTAAQISEQKSNDASEAEHQRAYLEDTCVEWLHKYLEKGKETLLHLEPPKTHVTHHPISDHEATLRCWALGFYPAEITLTWQQDGEGHTQDTELVETRPAGDGTFQKWAAVVVPSGEEQRYTCHVQHEGLPEPVTLR

SEQ ID NO: 13527 - DNA, 1339 bp, Homo sapiens
acgactcccgactataaagtccccatccggactcaagaagttctcaggactcagaggctgggatcatggtagatggaaccctccttttactcctctcggaggccctggcccttacccagacctgggcgggctcccactccttgaagtatttccacacttccgtgtcccggcccggccgcggggagccccgcttcatctctgtgggctacgtggacgacacccagttcgtgcgcttcgacaacgacgccgcgagtccgaggatggtgccgcgggcgccgtggatggagcaggaggggtcagagtattgggaccgggagacacggagcgccagggacaccgcacagattttccgagtgaatctgcggacgctgcgcggctactacaatcagagcgaggccgggtctcacaccctgcagtggatgcatggctgcgagctggggcccgacgggcgcttcctccgcgggtatgaacagttcgcctacgacggcaaggattatctcaccctgaatgaggacctgcgctcctggaccgcggtggacacggcggctcagatctccgagcaaaagtcaaatgatgcctctgaggcggagcaccagagagcctacctggaagacacatgcgtggagtggctccacaaatacctggagaaggggaaggagacgctgcttcacctggagcccccaaagacacacgtgactcaccaccccatctctgaccatgaggccaccctgaggtgctgggccctgggcttctaccctgcggagatcacactgacctggcagcaggatggggagggccatacccaggacacggagctcgtggagaccaggcctgcaggggatggaaccttccagaagtgggcagctgtggtggtgccttctggagaggagcagagatacacgtgccatgtgcagcatgaggggctacccgagcccgtcaccctgagatggaagccggcttcccagcccaccatccccatcgtgggcatcattgctggcctggttctccttggatctgtggtctctggagctgtggttgctgctgtgatatggaggaagaagagctcaggtggggaagggagaagggtggggtctgagttttcttgtcccactgggtgtttcaagccctaggtaaaagtgtgtcctgcctcgttactgggaagcaccatccacacacacgagcctacccagcctggggccctgtgtgccagcacctactctttttttttgagacggagtcttggctctgtcacccaggctggagtgcaatggcgtggtttcagctcactgcaacctccgcctcccaggttcaagcaattctcctgcctcagcctccctag

SEQ ID NO: 13528 - protein, 354 aa, Homo sapiens
MVDGTLLLLLSEALALTQTWAGSHSLKYFHTSVSRPGRGEPRFISVGYVDDTQFVRFDNDAASPRMVPRAPWMEQEGSEYWDRETRSARDTAQIFRVNLRTLRGYYNQSEAGSHTLQWMHGCELGPDGRFLRGYEQFAYDGKDYLTLNEDLRSWTAVDTAAQISEQKSNDASEAEHQRAYLEDTCVEWLHKYLEKGKETLLHLEPPKTHVTHHPISDHEATLRCWALGFYPAEITLTWQQDGEGHTQDTELVETRPAGDGTFQKWAAVVVPSGEEQRYTCHVQHEGLPEPVTLRWKPASQPTIPIVGIIAGLVLLGSVVSGAVVAAVIWRKKSSGGEGRRVGSEFSCPTGCFKP

SEQ ID NO: 13529 - DNA, 1414 bp, Homo sapiens
acgactcccgactataaagtccccatccggactcaagaagttctcaggactcagaggctgggatcatggtagatggaaccctccttttactcctctcggaggccctggcccttacccagacctgggcgggctcccactccttgaagtatttccacacttccgtgtcccggcccggccgcggggagccccgcttcatctctgtgggctacgtggacgacacccagttcgtgcgcttcgacaacgacgccgcgagtccgaggatggtgccgcgggcgccgtggatggagcaggaggggtcagagtattgggaccgggagacacggagcgccagggacaccgcacagattttccgagtgaatctgcggacgctgcgcggctactacaatcagagcgaggccgggtctcacaccctgcagtggatgcatggctgcgagctggggcccgacgggcgcttcctccgcgggtatgaacagttcgcctacgacggcaaggattatctcaccctgaatgaggacctgcgctcctggaccgcggtggacacggcggctcagatctccgagcaaaagtcaaatgatgcctctgaggcggagcaccagagagcctacctggaagacacatgcgtggagtggctccacaaatacctggagaaggggaaggagacgctgcttcacctggagcccccaaagacacacgtgactcaccaccccatctctgaccatgaggccaccctgaggtgctgggccctgggcttctaccctgcggagatcacactgacctggcagcaggatggggagggccatacccaggacacggagctcgtggagaccaggcctgcaggggatggaaccttccagaagtgggcagctgtggtggtgccttctggagaggagcagagatacacgtgccatgtgcagcatgaggggctacccgagcccgtcaccctgagatggaagccggcttcccagcccaccatccccatcgtgggcatcattgctggcctggttctccttggatctgtggtctctggagctgtggttgctgctgtgatatggaggaagaagagctcaggtggaaaaggagggagctactctaaggctgagtggagcgacagtgcccaggggtctgagtctcacagcttgtaaagcctgagacagctgccttgtgtgcgactgagatgcacagctgccttgtgtgcgactgagatgcaggatttcctcacgcctcccctatgtgtcttaggggactctggcttctctttttgcaagggcctctgaatctgtctgtgtccctgttagcacaatgtgaggaggtagagaaacagtccacctctgtgtctaccatgacccccttcctcacactgacctgtgttccttccctgttctcttttctattaaaaataagaacctgggcagag

SEQ ID NO: 13530 - protein, 358 aa, Homo sapiens; identical to SEQ ID NO: 1421

SEQ ID NO: 13531 - DNA, 1725 bp, Homo sapiens
acgactcccgactataaagtccccatccggactcaagaagttctcaggactcagaggctgggatcatggtagatggaaccctccttttactcctctcggaggccctggcccttacccagacctgggcgggctcccactccttgaagtatttccacacttccgtgtcccggcccggccgcggggagccccgcttcatctctgtgggctacgtggacgacacccagttcgtgcgcttcgacaacgacgccgcgagtccgaggatggtgccgcgggcgccgtggatggagcaggaggggtcagagtattgggaccgggagacacggagcgccagggacaccgcacagattttccgagtgaatctgcggacgctgcgcggctactacaatcagagcgaggccgggtctcacaccctgcagtggatgcatggctgcgagctggggcccgacgggcgcttcctccgcgggtatgaacagttcgcctacgacggcaaggattatctcaccctgaatgaggacctgcgctcctggaccgcggtggacacggcggctcagatctccgagcaaaagtcaaatgatgcctctgaggcggagcaccagagagcctacctggaagacacatgcgtggagtggctccacaaatacctggagaaggggaaggagacgctgcttcacctggagcccccaaagacacacgtgactcaccaccccatctctgaccatgaggccaccctgaggtgctgggccctgggcttctaccctgcggagatcacactgacctggcagcaggatggggagggccatacccaggacacggagctcgtggagaccaggcctgcaggggatggaaccttccagaagtgggcagctgtggtggtgccttctggagaggagcagagatacacgtgccatgtgcagcatgaggggctacccgagcccgtcaccctgagatggaagccggcttcccagcccaccatccccatcgtgggcatcattgctggcctggttctccttggatctgtggtctctggagctgtggttgctgctgtgatatggaggaagaagagctcaggtggaaaaggagggagctactctaaggctgagtggagcgacagtgcccaggggtctgagtctcacagcttgtaaagcctgagacagctgccttgtgtgcgactgagatgcacagctgccttgtgtgcgactgagatgcaggatttcctcacgcctcccctatgtgtcttaggggactctggcttctctttttgcaagggcctctgaatctgtctgtgtccctgttagcacaatgtgaggaggtagagaaacagtccacctctgtgtctaccatgacccccttcctcacactgacctgtgttccttccctgttctcttttctattaaaaataagaacctgggcagagtgcggcagctcatgcctgtaatcccagcacttagggaggccgaggagggcagatcacgaggtcaggagatcgaaaccatcctggctaacacggtgaaaccccgtctctactaaaaaatacaaaaaattagctgggcgcagaggcacgggcctgtagtcccagctactcaggaggcggaggcaggagaatggcgtcaacccgggaggcggaggttgcagtgagccaggattgtgcgactgcactccagcctgggtgacagggtgaaacgccatctcaaaaaataaaaattgaaaaataaaaaaagaacctgg

SEQ ID NO: 13532 - protein, 358 aa, Homo sapiens; identical to SEQ ID NO: 1421

SEQ ID NO: 13533 - DNA, 1182 bp, Homo sapiens
acgactcccgactataaagtccccatccggactcaagaagttctcaggactcagaggctgggatcatggtagatggaaccctccttttactcctctcggaggccctggcccttacccagacctgggcgggctcccactccttgaagtatttccacacttccgtgtcccggcccggccgcggggagccccgcttcatctctgtgggctacgtggacgacacccagttcgtgcgcttcgacaacgacgccgcgagtccgaggatggtgccgcgggcgccgtggatggagcaggaggggtcagagtattgggaccgggagacacggagcgccagggacaccgcacagattttccgagtgaatctgcggacgctgcgcggctactacaatcagagcgaggccgggtctcacaccctgcagtggatgcatggctgcgagctggggcccgacgggcgcttcctccgcgggtatgaacagttcgcctacgacggcaaggattatctcaccctgaatgaggacctgcgctcctggaccgcggtggacacggcggctcagatctccgagcaaaagtcaaatgatgcctctgaggcggagcaccagagagcctacctggaagacacatgcgtggagtggctccacaaatacctggagaaggggaaggagacgctgcttcacctggagcccccaaagacacacgtgactcaccaccccatctctttttgcaagggcctctgaatctgtctgtgtccctgttagcacaatgtgaggaggtagagaaacagtccacctctgtgtctaccatgacccccttcctcacactgacctgtgttccttccctgttctcttttctattaaaaataagaacctgggcagagtgcggcagctcatgcctgtaatcccagcacttagggaggccgaggagggcagatcacgaggtcaggagatcgaaaccatcctggctaacacggtgaaaccccgtctctactaaaaaatacaaaaaattagctgggcgcagaggcacgggcctgtagtcccagctactcaggaggcggaggcaggagaatggcgtcaacccgggaggcggaggttgcagtgagccaggattgtgcgactgcactccagcctgggtgacagggtgaaacgccatctcaaaaaataaaaattgaaaaataaaaaaagaacctgg

SEQ ID NO: 13534 - protein, 221 aa, Homo sapiens
MVDGTLLLLLSEALALTQTWAGSHSLKYFHTSVSRPGRGEPRFISVGYVDDTQFVRFDNDAASPRMVPRAPWMEQEGSEYWDRETRSARDTAQIFRVNLRTLRGYYNQSEAGSHTLQWMHGCELGPDGRFLRGYEQFAYDGKDYLTLNEDLRSWTAVDTAAQISEQKSNDASEAEHQRAYLEDTCVEWLHKYLEKGKETLLHLEPPKTHVTHHPISFCKGL

SEQ ID NO: 13535 - DNA, 2600 bp, Homo sapiens
acgactcccgactataaagtccccatccggactcaagaagttctcaggactcagaggctgggatcatggtagatggaaccctccttttactcctctcggaggccctggcccttacccagacctgggcgggctcccactccttgaagtatttccacacttccgtgtcccggcccggccgcggggagccccgcttcatctctgtgggctacgtggacgacacccagttcgtgcgcttcgacaacgacgccgcgagtccgaggatggtgccgcgggcgccgtggatggagcaggaggggtcagagtattgggaccgggagacacggagcgccagggacaccgcacagattttccgagtgaatctgcggacgctgcgcggctactacaatcagagcgaggccgggtctcacaccctgcagtggatgcatggctgcgagctggggcccgacgggcgcttcctccgcgggtatgaacagttcgcctacgacggcaaggattatctcaccctgaatgaggacctgcgctcctggaccgcggtggacacggcggctcagatctccgagcaaaagtcaaatgatgcctctgaggcggagcaccagagagcctacctggaagacacatgcgtggagtggctccacaaatacctggagaaggggaaggagacgctgcttcacctggagcccccaaagacacacgtgactcaccaccccatctctgaccatgaggccaccctgaggtgctgggccctgggcttctaccctgcggagatcacactgacctggcagcaggatggggagggccatacccaggacacggagctcgtggagaccaggcctgcaggggatggaaccttccagaagtgggcagctgtggtggtgccttctggagaggagcagagatacacgtgccatgtgcagcatgaggggctacccgagcccgtcaccctgagatggaagccggcttcccagcccaccatccccatcgtgggcatcattgctggcctggttctccttggatctgtggtctctggagctgtggttgctgctgtgatatggaggaagaagagctcaggtggaaaaggagggagctactctaaggctgagtggagcgacagtgcccaggggtctgagtctcacagcttgtaaagcctgagacagctgccttgtgtgcgactgagatgcacagctgccttgtgtgcgactgagatgcaggatttcctcacgcctcccctatgtgtcttaggggactctggcttctctttttgcaagggcctctgaatctgtctgtgtccctgttagcacaatgtgaggaggtagagaaacagtccacctctgtgtctaccatgacccccttcctcacactgacctgtgttccttccctgttctcttttctattaaaaataagaacctgggcagagtgcggcagctcatgcctgtaatcccagcacttagggaggccgaggagggcagatcacgaggtcaggagatcgaaaccatcctggctaacacggtgaaaccccgtctctactaaaaaatacaaaaaattagctgggcgcagaggcacgggcctgtagtcccagctactcaggaggcggaggcaggagaatggcgtcaacccgggaggcggaggttgcagtgagccaggattgtgcgactgcactccagcctgggtgacagggtgaaacgccatctcaaaaaataaaaattgaaaaataaaaaaagaacctggatctcaatttaatttttcatattcttgcaatgaaatggacttgaggaagctaagatcatagctagaaatacagataattccacagcacatctctagcaaatttagcctattcctattctctagcctattccttaccacctgtaatcttgaccatataccttggagttgaatattgttttcatactgctgtggtttgaatgttccctccaacactcatgttgagacttaatccctaatgtggcaatactgaaaggtggggcctttgagatgtgattggatcgtaaggctgtgccttcattcatgggttaatggattaatgggttatcacaggaatgggactggtggctttataagaagaggaaaagagaactgagctagcatgcccagcccacagagagcctccactagagtgatgctaagtggaaatgtgaggtgcagctgccacagagggcccccaccagggaaatgtctagtgtctagtggatccaggccacaggagagagtgccttgtggagcgctgggagcaggacctgaccaccaccaggaccccagaactgtggagtcagtggcagcatgcagcgcccccttgggaaagctttaggcaccagcctgcaacccattcgagcagccacgtaggctgcacccagcaaagccacaggcacggggctacctgaggccttgggggcccaatccctgctccagtgtgtccgtgaggcagcacacgaagtcaaaagagattattctcttcccacagataccttttctctcccatgaccctttaacagcatctgcttcattcccctcaccttcccaggctgatctgaggtaaactttgaagtaaaataaaagctgtgtttgagcatcatttgtatttc

SEQ ID NO: 13536 - protein, 358 aa, Homo sapiens; identical to SEQ ID NO: 1421

SEQ ID NO: 13537 - DNA, 2057 bp, Homo sapiens
acgactcccgactataaagtccccatccggactcaagaagttctcaggactcagaggctgggatcatggtagatggaaccctccttttactcctctcggaggccctggcccttacccagacctgggcgggctcccactccttgaagtatttccacacttccgtgtcccggcccggccgcggggagccccgcttcatctctgtgggctacgtggacgacacccagttcgtgcgcttcgacaacgacgccgcgagtccgaggatggtgccgcgggcgccgtggatggagcaggaggggtcagagtattgggaccgggagacacggagcgccagggacaccgcacagattttccgagtgaatctgcggacgctgcgcggctactacaatcagagcgaggccgggtctcacaccctgcagtggatgcatggctgcgagctggggcccgacgggcgcttcctccgcgggtatgaacagttcgcctacgacggcaaggattatctcaccctgaatgaggacctgcgctcctggaccgcggtggacacggcggctcagatctccgagcaaaagtcaaatgatgcctctgaggcggagcaccagagagcctacctggaagacacatgcgtggagtggctccacaaatacctggagaaggggaaggagacgctgcttcacctggagcccccaaagacacacgtgactcaccaccccatctctttttgcaagggcctctgaatctgtctgtgtccctgttagcacaatgtgaggaggtagagaaacagtccacctctgtgtctaccatgacccccttcctcacactgacctgtgttccttccctgttctcttttctattaaaaataagaacctgggcagagtgcggcagctcatgcctgtaatcccagcacttagggaggccgaggagggcagatcacgaggtcaggagatcgaaaccatcctggctaacacggtgaaaccccgtctctactaaaaaatacaaaaaattagctgggcgcagaggcacgggcctgtagtcccagctactcaggaggcggaggcaggagaatggcgtcaacccgggaggcggaggttgcagtgagccaggattgtgcgactgcactccagcctgggtgacagggtgaaacgccatctcaaaaaataaaaattgaaaaataaaaaaagaacctggatctcaatttaatttttcatattcttgcaatgaaatggacttgaggaagctaagatcatagctagaaatacagataattccacagcacatctctagcaaatttagcctattcctattctctagcctattccttaccacctgtaatcttgaccatataccttggagttgaatattgttttcatactgctgtggtttgaatgttccctccaacactcatgttgagacttaatccctaatgtggcaatactgaaaggtggggcctttgagatgtgattggatcgtaaggctgtgccttcattcatgggttaatggattaatgggttatcacaggaatgggactggtggctttataagaagaggaaaagagaactgagctagcatgcccagcccacagagagcctccactagagtgatgctaagtggaaatgtgaggtgcagctgccacagagggcccccaccagggaaatgtctagtgtctagtggatccaggccacaggagagagtgccttgtggagcgctgggagcaggacctgaccaccaccaggaccccagaactgtggagtcagtggcagcatgcagcgcccccttgggaaagctttaggcaccagcctgcaacccattcgagcagccacgtaggctgcacccagcaaagccacaggcacggggctacctgaggccttgggggcccaatccctgctccagtgtgtccgtgaggcagcacacgaagtcaaaagagattattctcttcccacagataccttttctctcccatgaccctttaacagcatctgcttcattcccctcaccttcccaggctgatctgaggtaaactttgaagtaaaataaaagctgtgtttgagcatcatttgtatttc

SEQ ID NO: 13538 - protein, 221 aa, Homo sapiens; identical to SEQ ID NO: 13534

SEQ ID NO: 13539 - DNA, 2925 bp, Homo sapiens
acgactcccgactataaagtccccatccggactcaagaagttctcaggactcagaggctgggatcatggtagatggaaccctccttttactcctctcggaggccctggcccttacccagacctgggcgggctcccactccttgaagtatttccacacttccgtgtcccggcccggccgcggggagccccgcttcatctctgtgggctacgtggacgacacccagttcgtgcgcttcgacaacgacgccgcgagtccgaggatggtgccgcgggcgccgtggatggagcaggaggggtcagagtattgggaccgggagacacggagcgccagggacaccgcacagattttccgagtgaatctgcggacgctgcgcggctactacaatcagagcgaggccgggtctcacaccctgcagtggatgcatggctgcgagctggggcccgacgggcgcttcctccgcgggtatgaacagttcgcctacgacggcaaggattatctcaccctgaatgaggacctgcgctcctggaccgcggtggacacggcggctcagatctccgagcaaaagtcaaatgatgcctctgaggcggagcaccagagagcctacctggaagacacatgcgtggagtggctccacaaatacctggagaaggggaaggagacgctgcttcacctggagcccccaaagacacacgtgactcaccaccccatctctgaccatgaggccaccctgaggtgctgggccctgggcttctaccctgcggagatcacactgacctggcagcaggatggggagggccatacccaggacacggagctcgtggagaccaggcctgcaggggatggaaccttccagaagtgggcagctgtggtggtgccttctggagaggagcagagatacacgtgccatgtgcagcatgaggggctacccgagcccgtcaccctgagatggaagccggcttcccagcccaccatccccatcgtgggcatcattgctggcctggttctccttggatctgtggtctctggagctgtggttgctgctgtgatatggaggaagaagagctcaggtggaaaaggagggagctactctaaggctgagtggagcgacagtgcccaggggtctgagtctcacagcttgtaaagcctgagacagctgccttgtgtgcgactgagatgcacagctgccttgtgtgcgactgagatgcaggatttcctcacgcctcccctatgtgtcttaggggactctggcttctctttttgcaagggcctctgaatctgtctgtgtccctgttagcacaatgtgaggaggtagagaaacagtccacctctgtgtctaccatgacccccttcctcacactgacctgtgttccttccctgttctcttttctattaaaaataagaacctgggcagagtgcggcagctcatgcctgtaatcccagcacttagggaggccgaggagggcagatcacgaggtcaggagatcgaaaccatcctggctaacacggtgaaaccccgtctctactaaaaaatacaaaaaattagctgggcgcagaggcacgggcctgtagtcccagctactcaggaggcggaggcaggagaatggcgtcaacccgggaggcggaggttgcagtgagccaggattgtgcgactgcactccagcctgggtgacagggtgaaacgccatctcaaaaaataaaaattgaaaaataaaaaaagaacctggatctcaatttaatttttcatattcttgcaatgaaatggacttgaggaagctaagatcatagctagaaatacagataattccacagcacatctctagcaaatttagcctattcctattctctagcctattccttaccacctgtaatcttgaccatataccttggagttgaatattgttttcatactgctgtggtttgaatgttccctccaacactcatgttgagacttaatccctaatgtggcaatactgaaaggtggggcctttgagatgtgattggatcgtaaggctgtgccttcattcatgggttaatggattaatgggttatcacaggaatgggactggtggctttataagaagaggaaaagagaactgagctagcatgcccagcccacagagagcctccactagagtgatgctaagtggaaatgtgaggtgcagctgccacagagggcccccaccagggaaatgtctagtgtctagtggatccaggccacaggagagagtgccttgtggagcgctgggagcaggacctgaccaccaccaggaccccagaactgtggagtcagtggcagcatgcagcgcccccttgggaaagctttaggcaccagcctgcaacccattcgagcagccacgtaggctgcacccagcaaagccacaggcacggggctacctgaggccttgggggcccaatccctgctccagtgtgtccgtgaggcagcacacgaagtcaaaagagattattctcttcccacagataccttttctctcccatgaccctttaacagcatctgcttcattcccctcaccttcccaggctgatctgaggtaaactttgaagtaaaataaaagctgtgtttgagcatcatttgtatttcatttgtgcgttttgtgccttgttgttttaattttttaaccacattcaagctatcctttggcttccaatgccatggtccacccagaactgcattcactggcccatgttctagttctggtcatgccgactttcccgttttcctggtgaatccctgtaatcacctgagtctcattctgtcaggtgatatccagtaagaaggcaacatgtgcggtgagaaagcccagggagtcctgggtgtgaatttttactttgccatttcttcctgtgtgacacgcggtggggcttcacctgtctgagctccagttcctcatcttgtacgtggcact

SEQ ID NO: 13540 - protein, 358 aa, Homo sapiens; identical to SEQ ID NO: 1421

SEQ ID NO: 13541 - DNA, 2382 bp, Homo sapiens
acgactcccgactataaagtccccatccggactcaagaagttctcaggactcagaggctgggatcatggtagatggaaccctccttttactcctctcggaggccctggcccttacccagacctgggcgggctcccactccttgaagtatttccacacttccgtgtcccggcccggccgcggggagccccgcttcatctctgtgggctacgtggacgacacccagttcgtgcgcttcgacaacgacgccgcgagtccgaggatggtgccgcgggcgccgtggatggagcaggaggggtcagagtattgggaccgggagacacggagcgccagggacaccgcacagattttccgagtgaatctgcggacgctgcgcggctactacaatcagagcgaggccgggtctcacaccctgcagtggatgcatggctgcgagctggggcccgacgggcgcttcctccgcgggtatgaacagttcgcctacgacggcaaggattatctcaccctgaatgaggacctgcgctcctggaccgcggtggacacggcggctcagatctccgagcaaaagtcaaatgatgcctctgaggcggagcaccagagagcctacctggaagacacatgcgtggagtggctccacaaatacctggagaaggggaaggagacgctgcttcacctggagcccccaaagacacacgtgactcaccaccccatctctttttgcaagggcctctgaatctgtctgtgtccctgttagcacaatgtgaggaggtagagaaacagtccacctctgtgtctaccatgacccccttcctcacactgacctgtgttccttccctgttctcttttctattaaaaataagaacctgggcagagtgcggcagctcatgcctgtaatcccagcacttagggaggccgaggagggcagatcacgaggtcaggagatcgaaaccatcctggctaacacggtgaaaccccgtctctactaaaaaatacaaaaaattagctgggcgcagaggcacgggcctgtagtcccagctactcaggaggcggaggcaggagaatggcgtcaacccgggaggcggaggttgcagtgagccaggattgtgcgactgcactccagcctgggtgacagggtgaaacgccatctcaaaaaataaaaattgaaaaataaaaaaagaacctggatctcaatttaatttttcatattcttgcaatgaaatggacttgaggaagctaagatcatagctagaaatacagataattccacagcacatctctagcaaatttagcctattcctattctctagcctattccttaccacctgtaatcttgaccatataccttggagttgaatattgttttcatactgctgtggtttgaatgttccctccaacactcatgttgagacttaatccctaatgtggcaatactgaaaggtggggcctttgagatgtgattggatcgtaaggctgtgccttcattcatgggttaatggattaatgggttatcacaggaatgggactggtggctttataagaagaggaaaagagaactgagctagcatgcccagcccacagagagcctccactagagtgatgctaagtggaaatgtgaggtgcagctgccacagagggcccccaccagggaaatgtctagtgtctagtggatccaggccacaggagagagtgccttgtggagcgctgggagcaggacctgaccaccaccaggaccccagaactgtggagtcagtggcagcatgcagcgcccccttgggaaagctttaggcaccagcctgcaacccattcgagcagccacgtaggctgcacccagcaaagccacaggcacggggctacctgaggccttgggggcccaatccctgctccagtgtgtccgtgaggcagcacacgaagtcaaaagagattattctcttcccacagataccttttctctcccatgaccctttaacagcatctgcttcattcccctcaccttcccaggctgatctgaggtaaactttgaagtaaaataaaagctgtgtttgagcatcatttgtatttcatttgtgcgttttgtgccttgttgttttaattttttaaccacattcaagctatcctttggcttccaatgccatggtccacccagaactgcattcactggcccatgttctagttctggtcatgccgactttcccgttttcctggtgaatccctgtaatcacctgagtctcattctgtcaggtgatatccagtaagaaggcaacatgtgcggtgagaaagcccagggagtcctgggtgtgaatttttactttgccatttcttcctgtgtgacacgcggtggggcttcacctgtctgagctccagttcctcatcttgtacgtggcact

SEQ ID NO: 13542 - protein, 221 aa, Homo sapiens; identical to SEQ ID NO: 13534

SEQ ID NO: 13543 - DNA, 863 bp, Homo sapiens
ctcaagaagttctcaggactcagaggctgggatcatggtagatggaaccctccttttactcctctcggaggccctggcccttacccagacctgggcgggctcccactccttgaagtatttccacacttccgtgtcccggcccggccgcggggagccccgcttcatctctgtgggctacgtggacgacacccagttcgtgcgcttcgacaacgacgccgcgagtccgaggatggtgccgcgggcgccgtggatggagcaggaggggtcagagtattgggaccgggagacacggagcgccagggacaccgcacagattttccgagtgaatctgcggacgctgcgcggctactacaatcagagcgaggccgggtctcacaccctgcagtggatgcatggctgcgagctggggcccgacgggcgcttcctccgcgggtatgaacagttcgcctacgacggcaaggattatctcaccctgaatgaggacctgcgctcctggaccgcggtggacacggcggctcaggtggaaaaggagggagctactctaaggctgagtggagcgacagtgcccaggggtctgagtctcacagcttgtaaagcctgagacagctgccttgtgtgcgactgagatgcacagctgccttgtgtgcgactgagatgcaggatttcctcacgcctcccctatgtgtcttaggggactctggcttctctttttgcaagggcctctgaatctgtctgtgtccctgttagcacaatgtgaggaggtagagaaacagtccacctctgtgtctaccatgacccccttcctcacactgacctgtgttccttccctgttctcttttctattaaaaataagaacctgggca

SEQ ID NO: 13544 - protein, 188 aa, Homo sapiens
MVDGTLLLLLSEALALTQTWAGSHSLKYFHTSVSRPGRGEPRFISVGYVDDTQFVRFDNDAASPRMVPRAPWMEQEGSEYWDRETRSARDTAQIFRVNLRTLRGYYNQSEAGSHTLQWMHGCELGPDGRFLRGYEQFAYDGKDYLTLNEDLRSWTAVDTAAQVEKEGATLRLSGATVPRGLSLTACKA

SEQ ID NO: 13545 - DNA, 1177 bp, Homo sapiens
ctcaagaagttctcaggactcagaggctgggatcatggtagatggaaccctccttttactcctctcggaggccctggcccttacccagacctgggcgggctcccactccttgaagtatttccacacttccgtgtcccggcccggccgcggggagccccgcttcatctctgtgggctacgtggacgacacccagttcgtgcgcttcgacaacgacgccgcgagtccgaggatggtgccgcgggcgccgtggatggagcaggaggggtcagagtattgggaccgggagacacggagcgccagggacaccgcacagattttccgagtgaatctgcggacgctgcgcggctactacaatcagagcgaggccgggtctcacaccctgcagtggatgcatggctgcgagctggggcccgacgggcgcttcctccgcgggtatgaacagttcgcctacgacggcaaggattatctcaccctgaatgaggacctgcgctcctggaccgcggtggacacggcggctcaggtggaaaaggagggagctactctaaggctgagtggagcgacagtgcccaggggtctgagtctcacagcttgtaaagcctgagacagctgccttgtgtgcgactgagatgcacagctgccttgtgtgcgactgagatgcaggatttcctcacgcctcccctatgtgtcttaggggactctggcttctctttttgcaagggcctctgaatctgtctgtgtccctgttagcacaatgtgaggaggtagagaaacagtccacctctgtgtctaccatgacccccttcctcacactgacctgtgttccttccctgttctcttttctattaaaaataagaacctgggcagagtgcggcagctcatgcctgtaatcccagcacttagggaggccgaggagggcagatcacgaggtcaggagatcgaaaccatcctggctaacacggtgaaaccccgtctctactaaaaaatacaaaaaattagctgggcgcagaggcacgggcctgtagtcccagctactcaggaggcggaggcaggagaatggcgtcaacccgggaggcggaggttgcagtgagccaggattgtgcgactgcactccagcctgggtgacagggtgaaacgccatctcaaaaaataaaaattgaaaaataaaaaaagaacctgg

SEQ ID NO: 13546 - protein, 188 aa, Homo sapiens; identical to SEQ ID NO: 13544

SEQ ID NO: 13547 - DNA, 2052 bp, Homo sapiens
ctcaagaagttctcaggactcagaggctgggatcatggtagatggaaccctccttttactcctctcggaggccctggcccttacccagacctgggcgggctcccactccttgaagtatttccacacttccgtgtcccggcccggccgcggggagccccgcttcatctctgtgggctacgtggacgacacccagttcgtgcgcttcgacaacgacgccgcgagtccgaggatggtgccgcgggcgccgtggatggagcaggaggggtcagagtattgggaccgggagacacggagcgccagggacaccgcacagattttccgagtgaatctgcggacgctgcgcggctactacaatcagagcgaggccgggtctcacaccctgcagtggatgcatggctgcgagctggggcccgacgggcgcttcctccgcgggtatgaacagttcgcctacgacggcaaggattatctcaccctgaatgaggacctgcgctcctggaccgcggtggacacggcggctcaggtggaaaaggagggagctactctaaggctgagtggagcgacagtgcccaggggtctgagtctcacagcttgtaaagcctgagacagctgccttgtgtgcgactgagatgcacagctgccttgtgtgcgactgagatgcaggatttcctcacgcctcccctatgtgtcttaggggactctggcttctctttttgcaagggcctctgaatctgtctgtgtccctgttagcacaatgtgaggaggtagagaaacagtccacctctgtgtctaccatgacccccttcctcacactgacctgtgttccttccctgttctcttttctattaaaaataagaacctgggcagagtgcggcagctcatgcctgtaatcccagcacttagggaggccgaggagggcagatcacgaggtcaggagatcgaaaccatcctggctaacacggtgaaaccccgtctctactaaaaaatacaaaaaattagctgggcgcagaggcacgggcctgtagtcccagctactcaggaggcggaggcaggagaatggcgtcaacccgggaggcggaggttgcagtgagccaggattgtgcgactgcactccagcctgggtgacagggtgaaacgccatctcaaaaaataaaaattgaaaaataaaaaaagaacctggatctcaatttaatttttcatattcttgcaatgaaatggacttgaggaagctaagatcatagctagaaatacagataattccacagcacatctctagcaaatttagcctattcctattctctagcctattccttaccacctgtaatcttgaccatataccttggagttgaatattgttttcatactgctgtggtttgaatgttccctccaacactcatgttgagacttaatccctaatgtggcaatactgaaaggtggggcctttgagatgtgattggatcgtaaggctgtgccttcattcatgggttaatggattaatgggttatcacaggaatgggactggtggctttataagaagaggaaaagagaactgagctagcatgcccagcccacagagagcctccactagagtgatgctaagtggaaatgtgaggtgcagctgccacagagggcccccaccagggaaatgtctagtgtctagtggatccaggccacaggagagagtgccttgtggagcgctgggagcaggacctgaccaccaccaggaccccagaactgtggagtcagtggcagcatgcagcgcccccttgggaaagctttaggcaccagcctgcaacccattcgagcagccacgtaggctgcacccagcaaagccacaggcacggggctacctgaggccttgggggcccaatccctgctccagtgtgtccgtgaggcagcacacgaagtcaaaagagattattctcttcccacagataccttttctctcccatgaccctttaacagcatctgcttcattcccctcaccttcccaggctgatctgaggtaaactttgaagtaaaataaaagctgtgtttgagcatcatttgtatttc

SEQ ID NO: 13548 - protein, 188 aa, Homo sapiens; identical to SEQ ID NO: 13544

SEQ ID NO: 13549 - DNA, 2377 bp, Homo sapiens
ctcaagaagttctcaggactcagaggctgggatcatggtagatggaaccctccttttactcctctcggaggccctggcccttacccagacctgggcgggctcccactccttgaagtatttccacacttccgtgtcccggcccggccgcggggagccccgcttcatctctgtgggctacgtggacgacacccagttcgtgcgcttcgacaacgacgccgcgagtccgaggatggtgccgcgggcgccgtggatggagcaggaggggtcagagtattgggaccgggagacacggagcgccagggacaccgcacagattttccgagtgaatctgcggacgctgcgcggctactacaatcagagcgaggccgggtctcacaccctgcagtggatgcatggctgcgagctggggcccgacgggcgcttcctccgcgggtatgaacagttcgcctacgacggcaaggattatctcaccctgaatgaggacctgcgctcctggaccgcggtggacacggcggctcaggtggaaaaggagggagctactctaaggctgagtggagcgacagtgcccaggggtctgagtctcacagcttgtaaagcctgagacagctgccttgtgtgcgactgagatgcacagctgccttgtgtgcgactgagatgcaggatttcctcacgcctcccctatgtgtcttaggggactctggcttctctttttgcaagggcctctgaatctgtctgtgtccctgttagcacaatgtgaggaggtagagaaacagtccacctctgtgtctaccatgacccccttcctcacactgacctgtgttccttccctgttctcttttctattaaaaataagaacctgggcagagtgcggcagctcatgcctgtaatcccagcacttagggaggccgaggagggcagatcacgaggtcaggagatcgaaaccatcctggctaacacggtgaaaccccgtctctactaaaaaatacaaaaaattagctgggcgcagaggcacgggcctgtagtcccagctactcaggaggcggaggcaggagaatggcgtcaacccgggaggcggaggttgcagtgagccaggattgtgcgactgcactccagcctgggtgacagggtgaaacgccatctcaaaaaataaaaattgaaaaataaaaaaagaacctggatctcaatttaatttttcatattcttgcaatgaaatggacttgaggaagctaagatcatagctagaaatacagataattccacagcacatctctagcaaatttagcctattcctattctctagcctattccttaccacctgtaatcttgaccatataccttggagttgaatattgttttcatactgctgtggtttgaatgttccctccaacactcatgttgagacttaatccctaatgtggcaatactgaaaggtggggcctttgagatgtgattggatcgtaaggctgtgccttcattcatgggttaatggattaatgggttatcacaggaatgggactggtggctttataagaagaggaaaagagaactgagctagcatgcccagcccacagagagcctccactagagtgatgctaagtggaaatgtgaggtgcagctgccacagagggcccccaccagggaaatgtctagtgtctagtggatccaggccacaggagagagtgccttgtggagcgctgggagcaggacctgaccaccaccaggaccccagaactgtggagtcagtggcagcatgcagcgcccccttgggaaagctttaggcaccagcctgcaacccattcgagcagccacgtaggctgcacccagcaaagccacaggcacggggctacctgaggccttgggggcccaatccctgctccagtgtgtccgtgaggcagcacacgaagtcaaaagagattattctcttcccacagataccttttctctcccatgaccctttaacagcatctgcttcattcccctcaccttcccaggctgatctgaggtaaactttgaagtaaaataaaagctgtgtttgagcatcatttgtatttcatttgtgcgttttgtgccttgttgttttaattttttaaccacattcaagctatcctttggcttccaatgccatggtccacccagaactgcattcactggcccatgttctagttctggtcatgccgactttcccgttttcctggtgaatccctgtaatcacctgagtctcattctgtcaggtgatatccagtaagaaggcaacatgtgcggtgagaaagcccagggagtcctgggtgtgaatttttactttgccatttcttcctgtgtgacacgcggtggggcttcacctgtctgagctccagttcctcatcttgtacgtggcact

SEQ ID NO: 13550 - protein, 188 aa, Homo sapiens; identical to SEQ ID NO: 13544

SEQ ID NO: 13551 - DNA, 1257 bp, Homo sapiens
tcaggactcagaggctgggatcatggtagatggaaccctccttttactcctctcggaggccctggcccttacccagacctgggcgggctcccactccttgaagtatttccacacttccgtgtcccggcccggccgcggggagccccgcttcatctctgtgggctacgtggacgacacccagttcgtgcgcttcgacaacgacgccgcgagtccgaggatggtgccgcgggcgccgtggatggagcaggaggggtcagagtattgggaccgggagacacggagcgccagggacaccgcacagattttccgagtgaatctgcggacgctgcgcggctactacaatcagagcgaggccggtgagtgaccccggccaggggagcaggtcacgacccctccccatcccccacggacggcgcgggtcccctcgaatcttcgggtcccagattcaccccaaggctgcggaacccgcccagaccctagaccggggagagtctcaggcgcctttacccggttctttttcagtttaggccaaaatgcccacagggtggtggcgacgggggcggggcttggtgggcgggactgactaaggggcggggccagggtctcacaccctgcagtggatgcatggctgcgagctggggcccgacgggcgcttcctccgcgggtatgaacagttcgcctacgacggcaaggattatctcaccctgaatgaggacctgcgctcctggaccgcggtggacacggcggctcagatctccgagcaaaagtcaaatgatgcctctgaggcggagcaccagagagcctacctggaagacacatgcgtggagtggctccacaaatacctggagaaggggaaggagacgctgcttcacctgggtaagagggtccacagggctactctcccatctccttcttgggctaggactgtgcccacagctgacagacctcaaacagtagaagaaacagggatggaggccagaataccactcctcccttggatcaggagagggagctgtcacctgaggtacaggagatcctataccacagagtgactctcttaaagggccagacctctctcaggggcaattaaggaatctagtctcgctggagattccatccttcagatgaactgatgagcagttctctttgactcccagtattaggaatcacgggggagtttctctcgtgcctgattctcagccccacaccaagagtttttggaggtctgactccagcttttctcagtcactcagcatc

SEQ ID NO: 13552 - protein, 113 aa, Homo sapiens [sequence omitted]

SEQ ID NO: 13553 - DNA, 432 bp, Homo sapiens
ggtagatggaaccctccttttactcctctcggaggccctggcccttacccagacctgggcgggctcccactccttgaagtatttccacacttccgtgtcccggcccggccgcggagagcctccactagagtgatgctaagtggaaatgtgaggtgcagctgccacagagggcccccaccagggaaatgtctagtgtctagtggatccagccacaggcacggggctacctgaggccttgggggcccaatccctgctccagtgtgtccgtgaggcagcacacgaagtcaaaagagattattctcttcccacagataccttttctctcccatgaccctttaacagcatctgcttcattcccctcaccttcccaggctgatctgaggtaaactttgaagtaaaataaaagctgtgtttgagcatcatttgtatttc

SEQ ID NO: 13554 - protein, 32 aa, Homo sapiens
MLSGNVRCSCHRGPPPGKCLVSSGSSHRHGAT

SEQ ID NO: 13555 - DNA, 757 bp, Homo sapiens
ggtagatggaaccctccttttactcctctcggaggccctggcccttacccagacctgggcgggctcccactccttgaagtatttccacacttccgtgtcccggcccggccgcggagagcctccactagagtgatgctaagtggaaatgtgaggtgcagctgccacagagggcccccaccagggaaatgtctagtgtctagtggatccagccacaggcacggggctacctgaggccttgggggcccaatccctgctccagtgtgtccgtgaggcagcacacgaagtcaaaagagattattctcttcccacagataccttttctctcccatgaccctttaacagcatctgcttcattcccctcaccttcccaggctgatctgaggtaaactttgaagtaaaataaaagctgtgtttgagcatcatttgtatttcatttgtgcgttttgtgccttgttgttttaattttttaaccacattcaagctatcctttggcttccaatgccatggtccacccagaactgcattcactggcccatgttctagttctggtcatgccgactttcccgttttcctggtgaatccctgtaatcacctgagtctcattctgtcaggtgatatccagtaagaaggcaacatgtgcggtgagaaagcccagggagtcctgggtgtgaatttttactttgccatttcttcctgtgtgacacgcggtggggcttcacctgtctgagctccagttcctcatcttgtacgtggcact

SEQ ID NO: 13556 - protein, 32 aa, Homo sapiens; identical to SEQ ID NO: 13554

SEQ ID NO: 13557 - DNA, 997 bp, Homo sapiens
aggggagcaggtcacgacccctccccatcccccacggacggcgcgggtcccctcgaatcttcgggtcccagattcaccccaaggctgcggaacccgcccagaccctagaccggggagagtctcaggcgcctttacccggttctttttcagtttaggccaaaatgcccacagggtggtggcgacgggggcggggcttggtgggcgggactgactaaggggcggggccagggtctcacaccctgcagtggatgcatggctgcgagctggggcccgacgggcgcttcctccgcgggtatgaacagttcgcctacgacggcaaggattatctcaccctgaatgaggacctgcgctcctggaccgcggtggacacggcggctcagatctccgagcaaaagtcaaatgatgcctctgaggcggagcaccagagagcctacctggaagacacatgcgtggagtggctccacaaatacctggagaaggggaaggagacgctgtccagtgtgtccgtgaggcagcacacgaagtcaaaagagattattctcttcccacagataccttttctctcccatgaccctttaacagcatctgcttcattcccctcaccttcccaggctgatctgaggtaaactttgaagtaaaataaaagctgtgtttgagcatcatttgtatttcatttgtgcgttttgtgccttgttgttttaattttttaaccacattcaagctatcctttggcttccaatgccatggtccacccagaactgcattcactggcccatgttctagttctggtcatgccgactttcccgttttcctggtgaatccctgtaatcacctgagtctcattctgtcaggtgatatccagtaagaaggcaacatgtgcggtgagaaagcccagggagtcctgggtgtgaatttttactttgccatttcttcctgtgtgacacgcggtggggcttcacctgtctgagctccagttcctcatcttgtacgtggcact

SEQ ID NO: 13558 - protein, 125 aa, Homo sapiens
MHGCELGPDGRFLRGYEQFAYDGKDYLTLNEDLRSWTAVDTAAQISEQKSNDASEAEHQRAYLEDTCVEWLHKYLEKGKETLSSVSVRQHTKSKEIILFPQIPFLSHDPLTASASFPSPSQADLR

SEQ ID NO: 13559 - DNA, 1049 bp, Homo sapiens
gagcccccaaagacacacgtgactcaccaccccatctctgaccatgaggccaccctgaggtgctgggccctgggcttctaccctgcggagatcacactgacctggcagcaggatggggagggccatacccaggacacggagctcgtggagaccaggcctgcaggggatggaaccttccagaagtgggcagctgtggtggtgccttctggagaggagcagagatacacgtgccatgtgcagcatgaggggctacccgagcccgtcaccctgagatggaagccggcttcccagcccaccatccccatcgtgggcatcattgctggcctggttctccttggatctgtggtctctggagctgtggttgctgctgtgatatggaggaagaagagctcaggtggggaagggagaaggtcacccaggctggaggagcgacagtgcccaggggtctgagtctcacagcttgtaaagcctgagacagctgccttgtgtgcgactgagatgcacagctgccttgtgtgcgactgagatgcaggatttcctcacgcctcccctatgtgtcttaggggactctggcttctctttttgcaagggcctctgaatctgtctgtgtccctgttagcacaatgtgaggaggtagagaaacagtccacctctgtgtctaccatgacccccttcctcacactgacctgtgttccttccctgttctcttttctattaaaaataagaacctgggcagagtgcggcagctcatgcctgtaatcccagcacttagggaggccgaggagggcagatcacgaggtcaggagatcgaaaccatcctggctaacacggtgaaaccccgtctctactaaaaaatacaaaaaattagctgggcgcagaggcacgggcctgtagtcccagctactcaggaggcggaggcaggagaatggcgtcaacccgggaggcggaggttgcagtgagccaggattgtgcgactgcactccagcctgggtgacagggtgaaacgccatctcaaaaaataaaaattgaaaaataaaaaaagaacctgg

SEQ ID NO: 13560 - protein, 66 aa, Homo sapiens
MEAGFPAHHPHRGHHCWPGSPWICGLWSCGCCCDMEEEELRWGREKVTQAGGATVPRGLSLTACKA

SEQ ID NO: 13561 - DNA, 1924 bp, Homo sapiens
gagcccccaaagacacacgtgactcaccaccccatctctgaccatgaggccaccctgaggtgctgggccctgggcttctaccctgcggagatcacactgacctggcagcaggatggggagggccatacccaggacacggagctcgtggagaccaggcctgcaggggatggaaccttccagaagtgggcagctgtggtggtgccttctggagaggagcagagatacacgtgccatgtgcagcatgaggggctacccgagcccgtcaccctgagatggaagccggcttcccagcccaccatccccatcgtgggcatcattgctggcctggttctccttggatctgtggtctctggagctgtggttgctgctgtgatatggaggaagaagagctcaggtggggaagggagaaggtcacccaggctggaggagcgacagtgcccaggggtctgagtctcacagcttgtaaagcctgagacagctgccttgtgtgcgactgagatgcacagctgccttgtgtgcgactgagatgcaggatttcctcacgcctcccctatgtgtcttaggggactctggcttctctttttgcaagggcctctgaatctgtctgtgtccctgttagcacaatgtgaggaggtagagaaacagtccacctctgtgtctaccatgacccccttcctcacactgacctgtgttccttccctgttctcttttctattaaaaataagaacctgggcagagtgcggcagctcatgcctgtaatcccagcacttagggaggccgaggagggcagatcacgaggtcaggagatcgaaaccatcctggctaacacggtgaaaccccgtctctactaaaaaatacaaaaaattagctgggcgcagaggcacgggcctgtagtcccagctactcaggaggcggaggcaggagaatggcgtcaacccgggaggcggaggttgcagtgagccaggattgtgcgactgcactccagcctgggtgacagggtgaaacgccatctcaaaaaataaaaattgaaaaataaaaaaagaacctggatctcaatttaatttttcatattcttgcaatgaaatggacttgaggaagctaagatcatagctagaaatacagataattccacagcacatctctagcaaatttagcctattcctattctctagcctattccttaccacctgtaatcttgaccatataccttggagttgaatattgttttcatactgctgtggtttgaatgttccctccaacactcatgttgagacttaatccctaatgtggcaatactgaaaggtggggcctttgagatgtgattggatcgtaaggctgtgccttcattcatgggttaatggattaatgggttatcacaggaatgggactggtggctttataagaagaggaaaagagaactgagctagcatgcccagcccacagagagcctccactagagtgatgctaagtggaaatgtgaggtgcagctgccacagagggcccccaccagggaaatgtctagtgtctagtggatccaggccacaggagagagtgccttgtggagcgctgggagcaggacctgaccaccaccaggaccccagaactgtggagtcagtggcagcatgcagcgcccccttgggaaagctttaggcaccagcctgcaacccattcgagcagccacgtaggctgcacccagcaaagccacaggcacggggctacctgaggccttgggggcccaatccctgctccagtgtgtccgtgaggcagcacacgaagtcaaaagagattattctcttcccacagataccttttctctcccatgaccctttaacagcatctgcttcattcccctcaccttcccaggctgatctgaggtaaactttgaagtaaaataaaagctgtgtttgagcatcatttgtatttc

SEQ ID NO: 13562 - protein, 66 aa, Homo sapiens; identical to SEQ ID NO: 13560

SEQ ID NO: 13563 - DNA, 2249 bp, Homo sapiens
gagcccccaaagacacacgtgactcaccaccccatctctgaccatgaggccaccctgaggtgctgggccctgggcttctaccctgcggagatcacactgacctggcagcaggatggggagggccatacccaggacacggagctcgtggagaccaggcctgcaggggatggaaccttccagaagtgggcagctgtggtggtgccttctggagaggagcagagatacacgtgccatgtgcagcatgaggggctacccgagcccgtcaccctgagatggaagccggcttcccagcccaccatccccatcgtgggcatcattgctggcctggttctccttggatctgtggtctctggagctgtggttgctgctgtgatatggaggaagaagagctcaggtggggaagggagaaggtcacccaggctggaggagcgacagtgcccaggggtctgagtctcacagcttgtaaagcctgagacagctgccttgtgtgcgactgagatgcacagctgccttgtgtgcgactgagatgcaggatttcctcacgcctcccctatgtgtcttaggggactctggcttctctttttgcaagggcctctgaatctgtctgtgtccctgttagcacaatgtgaggaggtagagaaacagtccacctctgtgtctaccatgacccccttcctcacactgacctgtgttccttccctgttctcttttctattaaaaataagaacctgggcagagtgcggcagctcatgcctgtaatcccagcacttagggaggccgaggagggcagatcacgaggtcaggagatcgaaaccatcctggctaacacggtgaaaccccgtctctactaaaaaatacaaaaaattagctgggcgcagaggcacgggcctgtagtcccagctactcaggaggcggaggcaggagaatggcgtcaacccgggaggcggaggttgcagtgagccaggattgtgcgactgcactccagcctgggtgacagggtgaaacgccatctcaaaaaataaaaattgaaaaataaaaaaagaacctggatctcaatttaatttttcatattcttgcaatgaaatggacttgaggaagctaagatcatagctagaaatacagataattccacagcacatctctagcaaatttagcctattcctattctctagcctattccttaccacctgtaatcttgaccatataccttggagttgaatattgttttcatactgctgtggtttgaatgttccctccaacactcatgttgagacttaatccctaatgtggcaatactgaaaggtggggcctttgagatgtgattggatcgtaaggctgtgccttcattcatgggttaatggattaatgggttatcacaggaatgggactggtggctttataagaagaggaaaagagaactgagctagcatgcccagcccacagagagcctccactagagtgatgctaagtggaaatgtgaggtgcagctgccacagagggcccccaccagggaaatgtctagtgtctagtggatccaggccacaggagagagtgccttgtggagcgctgggagcaggacctgaccaccaccaggaccccagaactgtggagtcagtggcagcatgcagcgcccccttgggaaagctttaggcaccagcctgcaacccattcgagcagccacgtaggctgcacccagcaaagccacaggcacggggctacctgaggccttgggggcccaatccctgctccagtgtgtccgtgaggcagcacacgaagtcaaaagagattattctcttcccacagataccttttctctcccatgaccctttaacagcatctgcttcattcccctcaccttcccaggctgatctgaggtaaactttgaagtaaaataaaagctgtgtttgagcatcatttgtatttcatttgtgcgttttgtgccttgttgttttaattttttaaccacattcaagctatcctttggcttccaatgccatggtccacccagaactgcattcactggcccatgttctagttctggtcatgccgactttcccgttttcctggtgaatccctgtaatcacctgagtctcattctgtcaggtgatatccagtaagaaggcaacatgtgcggtgagaaagcccagggagtcctgggtgtgaatttttactttgccatttcttcctgtgtgacacgcggtggggcttcacctgtctgagctccagttcctcatcttgtacgtggcact

SEQ ID NO: 13564 - protein, 66 aa, Homo sapiens; identical to SEQ ID NO: 13560

SEQ ID NO: 13565 - DNA, 807 bp, Homo sapiens
aggggctacccgagcccgtcaccctgagatggaagccggcttcccagcccaccatccccatcgtgggcatcattgctggcctggttctccttggatctgtggtctctggagctgtggttgctgctgtgatatggaggaagaagagctcaggtggaaaaggagggagctactctaaggctgagtggagcgacagtgcccaggggtctgagtctcacagcttgtaaagcctgagacagctgccttgtgtgcgactgagatgcacagctgccttgtgtgcgactgagatgcaggatttcctcacgcctcccctatgtgtcttaggggactctggcttctctttttgcaagggcctctgaatctgtctgtgtccctgttagcacaatgtgaggaggtagagaaacagtccacctctgtgtctaccatgacccccttcctcacactgacctgtgttccttccctgttctcttttctattaaaaataagaacctgggcagagtgcggcagctcatgcctgtaatcccagcacttagggaggccgaggagggcagatcacgaggtcaggagatcgaaaccatcctggctaacacggtgaaaccccgtctctactaaaaaatacaaaaaattagctgggcgcagaggcacgggcctgtagtcccagctactcaggaggcggaggcaggagaatggcgtcaacccgggaggcggaggttgcagtgagccaggattgtgcgactgcactccagcctgggtgacagggtgaaacgccatctcaaaaaataaaaattgaaaaataaaaaaagaacctgg

SEQ ID NO: 13566 - protein, 48 aa, Homo sapiens
MEAGFPAHHPHRGHHCWPGSPWICGLWSCGCCCDMEEEELRWKRRELL

SEQ ID NO: 13567 - DNA, 1682 bp, Homo sapiens
aggggctacccgagcccgtcaccctgagatggaagccggcttcccagcccaccatccccatcgtgggcatcattgctggcctggttctccttggatctgtggtctctggagctgtggttgctgctgtgatatggaggaagaagagctcaggtggaaaaggagggagctactctaaggctgagtggagcgacagtgcccaggggtctgagtctcacagcttgtaaagcctgagacagctgccttgtgtgcgactgagatgcacagctgccttgtgtgcgactgagatgcaggatttcctcacgcctcccctatgtgtcttaggggactctggcttctctttttgcaagggcctctgaatctgtctgtgtccctgttagcacaatgtgaggaggtagagaaacagtccacctctgtgtctaccatgacccccttcctcacactgacctgtgttccttccctgttctcttttctattaaaaataagaacctgggcagagtgcggcagctcatgcctgtaatcccagcacttagggaggccgaggagggcagatcacgaggtcaggagatcgaaaccatcctggctaacacggtgaaaccccgtctctactaaaaaatacaaaaaattagctgggcgcagaggcacgggcctgtagtcccagctactcaggaggcggaggcaggagaatggcgtcaacccgggaggcggaggttgcagtgagccaggattgtgcgactgcactccagcctgggtgacagggtgaaacgccatctcaaaaaataaaaattgaaaaataaaaaaagaacctggatctcaatttaatttttcatattcttgcaatgaaatggacttgaggaagctaagatcatagctagaaatacagataattccacagcacatctctagcaaatttagcctattcctattctctagcctattccttaccacctgtaatcttgaccatataccttggagttgaatattgttttcatactgctgtggtttgaatgttccctccaacactcatgttgagacttaatccctaatgtggcaatactgaaaggtggggcctttgagatgtgattggatcgtaaggctgtgccttcattcatgggttaatggattaatgggttatcacaggaatgggactggtggctttataagaagaggaaaagagaactgagctagcatgcccagcccacagagagcctccactagagtgatgctaagtggaaatgtgaggtgcagctgccacagagggcccccaccagggaaatgtctagtgtctagtggatccaggccacaggagagagtgccttgtggagcgctgggagcaggacctgaccaccaccaggaccccagaactgtggagtcagtggcagcatgcagcgcccccttgggaaagctttaggcaccagcctgcaacccattcgagcagccacgtaggctgcacccagcaaagccacaggcacggggctacctgaggccttgggggcccaatccctgctccagtgtgtccgtgaggcagcacacgaagtcaaaagagattattctcttcccacagataccttttctctcccatgaccctttaacagcatctgcttcattcccctcaccttcccaggctgatctgaggtaaactttgaagtaaaataaaagctgtgtttgagcatcatttgtatttc

SEQ ID NO: 13568 - protein, 48 aa, Homo sapiens; identical to SEQ ID NO: 13566

SEQ ID NO: 13569 - DNA, 2007 bp, Homo sapiens
aggggctacccgagcccgtcaccctgagatggaagccggcttcccagcccaccatccccatcgtgggcatcattgctggcctggttctccttggatctgtggtctctggagctgtggttgctgctgtgatatggaggaagaagagctcaggtggaaaaggagggagctactctaaggctgagtggagcgacagtgcccaggggtctgagtctcacagcttgtaaagcctgagacagctgccttgtgtgcgactgagatgcacagctgccttgtgtgcgactgagatgcaggatttcctcacgcctcccctatgtgtcttaggggactctggcttctctttttgcaagggcctctgaatctgtctgtgtccctgttagcacaatgtgaggaggtagagaaacagtccacctctgtgtctaccatgacccccttcctcacactgacctgtgttccttccctgttctcttttctattaaaaataagaacctgggcagagtgcggcagctcatgcctgtaatcccagcacttagggaggccgaggagggcagatcacgaggtcaggagatcgaaaccatcctggctaacacggtgaaaccccgtctctactaaaaaatacaaaaaattagctgggcgcagaggcacgggcctgtagtcccagctactcaggaggcggaggcaggagaatggcgtcaacccgggaggcggaggttgcagtgagccaggattgtgcgactgcactccagcctgggtgacagggtgaaacgccatctcaaaaaataaaaattgaaaaataaaaaaagaacctggatctcaatttaatttttcatattcttgcaatgaaatggacttgaggaagctaagatcatagctagaaatacagataattccacagcacatctctagcaaatttagcctattcctattctctagcctattccttaccacctgtaatcttgaccatataccttggagttgaatattgttttcatactgctgtggtttgaatgttccctccaacactcatgttgagacttaatccctaatgtggcaatactgaaaggtggggcctttgagatgtgattggatcgtaaggctgtgccttcattcatgggttaatggattaatgggttatcacaggaatgggactggtggctttataagaagaggaaaagagaactgagctagcatgcccagcccacagagagcctccactagagtgatgctaagtggaaatgtgaggtgcagctgccacagagggcccccaccagggaaatgtctagtgtctagtggatccaggccacaggagagagtgccttgtggagcgctgggagcaggacctgaccaccaccaggaccccagaactgtggagtcagtggcagcatgcagcgcccccttgggaaagctttaggcaccagcctgcaacccattcgagcagccacgtaggctgcacccagcaaagccacaggcacggggctacctgaggccttgggggcccaatccctgctccagtgtgtccgtgaggcagcacacgaagtcaaaagagattattctcttcccacagataccttttctctcccatgaccctttaacagcatctgcttcattcccctcaccttcccaggctgatctgaggtaaactttgaagtaaaataaaagctgtgtttgagcatcatttgtatttcatttgtgcgttttgtgccttgttgttttaattttttaaccacattcaagctatcctttggcttccaatgccatggtccacccagaactgcattcactggcccatgttctagttctggtcatgccgactttcccgttttcctggtgaatccctgtaatcacctgagtctcattctgtcaggtgatatccagtaagaaggcaacatgtgcggtgagaaagcccagggagtcctgggtgtgaatttttactttgccatttcttcctgtgtgacacgcggtggggcttcacctgtctgagctccagttcctcatcttgtacgtggcact

SEQ ID NO: 13570 - protein, 48 aa, Homo sapiens; identical to SEQ ID NO: 13566

SEQ ID NO: 13571 - DNA, 518 bp, Homo sapiens
cagaagggcagttgatccaggacccacacctgctttcttcacgtttcctgatcctgccctgggtctgcagtcacagttcaggaaacttctctgggatccaaaactaggaggttcctctaggaccttatggccctgcctcctccctggcccctcacaggacattttcttccaacaggtggaaaaggagggagctactctaaggctgagtggagcgacagtgcccaggggtctgagtctcacagcttgtaaagcctgagacagctgccttgtgtgcgactgagatgcacagctgccttgtgtgcgactgagatgcaggatttcctcacgcctcccctatgtgtcttaggggactctggcttctctttttgcaagggcctctgaatctgtctgtgtccctgttagcacaatgtgaggaggtagagaaacagtccacctctgtgtctaccatgacccccttcctcacactgacctgtgttccttccctgttctcttttctattaaaaataagaacctgggca

SEQ ID NO: 13572 - protein, 40 aa, Homo sapiens
MALPPPWPLTGHFLPTGGKGGSYSKAEWSDSAQGSESHSL

SEQ ID NO: 13573 - DNA, 832 bp, Homo sapiens
cagaagggcagttgatccaggacccacacctgctttcttcacgtttcctgatcctgccctgggtctgcagtcacagttcaggaaacttctctgggatccaaaactaggaggttcctctaggaccttatggccctgcctcctccctggcccctcacaggacattttcttccaacaggtggaaaaggagggagctactctaaggctgagtggagcgacagtgcccaggggtctgagtctcacagcttgtaaagcctgagacagctgccttgtgtgcgactgagatgcacagctgccttgtgtgcgactgagatgcaggatttcctcacgcctcccctatgtgtcttaggggactctggcttctctttttgcaagggcctctgaatctgtctgtgtccctgttagcacaatgtgaggaggtagagaaacagtccacctctgtgtctaccatgacccccttcctcacactgacctgtgttccttccctgttctcttttctattaaaaataagaacctgggcagagtgcggcagctcatgcctgtaatcccagcacttagggaggccgaggagggcagatcacgaggtcaggagatcgaaaccatcctggctaacacggtgaaaccccgtctctactaaaaaatacaaaaaattagctgggcgcagaggcacgggcctgtagtcccagctactcaggaggcggaggcaggagaatggcgtcaacccgggaggcggaggttgcagtgagccaggattgtgcgactgcactccagcctgggtgacagggtgaaacgccatctcaaaaaataaaaattgaaaaataaaaaaagaacctgg

SEQ ID NO: 13574 - protein, 40 aa, Homo sapiens; identical to SEQ ID NO: 13572

SEQ ID NO: 13575 - DNA, 1707 bp, Homo sapiens
cagaagggcagttgatccaggacccacacctgctttcttcacgtttcctgatcctgccctgggtctgcagtcacagttcaggaaacttctctgggatccaaaactaggaggttcctctaggaccttatggccctgcctcctccctggcccctcacaggacattttcttccaacaggtggaaaaggagggagctactctaaggctgagtggagcgacagtgcccaggggtctgagtctcacagcttgtaaagcctgagacagctgccttgtgtgcgactgagatgcacagctgccttgtgtgcgactgagatgcaggatttcctcacgcctcccctatgtgtcttaggggactctggcttctctttttgcaagggcctctgaatctgtctgtgtccctgttagcacaatgtgaggaggtagagaaacagtccacctctgtgtctaccatgacccccttcctcacactgacctgtgttccttccctgttctcttttctattaaaaataagaacctgggcagagtgcggcagctcatgcctgtaatcccagcacttagggaggccgaggagggcagatcacgaggtcaggagatcgaaaccatcctggctaacacggtgaaaccccgtctctactaaaaaatacaaaaaattagctgggcgcagaggcacgggcctgtagtcccagctactcaggaggcggaggcaggagaatggcgtcaacccgggaggcggaggttgcagtgagccaggattgtgcgactgcactccagcctgggtgacagggtgaaacgccatctcaaaaaataaaaattgaaaaataaaaaaagaacctggatctcaatttaatttttcatattcttgcaatgaaatggacttgaggaagctaagatcatagctagaaatacagataattccacagcacatctctagcaaatttagcctattcctattctctagcctattccttaccacctgtaatcttgaccatataccttggagttgaatattgttttcatactgctgtggtttgaatgttccctccaacactcatgttgagacttaatccctaatgtggcaatactgaaaggtggggcctttgagatgtgattggatcgtaaggctgtgccttcattcatgggttaatggattaatgggttatcacaggaatgggactggtggctttataagaagaggaaaagagaactgagctagcatgcccagcccacagagagcctccactagagtgatgctaagtggaaatgtgaggtgcagctgccacagagggcccccaccagggaaatgtctagtgtctagtggatccaggccacaggagagagtgccttgtggagcgctgggagcaggacctgaccaccaccaggaccccagaactgtggagtcagtggcagcatgcagcgcccccttgggaaagctttaggcaccagcctgcaacccattcgagcagccacgtaggctgcacccagcaaagccacaggcacggggctacctgaggccttgggggcccaatccctgctccagtgtgtccgtgaggcagcacacgaagtcaaaagagattattctcttcccacagataccttttctctcccatgaccctttaacagcatctgcttcattcccctcaccttcccaggctgatctgaggtaaactttgaagtaaaataaaagctgtgtttgagcatcatttgtatttc

SEQ ID NO: 13576 - protein, 40 aa, Homo sapiens; identical to SEQ ID NO: 13572

SEQ ID NO: 13577 - DNA, 2032 bp, Homo sapiens
cagaagggcagttgatccaggacccacacctgctttcttcacgtttcctgatcctgccctgggtctgcagtcacagttcaggaaacttctctgggatccaaaactaggaggttcctctaggaccttatggccctgcctcctccctggcccctcacaggacattttcttccaacaggtggaaaaggagggagctactctaaggctgagtggagcgacagtgcccaggggtctgagtctcacagcttgtaaagcctgagacagctgccttgtgtgcgactgagatgcacagctgccttgtgtgcgactgagatgcaggatttcctcacgcctcccctatgtgtcttaggggactctggcttctctttttgcaagggcctctgaatctgtctgtgtccctgttagcacaatgtgaggaggtagagaaacagtccacctctgtgtctaccatgacccccttcctcacactgacctgtgttccttccctgttctcttttctattaaaaataagaacctgggcagagtgcggcagctcatgcctgtaatcccagcacttagggaggccgaggagggcagatcacgaggtcaggagatcgaaaccatcctggctaacacggtgaaaccccgtctctactaaaaaatacaaaaaattagctgggcgcagaggcacgggcctgtagtcccagctactcaggaggcggaggcaggagaatggcgtcaacccgggaggcggaggttgcagtgagccaggattgtgcgactgcactccagcctgggtgacagggtgaaacgccatctcaaaaaataaaaattgaaaaataaaaaaagaacctggatctcaatttaatttttcatattcttgcaatgaaatggacttgaggaagctaagatcatagctagaaatacagataattccacagcacatctctagcaaatttagcctattcctattctctagcctattccttaccacctgtaatcttgaccatataccttggagttgaatattgttttcatactgctgtggtttgaatgttccctccaacactcatgttgagacttaatccctaatgtggcaatactgaaaggtggggcctttgagatgtgattggatcgtaaggctgtgccttcattcatgggttaatggattaatgggttatcacaggaatgggactggtggctttataagaagaggaaaagagaactgagctagcatgcccagcccacagagagcctccactagagtgatgctaagtggaaatgtgaggtgcagctgccacagagggcccccaccagggaaatgtctagtgtctagtggatccaggccacaggagagagtgccttgtggagcgctgggagcaggacctgaccaccaccaggaccccagaactgtggagtcagtggcagcatgcagcgcccccttgggaaagctttaggcaccagcctgcaacccattcgagcagccacgtaggctgcacccagcaaagccacaggcacggggctacctgaggccttgggggcccaatccctgctccagtgtgtccgtgaggcagcacacgaagtcaaaagagattattctcttcccacagataccttttctctcccatgaccctttaacagcatctgcttcattcccctcaccttcccaggctgatctgaggtaaactttgaagtaaaataaaagctgtgtttgagcatcatttgtatttcatttgtgcgttttgtgccttgttgttttaattttttaaccacattcaagctatcctttggcttccaatgccatggtccacccagaactgcattcactggcccatgttctagttctggtcatgccgactttcccgttttcctggtgaatccctgtaatcacctgagtctcattctgtcaggtgatatccagtaagaaggcaacatgtgcggtgagaaagcccagggagtcctgggtgtgaatttttactttgccatttcttcctgtgtgacacgcggtggggcttcacctgtctgagctccagttcctcatcttgtacgtggcact

SEQ ID NO: 13578 - protein, 40 aa, Homo sapiens; identical to SEQ ID NO: 13572

SEQ ID NO: 13579 - DNA, 1945 bp, Homo sapiens
agtgccacgtacaagatgaggaactggagctcagacaggtgaagccccaccgcgtgtcacacaggaagaaatggcaaagtaaaaattcacacccaggactccctgggctttctcaccgcacatgttgccttcttactggatatcacctgacagaatgagactcaggtgattacagggattcaccaggaaaacgggaaagtcggcatgaccagaactagaacatgggccagtgaatgcagttctgggtggaccatggcattggaagccaaaggatagcttgaatgtggttaaaaaattaaaacaacaaggcacaaaacgcacaaatgaaatacaaatgatgctcaaacacagcttttattttacttcaaagtttacctcagatcagcctgggaaggtgaggggaatgaagcagatgctgttaaagggtcatgggagagaaaaggtatctgtgggaagagaataatctcttttgacttcgtgtgctgcctcacggacacactggagcagggattgggcccccaaggcctcaggtagccccgtgcctgtggctttgctgggtgcagcctacgtggctgctcgaatgggttgcaggctggtgcctaaagctttcccaagggggcgctgcatgctgccactgactccacagttctggggtcctggtggtggtcaggtcctgctcccagcgctccacaaggcactctctcctgtggcctggatccactagacactagacatttccctggtgggggccctattagggattaagtctcaacatgagtgttggagggaacattcaaaccacagcagtatgaaaacaatattcaactccaaggtatatggtcaagattacaggtggtaaggaataggctagagaataggaataggctaaatttgctagagatgtgctgtggaattatctgtatttctagctatgatcttagcttcctcaagtccatttcattgcaagaatatgaaaaattaaattgagatccaggttctttttttatttttcaatttttattttttgagatggcgtttcaccctgtcacccaggctggagtgcagtcgcacaatcctggctcactgcaacctccgcctcccgggttgacgccattctcctgcctccgcctcctgagtagctgggactacaggcccgtgcctctgcgcccagctaattttttgtattttttagtagagacggggtttcaccgtgttagccaggatggtttcgatctcctgacctcgtgatctgccctcctcggcctccctaagtgctgggattacaggcatgagctgccgcactctgcccaggttcttatttttaatagaaaagagaacagggaaggaacacaggtcagtgtgaggaagggggtcatggtagacacagaggtggactgtttctctacctcctcacattgtgctaacagggacacagacagattcagaggcccttgcaaaaagagaagccagagtcccctaagacacataggggaggcgtgaggaaatcctgcatctcagtcgcacacaaggcagctgtgcatctcagtcgcacacaaggcagctgtctcaggctacagaagaaaatagtcatgaacaaattcaggtcagtcacggtaagtgatgacactctgaacagcccaccacacactcaaaaattctgaatcaaaaaatccccacaacccagtcctgtcccctctgccccaccctccacccacttcagacccccagaatctcacctttacaagctgtgagactcagacccctgggcactgtcgctccctggggtagaacaaaaacaagacctggtcagagcccacaggagatgtggtgcaggaggaattatagggtgggcgagctcctccacgctcccgccccgcacttacactcagccttagagtagctccctccttttccacctgttggaagaaaatgtcctgtgaggggc

SEQ ID NO: 13580 - protein, 72 aa, Homo sapiens [sequence omitted]

SEQ ID NO: 13581 - DNA, 407 bp, Homo sapiens
cggggcgggagcgtggaggagctcgcccaccctataattcctcctgcaccacatctcctgtgggctctgaccaggtcttgtttttgttctaccccagggagcgacagtgcccaggggtctgagtctcacagcttgtaaagcctgagacagctgccttgtgtgcgactgagatgcacagctgccttgtgtgcgactgagatgcaggatttcctcacgcctcccctatgtgtcttaggggactctggcttctctttttgcaagggcctctgaatctgtctgtgtccctgttagcacaatgtgaggaggtagagaaacagtccacctctgtgtctaccatgacccccttcctcacactgacctgtgttccttccctgttctcttttctattaaaaataagaacctgggca

SEQ ID NO: 13582 - protein, 60 aa, Homo sapiens
MCLRGLWLLFLQGPLNLSVSLLAQCEEVEKQSTSVSTMTPFLTLTCVPSLFSFLLKIRTW

SEQ ID NO: 13583 - DNA, 721 bp, Homo sapiens
cggggcgggagcgtggaggagctcgcccaccctataattcctcctgcaccacatctcctgtgggctctgaccaggtcttgtttttgttctaccccagggagcgacagtgcccaggggtctgagtctcacagcttgtaaagcctgagacagctgccttgtgtgcgactgagatgcacagctgccttgtgtgcgactgagatgcaggatttcctcacgcctcccctatgtgtcttaggggactctggcttctctttttgcaagggcctctgaatctgtctgtgtccctgttagcacaatgtgaggaggtagagaaacagtccacctctgtgtctaccatgacccccttcctcacactgacctgtgttccttccctgttctcttttctattaaaaataagaacctgggcagagtgcggcagctcatgcctgtaatcccagcacttagggaggccgaggagggcagatcacgaggtcaggagatcgaaaccatcctggctaacacggtgaaaccccgtctctactaaaaaatacaaaaaattagctgggcgcagaggcacgggcctgtagtcccagctactcaggaggcggaggcaggagaatggcgtcaacccgggaggcggaggttgcagtgagccaggattgtgcgactgcactccagcctgggtgacagggtgaaacgccatctcaaaaaataaaaattgaaaaataaaaaaagaacctgg

SEQ ID NO: 13584 - protein, 68 aa, Homo sapiens
MCLRGLWLLFLQGPLNLSVSLLAQCEEVEKQSTSVSTMTPFLTLTCVPSLFSFLLKIRTWAECGSSCL

SEQ ID NO: 13585 - DNA, 1596 bp, Homo sapiens
cggggcgggagcgtggaggagctcgcccaccctataattcctcctgcaccacatctcctgtgggctctgaccaggtcttgtttttgttctaccccagggagcgacagtgcccaggggtctgagtctcacagcttgtaaagcctgagacagctgccttgtgtgcgactgagatgcacagctgccttgtgtgcgactgagatgcaggatttcctcacgcctcccctatgtgtcttaggggactctggcttctctttttgcaagggcctctgaatctgtctgtgtccctgttagcacaatgtgaggaggtagagaaacagtccacctctgtgtctaccatgacccccttcctcacactgacctgtgttccttccctgttctcttttctattaaaaataagaacctgggcagagtgcggcagctcatgcctgtaatcccagcacttagggaggccgaggagggcagatcacgaggtcaggagatcgaaaccatcctggctaacacggtgaaaccccgtctctactaaaaaatacaaaaaattagctgggcgcagaggcacgggcctgtagtcccagctactcaggaggcggaggcaggagaatggcgtcaacccgggaggcggaggttgcagtgagccaggattgtgcgactgcactccagcctgggtgacagggtgaaacgccatctcaaaaaataaaaattgaaaaataaaaaaagaacctggatctcaatttaatttttcatattcttgcaatgaaatggacttgaggaagctaagatcatagctagaaatacagataattccacagcacatctctagcaaatttagcctattcctattctctagcctattccttaccacctgtaatcttgaccatataccttggagttgaatattgttttcatactgctgtggtttgaatgttccctccaacactcatgttgagacttaatccctaatgtggcaatactgaaaggtggggcctttgagatgtgattggatcgtaaggctgtgccttcattcatgggttaatggattaatgggttatcacaggaatgggactggtggctttataagaagaggaaaagagaactgagctagcatgcccagcccacagagagcctccactagagtgatgctaagtggaaatgtgaggtgcagctgccacagagggcccccaccagggaaatgtctagtgtctagtggatccaggccacaggagagagtgccttgtggagcgctgggagcaggacctgaccaccaccaggaccccagaactgtggagtcagtggcagcatgcagcgcccccttgggaaagctttaggcaccagcctgcaacccattcgagcagccacgtaggctgcacccagcaaagccacaggcacggggctacctgaggccttgggggcccaatccctgctccagtgtgtccgtgaggcagcacacgaagtcaaaagagattattctcttcccacagataccttttctctcccatgaccctttaacagcatctgcttcattcccctcaccttcccaggctgatctgaggtaaactttgaagtaaaataaaagctgtgtttgagcatcatttgtatttc

SEQ ID NO: 13586 - protein, 73 aa, Homo sapiens
MPSPQRASTRVMLSGNVRCSCHRGPPPGKCLVSSGSRPQERVPCGALGAGPDHHQDPRTVESVAACSAPLGKL

SEQ ID NO: 13587 - DNA, 1921 bp, Homo sapiens
cggggcgggagcgtggaggagctcgcccaccctataattcctcctgcaccacatctcctgtgggctctgaccaggtcttgtttttgttctaccccagggagcgacagtgcccaggggtctgagtctcacagcttgtaaagcctgagacagctgccttgtgtgcgactgagatgcacagctgccttgtgtgcgactgagatgcaggatttcctcacgcctcccctatgtgtcttaggggactctggcttctctttttgcaagggcctctgaatctgtctgtgtccctgttagcacaatgtgaggaggtagagaaacagtccacctctgtgtctaccatgacccccttcctcacactgacctgtgttccttccctgttctcttttctattaaaaataagaacctgggcagagtgcggcagctcatgcctgtaatcccagcacttagggaggccgaggagggcagatcacgaggtcaggagatcgaaaccatcctggctaacacggtgaaaccccgtctctactaaaaaatacaaaaaattagctgggcgcagaggcacgggcctgtagtcccagctactcaggaggcggaggcaggagaatggcgtcaacccgggaggcggaggttgcagtgagccaggattgtgcgactgcactccagcctgggtgacagggtgaaacgccatctcaaaaaataaaaattgaaaaataaaaaaagaacctggatctcaatttaatttttcatattcttgcaatgaaatggacttgaggaagctaagatcatagctagaaatacagataattccacagcacatctctagcaaatttagcctattcctattctctagcctattccttaccacctgtaatcttgaccatataccttggagttgaatattgttttcatactgctgtggtttgaatgttccctccaacactcatgttgagacttaatccctaatgtggcaatactgaaaggtggggcctttgagatgtgattggatcgtaaggctgtgccttcattcatgggttaatggattaatgggttatcacaggaatgggactggtggctttataagaagaggaaaagagaactgagctagcatgcccagcccacagagagcctccactagagtgatgctaagtggaaatgtgaggtgcagctgccacagagggcccccaccagggaaatgtctagtgtctagtggatccaggccacaggagagagtgccttgtggagcgctgggagcaggacctgaccaccaccaggaccccagaactgtggagtcagtggcagcatgcagcgcccccttgggaaagctttaggcaccagcctgcaacccattcgagcagccacgtaggctgcacccagcaaagccacaggcacggggctacctgaggccttgggggcccaatccctgctccagtgtgtccgtgaggcagcacacgaagtcaaaagagattattctcttcccacagataccttttctctcccatgaccctttaacagcatctgcttcattcccctcaccttcccaggctgatctgaggtaaactttgaagtaaaataaaagctgtgtttgagcatcatttgtatttcatttgtgcgttttgtgccttgttgttttaattttttaaccacattcaagctatcctttggcttccaatgccatggtccacccagaactgcattcactggcccatgttctagttctggtcatgccgactttcccgttttcctggtgaatccctgtaatcacctgagtctcattctgtcaggtgatatccagtaagaaggcaacatgtgcggtgagaaagcccagggagtcctgggtgtgaatttttactttgccatttcttcctgtgtgacacgcggtggggcttcacctgtctgagctccagttcctcatcttgtacgtggcact

SEQ ID NO: 13588 - protein, 73 aa, Homo sapiens; identical to SEQ ID NO: 13586

SEQ ID NO: 13589 - DNA, 1278 bp, Homo sapiens
gcgactgagatgcaggatttcctcacgcctcccctatgtgtcttaggggactctggcttctctttttgcaagggcctctgaatctgtctgtgtccctgttagcacaatgtgaggaggtagagaaacagtccacctctgtgtctaccatgacccccttcctcacactgacctgtgttccttccctgttctcttttctattaaaaataagaacctgggcagagtgcggcagctcatgcctgtaatcccagcacttagggaggccgaggagggcagatcacgaggtcaggagatcgaaaccatcctggctaacacggtgaaaccccgtctctactaaaaaatacaaaaaattagctgggcgcagaggcacgggcctgtagtcccagctactcaggaggcggaggcaggagaatggcgtcaacccgggaggcggaggttgcagtgagccaggattgtgcgactgcactccagcctgggtgacagggtgaaacgccatctcaaaaaataaaaattgaaaaataaaaaaagaacctggatctcaatttaatttttcatattcttgcaatgaaatggacttgaggaagctaagatcatagctagaaatacagataattccacagcacatctctagcaaatttagcctattcctattctctagcctattccttaccacctgtaatcttgaccatataccttggagttgaatattgttttcatactgctgtggtttgaatgttccctccaacactcatgttgagacttaatccctaatgtggcaatactgaaaggtggggcctttgagatgtgattggatcgtaaggctgtgccttcattcatgggttaatggattaatgggttatcacaggaatgggactggtggctttataagaagaggaaaagagaactgagctagcatgcccagcccacagagagcctccactagagtgatgctaagtggaaatgtgaggtgcagctgccacagaggcgcccccttgggaaagctttaggcaccagcctgcaacccattcgagcagccacgtaggctgcacccagcaaagccacaggcacggggctacctgaggccttgggggcccaatccctgctccagtgtgtccgtgaggcagcacacgaagtcaaaagagattattctcttcccacagataccttttctctcccatgaccctttaacagcatctgcttcattcccctcaccttcccaggctgatctgaggtaaactttgaagtaaaataaaagctgtgtttgagcatcatttgtatttc

SEQ ID NO: 13590 - protein, 30 aa, Homo sapiens
MPSPQRASTRVMLSGNVRCSCHRGAPLGKL

SEQ ID NO: 13591 - DNA, 1301 bp, Homo sapiens
gcgactgagatgcaggatttcctcacgcctcccctatgtgtcttaggggactctggcttctctttttgcaagggcctctgaatctgtctgtgtccctgttagcacaatgtgaggaggtagagaaacagtccacctctgtgtctaccatgacccccttcctcacactgacctgtgttccttccctgttctcttttctattaaaaataagaacctgggcagagtgcggcagctcatgcctgtaatcccagcacttagggaggccgaggagggcagatcacgaggtcaggagatcgaaaccatcctggctaacacggtgaaaccccgtctctactaaaaaatacaaaaaattagctgggcgcagaggcacgggcctgtagtcccagctactcaggaggcggaggcaggagaatggcgtcaacccgggaggcggaggttgcagtgagccaggattgtgcgactgcactccagcctgggtgacagggtgaaacgccatctcaaaaaataaaaattgaaaaataaaaaaagaacctggatctcaatttaatttttcatattcttgcaatgaaatggacttgaggaagctaagatcatagctagaaatacagataattccacagcacatctctagcaaatttagcctattcctattctctagcctattccttaccacctgtaatcttgaccatataccttggagttgaatattgttttcatactgctgtggtttgaatgttccctccaacactcatgttgagacttaatccctaatgtggcaatactgaaaggtggggcctttgagatgtgattggatcgtaaggctagagcctccactagagtgatgctaagtggaaatgtgaggtgcagctgccacagagggcccccaccagggaaatgtctagtgtctagtggatccaggccacaggagagagtgccttgtggagcgctgggagcaggacctgaccaccaccaggaccccagaactgtggagtcagtggcagcatgcagcgcccccttgggaaagctttaggcaccagcctgcaacccattcgagcagccacgtaggctgcacccagcaaagccacaggcacggggctacctgaggccttgggggcccaatccctgctccagtgtgtccgtgaggcagcacacgaagtcaaaagagattattctcttcccacagataccttttctctcccatgaccctttaacagcatctgcttcattcccctcaccttcccaggctgatctgaggtaaactttgaagtaaaataaaagctgtgtttgagcatcatttgtatttc

SEQ ID NO: 13592 - protein, 68 aa, Homo sapiens; identical to SEQ ID NO: 13584

SEQ ID NO: 13593 - DNA, 1603 bp, Homo sapiens
gcgactgagatgcaggatttcctcacgcctcccctatgtgtcttaggggactctggcttctctttttgcaagggcctctgaatctgtctgtgtccctgttagcacaatgtgaggaggtagagaaacagtccacctctgtgtctaccatgacccccttcctcacactgacctgtgttccttccctgttctcttttctattaaaaataagaacctgggcagagtgcggcagctcatgcctgtaatcccagcacttagggaggccgaggagggcagatcacgaggtcaggagatcgaaaccatcctggctaacacggtgaaaccccgtctctactaaaaaatacaaaaaattagctgggcgcagaggcacgggcctgtagtcccagctactcaggaggcggaggcaggagaatggcgtcaacccgggaggcggaggttgcagtgagccaggattgtgcgactgcactccagcctgggtgacagggtgaaacgccatctcaaaaaataaaaattgaaaaataaaaaaagaacctggatctcaatttaatttttcatattcttgcaatgaaatggacttgaggaagctaagatcatagctagaaatacagataattccacagcacatctctagcaaatttagcctattcctattctctagcctattccttaccacctgtaatcttgaccatataccttggagttgaatattgttttcatactgctgtggtttgaatgttccctccaacactcatgttgagacttaatccctaatgtggcaatactgaaaggtggggcctttgagatgtgattggatcgtaaggctgtgccttcattcatgggttaatggattaatgggttatcacaggaatgggactggtggctttataagaagaggaaaagagaactgagctagcatgcccagcccacagagagcctccactagagtgatgctaagtggaaatgtgaggtgcagctgccacagaggcgcccccttgggaaagctttaggcaccagcctgcaacccattcgagcagccacgtaggctgcacccagcaaagccacaggcacggggctacctgaggccttgggggcccaatccctgctccagtgtgtccgtgaggcagcacacgaagtcaaaagagattattctcttcccacagataccttttctctcccatgaccctttaacagcatctgcttcattcccctcaccttcccaggctgatctgaggtaaactttgaagtaaaataaaagctgtgtttgagcatcatttgtatttcatttgtgcgttttgtgccttgttgttttaattttttaaccacattcaagctatcctttggcttccaatgccatggtccacccagaactgcattcactggcccatgttctagttctggtcatgccgactttcccgttttcctggtgaatccctgtaatcacctgagtctcattctgtcaggtgatatccagtaagaaggcaacatgtgcggtgagaaagcccagggagtcctgggtgtgaatttttactttgccatttcttcctgtgtgacacgcggtggggcttcacctgtctgagctccagttcctcatcttgtacgtggcact

SEQ ID NO: 13594 - protein, 30 aa, Homo sapiens; identical to SEQ ID NO: 13590

SEQ ID NO: 13595 - DNA, 1192 bp, Homo sapiens
tgagatgcaggatttcctcacgcctcccctatgtgtcttaggggactctggcttctctttttgcaagggcctctgaatctgtctgtgtccctgttagcacaatgtgaggaggtagagaaacagtccacctctgtgtctaccatgacccccttcctcacactgacctgtgttccttccctgttctcttttctattaaaaataagaacctgggcagagtgcggcagctcatgcctgtaatcccagcacttagggaggccgaggagggcagatcacgaggtcaggagatcgaaaccatcctggctaacacggtgaaaccccgtctctactaaaaaatacaaaaaattagctgggcgcagaggcacgggcctgtagtcccagctactcaggaggcggaggcaggagaatggcgtcaacccgggaggcggaggttgcagtgagccaggattgtgcgactgcactccagcctgggtgacagggtgaaacgccatctcaaaaaataaaaattgaaaaataaaaaaagaacctggatctcaatttaatttttcatattcttgcaatgaaatggacttgaggaagctaagatcatagctagaaatacagataattccacagcacatctctagcaaatttagcctattcctattctctagcctattccttaccacctgtaatcttgaccatataccttggagttgaatattgttttcatactgctgtggtttgaatgttccctccaacactcatgttgagacttaatccctaatgtggcaatactgaaaggtggggcctttgagatgtgattggatcgtaaggctgtgccttcattcatgggttaatggattaatgggttatcacaggaatgggactggtggctttataagaagaggaaaagagaactgagctagcatgcccagcccacagagagcctccactagagtgatgctaagtggaaatgtgaggtgcagctgccacagagggcccccaccagggaaatgtctagtgtctagtggatccaggccacaggagagatgtgtccgtgaggcagcacacgaagtcaaaagagattattctcttcccacagataccttttctctcccatgaccctttaacagcatctgcttcattcccctcaccttcccaggctgatctgaggtaaactttgaagtaaaataaaagctgtgtttgagcatca

SEQ ID NO: 13596 - protein, 64 aa, Homo sapiens
MPSPQRASTRVMLSGNVRCSCHRGPPPGKCLVSSGSRPQERCVREAAHEVKRDYSLPTDTFSLP

SEQ ID NO: 13597 - DNA, 1527 bp, Homo sapiens
tgagatgcaggatttcctcacgcctcccctatgtgtcttaggggactctggcttctctttttgcaagggcctctgaatctgtctgtgtccctgttagcacaatgtgaggaggtagagaaacagtccacctctgtgtctaccatgacccccttcctcacactgacctgtgttccttccctgttctcttttctattaaaaataagaacctgggcagagtgcggcagctcatgcctgtaatcccagcacttagggaggccgaggagggcagatcacgaggtcaggagatcgaaaccatcctggctaacacggtgaaaccccgtctctactaaaaaatacaaaaaattagctgggcgcagaggcacgggcctgtagtcccagctactcaggaggcggaggcaggagaatggcgtcaacccgggaggcggaggttgcagtgagccaggattgtgcgactgcactccagcctgggtgacagggtgaaacgccatctcaaaaaataaaaattgaaaaataaaaaaagaacctggatctcaatttaatttttcatattcttgcaatgaaatggacttgaggaagctaagatcatagctagaaatacagataattccacagcacatctctagcaaatttagcctattcctattctctagcctattccttaccacctgtaatcttgaccatataccttggagttgaatattgttttcatactgctgtggtttgaatgttccctccaacactcatgttgagacttaatccctaatgtggcaatactgaaaggtggggcctttgagatgtgattggatcgtaaggctgtgccttcattcatgggttaatggattaatgggttatcacaggaatgggactggtggctttataagaagaggaaaagagaactgagctagcatgcccagcccacagagagcctccactagagtgatgctaagtggaaatgtgaggtgcagctgccacagagggcccccaccagggaaatgtctagtgtctagtggatccaggccacaggagagatgtgtccgtgaggcagcacacgaagtcaaaagagattattctcttcccacagataccttttctctcccatgaccctttaacagcatctgcttcattcccctcaccttcccaggctgatctgaggtaaactttgaagtaaaataaaagctgtgtttgagcatcatttgtatttcatttgtgcgttttgtgccttgttgttttaattttttaaccacattcaagctatcctttggcttccaatgccatggtccacccagaactgcattcactggcccatgttctagttctggtcatgccgactttcccgttttcctggtgaatccctgtaatcacctgagtctcattctgtcaggtgatatccagtaagaaggcaacatgtgcggtgagaaagcccagggagtcctgggtgtgaatttttactttgccatttcttcctgtgtgacacgcggtggggcttcacctgtctgagctccagttcctcatcttgtacgtggcact

SEQ ID NO: 13598 - protein, 64 aa, Homo sapiens; identical to SEQ ID NO: 13596

SEQ ID NO: 13599 - DNA, 1195 bp, Homo sapiens
ctgtgtctaccatgacccccttcctcacactgacctgtgttccttccctgttctcttttctattaaaaataagaacctgggcagagtgcggcagctcatgcctgtaatcccagcacttagggaggccgaggagggcagatcacgaggtcaggagatcgaaaccatcctggctaacacggtgaaaccccgtctctactaaaaaatacaaaaaattagctgggcgcagaggcacgggcctgtagtcccagctactcaggaggcggaggcaggagaatggcgtcaacccgggaggcggaggttgcagtgagccaggattgtgcgactgcactccagcctgggtgacagggtgaaacgccatctcaaaaaataaaaattgaaaaataaaaaaagaacctggatctcaatttaatttttcatattcttgcaatgaaatggacttgaggaagctaagatcatagctagaaatacagataattccacagcacatctctagcaaatttagcctattcctattctctagcctattccttaccacctgtaatcttgaccatataccttggagttgaatattgttttcatactgctgtggtttgaatgttccctccaacactcatgttgagacttaatccctaatgtggcaatactgaaaggtggggcctttgagatgtgattggatcgtaaggctgtgccttcattcatgggttaatggattaatgggttatcacaggaatgggactggtggctttataagaagaggaaaagagaactgagctagcatgcccagcccacagagagcctccactagagtgatgctaagtggaaatgtgaggtgcagctgccacagagggcccccaccagggaaatgtctagtgtctagtggatccaggccacaggagagacgcccccttgggaaagctttaggcaccagcctgcaacccattcgagcagccacgtaggctgcacccagcaaagccacaggcacggggctacctgaggccttgggggcccaatccctgctccagtgtgtccgtgaggcagcacacgaagtcaaaagagattattctcttcccacagataccttttctctcccatgaccctttaacagcatctgcttcattcccctcaccttcccaggctgatctgaggtaaactttgaagtaaaataaaagctgtgtttgagcatcatttgtatttc

SEQ ID NO: 13600 - protein, 59 aa, Homo sapiens
MPSPQRASTRVMLSGNVRCSCHRGPPPGKCLVSSGSRPQERRPLGKALGTSLQPIRAAT

SEQ ID NO: 13601 - DNA, 1520 bp, Homo sapiens
ctgtgtctaccatgacccccttcctcacactgacctgtgttccttccctgttctcttttctattaaaaataagaacctgggcagagtgcggcagctcatgcctgtaatcccagcacttagggaggccgaggagggcagatcacgaggtcaggagatcgaaaccatcctggctaacacggtgaaaccccgtctctactaaaaaatacaaaaaattagctgggcgcagaggcacgggcctgtagtcccagctactcaggaggcggaggcaggagaatggcgtcaacccgggaggcggaggttgcagtgagccaggattgtgcgactgcactccagcctgggtgacagggtgaaacgccatctcaaaaaataaaaattgaaaaataaaaaaagaacctggatctcaatttaatttttcatattcttgcaatgaaatggacttgaggaagctaagatcatagctagaaatacagataattccacagcacatctctagcaaatttagcctattcctattctctagcctattccttaccacctgtaatcttgaccatataccttggagttgaatattgttttcatactgctgtggtttgaatgttccctccaacactcatgttgagacttaatccctaatgtggcaatactgaaaggtggggcctttgagatgtgattggatcgtaaggctgtgccttcattcatgggttaatggattaatgggttatcacaggaatgggactggtggctttataagaagaggaaaagagaactgagctagcatgcccagcccacagagagcctccactagagtgatgctaagtggaaatgtgaggtgcagctgccacagagggcccccaccagggaaatgtctagtgtctagtggatccaggccacaggagagacgcccccttgggaaagctttaggcaccagcctgcaacccattcgagcagccacgtaggctgcacccagcaaagccacaggcacggggctacctgaggccttgggggcccaatccctgctccagtgtgtccgtgaggcagcacacgaagtcaaaagagattattctcttcccacagataccttttctctcccatgaccctttaacagcatctgcttcattcccctcaccttcccaggctgatctgaggtaaactttgaagtaaaataaaagctgtgtttgagcatcatttgtatttcatttgtgcgttttgtgccttgttgttttaattttttaaccacattcaagctatcctttggcttccaatgccatggtccacccagaactgcattcactggcccatgttctagttctggtcatgccgactttcccgttttcctggtgaatccctgtaatcacctgagtctcattctgtcaggtgatatccagtaagaaggcaacatgtgcggtgagaaagcccagggagtcctgggtgtgaatttttactttgccatttcttcctgtgtgacacgcggtggggcttcacctgtctgagctccagttcctcatcttgtacgtggcact

SEQ ID NO: 13602 - protein, 59 aa, Homo sapiens; identical to SEQ ID NO: 13600

SEQ ID NO: 13603 - DNA, 1206 bp, Homo sapiens
agaacgaccgagtttctctcagccgagaactgtggctgcccctccggtgaaaacagaggaagtgggagcggcaggaagcgctttgggaccagggcgacccctgaagcgtagaggaaccaggtcacaagcatacgtgaatgctcacattccatagttatcaaatgtattcaggtttaaattttacttttctagaaaaaatgtaaataatccgttgagaatatttaatgaaaaatgttggtcgtatctttatctggtctgcggctctgtccctgtttcctggataggagactacgtctgtatcttgtatcacaggaggcaccttcttcctgtttcctggcacagactttaaatcttagtgctcctcactctttgcgtctacgctgcttttatgaactgttaacactcactgtgaaggtctgcagcttcactccttaagccagcgagaccacaaacccactgggagggataaacaactccagacgggaggaacaaacaacttcgggtgcaccacctttatgaactgtagcactcactgtgaaggtctgcagcttcactcctgaggccagcaagaccacgaacccaccagaaggaacgaacaactccagatatgccacctttaagggctataacactcaccgcggaagtctgcagcttcactcctgaagtcagtgagaccatgaacccaccagaaggaagaaactctggacacatctgaacatctgaaggaacaaactctggacacaccatctttaagaactgtaacactcaccgcgagggtacacggcttcattcttgaagtcagcgagactaagaacccaacaattccggacacagcatgatcttggttcactacaacctggatctcccagagtcaagcaatcctctcgtctcagtctcccaagtagctggaactacaggtgtgtgccaccatgccccactaatttttgtatttattgtagagacggtttcagcatgttgcccaggctggtctccaactcctggactcaagtgatcctctccacctaggcctcccacagtgctgggattacaggaatgagccaccacgcccggcctaattggaagttttagagtgcagtggggatcacgtgcgtagaggttactgctgccttaattaaaggagacaacatgtttcataaaacttggaaattgtagagggtgtggggaaccactcaaattcagaatatc

SEQ ID NO: 13604 - protein, 67 aa, Homo sapiens
MLVVSLSGLRLCPCFLDRRLRLYLVSQEAPSSCFLAQTLNLSAPHSLRLRCFYELLTLTVKVCSFTP

SEQ ID NO: 13605 - DNA, 1221 bp, Homo sapiens
gggtggggccagcaggtgacgaggaggaggaggaagaggaagagctgagcagctcctgtgaggaggagggagaggaggaccgggatgcggatgaggagggagaaggggatgaggagaccccaacctcggctccagggtccagcctggctggccgaaacccttatgccctgctgggtgaggatgagtgctgagttcctcgcccagcgccatcttccctcccagtatctttgcttttggactgacctgggggtatctcccctctgccaccccaattgaataatttggaggaaaagcgtaaaggcagtggaggtgaggagagaattttcaaaatgtttggcagtgattgcaatgaaagaaaaaaatggagggagcagagtatatgcagttgaggaacttttttagtttggagtgtgttaacacgatgttaggaagaaggatcaagtgaaggagaaaggtgaaaatgctggaaggtggggcttagtgatgaaacaaaccttggggacaggtgggcgtggtactgagagtcccagtgaggggagtgccctcaggcaggcgccggtggcttctgtcacaggagggaacagcgctgacattcagctggttcgcactgatacggctcaaccagtttgttaaaacatgtctgttccagtgtcagtaatatacgagtaactgcaatatgcagtaaaaattataaattctaatacaaactcagttcaagctaattaagagatcgcaacagccgttggtaaatggacttcccgctgcatttgagaagctttgcagcgccatctgccggtgtcgtagcatcactgcaggctgagaggctgctttgcgccttcatcttgaagcactctgaaattgcctgtttaaattaccttggaatcatggagttgctactgcttctgaatagtttagcttctactttgattttattgttagtgcattgtcgttcttgtgtcagtagcaagtttcagtgttttaatatttacaaatacaaaaatttttaataaaatattaaagccaaacttgaatgaagagacaacaaagtttggatatgtttctttatgtgccttttgacatatcataaatgagaatcttttgattcctcaggagaacaaagaagaaatattaatgagctgcagccaggaatgttttctgttactgtgtaaaaatcagaataatatggaaatcatttgcaactttttattttgaaaaatttct

SEQ ID NO: 13606 - protein, 85 aa, Homo sapiens [sequence omitted]

SEQ ID NO: 13607 - DNA, 1043 bp, Homo sapiens
gggtggggccagcaggtgacgaggaggaggaggaagaggaagagctgagcagctcctgtgaggaggagggagaggaggaccgggatgcggatgaggagggagaaggggatgaggagaccccaacctcggctccagggtccagcctggctggccgaaacccttatgccctgctgggtgaggatgagtgctgagttcctcgcccagcgccatcttccctcccagtatctttgcttttggactgacctgggggtatctcccctctgccaccccaattgaataatttggaggaaaagcgtaaaggcagtggaggtgaggagagaattttcaaaatgtttggcagtgattgcaatgaaagaaaaaaatggagggagcagagtatatgcagttgaggaacttttttagtttggagtgtgttaacacgatgttaggaagaaggatcaagtgaaggagaaaggtgaaaatgctggaaggtggggcttagtgatgaaacaaaccttggggacaggtgggcgtggtactgagagtcccagtgaggggagtgccctcaggcaggcgccggtggcttctgtcacaggagggaacagcgctgacattcagctggttcgcactgatacggctcaaccagtttgttaaaacatgtctgttccagtgtcagtaatatacgagtaactgcaatatgcagtaaaaattataaattctaatacaaactcagttcaagctaattaagagatcgcaacagccgttggtaaatggacttcccgctgcatttgagaagctttgcagcgccatctgccggtgtcgtagcatcactgcaggctgagaggctgctttgcgccttcatcttgaagcactctgaaattgcctgtttaaattaccttggaatcatggagttgctactgcttctgaatagtttagcttctactttgattttattgttagtgcattgtcgttcttgtgtcagtagcaagtttcagtgttttaatatttacaaatacaaaaatttttaataaaatattaaagccaaacttgaatgaagagacaac

SEQ ID NO: 13608 - protein, 85 aa, Homo sapiens [sequence omitted]

SEQ ID NO: 13609 - DNA, 3478 bp, Homo sapiens
cagaaaggtctggggccgtattgaggttgatggttccagtaagagaactcctggttcaaggctccatttgggagagccccacttccatccctccccagcgcgtgcgcccttcctccttccgttacagccccctccttcgcaccttattagcccctagccccttgcccggacgggcttgacaggcatgtgcacatccctcccagacccctcaccgatgggactcccatcctcctcatctccagtctcttcccgctcgggcagcgggggctgctgctgtgtcggtggctggtgatgattctgcttctttcgtttcggcatcgtgtctgcggcaatggctgcagcgggatttggagggtagtgaggaaggggcacgcggggattctgtttccgcttccggggggtcggtgggcagcaatgctgaggctcccgccattccacttccggaaggttgcggagaacatctgcggcggccgcattccggagccaactgcctccctccgtctctgccaggcatggcggcaacctcacaccttccctttgctgcgtttctataaatgctttgaaaaaattactcttttcttccctcgctggaaaacaccacaaccagctcctcagagtgtgtcacagagtcaacaggctctcgggccagagggcctgagaagaggactgtcgcaccgtaagatcgccacatccggtcctcggttactatggtaacagctgcaggcacaacttcgtgccctttgacctccccccaaaagtccttgtcccgcttgggtttcccttctcgcccgcttttgcacttatgatctgtaaacctgctccttatcatcgttcccacaaggaatttgggtcccaacaggtcggcacccaggactctcagaccgccgccctcccctaaagacctctgaccgtgcccccggtgtagtccagcaacctggacgcagtctcggctttccactaaggtcaagcccggggctttgtagtatagcctcagcgtgtccacgccccctctcccctaggtagtaggccccgccctccgctccgccgccccctccaggtgagtggtaggttctcccgggagcgcaaggtagtgatgacacgcgccccccctcctccgaacgcgagttggtagcgtccgtgacggagttagcctggtcctcccacgcgcgcctccttcctcgccgccggggcgccctctcggtgccactggctctcacgtgccagtagcccaccccgcatcatcctctcgcctcgctcctggagggaagtgactatatctcccccgtccgccttccatcgccgccgcggcggtaattctgtcgggcccgcccgctgacgtcacctgctagccccgcctcctctagggtcccgggcccctgcggcgggggctgccccggggggcagtcagttgaggcggcgggagctcggcggagggcgggccaggtgactggtccgggccatgccgaggaagaagccattcagcgtgaagcagaagaagaagcagttgcaggacaaacgggagcggaagagagggcttcaagatgggctgcgctccagttccaacagccgcagcgggagccgggagcggcgagaggaacagaccgacacctcggacggggagtctgtgacccatcatatccgcaggcttaaccagcagccttctcaggggctgggtccacgaggctacgacccaaatcgataccgactgcattttgagagagacagcagggaggaggtagagaggagaaagagagcagcccgggagcaagttctacagccggtcagtgctgagttgttggagctggacatccgggaggtgtatcagcctggctcagttctggactttcctcgacgtcctccttggagctatgagatgtccaaggagcaactaatgagccaagaggaacggagcttccaagactatcttgggaagattcatggggcttactcctctgagaaactcagctactttgagcacaatctggagacatggaggcagctgtggcgggtgttagagatgtctgacatcgtcctgcttatcactgatatccgacatccagttgtgaatttcccgccagcactttatgagtatgtgactggagaacttggactggccctggtgctggttttgaacaaggtggatctggccccgccagctcttgtggttgcctggaagcattatttccatcaacactatccccagctccacgtcgtccttttcacctcttttcctcgggacccccgcaccccacaggaccctagtagtgtcttgaagaagagtcggaggcgggggagaggatggactcgggccctggggccagagcagttgctgagagcctgtgaagccatcactgtggggaaagtggacttgagcagctggcgggagaagattgctcgggatgtggctggggccacctggggtaatggctctggggaggaggaggaagaggaggatggcccagcagtcctggtggagcagcagactgattcagcaatggagccaactggcccaacccaagagcgctacaaggatggggtggtgaccatcggctgtgtgggtttccctaatgtgggaaagtcctcgctgatcaatgggctggtggggcggaaagtcgtgagtgtctccagaaccccgggccatacccgatactttcagacctactttcttaccccctctgtgaagctctgtgactgcccaggcctcatcttcccatctcttctgcctaggcagttgcaggttctggcagggatctaccctatcgcccagatccaggagccctacactgctgtgggctacctggcctcccgaattcccgtgcaggccctgctccacctgcgccacccagaggctgaggacccctcagcggaacacccctggtgtgcctgggacatctgtgaagcctgggcagagaaacgtggttacaagacagccaaggcggctcggaatgatgtgtacagagcagccaacagtctcttgcggctggcagtggacggccgcctcagcctgtgttttcatcccccaggctacagtgaacagaaaggcacctgggagtcccatccagagaccacggagctggtggttttgcagggcagggtggggccagcaggtgacgaggaggaggaggaagaggaagagctgagcagctcctgtgaggaggagggagaggaggaccgggatgcggatgaggagggagaaggggatgaggagaccccaacctcggctccagggtccagcctggctggccgaaacccttatgccctgctgggtgaggatgagtgctgagttcctcgcccagcgccatcttccctcccagtatctttgcttttggactgacctgggggtatctcccctctgccaccccaattgtgaataaagattgtttgctttgtagccccttccccagatgaactgaggtgagagcggctgttccaggctaacagctgtgggaggcttctctcctcttctcccttctttttt

SEQ ID NO: 13610 - protein, 607 aa, Homo sapiens; identical to SEQ ID NO: 1423

SEQ ID NO: 13611 - DNA, 413 bp, Homo sapiens
caggttctggcagggatctaccctatcgcccagatccaggagccctacactgctgtgggctacctggcctcccgaattccccaggtgacgaggaggaggaggaagaggaagagctgagcagctcctgtgaggaggagggagaggaggaccgggatgcggatgaggagggagaaggggatgaggagaccccaacctcggctccagggtccagcctggctggccgaaacccttatgccctgctgggtgaggatgagtgctgagttcctcgcccagcgccatcttccctcccagtatctttgcttttggactgacctgggggtatctcccctctgccaccccaattgtgaataaagattgtttgctttgtagccccttccccagatgaactgaggtgagagcggctgttccaggct

SEQ ID NO: 13612 - protein, 65 aa, Homo sapiens [sequence omitted]

SEQ ID NO: 13613 - DNA, 950 bp, Homo sapiens
attcagcaatggagccaactggcccaacccaagagcgctacaaggatggggtggtgaccatcggctgtgtgggtttccctaatgtgggaaagtcctcgctgatcaatgggctggtggggcggaaagtcgtgagtgtctccagaaccccgggccatacccgatactttcagacctactttcttaccccctctgtgaagctctgtgactgcccaggcctcatcttcccatctcttctgcctaggcagttgcaggttctggcagggatctaccctatcgcccagatccaggagccctacactgctgtgggctacctggcctcccgaattcccgtgcaggccctgctccacctgcgccacccagaggctgaggacccctcagcggaacacccctggtgtgcctgggacatctgtgaagcctgggcagagaaacgtggttacaagacagccaaggcggctcggaatgatgtgtacagagcagccaacagtctcttgcggctggcagtggacggccgcctcagcctgtgttttcatcccccaggctacagtgaacagaaaggcacctgggagtcccatccagagaccacggagctggtggttttgcagggcagggtggggccagcaggtgacgaggaggaggaggaagaggaagagctgagcagctcctgtgaggaggagggagaggaggaccgggatgcggatgaggagggagaaggggatgaggagaccccaacctcggctccagggtccagcctggctggccgaaacccttatgccctgctgggtgaggatgagtgctgagttcctcgcccagcgccatcttccctcccagtatctttgcttttggactgacctgggggtatctcccctctgccaccccaattgtgaataaagattgtttgctttgtagccccttccccagatgaactgaggtgagagcggctgttccaggct

SEQ ID NO: 13614 - protein, 262 aa, Homo sapiens
MEPTGPTQERYKDGVVTIGCVGFPNVGKSSLINGLVGRKVVSVSRTPGHTRYFQTYFLTPSVKLCDCPGLIFPSLLPRQLQVLAGIYPIAQIQEPYTAVGYLASRIPVQALLHLRHPEAEDPSAEHPWCAWDICEAWAEKRGYKTAKAARNDVYRAANSLLRLAVDGRLSLCFHPPGYSEQKGTWESHPETTELVVLQGRVGPAGDEEEEEEEELSSSCEEEGEEDRDADEEGEGDEETPTSAPGSSLAGRNPYALLGEDEC

SEQ ID NO: 13615 - DNA, 3436 bp, Homo sapiens
cagaaaggtctggggccgtattgaggttgatggttccagtaagagaactcctggttcaaggctccatttgggagagccccacttccatccctccccagcgcgtgcgcccttcctccttccgttacagccccctccttcgcaccttattagcccctagccccttgcccggacgggcttgacaggcatgtgcacatccctcccagacccctcaccgatgggactcccatcctcctcatctccagtctcttcccgctcgggcagcgggggctgctgctgtgtcggtggctggtgatgattctgcttctttcgtttcggcatcgtgtctgcggcaatggctgcagcgggatttggagggtagtgaggaaggggcacgcggggattctgtttccgcttccggggggtcggtgggcagcaatgctgaggctcccgccattccacttccggaaggttgcggagaacatctgcggcggccgcattccggagccaactgcctccctccgtctctgccaggcatggcggcaacctcacaccttccctttgctgcgtttctataaatgctttgaaaaaattactcttttcttccctcgctggaaaacaccacaaccagctcctcagagtgtgtcacagagtcaacaggctctcgggccagagggcctgagaagaggactgtcgcaccgtaagatcgccacatccggtcctcggttactatggtaacagctgcaggcacaacttcgtgccctttgacctccccccaaaagtccttgtcccgcttgggtttcccttctcgcccgcttttgcacttatgatctgtaaacctgctccttatcatcgttcccacaaggaatttgggtcccaacaggtcggcacccaggactctcagaccgccgccctcccctaaagacctctgaccgtgcccccggtgtagtccagcaacctggacgcagtctcggctttccactaaggtcaagcccggggctttgtagtatagcctcagcgtgtccacgccccctctcccctaggtagtaggccccgccctccgctccgccgccccctccaggtgagtggtaggttctcccgggagcgcaaggtagtgatgacacgcgccccccctcctccgaacgcgagttggtagcgtccgtgacggagttagcctggtcctcccacgcgcgcctccttcctcgccgccggggcgccctctcggtgccactggctctcacgtgccagtagcccaccccgcatcatcctctcgcctcgctcctggagggaagtgactatatctcccccgtccgccttccatcgccgccgcggcggtaattctgtcgggcccgcccgctgacgtcacctgctagccccgcctcctctagggtcccgggcccctgcggcgggggctgccccggggggcagtcagttgaggcggcgggagctcggcggagggcgggccaggtgactggtccgggccatgccgaggaagaagccattcagcgtgaagcagaagaagaagcagttgcaggacaaacgggagcggaagagagggcttcaagatgggctgcgctccagttccaacagccgcagcgggagccgggagcggcgagaggaacagaccgacacctcggacggggagtctgtgacccatcatatccgcaggcttaaccagcagccttctcaggggctgggtccacgaggctacgacccaaatcgataccgactgcattttgagagagacagcagggaggaggtagagaggagaaagagagcagcccgggagcaagttctacagccggtcagtgctgagttgttggagctggacatccgggaggtgtatcagcctggctcagttctggactttcctcgacgtcctccttggagctatgagatgtccaaggagcaactaatgagccaagaggaacggagcttccaagactatcttgggaagattcatggggcttactcctctgagaaactcagctactttgagcacaatctggagacatggaggcagctgtggcgggtgttagagatgtctgacatcgtcctgcttatcactgatatccgacatccagttgtgaatttcccgccagcactttatgagtatgtgactggagaacttggactggccctggtgctggttttgaacaaggtggatctggccccgccagctcttgtggttgcctggaagcattatttccatcaacactatccccagctccacgtcgtccttttcacctcttttcctcgggacccccgcaccccacaggaccctagtagtgtcttgaagaagagtcggaggcgggggagaggatggactcgggccctggggccagagcagttgctgagagcctgtgaagccatcactgtggggaaagtggacttgagcagctggcgggagaagattgctcgggatgtggctggggccacctggggtaatggctctggggaggaggaggaagaggaggatggcccagcagtcctggtggagcagcagactgattcagcaatggagccaactggcccaacccaagagcgctacaaggatggggtggtgaccatcggctgtgtgggtttccctaatgtgggaaagtcctcgctgatcaatgggctggtggggcggaaagtcgtgagtgtctccagaaccccgggccatacccgatactttcagacctactttcttaccccctctgtgaagctctgtgactgcccaggcctcatcttcccatctcttctgcctaggcagttgcaggttctggcagggatctaccctatcgcccagatccaggagccctacactgctgtgggctacctggcctcccgaattcccgtgcaggccctgctccacctgcgccacccagaggctgaggacccctcagcggaacacccctggtgtgcctgggacatctgtgaagcctgggcagagaaacgtggttacaagacagccaaggcggctcggaatgatgtgtacagagcagccaacagtctcttgcggctggcagtggacggccgcctcagcctgtgttttcatcccccaggctacagtgaacagaaaggcacctgggagtcccatccagagaccacggagctggtggttttgcagggcagggtggggccagcaggtgacgaggaggaggaggaagaggaagagctgagcagctcctgtgaggaggagggagaggaggaccgggatgcggatgaggagggagaaggggatgaggagaccccaacctcggctccagggtccagcctggctggccgaaacccttatgccctgctgggtgaggatgagtgctgagttcctcgcccagcgccatcttccctcccagtatctttgcttttggactgacctgggggtatctcccctctgccaccccaattgtgaataaagattgtttgctttgtagccccttccccagatgaactgaggtgagagcggctgttccaggct

SEQ ID NO: 13616 - protein, 607 aa, Homo sapiens; identical to SEQ ID NO: 1423

SEQ ID NO: 13617 - DNA, 819 bp, Homo sapiens
aggctgaggacccctcagcggaacacccctggtgtgcctgggacatctgtgaaggtgagttccatgtgcctggcttcgccccacctggtttcagctgctcttccttacctgcctcgccttttacccttccctgtctcctttcctctcctcagagattctgccattgatgaagctgctgtccactcacccctagatttttgttgcatagccagtaagatctctggcctggaatgttttggggaaaactggaaggactgtgttatgggagtgggagtataactggtacctggttaatgctttccctttccattattcttttcttcctccagcctgggcagagaaacgtggttacaagacagccaaggcggctcggaatgatgtgtacagagcagccaacagtctcttgcggctggcagtggacggccgcctcagcctgtgttttcatcccccaggctacagtgaacagaaaggcacctgggagtcccatccagagaccacggagctggtggttttgcagggcagggtggggccagcaggtgacgaggaggaggaggaagaggaagagctgagcagctcctgtgaggaggagggagaggaggaccgggatgcggatgaggagggagaaggggatgaggagaccccaacctcggctccagggtccagcctggctggccgaaacccttatgccctgctgggtgaggatgagtgctgagttcctcgcccagcgccatcttccctcccagtatctttgcttttggactgacctgggggtatctcccctctgccaccccaattgtgaataaagattgtttgctttgt

SEQ ID NO: 13618 - protein, 112 aa, Homo sapiens
MFWGKLEGLCYGSGSITGTWLMLSLSIILFFLQPGQRNVVTRQPRRLGMMCTEQPTVSCGWQWTAASACVFIPQATVNRKAPGSPIQRPRSWWFCRAGWGQQVTRRRRKRKS

SEQ ID NO: 13619 - DNA, 2763 bp, Homo sapiens
ctccgtctctgccaggcatggcggcaacctcacaccttccctttgctgcgtttctataaatgctttgaaaaaattactcttttcttccctcgctggaaaacaccacaaccagctcctcagagtgtgtcacagagtcaacaggctctcgggccagagggcctgagaagaggactgtcgcaccgtaagatcgccacatccggtcctcggttactatggtaacagctgcaggcacaacttcgtgccctttgacctccccccaaaagtccttgtcccgcttgggtttcccttctcgcccgcttttgcacttatgatctgtaaacctgctccttatcatcgttcccacaaggaatttgggtcccaacaggtcggcacccaggactctcagaccgccgccctcccctaaagacctctgaccgtgcccccggtgtagtccagcaacctggacgcagtctcggctttccactaaggtcaagcccggggctttgtagtatagcctcagcgtgtccacgccccctctcccctaggtagtaggccccgccctccgctccgccgccccctccaggtgagtggtaggttctcccgggagcgcaaggtagtgatgacacgcgccccccctcctccgaacgcgagttggtagcgtccgtgacggagttagcctggtcctcccacgcgcgcctccttcctcgccgccggggcgccctctcggtgccactggctctcacgtgccagtagcccaccccgcatcatcctctcgcctcgctcctggagggaagtgactatatctcccccgtccgccttccatcgccgccgcggcggtaattctgtcgggcccgcccgctgacgtcacctgctagccccgcctcctctagggtcccgggcccctgcggcgggggctgccccggggggcagtcagttgaggcggcgggagctcggcggagggcgggccaggtgactggtccgggccatgccgaggaagaagccattcagcgtgaagcagaagaagaagcagttgcaggacaaacgggagcggaagagagggcttcaagatgggctgcgctccagttccaacagccgcagcgggagccgggagcggcgagaggaacagaccgacacctcggacggggagtctgtgacccatcatatccgcaggcttaaccagcagccttctcaggggctgggtccacgaggctacgacccaaatcgataccgactgcattttgagagagacagcagggaggaggtagagaggagaaagagagcagcccgggagcaagttctacagccggtcagtgctgagttgttggagctggacatccgggaggtgtatcagcctggctcagttctggactttcctcgacgtcctccttggagctatgagatgtccaaggagcaactaatgagccaagaggaacggagcttccaagactatcttgggaagattcatggggcttactcctctgagaaactcagctactttgagcacaatctggagacatggaggcagctgtggcgggtgttagagatgtctgacatcgtcctgcttatcactgatatccgacatccagttgtgaatttcccgccagcactttatgagtatgtgactggagaacttggactggccctggtgctggttttgaacaaggtggatctggccccgccagctcttgtggttgcctggaagcattatttccatcaacactatccccagctccacgtcgtccttttcacctcttttcctcgggacccccgcaccccacaggaccctagtagtgtcttgaagaagagtcggaggcgggggagaggatggactcgggccctggggccagagcagttgctgagagcctgtgaacagcagactgattcagcaatggagccaactggcccaacccaagagcgctacaaggatggggtggtgaccatcggctgtgtgggtttccctaatgtgggaaagtcctcgctgatcaatgggctggtggggcggaaagtcgtgagtgtctccagaaccccgggccatacccgatactttcagacctactttcttaccccctctgtgaagctctgtgactgcccaggcctcatcttcccatctcttctgcctaggcagttgcaggttctggcagggatctaccctatcgcccagatccaggagccctacactgctgtgggctacctggcctcccgaattcccgtgcaggccctgctccacctgcgccacccagaggctgaggacccctcagcggaacacccctggtgtgcctgggacatctgtgaagcctgggcagagaaacgtggttacaagacagccaaggcggctcggaatgatgtgtacagagcagccaacagtctcttgcggctggcagtggacggccgcctcagcctgtgttttcatcccccaggctacagtgaacagaaaggcacctgggagtcccatccagagaccacggagctggtggttttgcagggcagggtggggccagcaggtgacgaggaggaggaggaagaggaagagctgagcagctcctgtgaggaggagggagaggaggaccgggatgcggatgaggagggagaaggggatgaggagaccccaacctcggctccagggtccagcctggctggccgaaacccttatgccctgctgggtgaggatgagtgctgagttcctcgcccagcgccatcttccctcccagtatctttgcttttggactgacctgggggtatctcccctctgccaccccaattgtgaataaagattgtttgctttgt

SEQ ID NO: 13620 - protein, 563 aa, Homo sapiens
MPRKKPFSVKQKKKQLQDKRERKRGLQDGLRSSSNSRSGSRERREEQTDTSDGESVTHHIRRLNQQPSQGLGPRGYDPNRYRLHFERDSREEVERRKRAAREQVLQPVSAELLELDIREVYQPGSVLDFPRRPPWSYEMSKEQLMSQEERSFQDYLGKIHGAYSSEKLSYFEHNLETWRQLWRVLEMSDIVLLITDIRHPVVNFPPALYEYVTGELGLALVLVLNKVDLAPPALVVAWKHYFHQHYPQLHVVLFTSFPRDPRTPQDPSSVLKKSRRRGRGWTRALGPEQLLRACEQQTDSAMEPTGPTQERYKDGVVTIGCVGFPNVGKSSLINGLVGRKVVSVSRTPGHTRYFQTYFLTPSVKLCDCPGLIFPSLLPRQLQVLAGIYPIAQIQEPYTAVGYLASRIPVQALLHLRHPEAEDPSAEHPWCAWDICEAWAEKRGYKTAKAARNDVYRAANSLLRLAVDGRLSLCFHPPGYSEQKGTWESHPETTELVVLQGRVGPAGDEEEEEEEELSSSCEEEGEEDRDADEEGEGDEETPTSAPGSSLAGRNPYALLGEDEC

SEQ ID NO: 13621 - DNA, 3390 bp, Homo sapiens
cagaaaggtctggggccgtattgaggttgatggttccagtaagagaactcctggttcaaggctccatttgggagagccccacttccatccctccccagcgcgtgcgcccttcctccttccgttacagccccctccttcgcaccttattagcccctagccccttgcccggacgggcttgacaggcatgtgcacatccctcccagacccctcaccgatgggactcccatcctcctcatctccagtctcttcccgctcgggcagcgggggctgctgctgtgtcggtggctggtgatgattctgcttctttcgtttcggcatcgtgtctgcggcaatggctgcagcgggatttggagggtagtgaggaaggggcacgcggggattctgtttccgcttccggggggtcggtgggcagcaatgctgaggctcccgccattccacttccggaaggttgcggagaacatctgcggcggccgcattccggagccaactgcctccctccgtctctgccaggcatggcggcaacctcacaccttccctttgctgcgtttctataaatgctttgaaaaaattactcttttcttccctcgctggaaaacaccacaaccagctcctcagagtgtgtcacagagtcaacaggctctcgggccagagggcctgagaagaggactgtcgcaccgtaagatcgccacatccggtcctcggttactatggtaacagctgcaggcacaacttcgtgccctttgacctccccccaaaagtccttgtcccgcttgggtttcccttctcgcccgcttttgcacttatgatctgtaaacctgctccttatcatcgttcccacaaggaatttgggtcccaacaggtcggcacccaggactctcagaccgccgccctcccctaaagacctctgaccgtgcccccggtgtagtccagcaacctggacgcagtctcggctttccactaaggtcaagcccggggctttgtagtatagcctcagcgtgtccacgccccctctcccctaggtagtaggccccgccctccgctccgccgccccctccaggtgagtggtaggttctcccgggagcgcaaggtagtgatgacacgcgccccccctcctccgaacgcgagttggtagcgtccgtgacggagttagcctggtcctcccacgcgcgcctccttcctcgccgccggggcgccctctcggtgccactggctctcacgtgccagtagcccaccccgcatcatcctctcgcctcgctcctggagggaagtgactatatctcccccgtccgccttccatcgccgccgcggcggtaattctgtcgggcccgcccgctgacgtcacctgctagccccgcctcctctagggtcccgggcccctgcggcgggggctgccccggggggcagtcagttgaggcggcgggagctcggcggagggcgggccaggtgactggtccgggccatgccgaggaagaagccattcagcgtgaagcagaagaagaagcagttgcaggacaaacgggagcggaagagagggcttcaagatgggctgcgctccagttccaacagccgcagcgggagccgggagcggcgagaggaacagaccgacacctcggacggggagtctgtgacccatcatatccgcaggcttaaccagcagccttctcaggggctgggtccacgaggctacgacccaaatcgataccgactgcattttgagagagacagcagggaggaggtagagaggagaaagagagcagcccgggagcaagttctacagccggtcagtgctgagttgttggagctggacatccgggaggtgtatcagcctggctcagttctggactttcctcgacgtcctccttggagctatgagatgtccaaggagcaactaatgagccaagaggaacggagcttccaagactatcttgggaagattcatggggcttactcctctgagaaactcagctactttgagcacaatctggagacatggaggcagctgtggcgggtgttagagatgtctgacatcgtcctgcttatcactgatatccgacatccagttgtgaatttcccgccagcactttatgagtatgtgactggagaacttggactggccctggtgctggttttgaacaaggtggatctggccccgccagctcttgtggttgcctggaagcattatttccatcaacactatccccagctccacgtcgtccttttcacctcttttcctcgggacccccgcaccccacaggaccctagtagtgtcttgaagaagagtcggaggcgggggagaggatggactcgggccctggggccagagcagttgctgagagcctgtgaagccatcactgtggggaaagtggacttgagcagctggcgggagaagattgctcgggatgtggctggggccacctggggtaatggctctggggaggaggaggaagaggaggatggcccagcagtcctggtggagcagcagactgattcagcaatggagccaactggcccaacccaagagcgctacaaggatggggtggtgaccatcggctgtgtgggtttccctaatgtgggaaagtcctcgctgatcaatgggctggtggggcggaaagtcgtgagtgtctccagaaccccgggccatacccgatactttcagacctactttcttaccccctctgtgaagctctgtgactgcccaggcctcatcttcccatctcttctgcctaggcagttgcaggttctggcagggatctaccctatcgcccagatccaggagccctacactgctgtgggctacctggcctcccgaattcccgtgcaggccctgctccacctgcgccacccagaggctgaggacccctcagcggaacacccctggtgtgcctgggacatctgtgaagcctgggcagagaaacgtggttacaagacagccaaggcggctcggaatgatgtgtacagagcagccaacagtctcttgcggctggcagtggacggccgcctcagcctgtgttttcatcccccaggctacagtgaacagaaaggcacctgggagtcccatccagagaccacggagctggtggttttgcagggcagggtggggccagcaggtgacgaggaggaggaggaagaggaagagctgagcagctcctgtgaggaggagggagaggaggaccgggatgcggatgaggagggagaaggggatgaggagaccccaacctcggctccagggtccagcctggctggccgaaacccttatgccctgctgggtgaggatgagtgctgagttcctcgcccagcgccatcttccctcccagtatctttgcttttggactgacctgggggtatctcccctctgccaccccaattgtgaataaagattgtttgctttgt

SEQ ID NO: 13622 - protein, 607 aa, Homo sapiens; identical to SEQ ID NO: 1423

SEQ ID NO: 13623 - DNA, 761 bp, Homo sapiens
tcagcaatggagccaactggcccaacccaagagcgctacaaggatggggtggtgaccatcggctgtgtgggtttccctaatgtgggaaagtcctcgctgatcaatgggctggtggggcggaaagtcgtgagtgtctccagaaccccgggccatacccgatactttcagacctactttcttaccccctctgtgaagctctgtgactgcccaggcctcatcttcccatctcttctgcctaggcagttgcaggttctggcagggatctaccctatcgcccagatccaggagccctacactgctgtgggctacctggcctcccgaattcccgtgcaggccctgctccacctgcgccacccagaggctgaggacccctcagcggaacacccctggtgtgcctgggacatctgtgaagcctgggcagagaaacgtggttacaagacagccaaggcggctcggaatgatgtgtacagagcagccaacagtctcttgcggctggcagtggacggccgcctcagcctgtgttttcatcccccaggctacagtgaacagaaaggtcagagcccagatattcttccccagccccctgctatagcgtaggtaaaagggtgtgggctttgtggccagagagagggtcaaacctggattctgtacctgttggctagctctgttacttaacatctgtgatattttcctgatctgcaaactgagggtaataattgacccttagcatagtgattgtaaagattgaagttgatgtgcac

SEQ ID NO: 13624 - protein, 196 aa, Homo sapiens
MEPTGPTQERYKDGVVTIGCVGFPNVGKSSLINGLVGRKVVSVSRTPGHTRYFQTYFLTPSVKLCDCPGLIFPSLLPRQLQVLAGIYPIAQIQEPYTAVGYLASRIPVQALLHLRHPEAEDPSAEHPWCAWDICEAWAEKRGYKTAKAARNDVYRAANSLLRLAVDGRLSLCFHPPGYSEQKGQSPDILPQPPAIA

SEQ ID NO: 13625 - DNA, 1259 bp, Homo sapiens
aaagatgagttgtcagggcagagaggggtgcttggaattgaggctttggagctgtgaagtgacaagatgcaggtattaccatgggagtgggcagctgaggtggggtaaaggagatgctctgtggaagggagatgaaggcactgaagtcagccagaaacacaaaaactggtggtggtgagtgagcagagtggcagtgagccccaaggcttccagttttctccttggacaagtcatcgtaattattattattattttttgagatggagtttccctcttattgcccaggctggagtgcaatggtgcaatctcagctcactgcaacctccgcctcctgggttcaagtggttctcctgcctcagcctcccaagtagctgcaattacaggcgcccaccaccacgcccagctaatttttgtatttttagtagagatggggtttcaccatgttggccaggctggtcttgaagtcctgacctcaggtgatccacccgccttggcctcccaaagtaatcacgctgggattacaagcgtgagccactgtgccaggccaagtcatagtaattatgagatgtggatcactggtactgggtacttactgtactgcaggcactgacccacacaagttgtattggttatctcatttaatcctgaccaccctgaggtagggaggtgtccacactgtaaaatgaagaaacagaggctcagaaagttagttgccctgacatcacaaagctggtaagtggaagggccaggatttaaccctggcagcccagagcgtgatttgtattctgcaataccatttccttaatttctgagccttagttccccttttacctataggtatagcaccaagtcccatcacagagtagaaacctgttaaacgttaattttccttgccttcctcaggtttccctaatgtgggaaagtcctcgctgatcaatgggctggtggggcggaaagtcgtgagtgtctccagaaccccgggccatacccgatactttcagacctactttcttaccccctctgtgaagctctgtgactgcccaggcctcatcttcccatctcttctgcctaggcagttgcaggttctggcagggatctaccctatcgcccagatccaggagccctacactgctgtgggctacctggcctcccgaattcccgtgcaggccctgctccacctgcgccacccagaggctgaggacccctcagcggaacacccctggtgtgcctgggacatctgtgaagagattctgccattg

SEQ ID NO: 13626 - protein, 60 aa, Homo sapiens
MGFHHVGQAGLEVLTSGDPPALASQSNHAGITSVSHCARPSHSNYEMWITGTGYLLYCRH

SEQ ID NO: 13627 - DNA, 2690 bp, Homo sapiens
gagccagtggcaccgagagggcgccccggcggcgaggaaggaggcgcgcgtgggaggaccaggctaactccgtcacggacgctaccaactcgcgttcggaggagggggggcgcgtgtcatcactaccttgcgctcccgggagaacctaccactcacctggagggggcggcggagcggagggcggggcctactacctaggggagagggggcgtggacacgctgaggctatactacaaagccccgggcttgaccttagtggaaagccgagactgcgtccaggttgctggactacaccgggggcacggtcagaggtctttaggggagggcggcggtctgagagtcctgggtgccgacctgttgggacccaaattccttgtgggaacgatgataaggagcaggtttacagatcataagtgcaaaagcgggcgagaagggaaacccaagcgggacaaggacttttggggggaggtcaaagggcacgaagttgtgcctgcagctgttaccatagtaaccgaggaccggatgtggcgatcttacggtgcgacagtcctcttctcaggccctctggcccgagagcctgttgactctgtgacacactctgaggagctggttgtggtgttttccagcgagggaagaaaagagtaattttttcaaagcatttatagaaacgcagcaaagggaaggtgtgaggttgccgccatgcctggcagagacggagggaggcagttggctccggaatgcggccgccgcagatgttctccgcaaccttccggaagtggaatggcgggagcctcagcattgctgcccaccgaccccccggaagcggaaacagaatccccgcgtgccccttcctcactaccctccaaatcccgctgcagccattgccgcagacacgatgccgaaacgaaagaagcagaatcatcaccagccaccgacacagcagcagcccccgctgcccgagcgggaagagactggagatgaggaggatgggagtcccatcggaccacccagccttctgggccctccccccatggccaatggaaaacctggcgaccctaagtcagctcttcacagaggtcctccaggatcaaggggaccactgattccaccactgctgagtctcccacctcctccttggggtagaggcccaattcggagagggcttggccccaggtctagcccatatggtcgtggttggtggggagtcaatgcagaacctccttttccggggccaggccatgggggtcccaccaggggaagctttcacaaggaacagagaaaccctcgaaggctcaaaagctggtctcttatcaagaatacctgcccgcccaaggatgacccccaggttatggaagacaaatccgaccgccctgtctgccgacattttgccaaaaagggccactgtcgatatgaggacctctgtgccttctaccatccaggcgtcaatggacctcctctgtgagactgtgccttcccatccaggctggaaggagctctctgtgacctagcggccatttatttctctgtagccctatgatggctactgtgaggctcttctaacaccctcagtcagtgacacacccatcccatccaccacttcccccgtgtggggtccagagtggtgttgcatcactggtgcgcggcatacgcgctttcttctgatccagcctgtagagactcgcctttgggacccatctttgcttcctttcagttgcctcctggatcttctttcccgtcatcaaatgactgctgaacaggaaacctctttggtgctgtttcttgtgcatctgtccacctgttccccagtattgccctcaattcctgagagccctggagcggtttcctaccattcccttcttttagctgcttgttttaagtcctttttatgtgacattccctacccccaatgttgtcagctgcttgtgaaactcagccaggttgtctaacctggggtcaagtttgggtgactggtgcagagttacttcctaaaaggccactctccctgcctttggatttcatagtttctctgtcagtagcatgatccccaccgctatggtctatctatgatcaccgtgctttgtgaaactgtgcatccccttgtagcctttctcagtgtccgtggcatttttgtgacttcccagcactagaataagttttcctgccaaaatgagtgaggcgcttggtgccctctggactttcccacttcccaacatgggagaattgtgaactttccatcagactgcctccctggccctccccattcttctcctgttggttattctgagtctgacacagacccatgacatgtcttataaagcctccaatggctttatcctacctagatcccttccagcccattttaattagactatgtcattgtgaggccaccagtccattcatttgaattctgtgaatctccaccttgcctatctttgggtagaagctggacagtactgttgccctcttccaatcctcttcccctacatccctggcactggttgttttctgtgaaaacagcagtgaacaggttcagttttgaactggccctgaggaaatgggtcaggagttgtattggcaagagggaggggtgagagctgttggagaactgagaatgaggttttttttttttttttctttttaactttttttatattagtaataaatgcagtggaaaccagcattttatttaa

SEQ ID NO: 13628 - protein, 188 aa, Homo sapiens
MPKRKKQNHHQPPTQQQPPLPEREETGDEEDGSPIGPPSLLGPPPMANGKPGDPKSALHRGPPGSRGPLIPPLLSLPPPPWGRGPIRRGLGPRSSPYGRGWWGVNAEPPFPGPGHGGPTRGSFHKEQRNPRRLKSWSLIKNTCPPKDDPQVMEDKSDRPVCRHFAKKGHCRYEDLCAFYHPGVNGPPL

SEQ ID NO: 13629 - DNA, 459 bp, Homo sapiens
cgcaaccttccggaagtggaatggcgggagcctcagcattgctgcccaccgaccccccggaagcggaaacagaatccccgcgtgccccttcctcactaccctccaaatcccgctgcagccattgccgcagacacgatgccgaaacgaaagaagcagaatcatcaccagccaccgacacagcagcagcccccgctgcccgagcgggaagagactggagatgaggaggatgggagtcccatcgccccaaactggataccacccacatgtccatcatcagtagaatggataaataaattgttgtgtatgcatgcaatgggactacactgcaacgaaaatgaatgaactgctgctacaggcaacctggatgaatctcacaaacatgatgttgagcgaaaggagccagacataaaagaatgcagactgtatgattccatttttgtgaagttcaaaaacaggcaa

SEQ ID NO: 13630 - protein, 68 aa, Homo sapiens
MPKRKKQNHHQPPTQQQPPLPEREETGDEEDGSPIAPNWIPPTCPSSVEWINKLLCMHAMGLHCNENE

SEQ ID NO: 13631 - DNA, 1797 bp, Homo sapiens
agaatccccgcgtgccccttcctcactaccctccaaatcccgctgcagccattgccgcagacacgatgccgaaacgaaagaagcagaatcatcaccagccaccgacacagcagcagcccccgctgcccgagcgggaagagactggagatgaggaggatgggagtcccatcgctcttcacagaggtcctccaggatcaaggggaccactgattccaccactgctgagtctcccacctcctccttggggtagaggcccaattcggagagggcttggccccaggtctagcccatatggtcgtggttggtggggagtcaatgcagaacctccttttccggggccaggccatgggggtcccaccaggggaagctttcacaaggaacagagaaaccctcgaaggctcaaaagctggtctcttatcaagaatacctgcccgcccaaggatgacccccaggttatggaagacaaatccgaccgccctgtctgccgacattttgccaaaaagggccactgtcgatatgaggacctctgtgccttctaccatccaggcgtcaatggacctcctctgtgagactgtgccttcccatccaggctggaaggagctctctgtgacctagcggccatttatttctctgtagccctatgatggctactgtgaggctcttctaacaccctcagtcagtgacacacccatcccatccaccacttcccccgtgtggggtccagagtggtgttgcatcactggtgcgcggcatacgcgctttcttctgatccagcctgtagagactcgcctttgggacccatctttgcttcctttcagttgcctcctggatcttctttcccgtcatcaaatgactgctgaacaggaaacctctttggtgctgtttcttgtgcatctgtccacctgttccccagtattgccctcaattcctgagagccctggagcggtttcctaccattcccttcttttagctgcttgttttaagtcctttttatgtgacattccctacccccaatgttgtcagctgcttgtgaaactcagccaggttgtctaacctggggtcaagtttgggtgactggtgcagagttacttcctaaaaggccactctccctgcctttggatttcatagtttctctgtcagtagcatgatccccaccgctatggtctatctatgatcaccgtgctttgtgaaactgtgcatccccttgtagcctttctcagtgtccgtggcatttttgtgacttcccagcactagaataagttttcctgccaaaatgagtgaggcgcttggtgccctctggactttcccacttcccaacatgggagaattgtgaactttccatcagactgcctccctggccctccccattcttctcctgttggttattctgagtctgacacagacccatgacatgtcttataaagcctccaatggctttatcctacctagatcccttccagcccattttaattagactatgtcattgtgaggccaccagtccattcatttgaattctgtgaatctccaccttgcctatctttgggtagaagctggacagtactgttgccctcttccaatcctcttcccctacatccctggcactggttgttttctgtgaaaacagcagtgaacaggttcagttttgaactggccctgaggaaatgggtcaggagttgtattggcaagagggaggggtgagagctgttggagaactgagaatgaggttttttttttttttttctttttaactttttttatattagtaataaatgcagtggaaaccagcattttatttaa

SEQ ID NO: 13632 - protein, 167 aa, Homo sapiens
MPKRKKQNHHQPPTQQQPPLPEREETGDEEDGSPIALHRGPPGSRGPLIPPLLSLPPPPWGRGPIRRGLGPRSSPYGRGWWGVNAEPPFPGPGHGGPTRGSFHKEQRNPRRLKSWSLIKNTCPPKDDPQVMEDKSDRPVCRHFAKKGHCRYEDLCAFYHPGVNGPPL

SEQ ID NO: 13633 - DNA, 2005 bp, Homo sapiens
atcccgctgcagccattgccgcagacacgatgccgaaacgaaagaagcagaatcatcaccagccaccgacacagcagcagcccccgctgcccgagcgggaagagactggagatgaggaggatgggagtcccatcggaccacccagccttctgggccctccccccatggccaatggaaaacctggcgaccctaagtcagccccaaactggataccacccacatgtccatcatcagtagaatggataaataaattgttgtgtatgcatgcaatgggactacactgcaacgaaaatgaatgaactgctgctacaggcaacctggatgaatctcacaaacatgatgttgagcgaaaggagccagacataaaagaatgcagactctcttcacagaggtcctccaggatcaaggggaccactgattccaccactgctgagtctcccacctcctccttggggtagaggcccaattcggagagggcttggccccaggtctagcccatatggtcgtggttggtggggagtcaatgcagaacctccttttccggggccaggccatgggggtcccaccaggggaagctttcacaaggaacagagaaaccctcgaaggctcaaaagctggtctcttatcaagaatacctgcccgcccaaggatgacccccaggttatggaagacaaatccgaccgccctgtctgccgacattttgccaaaaagggccactgtcgatatgaggacctctgtgccttctaccatccaggcgtcaatggacctcctctgtgagactgtgccttcccatccaggctggaaggagctctctgtgacctagcggccatttatttctctgtagccctatgatggctactgtgaggctcttctaacaccctcagtcagtgacacacccatcccatccaccacttcccccgtgtggggtccagagtggtgttgcatcactggtgcgcggcatacgcgctttcttctgatccagcctgtagagactcgcctttgggacccatctttgcttcctttcagttgcctcctggatcttctttcccgtcatcaaatgactgctgaacaggaaacctctttggtgctgtttcttgtgcatctgtccacctgttccccagtattgccctcaattcctgagagccctggagcggtttcctaccattcccttcttttagctgcttgttttaagtcctttttatgtgacattccctacccccaatgttgtcagctgcttgtgaaactcagccaggttgtctaacctggggtcaagtttgggtgactggtgcagagttacttcctaaaaggccactctccctgcctttggatttcatagtttctctgtcagtagcatgatccccaccgctatggtctatctatgatcaccgtgctttgtgaaactgtgcatccccttgtagcctttctcagtgtccgtggcatttttgtgacttcccagcactagaataagttttcctgccaaaatgagtgaggcgcttggtgccctctggactttcccacttcccaacatgggagaattgtgaactttccatcagactgcctccctggccctccccattcttctcctgttggttattctgagtctgacacagacccatgacatgtcttataaagcctccaatggctttatcctacctagatcccttccagcccattttaattagactatgtcattgtgaggccaccagtccattcatttgaattctgtgaatctccaccttgcctatctttgggtagaagctggacagtactgttgccctcttccaatcctcttcccctacatccctggcactggttgttttctgtgaaaacagcagtgaacaggttcagttttgaactggccctgaggaaatgggtcaggagttgtattggcaagagggaggggtgagagctgttggagaactgagaatgaggttttttttttttttttctttttaactttttttatattagtaataaatgcagtggaaaccagcattttatttaa

SEQ ID NO: 13634 - protein, 107 aa, Homo sapiens [sequence omitted]

SEQ ID NO: 13635 - DNA, 1941 bp, Homo sapiens
tcccgctgcagccattgccgcagacacgatgccgaaacgaaagaagcagaatcatcaccagccaccgacacagcagcagcccccgctgcccgagcgggaagagactggagatgaggaggatgggagtcccatcgccccaaactggataccacccacatgtccatcatcagtagaatggataaataaattgttgtgtatgcatgcaatgggactacactgcaacgaaaatgaatgaactgctgctacaggcaacctggatgaatctcacaaacatgatgttgagcgaaaggagccagacataaaagaatgcagactctcttcacagaggtcctccaggatcaaggggaccactgattccaccactgctgagtctcccacctcctccttggggtagaggcccaattcggagagggcttggccccaggtctagcccatatggtcgtggttggtggggagtcaatgcagaacctccttttccggggccaggccatgggggtcccaccaggggaagctttcacaaggaacagagaaaccctcgaaggctcaaaagctggtctcttatcaagaatacctgcccgcccaaggatgacccccaggttatggaagacaaatccgaccgccctgtctgccgacattttgccaaaaagggccactgtcgatatgaggacctctgtgccttctaccatccaggcgtcaatggacctcctctgtgagactgtgccttcccatccaggctggaaggagctctctgtgacctagcggccatttatttctctgtagccctatgatggctactgtgaggctcttctaacaccctcagtcagtgacacacccatcccatccaccacttcccccgtgtggggtccagagtggtgttgcatcactggtgcgcggcatacgcgctttcttctgatccagcctgtagagactcgcctttgggacccatctttgcttcctttcagttgcctcctggatcttctttcccgtcatcaaatgactgctgaacaggaaacctctttggtgctgtttcttgtgcatctgtccacctgttccccagtattgccctcaattcctgagagccctggagcggtttcctaccattcccttcttttagctgcttgttttaagtcctttttatgtgacattccctacccccaatgttgtcagctgcttgtgaaactcagccaggttgtctaacctggggtcaagtttgggtgactggtgcagagttacttcctaaaaggccactctccctgcctttggatttcatagtttctctgtcagtagcatgatccccaccgctatggtctatctatgatcaccgtgctttgtgaaactgtgcatccccttgtagcctttctcagtgtccgtggcatttttgtgacttcccagcactagaataagttttcctgccaaaatgagtgaggcgcttggtgccctctggactttcccacttcccaacatgggagaattgtgaactttccatcagactgcctccctggccctccccattcttctcctgttggttattctgagtctgacacagacccatgacatgtcttataaagcctccaatggctttatcctacctagatcccttccagcccattttaattagactatgtcattgtgaggccaccagtccattcatttgaattctgtgaatctccaccttgcctatctttgggtagaagctggacagtactgttgccctcttccaatcctcttcccctacatccctggcactggttgttttctgtgaaaacagcagtgaacaggttcagttttgaactggccctgaggaaatgggtcaggagttgtattggcaagagggaggggtgagagctgttggagaactgagaatgaggttttttttttttttttctttttaactttttttatattagtaataaatgcagtggaaaccagcattttatttaa

SEQ ID NO: 13636 - protein, 107 aa, Homo sapiens [sequence omitted]

SEQ ID NO: 13637 - DNA, 627 bp, Homo sapiens
tgcagccattgccgcagacacgatgccgaaacgaaagaagcagaatcatcaccagccaccgacacagcagcagcccccgctgcccgagcgggaagagactggagatgaggaggatgggagtcccatcggaccacccagccttctgggccctccccccatggccaatggaaaacctggcgaccctaagtcagccccaaactggataccacccacatgtccatcatcagtagaatggataaataaattgttgtgtatgcatgcaatgggactacactgcaacgaaaatgaatgaactgctgctacaggcaacctggatgaatctcacaaacatgatgttgagcgaaaggagccagacataaaagaatgcagactgtatgattccatttttgtgaagttcaaaaacaggcaaaaactaacctatggtgtcaggatagtggttacctttggggaggagggtgggtaatgggaaaaggggcacaaggggaggatcttttgaggtgctaataaggctttatctcttcacctggtggtggaaactcaagtgtgtctactttgtgagaactgggttgtgcacttaaaactggtgtgtctttatgtatgctgttcttcaataaaaaaaattttttt

SEQ ID NO: 13638 - protein, 89 aa, Homo sapiens
MPKRKKQNHHQPPTQQQPPLPEREETGDEEDGSPIGPPSLLGPPPMANGKPGDPKSAPNWIPPTCPSSVEWINKLLCMHAMGLHCNENE

SEQ ID NO: 13639 - DNA, 605 bp, Homo sapiens
cagaatcatcaccagccaccgacacagcagcagcccccgctgcccgagcgggaagagactggagatgaggaggatgggagtcccatcggaccacccagccttctgggccctccccccatggccaatggaaaacctggcgaccctaagtcaggtgaggaggaaggggccctgatccttgtattaggtcgtagagaagacagcaagggaggggataaaacccaggaaggacttaaaaataaaagatcagggattccatccctaaatgaatggagagaagttgtatatttgctgatttaaaaactcaatgttgtaaaaatgtcacttcttcccaaattgataaacagatttcatgcattccaagtcagaacacccataatgtttttgtggaaatacacattattatagggaaatgcaaaatatcaaggcgactatcaagacaatcttgaagtgggagggcttactatgaatatcaagatttgtaagctgggcatggtggcacacgcctgtagtcccagttactcaggaggctgaggtgcgaggatcctttgagcccaggagtttttgaggccactctgggcaacatagtgagatcctgtctctaaata

SEQ ID NO: 13640 - protein, 35 aa, Homo sapiens
MRRMGVPSDHPAFWALPPWPMENLATLSQVRRKGP

SEQ ID NO: 13641 - DNA, 460 bp, Homo sapiens
gcagcagcccccgctgcccgagcgggaagagactggagatgaggaggatgggagtcccatcggaccacccagccttctgggccctccccccatggccaatggaaaacctggcgaccctaagtcagccccaaactggataccacccacatgtccatcatcagtagaatggataaataaattgttgtgtatgcatgcaatgggactacactgcaacgaaaatgaatgaactgctgctacaggcaaaaactaacctatggtgtcaggatagtggttacctttggggaggagggtgggtaatgggaaaaggggcacaaggggaggatcttttgaggtgctaataaggctttatctcttcacctggtggtggaaactcaagtgtgtctactttgtgagaactgggttgtgcacttaaaactggtgtgtctttatgtatgctgttcttcaataaaaaaaatttttt

SEQ ID NO: 13642 - protein, 48 aa, Homo sapiens
MQWDYTATKMNELLLQAKTNLWCQDSGYLWGGGWVMGKGAQGEDLLRC

SEQ ID NO: 13643 - DNA, 3153 bp, Homo sapiens
cgggggcggggttggccgcgccagcttggagagccagccccatcggggttccccgccgccggaagcggaaatagcaccgggcgccgccacagtagctgtaactgccaccgcgatgccgaaggcgcccaagcagcagccgccggagcccgagtggatcggggacggagagagcacgagcccatcagacaaagtggtgaagaaagggaagaaggacaagaagatcaaaaaaacgttctttgaagagctggcagtagaagataaacaggctggggaagaagagaaagtgctcaaggagaaggagcagcagcagcagcaacagcaacagcagcaaaaaaaaaagcgagatacccgaaaaggcaggcggaagaaggatgtggatgatgatggagaagagaaagagctcatggagcgtcttaagaagctctcagtgccaaccagtgatgaggaggatgaagtacccgccccaaaaccccgcggagggaagaaaaccaagggtggtaatgtttttgcagccctgattcaggatcagagtgaggaagaggaggaggaagaaaaacatcctcctaagcctgccaagccggagaagaatcggatcaataaggccgtatctgaggaacagcagcctgcactcaagggcaaaaagggaaaggaagagaagtcaaaagggaaggctaagcctcaaaataaattcgctgctctggacaatgaagaggaggataaagaagaagaaattataaaggaaaaggagcctcccaaacaagggaaggagaaggccaagaaggcagagcagatggagtatgagcgccaagtggcttcattaaaagcagccaatgcagctgaaaatgacttctccgtgtcccaggcggagatgtcctcccgccaagccatgttagaaaatgcatctgacatcaagctggagaagttcagcatctccgctcatggcaaggagctgttcgtcaatgcagacctgtacattgtagccggccgccgctacgggctggtaggacccaatggcaagggcaagaccacactcctcaagcacattgccaaccgagccctgagcatccctcccaacattgatgtgttgctgtgtgagcaggaggtggtagcagatgagacaccagcagtccaggctgttcttcgagctgacaccaagcgattgaagctgctggaagaggagcggcggcttcagggacagctggaacaaggggatgacacagctgctgagaggctagagaaggtgtatgaggaattgcgggccactggggcggcagctgcagaggccaaagcacggcggatcctggctggcctgggctttgaccctgaaatgcagaatcgacccacacagaagttctcagggggctggcgcatgcgtgtctccctggccagggcactgttcatggagcccacactgctgatgctggatgagcccaccaaccacctggacctcaacgctgtcatctggcttaataactacctccagggctggcggaagaccttgctgatcgtctcccatgaccagggcttcttggatgatgtctgcactgatatcatccacctcgatgcccagcggctccactactataggggcaattacatgaccttcaaaaagatgtaccagcagaagcagaaagaactgctgaaacagtatgagaagcaagagaaaaagctgaaggagctgaaggcaggcgggaagtccaccaagcaggcggaaaaacaaacgaaggaagccctgactcggaagcagcagaaatgccgacggaaaaaccaagatgaggaatcccaggaggcccctgagctcctgaagcgccctaaggagtacactgtgcgcttcacttttccagaccccccaccactcagccctccagtgctgggtctgcatggtgtgacattcggctaccagggacagaaaccactctttaagaacttggattttggcatcgacatggattcaaggatttgcattgtgggccctaatggtgtggggaagagtacgctactcctgctgctgactggcaagctgacaccgacccatggggaaatgagaaagaaccaccggctgaaaattggcttcttcaaccagcagtatgcagagcagctgcgcatggaggagacgcccactgagtacctgcagcggggcttcaacctgccctaccaggatgcccgcaagtgcctgggccgcttcggcctggagagtcacgcccacaccatccagatctgcaaactctctggtggtcagaaggcgcgagttgtgtttgctgagctggcctgtcgggaacctgatgtcctcatcttggacgagccaaccaataacctggacatagagtctattgatgctctaggggaggccatcaatgaatacaagggtgctgtgatcgttgtcagccatgatgcccgactcatcacagaaaccaattgccagctgtgggtggtggaggagcagagtgttagccaaatcgatggtgactttgaagactacaagcgggaggtgttggaggccctgggtgaagtcatggtcagccggccccgagagtgagctttccttcccagaagtctcccgagagacatatttgtgtggcctagaagtcctctgtggtctcccctcctctgaagactgcctctggcctgcagctgacctggcaaccattcaggcacatgaaggtggagtgtgaccttgatgtgaccgggatcccactctgattgcatccatttctctgaaagacttgtttgttctgcttctcttcatataactgagctggccttatccttggcatccccctaaacaaacaagaggtgaccaccttattgtgaggttccatccagccaagtttatgtggcctattgtctcaggactctcatcactcagaagcctgcctctgatttaccctacagcttcaggcccagctgccccccagtctttgggtggtgctgttcttttctggtggatttaatgctgactcactggtacaaacagctgttgaagctcagagctggaggtgagcttctgaggcctttgccattatccagcccaagatttggtgcctgcagcctcttgtctggttgaggacttggggcaggaaaggaatgctgctgaacttgaatttccctttacaaggggaagaaataaaggaaaggagttgctgccgacctgtc

SEQ ID NO: 13644 - protein, 807 aa, Homo sapiens; identical to SEQ ID NO: 1429

SEQ ID NO: 13645 - DNA, 3267 bp, Homo sapiens
cgggggcggggttggccgcgccagcttggagagccagccccatcggggttccccgccgccggaagcggaaatagcaccgggcgccgccacagtagctgtaactgccaccgcgatgccgaaggcgcccaagcagcagccgccggagcccgagtggatcggggacggagagagcacgagcccatcagacaaagtggtgaagaaagggaagaaggacaagaagatcaaaaaaacgttctttgaagagctggcagtagaagataaacaggctggggaagaagagaaagtgctcaaggagaaggagcagcagcagcagcaacagcaacagcagcaaaaaaaaaagcgagatacccgaaaaggcaggcggaagaaggatgtggatgatgatggagaagagaaagagctcatggagcgtcttaagaagctctcagtgccaaccagtgatgaggaggatgaagtacccgccccaaaaccccgcggagggaagaaaaccaagggtggtaatgtttttgcagccctgattcaggatcagagtgaggaagaggaggaggaagaaaaacatcctcctaagcctgccaagccggagaagaatcggatcaataaggccgtatctgaggaacagcagcctgcactcaagggcaaaaagggaaaggaagagaagtcaaaagggaaggctaagcctcaaaataaattcgctgctctggacaatgaagaggaggataaagaagaagaaattataaaggaaaaggagcctcccaaacaagggaaggagaaggccaagaaggcagagcagggttcagaggaagaaggagaaggggaagaagaggaggaggaaggaggagagtctaaggcagatgatccctatgctcatcttagcaaaaaggagaagaaaaagctgaaaaaacagatggagtatgagcgccaagtggcttcattaaaagcagccaatgcagctgaaaatgacttctccgtgtcccaggcggagatgtcctcccgccaagccatgttagaaaatgcatctgacatcaagctggagaagttcagcatctccgctcatggcaaggagctgttcgtcaatgcagacctgtacattgtagccggccgccgctacgggctggtaggacccaatggcaagggcaagaccacactcctcaagcacattgccaaccgagccctgagcatccctcccaacattgatgtgttgctgtgtgagcaggaggtggtagcagatgagacaccagcagtccaggctgttcttcgagctgacaccaagcgattgaagctgctggaagaggagcggcggcttcagggacagctggaacaaggggatgacacagctgctgagaggctagagaaggtgtatgaggaattgcgggccactggggcggcagctgcagaggccaaagcacggcggatcctggctggcctgggctttgaccctgaaatgcagaatcgacccacacagaagttctcagggggctggcgcatgcgtgtctccctggccagggcactgttcatggagcccacactgctgatgctggatgagcccaccaaccacctggacctcaacgctgtcatctggcttaataactacctccagggctggcggaagaccttgctgatcgtctcccatgaccagggcttcttggatgatgtctgcactgatatcatccacctcgatgcccagcggctccactactataggggcaattacatgaccttcaaaaagatgtaccagcagaagcagaaagaactgctgaaacagtatgagaagcaagagaaaaagctgaaggagctgaaggcaggcgggaagtccaccaagcaggcggaaaaacaaacgaaggaagccctgactcggaagcagcagaaatgccgacggaaaaaccaagatgaggaatcccaggaggcccctgagctcctgaagcgccctaaggagtacactgtgcgcttcacttttccagaccccccaccactcagccctccagtgctgggtctgcatggtgtgacattcggctaccagggacagaaaccactctttaagaacttggattttggcatcgacatggattcaaggatttgcattgtgggccctaatggtgtggggaagagtacgctactcctgctgctgactggcaagctgacaccgacccatggggaaatgagaaagaaccaccggctgaaaattggcttcttcaaccagcagtatgcagagcagctgcgcatggaggagacgcccactgagtacctgcagcggggcttcaacctgccctaccaggatgcccgcaagtgcctgggccgcttcggcctggagagtcacgcccacaccatccagatctgcaaactctctggtggtcagaaggcgcgagttgtgtttgctgagctggcctgtcgggaacctgatgtcctcatcttggacgagccaaccaataacctggacatagagtctattgatgctctaggggaggccatcaatgaatacaagggtgctgtgatcgttgtcagccatgatgcccgactcatcacagaaaccaattgccagctgtgggtggtggaggagcagagtgttagccaaatcgatggtgactttgaagactacaagcgggaggtgttggaggccctgggtgaagtcatggtcagccggccccgagagtgagctttccttcccagaagtctcccgagagacatatttgtgtggcctagaagtcctctgtggtctcccctcctctgaagactgcctctggcctgcagctgacctggcaaccattcaggcacatgaaggtggagtgtgaccttgatgtgaccgggatcccactctgattgcatccatttctctgaaagacttgtttgttctgcttctcttcatataactgagctggccttatccttggcatccccctaaacaaacaagaggtgaccaccttattgtgaggttccatccagccaagtttatgtggcctattgtctcaggactctcatcactcagaagcctgcctctgatttaccctacagcttcaggcccagctgccccccagtctttgggtggtgctgttcttttctggtggatttaatgctgactcactggtacaaacagctgttgaagctcagagctggaggtgagcttctgaggcctttgccattatccagcccaagatttggtgcctgcagcctcttgtctggttgaggacttggggcaggaaaggaatgctgctgaacttgaatttccctttacaaggggaagaaataaaggaaaggagttgctgccgacctgtc

SEQ ID NO: 13646 - protein, 845 aa, Homo sapiens; identical to SEQ ID NO: 1427

SEQ ID NO: 13647 - DNA, 638 bp, Homo sapiens
cggaaatagcaccgggcgccgccacagtagctgtaactgccaccgcgatgccgaaggcgcccaagcagcagccgccggagcccgagtggatcggggacggagagagcacgagcccatcagacaaagtggtgaagaaagggaagaaggacaagaagatcaaaaaaacgttctttgaagagctggcagtagaagataaacaggctggggaagaagagaaagtgctcaaggagaaggagcagcagcagcagcaacagcaacagcagcaaaaaaaaaagcgagatacccgaaaaggcaggcggaagaaggatgtggatgatgatggagaagagaaagagctcatggagcgtcttaagaagctctcagtgccaaccagtgatgaggaggatgaagtacccgccccaaaaccccgcggagggaagaaaaccaagggtggtaatgtttttgcagccctgattcaggatcagagtgaggaagaggaggaggaagaaaaacatcctcctaagcctgccaagccggagaagaatcggatcaataaggccgtatctgaggaacagcagcctgcactcaagggcaaaaagggaaaggaagagaagtcaaaagggaaggctaagcctcaaaataaattcgctgctctggac

SEQ ID NO: 13648 - protein, 196 aa, Homo sapiens
MPKAPKQQPPEPEWIGDGESTSPSDKVVKKGKKDKKIKKTFFEELAVEDKQAGEEEKVLKEKEQQQQQQQQQQKKKRDTRKGRRKKDVDDDGEEKELMERLKKLSVPTSDEEDEVPAPKPRGGKKTKGGNVFAALIQDQSEEEEEEEKHPPKPAKPEKNRINKAVSEEQQPALKGKKGKEEKSKGKAKPQNKFAAL

SEQ ID NO: 13649 - DNA, 1360 bp, Homo sapiens
cgccacagtagctgtaactgccaccgcgatgccgaaggcgcccaagcagcagccgccggagcccgagtggatcggggacggagagagcacgagcccatcagacaaagtggtgaagaaagggaagaaggacaagaagatcaaaaaaacgttctttgaagagctggcagtagaagataaacaggctggggaagaagagaaagtgctcaaggagaaggagcagcagcagcagcaacagcaacagcagcaaaaaaaaaagcgagatacccgaaaaggcaggcggaagaaggatgtggatgatgatggagaagagaaagagctcatggagcgtcttaagaagctctcagtgccaaccactgccctaccaggatgcccgcaagtgcctgggccgcttcggcctggagagtcacgcccacaccatccagatctgcaaactctctggtggtcagaaggcgcgagttgtgtttgctgagctggcctgtcgggaacctgatgtcctcatcttggacgagccaaccaataacctggacatagagtctattgatgctctaggggaggccatcaatgaatacaagggtgctgtgatcgttgtcagccatgatgcccgactcatcacagaaaccaattgccagctgtgggtggtggaggagcagagtgttagccaaatcgatggtgactttgaagactacaagcgggaggtgttggaggccctgggtgaagtcatggtcagccggccccgagagtgagctttccttcccagaagtctcccgagagacatatttgtgtggcctagaagtcctctgtggtctcccctcctctgaagactgcctctggcctgcagctgacctggcaaccattcaggcacatgaaggtggagtgtgaccttgatgtgaccgggatcccactctgattgcatccatttctctgaaagacttgtttgttctgcttctcttcatataactgagctggccttatccttggcatccccctaaacaaacaagaggtgaccaccttattgtgaggttccatccagccaagtttatgtggcctattgtctcaggactctcatcactcagaagcctgcctctgatttaccctacagcttcaggcccagctgccccccagtctttgggtggtgctgttcttttctggtggatttaatgctgactcactggtacaaacagctgttgaagctcagagctggaggtgagcttctgaggcctttgccattatccagcccaagatttggtgcctgcagcctcttgtctggttgaggacttggggcaggaaaggaatgctgctgaacttgaatttccctttacaaggggaagaaataaaggaaaggagttgctgccgacctgtc

SEQ ID NO: 13650 - protein, 151 aa, Homo sapiens
MWMMMEKRKSSWSVLRSSQCQPLPYQDARKCLGRFGLESHAHTIQICKLSGGQKARVVFAELACREPDVLILDEPTNNLDIESIDALGEAINEYKGAVIVVSHDARLITETNCQLWVVEEQSVSQIDGDFEDYKREVLEALGEVMVSRPRE

SEQ ID NO: 13651 - DNA, 1393 bp, Homo sapiens
cgccacagtagctgtaactgccaccgcgatgccgaaggcgcccaagcagcagccgccggagcccgagtggatcggggacggagagagcacgagcccatcagacaaagtggtgaagaaagggaagaaggacaagaagatcaaaaaaacgttctttgaagagctggcagtagaagataaacaggctggggaagaagagaaagtgctcaaggagaaggagcagcagcagcagcaacagcaacagcagcaaaaaaaaaagcgagatacccgaaaaggcaggcggaagaaggatgtggatgatgatggagaagagaaagagctcatggagcgtcttaagaagctctcagtgccaaccactgccctaccaggatgcccgcaagtgcctgggccgcttcggcctggagagtcacgcccacaccatccagatctgcaaactctctggtggtcagaaggcgcgagttgtgtttgctgagctggcctgtcgggaacctgatgtcctcatcttggacgagccaaccaataacctggacatagagtctattgatgctctaggggaggccatcaatgaatacaagggtgctgtgatcgttgtcagccatgatgcccgactcatcacagaaaccaattgccagctgtgggtggtggaggagcagagtgttagccaaatcgatggtgactttgaagactacaagcgggaggtgttggaggccctgggtgaagtcatggtcagccggccccgagagtgagctttccttcccagaagtctcccgagagacatatttgtgtggcctagaagtcctctgtggtctcccctcctctgaagactgcctctggcctgcagctgacctggcaaccattcaggcacatgaaggtggagtgtgaccttgatgtgaccgggatcccactctgattgcatccatttctctgaaagacttgtttgttctgcttctcttcatataactgagctggccttatccttggcatccccctaaacaaacaagaggtgaccaccttattgtgaggttccatccagccaagtttatgtggcctattgtctcaggactctcatcactcagaagcctgcctctgatttaccctacagcttcaggcccagctgccccccagtctttgggtggtgctgttcttttctggtggatttaatgctgactcactggtacaaacagctgttgaagctcagagctggaggtgagcttctgaggcctttgccattatccagcccaagatttggtgcctgcagcctcttgtctggttgaggacttggggcaggaaaggaatgctgctgaacttgaatttccctttacaaggggaagaaataaaggaaaggagttgctgccgacctgtcactgtttggagattgatgggagttggaactgtt

SEQ ID NO: 13652 - protein, 151 aa, Homo sapiens; identical to SEQ ID NO: 13650

SEQ ID NO: 13653 - DNA, 1573 bp, Homo sapiens
cgccacagtagctgtaactgccaccgcgatgccgaaggcgcccaagcagcagccgccggagcccgagtggatcggggacggagagagcacgagcccatcagacaaagtggtgaagaaagggaagaaggacaagaagatcaaaaaaacgttctttgaagagctggcagtagaagataaacaggctggggaagaagagaaagtgctcaaggagaaggagcagcagcagcagcaacagcaacagcagcaaaaaaaaaagcgagatacccgaaaaggcaggcggaagaaggatgtggatgatgatggagaagagaaagagctcatggagcgtcttaagaagctctcagtgccaaccactgccctaccaggatgcccgcaagtgcctgggccgcttcggcctggagagtcacgcccacaccatccagatctgcaaactctctggtggtcagaaggcgcgagttgtgtttgctgagctggcctgtcgggaacctgatgtcctcatcttggacgagccaaccaataacctggacatagagtctattgatgctctaggggaggccatcaatgaatacaagggtgctgtgatcgttgtcagccatgatgcccgactcatcacagaaaccaattgccagctgtgggtggtggaggagcagagtgttagccaaatcgatggtgactttgaagactacaagcgggaggtgttggaggccctgggtgaagtcatggtcagccggccccgagagtgagctttccttcccagaagtctcccgagagacatatttgtgtggcctagaagtcctctgtggtctcccctcctctgaagactgcctctggcctgcagctgacctggcaaccattcaggcacatgaaggtggagtgtgaccttgatgtgaccgggatcccactctgattgcatccatttctctgaaagacttgtttgttctgcttctcttcatataactgagctggccttatccttggcatccccctaaacaaacaagaggtgaccaccttattgtgaggttccatccagccaagtttatgtggcctattgtctcaggactctcatcactcagaagcctgcctctgatttaccctacagcttcaggcccagctgccccccagtctttgggtggtgctgttcttttctggtggatttaatgctgactcactggtacaaacagctgttgaagctcagagctggaggtgagcttctgaggcctttgccattatccagcccaagatttggtgcctgcagcctcttgtctggttgaggacttggggcaggaaaggaatgctgctgaacttgaatttccctttacaaggggaagaaataaaggaaaggagttgctgccgacctgtcactgtttggagattgatgggagttggaactgttctcagtcttgatttgctttattcagttttctagcagcttttaatagtcccctcttccccactaaatggatcttgtttgcagtcttgctgacagtgtttgctgtttaaggatcataggattcctttcccccaacccttcacgcaaggaaaaagcaaagtgattcataccttctatcttgga

SEQ ID NO: 13654 - protein, 151 aa, Homo sapiens; identical to SEQ ID NO: 13650

SEQ ID NO: 13655 - DNA, 1468 bp, Homo sapiens
ccgtctctactaaaaatacaaaaaattagccgggtgtggtggcaggcacctgtattcccagctactggggaggctgaggcaggagaatggcgtgaacccggaaggtggaggttgcagtgagccgagatcgcgccactgcactccagcctgggggacagagcgagactccgtctcaaaaaaaaaaaaaaaaagttgatgtatggagctgcagcacctttttcccttgccctcctcttaactactttgtcttcccttgcagacccatggggaaatgagaaagaaccaccggctggtaagttggcattgggatttagggaatgataatctgatggaggaagtgtgactttaaccgaccacctccctctcttctcgggcagaaaattggcttcttcaaccagcagtatgcagagcagctgcgcatggaggagacgcccactgagtacctgcagcggggcttcaacctgccctaccaggatgcccgcaagtgcctgggccgcttcggcctggagagtcacgcccacaccatccagatctgcaaactctctggtggtcagaaggcgcgagttgtgtttgctgagctggcctgtcgggaacctgatgtcctcatcttggacgagccaaccaataacctggacatagagtctattgatgctctaggggaggccatcaatgaatacaagggtgctgtgatcgttgtcagccatgatgcccgactcatcacagaaaccaattgccagctgtgggtggtggaggagcagagtgttagccaaatcgatggtgactttgaagactacaagcgggaggtgttggaggccctgggtgaagtcatggtcagccggccccgagagtgagctttccttcccagaagtctcccgagagacatatttgtgtggcctagaagtcctctgtggtctcccctcctctgaagactgcctctggcctgcagctgacctggcaaccattcaggcacatgaaggtggagtgtgaccttgatgtgaccgggatcccactctgattgcatccatttctctgaaagacttgtttgttctgcttctcttcatataactgagctggccttatccttggcatccccctaaacaaacaagaggtgaccaccttattgtgaggttccatccagccaagtttatgtggcctattgtctcaggactctcatcactcagaagcctgcctctgatttaccctacagcttcaggcccagctgccccccagtctttgggtggtgctgttcttttctggtggatttaatgctgactcactggtacaaacagctgttgaagctcagagctggaggtgagcttctgaggcctttgccattatccagcccaagatttggtgcctgcagcctcttgtctggttgaggacttggggcaggaaaggaatgctgctgaacttgaatttccctttacaaggggaagaaataaaggaaaggagttgctgccgacctgtc

SEQ ID NO: 13656 - protein, 143 aa, Homo sapiens
MEETPTEYLQRGFNLPYQDARKCLGRFGLESHAHTIQICKLSGGQKARVVFAELACREPDVLILDEPTNNLDIESIDALGEAINEYKGAVIVVSHDARLITETNCQLWVVEEQSVSQIDGDFEDYKREVLEALGEVMVSRPRE

SEQ ID NO: 13657 - DNA, 1501 bp, Homo sapiens
ccgtctctactaaaaatacaaaaaattagccgggtgtggtggcaggcacctgtattcccagctactggggaggctgaggcaggagaatggcgtgaacccggaaggtggaggttgcagtgagccgagatcgcgccactgcactccagcctgggggacagagcgagactccgtctcaaaaaaaaaaaaaaaaagttgatgtatggagctgcagcacctttttcccttgccctcctcttaactactttgtcttcccttgcagacccatggggaaatgagaaagaaccaccggctggtaagttggcattgggatttagggaatgataatctgatggaggaagtgtgactttaaccgaccacctccctctcttctcgggcagaaaattggcttcttcaaccagcagtatgcagagcagctgcgcatggaggagacgcccactgagtacctgcagcggggcttcaacctgccctaccaggatgcccgcaagtgcctgggccgcttcggcctggagagtcacgcccacaccatccagatctgcaaactctctggtggtcagaaggcgcgagttgtgtttgctgagctggcctgtcgggaacctgatgtcctcatcttggacgagccaaccaataacctggacatagagtctattgatgctctaggggaggccatcaatgaatacaagggtgctgtgatcgttgtcagccatgatgcccgactcatcacagaaaccaattgccagctgtgggtggtggaggagcagagtgttagccaaatcgatggtgactttgaagactacaagcgggaggtgttggaggccctgggtgaagtcatggtcagccggccccgagagtgagctttccttcccagaagtctcccgagagacatatttgtgtggcctagaagtcctctgtggtctcccctcctctgaagactgcctctggcctgcagctgacctggcaaccattcaggcacatgaaggtggagtgtgaccttgatgtgaccgggatcccactctgattgcatccatttctctgaaagacttgtttgttctgcttctcttcatataactgagctggccttatccttggcatccccctaaacaaacaagaggtgaccaccttattgtgaggttccatccagccaagtttatgtggcctattgtctcaggactctcatcactcagaagcctgcctctgatttaccctacagcttcaggcccagctgccccccagtctttgggtggtgctgttcttttctggtggatttaatgctgactcactggtacaaacagctgttgaagctcagagctggaggtgagcttctgaggcctttgccattatccagcccaagatttggtgcctgcagcctcttgtctggttgaggacttggggcaggaaaggaatgctgctgaacttgaatttccctttacaaggggaagaaataaaggaaaggagttgctgccgacctgtcactgtttggagattgatgggagttggaactgtt

SEQ ID NO: 13658 - protein, 143 aa, Homo sapiens; identical to SEQ ID NO: 13656

SEQ ID NO: 13659 - DNA, 1681 bp, Homo sapiens
ccgtctctactaaaaatacaaaaaattagccgggtgtggtggcaggcacctgtattcccagctactggggaggctgaggcaggagaatggcgtgaacccggaaggtggaggttgcagtgagccgagatcgcgccactgcactccagcctgggggacagagcgagactccgtctcaaaaaaaaaaaaaaaaagttgatgtatggagctgcagcacctttttcccttgccctcctcttaactactttgtcttcccttgcagacccatggggaaatgagaaagaaccaccggctggtaagttggcattgggatttagggaatgataatctgatggaggaagtgtgactttaaccgaccacctccctctcttctcgggcagaaaattggcttcttcaaccagcagtatgcagagcagctgcgcatggaggagacgcccactgagtacctgcagcggggcttcaacctgccctaccaggatgcccgcaagtgcctgggccgcttcggcctggagagtcacgcccacaccatccagatctgcaaactctctggtggtcagaaggcgcgagttgtgtttgctgagctggcctgtcgggaacctgatgtcctcatcttggacgagccaaccaataacctggacatagagtctattgatgctctaggggaggccatcaatgaatacaagggtgctgtgatcgttgtcagccatgatgcccgactcatcacagaaaccaattgccagctgtgggtggtggaggagcagagtgttagccaaatcgatggtgactttgaagactacaagcgggaggtgttggaggccctgggtgaagtcatggtcagccggccccgagagtgagctttccttcccagaagtctcccgagagacatatttgtgtggcctagaagtcctctgtggtctcccctcctctgaagactgcctctggcctgcagctgacctggcaaccattcaggcacatgaaggtggagtgtgaccttgatgtgaccgggatcccactctgattgcatccatttctctgaaagacttgtttgttctgcttctcttcatataactgagctggccttatccttggcatccccctaaacaaacaagaggtgaccaccttattgtgaggttccatccagccaagtttatgtggcctattgtctcaggactctcatcactcagaagcctgcctctgatttaccctacagcttcaggcccagctgccccccagtctttgggtggtgctgttcttttctggtggatttaatgctgactcactggtacaaacagctgttgaagctcagagctggaggtgagcttctgaggcctttgccattatccagcccaagatttggtgcctgcagcctcttgtctggttgaggacttggggcaggaaaggaatgctgctgaacttgaatttccctttacaaggggaagaaataaaggaaaggagttgctgccgacctgtcactgtttggagattgatgggagttggaactgttctcagtcttgatttgctttattcagttttctagcagcttttaatagtcccctcttccccactaaatggatcttgtttgcagtcttgctgacagtgtttgctgtttaaggatcataggattcctttcccccaacccttcacgcaaggaaaaagcaaagtgattcataccttctatcttgga

SEQ ID NO: 13660 - protein, 143 aa, Homo sapiens; identical to SEQ ID NO: 13656

SEQ ID NO: 13661 - DNA, 957 bp, Homo sapiens
gcagtgctcagtcatggaattcctcctatgtaggacgagccaaccaataacctggacatagagtctattgatgctctaggggaggccatcaatgaatacaagggtggtaagtcagctgagagtgtgccctcatccctgctccatggggaccaagctgtagtgtccttcactacagaagggcctaggactcccttatttcatgttctgattcccctctttctcctttcttcctgccctctgttgttgctatctttcttcaaagctgtgatcgttgtcagccatgatgcccgactcatcacagaaaccaattgccagctgtgggtggtggaggagcagagtgttagccaaatcgatggtgactttgaagactacaagcgggaggtgttggaggccctgggtgaagtcatggtcagccggccccgagagtgagctttccttcccagaagtctcccgagagacatatttgtgtggcctagaagtcctctgtggtctcccctcctctgaagactgcctctggcctgcagctgacctggcaaccattcaggcacatgaaggtggagtgtgaccttgatgtgaccgggatcccactctgattgcatccatttctctgaaagacttgtttgttctgcttctcttcatataactgagctggccttatccttggcatccccctaaacaaacaagaggtgaccaccttattgtgaggttccatccagccaagtttatgtggcctattgtctcaggactctcatcactcagaagcctgcctctgatttaccaaacagctgttgaagctcagagctggaggtgagcttctgaggcctttgccattatccagcccaagatttggtgcctgcagcctcttgtctggttgaggacttggggcaggaaaggaatgctgctgaacttgaatttccctttacaaggggaagaaataaaggaaaggagttgctgccg

SEQ ID NO: 13662 - protein, 94 aa, Homo sapiens
MMPDSSQKPIASCGWWRSRVLAKSMVTLKTTSGRCWRPWVKSWSAGPESELSFPEVSRETYLCGLEVLCGLPSSEDCLWPAADLATIQAHEGGV

SEQ ID NO: 13663 - DNA, 1170 bp, Homo sapiens
gcagtgctcagtcatggaattcctcctatgtaggacgagccaaccaataacctggacatagagtctattgatgctctaggggaggccatcaatgaatacaagggtggtaagtcagctgagagtgtgccctcatccctgctccatggggaccaagctgtagtgtccttcactacagaagggcctaggactcccttatttcatgttctgattcccctctttctcctttcttcctgccctctgttgttgctatctttcttcaaagctgtgatcgttgtcagccatgatgcccgactcatcacagaaaccaattgccagctgtgggtggtggaggagcagagtgttagccaaatcgatggtgactttgaagactacaagcgggaggtgttggaggccctgggtgaagtcatggtcagccggccccgagagtgagctttccttcccagaagtctcccgagagacatatttgtgtggcctagaagtcctctgtggtctcccctcctctgaagactgcctctggcctgcagctgacctggcaaccattcaggcacatgaaggtggagtgtgaccttgatgtgaccgggatcccactctgattgcatccatttctctgaaagacttgtttgttctgcttctcttcatataactgagctggccttatccttggcatccccctaaacaaacaagaggtgaccaccttattgtgaggttccatccagccaagtttatgtggcctattgtctcaggactctcatcactcagaagcctgcctctgatttaccaaacagctgttgaagctcagagctggaggtgagcttctgaggcctttgccattatccagcccaagatttggtgcctgcagcctcttgtctggttgaggacttggggcaggaaaggaatgctgctgaacttgaatttccctttacaaggggaagaaataaaggaaaggagttgctgccgacctgtcactgtttggagattgatgggagttggaactgttctcagtcttgatttgctttattcagttttctagcagcttttaatagtcccctcttccccactaaatggatcttgtttgcagtcttgctgacagtgtttgctgtttaaggatcataggattcctttcccccaacccttcacgcaaggaaaaagcaaagtgattcataccttcta

SEQ ID NO: 13664 - protein, 94 aa, Homo sapiens; identical to SEQ ID NO: 13662

SEQ ID NO: 13665 - DNA, 1739 bp, Homo sapiens
gcagtgctcagtcatggaattcctcctatgtaggacgagccaaccaataacctggacatagagtctattgatgctctaggggaggccatcaatgaatacaagggtggtaagtcagctgagagtgtgccctcatccctgctccatggggaccaagctgtagtgtccttcactacagaagggcctaggactcccttatttcatgttctgattcccctctttctcctttcttcctgccctctgttgttgctatctttcttcaaagctgtgatcgttgtcagccatgatgcccgactcatcacagaaaccaattgccagctgtgggtggtggaggagcagagtgttagccaaatcgatggtgactttgaagactacaagcgggaggtgttggaggccctgggtgaagtcatggtcagccggccccgagagtgagctttccttcccagaagtctcccgagagacatatttgtgtggcctagaagtcctctgtggtctcccctcctctgaagactgcctctggcctgcagctgacctggcaaccattcaggcacatgaaggtggagtgtgaccttgatgtgaccgggatcccactctgattgcatccatttctctgaaagacttgtttgttctgcttctcttcatataactgagctggccttatccttggcatccccctaaacaaacaagaggtgaccaccttattgtgaggttccatccagccaagtttatgtggcctattgtctcaggactctcatcactcagaagcctgcctctgatttaccctacagcttcaggcccagctgccccccagtctttgggtggtgctgttcttttctggtggatttaatgctgactcactggtacaaacagctgttgaagctcagagctggagggggagtggcatctcctggagcagctacgttgctgtcagaagaggaactgtcatcaacatctccgactcaccccctcctgctcccttgtgtccacagatccaccccattcagagcctgagaatatggtccatacctctgacgtttgagggggatgggtttaaggttgtacttgtcagaaaccaccactgtgctggcattcttcttcacaggcaccaaggatggtgtctccagctctagtcctggggaaagaagcacggtgtgggcagctgaactcaaaccccagacccccgaattttcctcccgttctcacccgcaaatgttcttctagccttgtaaccaaagcttcctctgctagtcttccctcttccttacgattaacataccacacatcaaatgattcccccataaggctctgggtgtgcacatgcccatgaaccctccagaggccagccgccagtcttaccagtggaacggaacttggcatgactgggtgctgtggtgcgaagagacttgggcttctccctcttcttctctggggcctcctcagcccgggtctcagccttcacctctgtcaaaggtcgctcaggaagggtagttcgactttttccttcatctttacgtttcttcttatctttctctgttgtgaaaaaacaaagcagaaaaggattttatttagatgaacactgtcagaggtgaagcagactgggagcacctaaaggccacatcccaataggaaagaaataaatacaaaggataaaggactaaggagcttaccagcaggctgggtactgctctgagagcggatgacagccatccagtcgctgacaaggactgaggccaatttccgga

SEQ ID NO: 13666 - protein, 54 aa, Homo sapiens
MLTHWYKQLLKLRAGGGVASPGAATLLSEEELSSTSPTHPLLLPCVHRSTPFRA

SEQ ID NO: 13667 - DNA, 973 bp, Homo sapiens
agacggagtcttgctctgtcgccatcctggaatgcagtagcgttatctcggctcactgcaacctctgcctcctggattcaagcgattcccctgcctcagcctcccaagtagctgggactacagggggagtggcatctcctggagcagctacgttgctgtcagaagaggaactgtcatcaacatctccgactcaccccctcctgctcccttgtgtccacagatccaccccattcagagcctgagaatatggtccatacctctgacgtttgagggggatgggtttaaggttgtacttgtcagaaaccaccactgtgctggcattcttcttcacaggcaccaaggatggtgtctccagctctagtcctggggaaagaagcacggtgtgggcagctgaactcaaaccccagacccccgaattttcctcccgttctcacccgcaaatgttcttctagccttgtaaccaaagcttcctctgctagtcttccctcttccttacgattaacataccacacatcaaatgattcccccataaggctctgggtgtgcacatgcccatgaaccctccagaggccagccgccagtcttaccagtggaacggaacttggcatgactgggtgctgtggtgcgaagagacttgggcttctccctcttcttctctggggcctcctcagcccgggtctcagccttcacctctgtcaaaggtcgctcaggaagggtagttcgactttttccttcatctttacgtttcttcttatctttctctgttgtgaaaaaacaaagcagaaaaggattttatttagatgaacactgtcagaggtgaagcagactgggagcacctaaaggccacatcccaataggaaagaaataaatacaaaggataaaggactaaggagcttaccagcaggctgggtactgctctgagagcggatgacagccatccagtcgctgacaaggactgaggccaatttccgga

SEQ ID NO: 13668 - protein, 71 aa, Homo sapiens
MVSPALVLGKEARCGQLNSNPRPPNFPPVLTRKCSSSLVTKASSASLPSSLRLTYHTSNDSPIRLWVCTCP

SEQ ID NO: 13669 - DNA, 1169 bp, Homo sapiens
acatgtcaaaccgccctgtctgccgacatttcatgatgaagggcaactgccgctatgagaacaactgtgccttctaccacccgggtgtcaatgggccccccctgccctagggaccatttgcctgccctgttcacacaacccctgtggactgcagcctcgctctttccaccctgttatggcttctgtgaggcccattttcccttttccccagctgatgaggagccggccccctcagttcccacttgcttgggttcctgggggttttctgatcactggtgcgcattgatgtacatattttcctccagtctggggaggagagagactggaaacgttcctggactgctgaagaggagacccagttggcttcactttttgagaagattcgccctgtaccccaaacccctttccagtattacccttaatgcttgagaacctaaagctggttatcctggcgaacacccctacccttctattgcgggtccccacatgcacacagaactctgacacaggatcagctgcacttaagaaatcatcccagctaagttcattattcctcatggggtggggagatgctgaaaggggtattgtatatcccactgcactgagagggctcaatcagctggatttgagttctggaacacacatcatccccacccctcccccagcgtgggctcaccattcttagtcctttctcaagtgggaccttcaactttctgtgaacacccagtctgcgtcctgggtctgctaggttcgatgatggcgaactcgtatctgcatccggtgcaagttttagctggcagaggtgagaccggtggtgctggtctgcctttgccaactatagccagtctggagacttgataaaatacttcagtgagaccagcttctcatcaacttgggcccggcgtgctgggcctgaaagtcacactacatgcactgcctttgggagtcagctcactccctgctcccacctggaaccttgccagcgtgaaggaggcttccaggtacttcaccctgtcaaccacctctgaatccccaccaggcgccttcctgggtggattcaacaagatgattttgccctttcccagttctctccttcactttggcatcagttgttttctatgaaaacagtggattggttgggttttgtgcagggttaatttttttgtatt

SEQ ID NO: 13670 - protein, 124 aa, Homo sapiens
MRTTVPSTTRVSMGPPCPRDHLPALFTQPLWTAASLFPPCYGFCEAHFPFSPADEEPAPSVPTCLGSWGFSDHWCALMYIFSSSLGRRETGNVPGLLKRRPSWLHFLRRFALYPKPLSSITLNA

SEQ ID NO: 13671 - DNA, 4524 bp, Homo sapiens
attctggggttcgtttagaggtttgaattttctcggagaaagacaggccggccacgaggaaaacagaaacaagccgcagcaacatctaagcccttgaaaggatcctgagagaggggggaaagggaaaacagcagccaccagcccaaccacttgtgtcttctgccccttcccacctatcttgcccaccccaccagcccacgctgcttgggacttgaaatctgtggccgaaggaccgtcactacataacttcaaaaataatcaaccaccctcccttcccaaaccacccaaattcactcatccagcgtttacttttttgaatccactcagaacttttttctgcgacccccctccctaaatggagttgggtgggggggaaatgaatactgagttggcctttattttttaaaagactttttgatccaatgaggccccctaaataattgagttttgggtcctggttggttgttttattttttttcctccaaaattttaccccctcccccctgagcccgaggtgctgacgtcgcaaaaaaattggataaaaccaccatcatgggttcgggtcccatagaccccaaagaacttctcaagggcctggacagcttccttaaccgagatggggaagtcaaaagtgtggatgggatttccaagatcttcagtttgatgaaggaagcacgaaagatggtgagtcgatgcacttacttgaacattctcctgcagacccgttcaccagaaatattggtcaaatttattgacgttggcggctacaaacttcttaacaattggctgacgtattcaaagacaaccaacaacattcccctcctccagcaaattctactgaccctgcagcatctaccgctcactgtagaccatctcaagcagaacaacacagctaaactggtgaagcagctgagcaagtcaagtgaggatgaagagctccggaaattggcctcagtccttgtcagcgactggatggctgtcatccgctctcagagcagtacccagcctgctgagaaagataagaagaaacgtaaagatgaaggaaaaagtcgaactacccttcctgagcgacctttgacagaggtgaaggctgagacccgggctgaggaggccccagagaagaagagggagaagcccaagtctcttcgcaccacagcacccagtcatgccaagttccgttccactggactagagctggagacaccatccttggtgcctgtgaagaagaatgccagcacagtggtggtttctgacaagtacaaccttaaacccatccccctcaaacgtcagagcaacgtagctgctccaggagatgccactccccctgcagagaagaaatacaagccactcaacacaacacctaatgccaccaaagagatcaaagtgaagatcatcccgccacagcctatggagggcctgggctttctggatgctcttaattcagcccctgttccaggcatcaaaattaagaagaaaaaaaaagtactgtcacctacggctgccaagccaagcccctttgaagggaaaacgagcacagaaccaagcacagccaaaccttcttccccagaaccagcaccaccttctgaggcaatggacgcagaccgtccaggcaccccggttccccctgttgaagtcccggagctcatggatacagcctctttggagccaggagctctggatgccaagccagtggagagtcctggagatcctaaccaactgacccggaaaggcaggaagaggaaaagtgtgacatggcctgaggaaggcaaactgagagaatatttctattttgaattggatgaaactgaacgagtaaatgtgaataagatcaaggactttggtgaggcggctaagcgagagatactgtcagaccgacatgcatttgagacagcgcggcgtctgagccatgataacatggaggagaaggtgccctgggtgtgcccccggcccctggttctgccctcacctcttgtcacccctggaagcaatagtcaggagcgatatatccaggctgagcgggagaagggaatccttcaggagctcttcctgaacaaggagagtcctcatgagcctgatcctgagccctacgagcccataccccctaaactcatccccctagatgaggagtgttccatggatgagactccgtatgttgagactctggaacctggggggtcaggtggctcacctgatggggcaggaggctccaagttgcctccagttctggccaatcttatgggaagcatgggtgctggaaagggcccccaaggccctggaggaggaggcattaatgtccaagagatcctcacctccatcatgggtagcccaaacagtcatccttcagaggaactactgaaacaaccagactattcggacaagatcaagcagatgctggtgccacatggactcctaggccctggcccaatagccaatggtttcccaccagggggtcctgggggccccaagggcatgcagcactttccccctggacctgggggacctatgccaggtccccatggaggccctggtgggccagtgggtccacgtcttctgggtcctccaccccctccccggggaggtgatcccttctgggatggcccgggcgaccctatgcggggtggcccaatgcgggggggtccaggaccaggtcctggaccataccatagaggccgaggtggccgaggaggaaacgaacctcctcctcctcctcctccattccgaggcgccagaggaggtcgctctggaggaggacccccaaatggacgagggggccctggtgggggcatggttggaggtggtgggcatcgtcctcacgaaggccctggtgggggcatgggcaacagcagtggacatcgtccccacgaaggccctggcggtggcatgggaagtgggcatcgcccccatgaaggccctggtggtagcatgggtgggggtggaggacatcgtccccacgaaggccctggcggtggcatcagtggtggcagtggccatcgtccccatgaaggccctggcggaggaatgggtgccggtggtggacatcgcccccacgaaggccctggcggaagcatgggtggaagtggtggacatcgtccccatgaaggccctggacacggggggccccatggccaccggcctcatgatgtccctggtcaccgaggccatgaccatcgagggccgccacctcatgagcaccgtggccatgatggtcctggccacgggggagggggccaccgagggcacgatggaggccacagccatggaggagacatgtcaaaccgccctgtctgccgacatttcatgatgaagggcaactgccgctatgagaacaactgtgccttctaccacccgggtgtcaatgggccccccctgccctagggaccatttgcctgccctgttcacacaacccctgtggactgcagcctcgctctttccaccctgttatggcttctgtgaggcccattttcccttttccccagctgatgaggagccggccccctcagttcccacttgcttgggttcctgggggttttctgatcactggtgcgcattgatgtacatattttcctccagtctggggaggagagagactggaaacgttcctggactgctgaagaggagacccagttggcttcactttttgagaagattcgccctgtaccccaaacccctttccagtattacccttaatgcttgagaacctaaagctggttatcctggcgaacacccctacccttctattgcgggtccccacatgcacacagaactctgacacaggatcagctgcacttaagaaatcatcccagctaagttcattattcctcatggggtggggagatgctgaaaggggtattgtatatcccactgcactgagagggctcaatcagctggatttgagttctggaacacacatcatccccacccctcccccagcgtgggctcaccattcttagtcctttctcaagtgggaccttcaactttctgtgaacacccagtctgcgtcctgggtctgctaggttcgatgatggcgaactcgtatctgcatccggtgcaagttttagctggcagaggtgagaccggtggtgctggtctgcctttgccaactatagccagtctggagacttgataaaatacttcagtgagaccagcttctcatcaacttgggcccggcgtgctgggcctgaaagtcacactacatgcactgcctttgggagtcagctcactccctgctcccacctggaaccttgccagcgtgaaggaggcttccaggtacttcaccctgtcaaccacctctgaatccccaccaggcgccttcctgggtggattcaacaagatgattttgccctttcccagttctctccttcactttggcatcagttgttttctatgaaaacagtggattggttgggttttgtgcagggtcttgggttagagccaaaatggatttgaggatgagtatttttttttttggttttgtatattttgtacattaataataaacagtggaaagagaagcagcttatttaa

SEQ ID NO: 13672 - protein, 940 aa, Homo sapiens; identical to SEQ ID NO: 1431

SEQ ID NO: 13673 - DNA, 1061 bp, Homo sapiens
gccttccctttcacgcttccgtcctgacgcaaacgtggggccgccttccgcactgcgggcttgtccttggccctgccctactcagtttcctgaagcatgcgcagttgcctttccgtcaattcctgtcctgggcgtacgtcaagatggcggcgtctgtattaaacaccgtgctgaggcggcttcctatgctatctctcttccgaggttctcacagagttcaggttcccctccagactctttgcaccaaagctccctctgaggaagattctttgtcctcagttcccatttctccttataaggatgagccctggaaatatctggaatcagaagaataccaggagcgatatggttctcgccccgtctgggctgactaccgccgcaaccacaagggtggtgtacccccacagcggactcggaagacatgtattcgtcggaataaagttgttgggaatccctgccccatctgtcgagatcacaagttgcatgttgactttaggaacgtgaagctcttggagcaatttgtctgcgcccacacgggtatcatcttctatgctccatacacaggagtctgtgtgaagcagcacaagcggttgacccaggccatccagaaagccagggatcatggtctcctcatttaccacatcccccaggttgaaccacgggaccttgacttcagtacctctcatggggctgtgagtgctactccgccagcccccaccctggtctcaggtgacccctggtacccatggtacaactggaaacagccaccggagagagaactgtctcgccttcgccggctttaccagggtcatctccaagaagagagtggccccccacctgagtcaatgcccaagatgccccctagaacaccagcggaagcctcctccactgggcagacaggccctcagagtgctctgtaggagctgtagactgggaagagaggccaggcgtggtggctcactcctgtaatcccagcactttgggaagccaaggtgggctgatcacttgatcccaggagtttgagaccagcctgggcaccatggtgaaacctcgtctttacc

SEQ ID NO: 13674 - protein, 258 aa, Homo sapiens; identical to SEQ ID NO: 1433

SEQ ID NO: 13675 - DNA, 1520 bp, Homo sapiens
gccttccctttcacgcttccgtcctgacgcaaacgtggggccgccttccgcactgcgggcttgtccttggccctgccctactcagtttcctgaagcatgcgcagttgcctttccgtcaattcctgtcctgggcgtacgtcaagatggcggcgtctgtattaaacaccgtgctgaggcggcttcctatgctatctctcttccgaggttctcacagagttcaggttcccctccagactctttgcaccaaagctccctctgaggaagattctttgtcctcagttcccatttctccttataaggatgagccctggaaatatctggaatcagaagaataccaggagcgatatggttctcgccccgtctgggctgactaccgccgcaaccacaagggtggtgtacccccacagcggactcggaagacatgtattcgtcggaataaagttgttgggaatccctgccccatctgtcgagatcacaagttgcatgttgactttaggaacgtgaagctcttggagcaatttgtctgcgcccacacgggtatcatcttctatgctccatacacaggagtctgtgtgaagcagcacaagcggttgacccaggccatccagaaagccagggatcatggtctcctcatttaccacatcccccaggttgaaccacgggaccttgacttcagtacctctcatggggctgtgagtgctactccgccagcccccaccctggtctcaggtgacccctggtacccatggtacaactggaaacagccaccggagagagaactgtctcgccttcgccggctttaccagggtcatctccaagaagagagtggccccccacctgagtcaatgcccaagatgccccctagaacaccagcggaagcctcctccactgggcagacaggccctcagagtgctctgtaggagctgtagactgggaagagaggccaggcgtggtggctcactcctgtaatcccagcactttgggaagccaaggtgggctgatcacttgatcccaggagtttgagaccagcctgggcaccatggtgaaacctcgtctttaccaaaaaatacaaaaattagctgggtgtggtggtgcacacctgtagtctcaactattggggaggctaaggtaggatcacttgatcccaggaggcggaggttgcagtgagttgcagtcacacccctgcactccagcctgggtgacagctagaccctgtctcaaaaaaaaaaaaaaagactgggaagagagctagagggactaggagataatgtgtatgtaggtttatgtgatgggatatcaccctgaagagttgtgtcttttgtggccagtgacaaatccaggaaatgaatgttgctgatagggataaatcttgaggctgagggcgggtggtacagatgtgtatgggaaaccccaacccctatatattgtaaatagatgggctgggctaaacattgttgccgtttcatacttctaccaactcagcttttacacaataaagctctactgtctctggtttgctt

SEQ ID NO: 13676 - protein, 258 aa, Homo sapiens; identical to SEQ ID NO: 1433

SEQ ID NO: 13677 - DNA, 1183 bp, Homo sapiens
gcctttccgtcaattcctgtcctgggcgtacgtcaagatggcggcgtctgtattaaacaccgtgctgaggcggcttcctatgctatctctcttccgaggttctcacagagttcaggttcccctccagactctttgcaccaaagctccctctgaggaagattctttgtcctcagttcccatttctccttataaggatgagccctggaaatatctggaatcagaagaataccaggagcgatatggttctcgccccgtctgggctgactaccgccgcaaccacaagggtggtgtacccccacagcggactcggaagacatgtattcgtcggaataaagttgttgggaatccctgccccatctgtcgagatcacaagttgcatgttgactttaggaacgtgaagctcttggagcaatttgtctgcgcccacacgggtatcatcttctatgccatccagaaagccagggatcatggtctcctcatttaccacagtggccccccacctgagtcaatgcccaagatgccccctagaacaccagcggaagcctcctccactgggcagacaggccctcagagtgctctgtaggagctgtagactgggaagagaggccaggcgtggtggctcactcctgtaatcccagcactttgggaagccaaggtgggctgatcacttgatcccaggagtttgagaccagcctgggcaccatggtgaaacctcgtctttaccaaaaaatacaaaaattagctgggtgtggtggtgcacacctgtagtctcaactattggggaggctaaggtaggatcacttgatcccaggaggcggaggttgcagtgagttgcagtcacacccctgcactccagcctgggtgacagctagaccctgtctcaaaaaaaaaaaaaaagactgggaagagagctagagggactaggagataatgtgtatgtaggtttatgtgatgggatatcaccctgaagagttgtgtcttttgtggccagtgacaaatccaggaaatgaatgttgctgatagggataaatcttgaggctgagggcgggtggtacagatgtgtatgggaaaccccaacccctatatattgtaaatagatgggctgggctaaacattgttgccgtttcatacttctaccaactcagcttttacacaataaagctctactgtctctggtttgctt

SEQ ID NO: 13678 - protein, 181 aa, Homo sapiens
MAASVLNTVLRRLPMLSLFRGSHRVQVPLQTLCTKAPSEEDSLSSVPISPYKDEPWKYLESEEYQERYGSRPVWADYRRNHKGGVPPQRTRKTCIRRNKVVGNPCPICRDHKLHVDFRNVKLLEQFVCAHTGIIFYAIQKARDHGLLIYHSGPPPESMPKMPPRTPAEASSTGQTGPQSAL

SEQ ID NO: 13679 - DNA, 1347 bp, Homo sapiens
gcctttccgtcaattcctgtcctgggcgtacgtcaagatggcggcgtctgtattaaacaccgtgctgaggcggcttcctatgctatctctcttccgaggttctcacagagttcaggttcccctccagactctttgcaccaaagctccctctgaggaagattctttgtcctcagttcccatttctccttataaggatgagccctggaaatatctggaatcagaagaataccaggagcgatatggttctcgccccgtctgggctgactaccgccgcaaccacaagggtggtgtacccccacagcggactcggaagacatgtattcgtcggaataaagttgttgggaatccctgccccatctgtcgagatcacaagttgcatgttgactttagggagtctgtgtgaagcagcacaagcggttgacccaggccatccagaaagccagggatcatggtctcctcatttaccacatcccccaggttgaaccacgggaccttgacttcagtacctctcatggggctgtgagtgctactccgccagcccccaccctggtctcaggtgacccctggtacccatggtacaactggaaacagccaccggagagagaactgtctcgccttcgccggctttaccagggtcatctccaagaagagagtggccccccacctgagtcaatgcccaagatgccccctagaacaccagcggaagcctcctccactgggcagacaggccctcagagtgctctgtaggagctgtagactgggaagagaggccaggcgtggtggctcactcctgtaatcccagcactttgggaagccaaggtgggctgatcacttgatcccaggagtttgagaccagcctgggcaccatggtgaaacctcgtctttaccaaaaaatacaaaaattagctgggtgtggtggtgcacacctgtagtctcaactattggggaggctaaggtaggatcacttgatcccaggaggcggaggttgcagtgagttgcagtcacacccctgcactccagcctgggtgacagctagaccctgtctcaaaaaaaaaaaaaaagactgggaagagagctagagggactaggagataatgtgtatgtaggtttatgtgatgggatatcaccctgaagagttgtgtcttttgtggccagtgacaaatccaggaaatgaatgttgctgatagggataaatcttgaggctgagggcgggtggtacagatgtgtatgggaaaccccaacccctatatattgtaaatagatgggctgggctaaacattgttgccgtttcatacttctaccaactcagcttttacacaataaagctctactgtctctggtttgctt

SEQ ID NO: 13680 - protein, 121 aa, Homo sapiens
MAASVLNTVLRRLPMLSLFRGSHRVQVPLQTLCTKAPSEEDSLSSVPISPYKDEPWKYLESEEYQERYGSRPVWADYRRNHKGGVPPQRTRKTCIRRNKVVGNPCPICRDHKLHVDFRESV

SEQ ID NO: 13681 - DNA, 1191 bp, Homo sapiens
gcctttccgtcaattcctgtcctgggcgtacgtcaagatggcggcgtctgtattaaacaccgtgctgaggcggcttcctatgctatctctcttccgaggttctcacagagttcaggttcccctccagactctttgcaccaaagctccctctgaggaagattctttgtcctcagttcccatttctccttataaggatgagccctggaaattatcatcttctatgctccatacacaggagtctgtgtgaagcagcacaagcggttgacccaggccatccagaaagccagggatcatggtctcctcatttaccacatcccccaggttgaaccacgggaccttgacttcagtacctctcatggggctgtgagtgctactccgccagcccccaccctggtctcaggtgacccctggtacccatggtacaactggaaacagccaccggagagagaactgtctcgccttcgccggctttaccagggtcatctccaagaagagagtggccccccacctgagtcaatgcccaagatgccccctagaacaccagcggaagcctcctccactgggcagacaggccctcagagtgctctgtaggagctgtagactgggaagagaggccaggcgtggtggctcactcctgtaatcccagcactttgggaagccaaggtgggctgatcacttgatcccaggagtttgagaccagcctgggcaccatggtgaaacctcgtctttaccaaaaaatacaaaaattagctgggtgtggtggtgcacacctgtagtctcaactattggggaggctaaggtaggatcacttgatcccaggaggcggaggttgcagtgagttgcagtcacacccctgcactccagcctgggtgacagctagaccctgtctcaaaaaaaaaaaaaaagactgggaagagagctagagggactaggagataatgtgtatgtaggtttatgtgatgggatatcaccctgaagagttgtgtcttttgtggccagtgacaaatccaggaaatgaatgttgctgatagggataaatcttgaggctgagggcgggtggtacagatgtgtatgggaaaccccaacccctatatattgtaaatagatgggctgggctaaacattgttgccgtttcatacttctaccaactcagcttttacacaataaagctctactgtctctggtttgctt

SEQ ID NO: 13682 - protein, 69 aa, Homo sapiens
MAASVLNTVLRRLPMLSLFRGSHRVQVPLQTLCTKAPSEEDSLSSVPISPYKDEPWKLSSSMLHTQESV

SEQ ID NO: 13683 - DNA, 592 bp, Homo sapiens
cctgtcctgggcgtacgtcaagatggcggcgtctgtattaaacaccgtgctgaggcggcttcctatgctatctctcttccgaggttctcacagagttcaggttcccctccagactctttgcaccaaagctccctctgaggaagattctttgtcctcagttcccatttctccttataaggatgagccctggaaatatctggaatcagaagaataccaggagcgatatggttctcgccccgtctgggctgactaccgccgcaaccacaagggtggtgtacccccacagcggactcggaagacatgtattcgtcggaataaagttgttgggaatccctgccccatctgtcgagatcacaagttgcatgttgactttagggtaaggagagtcttttctttttagggtaagaaaaataaagattaggggctgggcgcggtggctcacgcctgtaatcccagcactttgggaggccaaggcaggtggatcatgaggtcaggagatcaagaccatcctggctaacacggtgaaaccccgtctctactaaaaatacaaaaaattagccggttgtggtggcgggcgcctgtagtcccagct

SEQ ID NO: 13684 - protein, 125 aa, Homo sapiens
MAASVLNTVLRRLPMLSLFRGSHRVQVPLQTLCTKAPSEEDSLSSVPISPYKDEPWKYLESEEYQERYGSRPVWADYRRNHKGGVPPQRTRKTCIRRNKVVGNPCPICRDHKLHVDFRVRRVFSF

SEQ ID NO: 13685 - DNA, 1612 bp, Homo sapiens
gggcgtacgtcaagatggcggcgtctgtattaaacaccgtgctgaggcggcttcctatgctatctctcttccgaggttctcacagagttcaggttcccctccagactctttgcaccaaagctccctctgaggaagattctttgtcctcagttcccatttctccttataaggatgagccctggaaatatctggaatcagaaggtacctctaaagggggaaagggagggtcagataggatttgagataagtggacagagccacccactacactcccacccaggaataacttgtatgatctttcatttcagaataccaggagcgatatggttctcgccccgtctgggctgactaccgccgcaaccacaagggtggtgtacccccacagcggactcggaagacatgtattgtgagtttctgagagtgggatgtggagtgcggggaggccacaagtaacagtaacagcagcactttttctgacgtgtttgaacatccttaactgctgttttttttctctctacagcgtcggaataaagttgttgggaatccctgccccatctgtcgagatcacaagttgcatgttgactttaggaacgtgaagctcttggagcaatttgtctgcgcccacacgggtatcatcttctatgctccatacacaggagtctgtgtgaagcagcacaagcggttgacccaggccatccagaaagccagggatcatggtctcctcatttaccacatcccccaggttgaaccacgggaccttgacttcagtacctctcatggggctgtgagtgctactccgccagcccccaccctggtctcaggtgacccctggtacccatggtacaactggaaacagccaccggagagagaactgtctcgccttcgccggctttaccagggtcatctccaagaagagagtggccccccacctgagtcaatgcccaagatgccccctagaacaccagcggaagcctcctccactgggcagacaggccctcagagtgctctgtaggagctgtagactgggaagagaggccaggcgtggtggctcactcctgtaatcccagcactttgggaagccaaggtgggctgatcacttgatcccaggagtttgagaccagcctgggcaccatggtgaaacctcgtctttaccaaaaaatacaaaaattagctgggtgtggtggtgcacacctgtagtctcaactattggggaggctaaggtaggatcacttgatcccaggaggcggaggttgcagtgagttgcagtcacacccctgcactccagcctgggtgacagctagaccctgtctcaaaaaaaaaaaaaaagactgggaagagagctagagggactaggagataatgtgtatgtaggtttatgtgatgggatatcaccctgaagagttgtgtcttttgtggccagtgacaaatccaggaaatgaatgttgctgatagggataaatcttgaggctgagggcgggtggtacagatgtgtatgggaaaccccaacccctatatattgtaaatagatgggctgggctaaacattgttgccgtttcatacttctaccaactcagcttttacacaataaagctctactgtctctggtttgctt

SEQ ID NO: 13686 - protein, 75 aa, Homo sapiens
MAASVLNTVLRRLPMLSLFRGSHRVQVPLQTLCTKAPSEEDSLSSVPISPYKDEPWKYLESEGTSKGGKGGSDRI

SEQ ID NO: 13687 - DNA, 1322 bp, Homo sapiens
agattgccttccccaactctgaaatctcttttccctttattgaatctttgtggattgttcaactcaaccctctaattaaccacacttgcccattaaattgtgttctccctgtcttggaggttttaccattaaatggcttctctatagtggctagaccctcctaaatctttatcccagctctccaaaagatgggggagattctttcctttgggcagatggggaaactgaggtccatggaggggtcaggggaaaggggtcattaggtaaagccaatccttcccaatctacccctctgtcaccatatggaagcagttgtgttctattatttactgtgccttaaagaacaagatatttttctccccacaggagtctgtgtgaagcagcacaagcggttgacccaggccatccagaaagccagggatcatggtctcctcatttaccacatcccccaggttgaaccacgggaccttgacttcagtacctctcatggggctgtgagtgctactccgccagcccccaccctggtctcaggtgacccctggtacccatggtacaactggaaacagccaccggagagagaactgtctcgccttcgccggctttaccagggtcatctccaagaagagagtggccccccacctgagtcaatgcccaagatgccccctagaacaccagcggaagcctcctccactgggcagacaggccctcagagtgctctgtaggagctgtagactgggaagagaggccaggcgtggtggctcactcctgtaatcccagcactttgggaagccaaggtgggctgatcacttgatcccaggagtttgagaccagcctgggcaccatggtgaaacctcgtctttaccaaaaaatacaaaaattagctgggtgtggtggtgcacacctgtagtctcaactattggggaggctaaggtaggatcacttgatcccaggaggcggaggttgcagtgagttgcagtcacacccctgcactccagcctgggtgacagctagaccctgtctcaaaaaaaaaaaaaaagactgggaagagagctagagggactaggagataatgtgtatgtaggtttatgtgatgggatatcaccctgaagagttgtgtcttttgtggccagtgacaaatccaggaaatgaatgttgctgatagggataaatcttgaggctgagggcgggtggtacagatgtgtatgggaaaccccaacccctatatattgtaaatagatgggctgggctaaacattgttgccgtttcatacttctaccaactcagcttttacacaataaagctctactgtctctggtttgctt

SEQ ID NO: 13688 - protein, 139 aa, Homo sapiens
MEAVVFYYLLCLKEQDIFLPTGVCVKQHKRLTQAIQKARDHGLLIYHIPQVEPRDLDFSTSHGAVSATPPAPTLVSGDPWYPWYNWKQPPERELSRLRRLYQGHLQEESGPPPESMPKMPPRTPAEASSTGQTGPQSAL

SEQ ID NO: 13689 - DNA, 2217 bp, Homo sapiens
agtgacgtcgtgtggggcgggtccgaccgcgcacaatgggccatggagttcccgttcgatgtggacgcgctgttcccggagcggatcacggtgctggaccagcacctgaggcccccagcccgccgacccggaaccacaacgccggcccgtgttgatctacagcagcaaattatgaccattatagatgaactgggcaaggcttctgccaaggcccagaatctttccgctcctatcactagtgcatcaaggatgcagagtaaccgccatgttgtttatattctcaaagacagttcagcccgaccggctggaaaaggagccattattggtttcatcaaagttggatacaagaagctctttgtactggatgatcgtgaggctcataatgaggtagaaccactttgcatcctggacttttacatccatgagtctgtgcaacgccatggccatgggcgagaactcttccagtatatgttgcagaaggagcgagtggaaccgcaccaactggcaattgaccgaccctcacagaagctgctgaaattcctgaataagcactacaatctggagaccacagtcccacaggtgaacaactttgtgatctttgaaggcttctttgcccatcaacatcggccccctgctccctctctgagggcaactcgacactctcgtgctgctgcagtcgatcccacgcccgctggtaaagcctgtattgaaggggtggaactgtagtgcagtgatggctacttactctagatgccacggggtacagtgccatctgtgggcaattttggaaaattctaaagcaacccaagtctccagcagtcatgactgtttgcctttgccctcatgggagctcagtgcattttatatttggcaagacttttaactaagcaagctcattgggagcctgtttgacagctgatatcaatggaccctcttgccagttcaggtccgtcaacataggccagagtcaggctcctttgtaaaccccaggcttctgttagccagtgagggacaggctggtgcaaacagcccttccatttgcagtcacagaatagtgacacaaatggcccaaaatttaaatgttacttttagaagataacactcagagtttataacatttccaaccagataatgaaattgatatggagaaaccaaacctcagaggcactaaaatgctgtccagattccccatcccatatacacacatacacacacacacacacacacaaacacacttactgacagtctgagccccactccttcctcttcctcaccacctccaccttaccaacttctgacagctgtacagtgcttgcttgcacagaagagcccccttcctgagctggctctgtggccaggaaaggatgtaaccaccatccaaacagcagtctgtaaccagctatgagcatcacagtgtcaggcactgagaggcacctcaactcgctttggtttccaaggcttctcccatttagcttgttcagaaccacaggctgtgagagggactgagggccaacaaggatggtgaggtctcaggcctgcaggggagggtgctgtggataaagcttaagtgaatttgctgagaagtctttcatttgccacacatacatgatggagaatctcttgagagggaaagccgggagcaagtagagaagtgaggagggggaggctgaactttggacattacatcagcctcctgcttactctgatagctccctttcagatgcccatatttattttcttttttttttttaacctaataaaacttcagtctcttcccattttcgtataggaaggagagattgtgccctccttccaaacctcccctgacctctccagagcaattcctgattaaccaagggctttgtccatctcatccagaggaacccagggtcctcgttggcccggctgggaccattccactgccccagaataccagggggccatgacagcacccactgacagtaagagctcacttcccttggctgcccttctcctgcatctcccaggcccccagagtctccccttcgatctttctccctagctctgtgtttggcctactccttctggctttcctcaacagtgttccacattcccctcaaattcccttttggtgtgctggcattgccatggtgctgctcctgcaagttctcaggaggaactgtggtgtcagggagcagaggtttggggttggggtatagtggctgggaggaggggtgc

SEQ ID NO: 13690 - protein, 227 aa, Homo sapiens [sequence omitted]

SEQ ID NO: 13691 - DNA, 2610 bp, Homo sapiens
agtgacgtcgtgtggggcgggtccgaccgcgcacaatgggccatggagttcccgttcgatgtggacgcgctgttcccggagcggatcacggtgctggaccagcacctgaggcccccagcccgccgacccggaaccacaacgccggcccgtgttgatctacagcagcaaattatgaccattatagatgaactgggcaaggcttctgccaaggcccagaatctttccgctcctatcactagtgcatcaaggatgcagagtaaccgccatgttgtttatattctcaaagacagttcagcccgaccggctggaaaaggagccattattggtttcatcaaagttggatacaagaagctctttgtactggatgatcgtgaggctcataatgaggtagaaccactttgcatcctggacttttacatccatgagtctgtgcaacgccatggccatgggcgagaactcttccagtatatgttgcagaaggagcgagtggaaccgcaccaactggcaattgaccgaccctcacagaagctgctgaaattcctgaataagcactacaatctggagaccacagtcccacaggtgaacaactttgtgatctttgaaggcttctttgcccatcaacatcctccagcaaggaagctgccacccaagagagcagagggagacatcaagccatactcctctagtgaccgagaatttctgaaggtagctgtggagcctccttggcccctaaacagggcccctcgccgcgccacacctccagcccacccacccccccgctccagcagcctgggaaactcaccagaacgaggtcccctccgcccctttgtgccagagcaggagctgctgcgttccttgcgcctctgccccccacaccctaccgcccgccttctgttggctgctgaccctgggggcagcccagctcaacgtcgtcgcaccaggtaataggagttgaagggctaaggagcctcacagctataaaagaggatgttagaaatggcaaagggcaatttgaatccatcagagagatggatcaataagatgggtggcttggggggggtcctgaaacctttcaagaaaaatatttgtgcaagtgatctgggaaaaaaatgcagtgaaggagcagaataggaccttatatggagcctagggaccctggctttaatgtgagagttatgtggaatggtaggaagaacaccgagatccatcgagttgggggaacagagccttctaagattgggaaaatcttcgcttaatacttgctggggaaggggcagtgtctgacagagagtgggaagccactggcttgtgtgccaagagtccatcgcagcaggcagggagtgggcatttcctttatttctctccctttctcttcacctctgacttctctgtttttctctcccccgccccccgccatttcccatctcccttcctcccatccataacatccttccacagctcccttccccgctctgaggagagtcgatactaacagctaccctctccctgccctgggagacctggggtgggcagggaacccctccctgagaacctcagacccactcttccattgcatcctgtaggacccagtggaacctgacagagcccataggattccctcttctactttcttagacagcagggatgtcagggtctcaaactgcctaacactttgtagcttttcttaacacaaaagcaccccttctctcctaacttgggctctgaatactttcccaacaggaagtctgatctgttgccagacttcttggttagatggctcatacatttatctagagaagcacactcttgcttgctgtcaaactttagaccaccatggaaggtctaagggcatcctgtgccagggaaactttttaaggaattttatctatgggataaaccccatattccctctagtgtctactggtggctctaatactgctttgtgctgcctgccacacttgccctttgagcctgcgaatggccgctagtgagcaagctctgcttcagagcagtctagttaggtagaacagggacttaccagcttcccaaagggatctactcaccattgccaaactcttcatttccacattttgtgtaggtgtcagggaaccccaaactggtgttgctttggggtctctaaaggagattggctgacaccaccatttcccccagatccagattctctgagggaggttgtttcttgagagtagatccagagtgtcaaggatctgttagatcctggaatcccttcttgcatccatccctccctggtagctaggtcccgatatactcctgtcttgtgagattgtcgagatgagatgggggaccactcttcctctgtccttcctctctcctttcctccatagcaaggacgaccttccctgctccatgcccagagtatagctagatcccttcccctccctaccctctgaatgtgtgctagatcaggtgccccactgtgtttcctgaaatccttgggagccggatctccccatctcccctactcactcttcccttttcttctctcagtgttgtctgaataaagtgtgaaatcttttgtgttttctaaattgacattttcaatgaaaaaaagaatcacaaaaaaaaaag

SEQ ID NO: 13692 - protein, 300 aa, Homo sapiens
MEFPFDVDALFPERITVLDQHLRPPARRPGTTTPARVDLQQQIMTIIDELGKASAKAQNLSAPITSASRMQSNRHVVYILKDSSARPAGKGAIIGFIKVGYKKLFVLDDREAHNEVEPLCILDFYIHESVQRHGHGRELFQYMLQKERVEPHQLAIDRPSQKLLKFLNKHYNLETTVPQVNNFVIFEGFFAHQHPPARKLPPKRAEGDIKPYSSSDREFLKVAVEPPWPLNRAPRRATPPAHPPPRSSSLGNSPERGPLRPFVPEQELLRSLRLCPPHPTARLLLAADPGGSPAQRRRTR

SEQ ID NO: 13693 - DNA, 2679 bp, Homo sapiens
agtgacgtcgtgtggggcgggtccgaccgcgcacaatgggccatggagttcccgttcgatgtggacgcgctgttcccggagcggatcacggtgctggaccagcacctgaggcccccagcccgccgacccggaaccacaacgccggcccgtgttgatctacagcagcaaattatgaccattatagatgaactgggcaaggcttctgccaaggcccagaatctttccgctcctatcactagtgcatcaaggatgcagagtaaccgccatgttgtttatattctcaaagacagttcagcccgaccggctggaaaaggagccattattggtttcatcaaagttggatacaagaagctctttgtactggatgatcgtgaggctcataatgaggtagaaccactttgcatcctggacttttacatccatgagtctgtgcaacgccatggccatgggcgagaactcttccagtatatgttgcagaaggagcgagtggaaccgcaccaactggcaattgaccgaccctcacagaagctgctgaaattcctgaataagcactacaatctggagaccacagtcccacaggtgaacaactttgtgatctttgaaggcttctttgcccatcaacatcggccccctgctccctctctgagggcaactcgacactctcgtgctgctgcagtcgatcccacgcccgctgctccagcaaggaagctgccacccaagagagcagagggagacatcaagccatactcctctagtgaccgagaatttctgaaggtagctgtggagcctccttggcccctaaacagggcccctcgccgcgccacacctccagcccacccacccccccgctccagcagcctgggaaactcaccagaacgaggtcccctccgcccctttgtgccagagcaggagctgctgcgttccttgcgcctctgccccccacaccctaccgcccgccttctgttggctgctgaccctgggggcagcccagctcaacgtcgtcgcaccaggtaataggagttgaagggctaaggagcctcacagctataaaagaggatgttagaaatggcaaagggcaatttgaatccatcagagagatggatcaataagatgggtggcttggggggggtcctgaaacctttcaagaaaaatatttgtgcaagtgatctgggaaaaaaatgcagtgaaggagcagaataggaccttatatggagcctagggaccctggctttaatgtgagagttatgtggaatggtaggaagaacaccgagatccatcgagttgggggaacagagccttctaagattgggaaaatcttcgcttaatacttgctggggaaggggcagtgtctgacagagagtgggaagccactggcttgtgtgccaagagtccatcgcagcaggcagggagtgggcatttcctttatttctctccctttctcttcacctctgacttctctgtttttctctcccccgccccccgccatttcccatctcccttcctcccatccataacatccttccacagctcccttccccgctctgaggagagtcgatactaacagctaccctctccctgccctgggagacctggggtgggcagggaacccctccctgagaacctcagacccactcttccattgcatcctgtaggacccagtggaacctgacagagcccataggattccctcttctactttcttagacagcagggatgtcagggtctcaaactgcctaacactttgtagcttttcttaacacaaaagcaccccttctctcctaacttgggctctgaatactttcccaacaggaagtctgatctgttgccagacttcttggttagatggctcatacatttatctagagaagcacactcttgcttgctgtcaaactttagaccaccatggaaggtctaagggcatcctgtgccagggaaactttttaaggaattttatctatgggataaaccccatattccctctagtgtctactggtggctctaatactgctttgtgctgcctgccacacttgccctttgagcctgcgaatggccgctagtgagcaagctctgcttcagagcagtctagttaggtagaacagggacttaccagcttcccaaagggatctactcaccattgccaaactcttcatttccacattttgtgtaggtgtcagggaaccccaaactggtgttgctttggggtctctaaaggagattggctgacaccaccatttcccccagatccagattctctgagggaggttgtttcttgagagtagatccagagtgtcaaggatctgttagatcctggaatcccttcttgcatccatccctccctggtagctaggtcccgatatactcctgtcttgtgagattgtcgagatgagatgggggaccactcttcctctgtccttcctctctcctttcctccatagcaaggacgaccttccctgctccatgcccagagtatagctagatcccttcccctccctaccctctgaatgtgtgctagatcaggtgccccactgtgtttcctgaaatccttgggagccggatctccccatctcccctactcactcttcccttttcttctctcagtgttgtctgaataaagtgtgaaatcttttgtgttttctaaattgacattttcaatgaaaaaaagaatcacaaaaaaaaaag

SEQ ID NO: 13694 - protein, 323 aa, Homo sapiens; identical to SEQ ID NO: 1437

SEQ ID NO: 13695 - DNA, 2093 bp, Homo sapiens
agtgacgtcgtgtggggcgggtccgaccgcgcacaatgggccatggagttcccgttcgatgtggacgcgctgttcccggagcggatcacggtgctggaccagcacctgaggcccccagcccgccgacccggaaccacaacgccggcccgtgttgatctacagcagcaaattatgaccattatagatgaactgggcaaggcttctgccaaggcccagaatctttccgctcctatcactagtgcatcaaggatgcagagtaaccgccatgttgtttatattctcaaagacagttcagcccgaccggctggaaaaggagccattattggtttcatcaaagttggatacaagaagctctttgtactggatgatcgtgaggctcataatgaggtagaaccactttgcatcctggacttttacatccatgagtctgtgcaacgccatggccatgggcgagaactcttccagtatatgttgcagaaggagcgagtggaaccgcaccaactggcaattgaccgaccctcacagaagctgctgaaattcctgaataagcactacaatctggagaccacagtcccacaggtgaacaactttgtgatctttgaaggcttctttgcccatcaacatcctccagcaaggaagctgccacccaagagagcagagggagacatcaagccatactcctctagtgaccgagaatttctgaaggtagctgtggagcctccttggcccctaaacagggcccctcgccgcgccacacctccagcccacccacccccccgctccagcagcctgggaaactcaccagaacgaggtcccctccgcccctttgtgccagagcaggagctgctgcgttccttgcgcctctgccccccacaccctaccgcccgccttctgttggctgctgaccctgggggcagcccagctcaacgtcgtcgcaccagctcccttccccgctctgaggagagtcgatactaacagctaccctctccctgccctgggagacctggggtgggcagggaacccctccctgagaacctcagacccactcttccattgcatcctgtaggacccagtggaacctgacagagcccataggattccctcttctactttcttagacagcagggatgtcagggtctcaaactgcctaacactttgtagcttttcttaacacaaaagcaccccttctctcctaacttgggctctgaatactttcccaacaggaagtctgatctgttgccagacttcttggttagatggctcatacatttatctagagaagcacactcttgcttgctgtcaaactttagaccaccatggaaggtctaagggcatcctgtgccagggaaactttttaaggaattttatctatgggataaaccccatattccctctagtgtctactggtggctctaatactgctttgtgctgcctgccacacttgccctttgagcctgcgaatggccgctagtgagcaagctctgcttcagagcagtctagttaggtagaacagggacttaccagcttcccaaagggatctactcaccattgccaaactcttcatttccacattttgtgtaggtgtcagggaaccccaaactggtgttgctttggggtctctaaaggagattggctgacaccaccatttcccccagatccagattctctgagggaggttgtttcttgagagtagatccagagtgtcaaggatctgttagatcctggaatcccttcttgcatccatccctccctggtagctaggtcccgatatactcctgtcttgtgagattgtcgagatgagatgggggaccactcttcctctgtccttcctctctcctttcctccatagcaaggacgaccttccctgctccatgcccagagtatagctagatcccttcccctccctaccctctgaatgtgtgctagatcaggtgccccactgtgtttcctgaaatccttgggagccggatctccccatctcccctactcactcttcccttttcttctctcagtgttgtctgaataaagtgtgaaatcttttgtgttttctaaattgacattttcaatgaaaaaaagaatcacaaaaaaaaaag

SEQ ID NO: 13696 - protein, 310 aa, Homo sapiens
MEFPFDVDALFPERITVLDQHLRPPARRPGTTTPARVDLQQQIMTIIDELGKASAKAQNLSAPITSASRMQSNRHVVYILKDSSARPAGKGAIIGFIKVGYKKLFVLDDREAHNEVEPLCILDFYIHESVQRHGHGRELFQYMLQKERVEPHQLAIDRPSQKLLKFLNKHYNLETTVPQVNNFVIFEGFFAHQHPPARKLPPKRAEGDIKPYSSSDREFLKVAVEPPWPLNRAPRRATPPAHPPPRSSSLGNSPERGPLRPFVPEQELLRSLRLCPPHPTARLLLAADPGGSPAQRRRTSSLPRSEESRY

SEQ ID NO: 13697 - DNA, 2162 bp, Homo sapiens
agtgacgtcgtgtggggcgggtccgaccgcgcacaatgggccatggagttcccgttcgatgtggacgcgctgttcccggagcggatcacggtgctggaccagcacctgaggcccccagcccgccgacccggaaccacaacgccggcccgtgttgatctacagcagcaaattatgaccattatagatgaactgggcaaggcttctgccaaggcccagaatctttccgctcctatcactagtgcatcaaggatgcagagtaaccgccatgttgtttatattctcaaagacagttcagcccgaccggctggaaaaggagccattattggtttcatcaaagttggatacaagaagctctttgtactggatgatcgtgaggctcataatgaggtagaaccactttgcatcctggacttttacatccatgagtctgtgcaacgccatggccatgggcgagaactcttccagtatatgttgcagaaggagcgagtggaaccgcaccaactggcaattgaccgaccctcacagaagctgctgaaattcctgaataagcactacaatctggagaccacagtcccacaggtgaacaactttgtgatctttgaaggcttctttgcccatcaacatcggccccctgctccctctctgagggcaactcgacactctcgtgctgctgcagtcgatcccacgcccgctgctccagcaaggaagctgccacccaagagagcagagggagacatcaagccatactcctctagtgaccgagaatttctgaaggtagctgtggagcctccttggcccctaaacagggcccctcgccgcgccacacctccagcccacccacccccccgctccagcagcctgggaaactcaccagaacgaggtcccctccgcccctttgtgccagagcaggagctgctgcgttccttgcgcctctgccccccacaccctaccgcccgccttctgttggctgctgaccctgggggcagcccagctcaacgtcgtcgcaccagctcccttccccgctctgaggagagtcgatactaacagctaccctctccctgccctgggagacctggggtgggcagggaacccctccctgagaacctcagacccactcttccattgcatcctgtaggacccagtggaacctgacagagcccataggattccctcttctactttcttagacagcagggatgtcagggtctcaaactgcctaacactttgtagcttttcttaacacaaaagcaccccttctctcctaacttgggctctgaatactttcccaacaggaagtctgatctgttgccagacttcttggttagatggctcatacatttatctagagaagcacactcttgcttgctgtcaaactttagaccaccatggaaggtctaagggcatcctgtgccagggaaactttttaaggaattttatctatgggataaaccccatattccctctagtgtctactggtggctctaatactgctttgtgctgcctgccacacttgccctttgagcctgcgaatggccgctagtgagcaagctctgcttcagagcagtctagttaggtagaacagggacttaccagcttcccaaagggatctactcaccattgccaaactcttcatttccacattttgtgtaggtgtcagggaaccccaaactggtgttgctttggggtctctaaaggagattggctgacaccaccatttcccccagatccagattctctgagggaggttgtttcttgagagtagatccagagtgtcaaggatctgttagatcctggaatcccttcttgcatccatccctccctggtagctaggtcccgatatactcctgtcttgtgagattgtcgagatgagatgggggaccactcttcctctgtccttcctctctcctttcctccatagcaaggacgaccttccctgctccatgcccagagtatagctagatcccttcccctccctaccctctgaatgtgtgctagatcaggtgccccactgtgtttcctgaaatccttgggagccggatctccccatctcccctactcactcttcccttttcttctctcagtgttgtctgaataaagtgtgaaatcttttgtgttttctaaattgacattttcaatgaaaaaaagaatcacaaaaaaaaaag

SEQ ID NO: 13698 - protein, 333 aa, Homo sapiens
MEFPFDVDALFPERITVLDQHLRPPARRPGTTTPARVDLQQQIMTIIDELGKASAKAQNLSAPITSASRMQSNRHVVYILKDSSARPAGKGAIIGFIKVGYKKLFVLDDREAHNEVEPLCILDFYIHESVQRHGHGRELFQYMLQKERVEPHQLAIDRPSQKLLKFLNKHYNLETTVPQVNNFVIFEGFFAHQHRPPAPSLRATRHSRAAAVDPTPAAPARKLPPKRAEGDIKPYSSSDREFLKVAVEPPWPLNRAPRRATPPAHPPPRSSSLGNSPERGPLRPFVPEQELLRSLRLCPPHPTARLLLAADPGGSPAQRRRTSSLPRSEESRY

SEQ ID NO: 13699 - DNA, 1242 bp, Homo sapiens
agtgacgtcgtgtggggcgggtccgaccgcgcacaatgggccatggagttcccgttcgatgtggacgcgctgttcccggagcggatcacggtgctggaccagcacctgaggcccccagcccgccgacccggaaccacaacgccggcccgtgttgatctacagcagcaaattatgaccattatagatgaactgggcaaggcttctgccaaggcccagaatctttccgctcctatcactagtgcatcaaggatgcagagtaaccgccatgttgtttatattctcaaagacagttcagcccgaccggctggaaaaggagccattattggtttcatcaaagttggatacaagaagctctttgtactggatgatcgtgaggctcataatgaggtagaaccactttgcatcctggacttttacatccatgagtctgtgcaacgccatggccatgggcgagaactcttccagtatatgttgcagaaggagcgagtggaaccgcaccaactggcaattgaccgaccctcacagaagctgctgaaattcctgaataagcactacaatctggagaccacagtcccacaggtgaacaactttgtgatctttgaaggcttctttgcccatcaacatcggccccctgctccctctctgagggcaactcgacactctcgtgctgctgcagtcgatcccacgcccgctgctccagcaaggaagctgccacccaagagagcagagggagacatcaagccatactcctctagtgaccgagaatggggactcccccaggtctggtagcccaaagctgctgctacagccgccatgggggggtgaattcctcatcccccaatacaggcaaccaagactccaagcagggagaacaggaaacaaagaataggtctgccagtgaggagcaggccttgtcacaggatgggtctggggagaagcccatgcacacagctcctccacaggccccggccccgccagcccagtcctggacagtgggtggggacatactcaacgccaggttcattcgaaacctgcaggaacgtcgcagcaccaggccttggtgaccgcagccccgtcaaacatcttcaaagtattatttctccctcactacaggaaagagccaaagcccaaccctcataatagatggatacattcattcattcattcattcagcaggcttatcagattcaagtcatttgtatcttttaaccagaccaataaaagtatttatttttatcacaa

SEQ ID NO: 13700 - protein, 248 aa, Homo sapiens
MEFPFDVDALFPERITVLDQHLRPPARRPGTTTPARVDLQQQIMTIIDELGKASAKAQNLSAPITSASRMQSNRHVVYILKDSSARPAGKGAIIGFIKVGYKKLFVLDDREAHNEVEPLCILDFYIHESVQRHGHGRELFQYMLQKERVEPHQLAIDRPSQKLLKFLNKHYNLETTVPQVNNFVIFEGFFAHQHRPPAPSLRATRHSRAAAVDPTPAAPARKLPPKRAEGDIKPYSSSDREWGLPQVW

SEQ ID NO: 13701 - DNA, 1602 bp, Homo sapiens
agtgacgtcgtgtggggcgggtccgaccgcgcacaatgggccatggagttcccgttcgatgtggacgcgctgttcccggagcggatcacggtgctggaccagcacctgaggcccccagcccgccgacccggaaccacaacgccggcccgtgttgatctacagcagcaaattatgaccattatagatgaactgggcaaggcttctgccaaggcccagaatctttccgctcctatcactagtgcatcaaggatgcagagtaaccgccatgttgtttatattctcaaagacagttcagcccgaccggctggaaaaggagccattattggtttcatcaaagttggatacaagaagctctttgtactggatgatcgtgaggctcataatgaggtagaaccactttgcatcctggacttttacatccatgagtctgtgcaacgccatggccatgggcgagaactcttccagtatatgttgcagaaggagcgagtggaaccgcaccaactggcaattgaccgaccctcacagaagctgctgaaattcctgaataagcactacaatctggagaccacagtcccacaggtgaacaactttgtgatctttgaaggcttctttgcccatcaacatcggccccctgctccctctctgagggcaactcgacactctcgtgctgctgcagtcgatcccacgcccgctgctccagcaaggaagctgccacccaagagagcagagggagacatcaagccatactcctctagtgaccgagaatggggactcccccaggtctggtagcccaaagctgctgctacagccgccatgggggggtgaattcctcatcccccaatacaggcaaccaagactccaagcagggagaacaggaaacaaagaataggtgaggtctaaacccctcccctaacagcctcccaccaccatctgactcccttcctaacatcattctcagtcacttcctactcttaaatcttattgtatgaactggacaccagctcctcccacaattccttctaccttacatcctgcaagcccctttcccccacaggttcaactctggtacttccctttggaatacggattctctgagaggttttaaatttggacatagcactaatggttccagcttcatacccatcatgtgtcctacattaaaacctggcccgagaccttgaagagtctgtaatcttaatttcctctttagtattcctataacccactctccatctccccacctaccaggtctgccagtgaggagcaggccttgtcacaggatgggtctggggagaagcccatgcacacagctcctccacaggccccggccccgccagcccagtcctggacagtgggtggggacatactcaacgccaggttcattcgaaacctgcaggaacgtcgcagcaccaggccttggtgaccgcagccccgtcaaacatcttcaaagtattatttctccctcactacaggaaagagccaaagcccaaccctcataatagatggatacattcattcattcattcattcagcaggcttatcagattcaagtcatttgtatcttttaaccagaccaataaaagtatttatttttatcacaag

SEQ ID NO: 13702 - protein, 248 aa, Homo sapiens; identical to SEQ ID NO: 13700

SEQ ID NO: 13703 - DNA, 1726 bp, Homo sapiens
atggagttcccgttcgatgtggacgcgctgttcccggagcggatcacggtgctggaccagcacctgaggcccccagcccgccgacccggaaccacaacgccggcccggtgacagctcaaacccaccctctggcccttttctcccggttcctctccaaacctggtccaggcaccacgcccccttctcactgactagtgatcgccccttttgatgtccaggcctgcctttttggtgacctctgaccctgggcctagtgggattgatcagcgcttggatctgtgacctttcaccccgggcccaaaatgtcccaatcaaaggatgtggttgacctggcctttctgcttcctcacaataaccttaagggaggagggagtgtgccaccttgaaagtgttgatctacagcagcaaattatgaccattatagatgaactgggcaaggcttctgccaaggcccagaatctttccgctcctatcactagtgcatcaaggatgcagagtaaccgccatgttgtttatattctcaaagacagttcagcccgaccggctggaaaaggagccattattggtttcatcaaagttggatacaagaagctctttgtactggatgatcgtgaggctcataatgaggtagaaccactttgcatcctggacttttacatccatgagtctgtgcaacgccatggccatgggcgagaactcttccagtatatgttgcagaaggagcgagtggaaccgcaccaactggcaattgaccgaccctcacagaagctgctgaaattcctgaataagcactacaatctggagaccacagtcccacaggtgaacaactttgtgatctttgaaggcttctttgcccatcaacatcggccccctgctccctctctgagggcaactcgacactctcgtgctgctgcagtcgatcccacgcccgctgctccagcaaggaagctgccacccaagagagcagagggagacatcaagccatactcctctagtgaccgagaatttctgaaggtagctgtggagcctccttggcccctaaacagggcccctcgccgcgccacacctccagcccacccacccccccgctccagcagcctgggaaactcaccagaacgaggtcccctccgcccctttgtgccagagcaggagctgctgcgttccttgcgcctctgccccccacaccctaccgcccgccttctgttggctgctgaccctgggggcagcccagctcaacgtcgtcgcaccagggggactcccccaggtctggtagcccaaagctgctgctacagccgccatgggggggtgaattcctcatcccccaatacaggcaaccaagactccaagcagggagaacaggaaacaaagaataggtctgccagtgaggagcaggccttgtcacaggatgggtctggggagaagcccatgcacacagctcctccacaggccccggccccgccagcccagtcctggacagtgggtggggacatactcaacgccaggttcattcgaaacctgcaggaacgtcgcagcaccaggccttggtgaccgcagccccgtcaaacatcttcaaagtattatttctccctcactacaggaaagagccaaagcccaaccctcataatagatggatacattcattcattcattcattcagcaggcttatcagattcaagtcatttgtatcttttaaccagaccaataaaagtatttatttttatcacaa

SEQ ID NO: 13704 - protein, 409 aa, Homo sapiens; identical to SEQ ID NO: 1435

SEQ ID NO: 13705 - DNA, 286 bp, Homo sapiens
cattccactgccccagaataccagggggccatgacagcacccactgacactccagcaaggaagctgccacccaagagagcagagggagacatcaagccatactcctctagtgaccgagaatggggactcccccaggtctggtagcccaaagctgctgctacagccgccatgggggggtgaattcctcatcccccaatacaggtaagtattcactcctccctaccctcaaatcaagtaggccacattcactgtctactcctgccttcccattcacatgcctgatatt

SEQ ID NO: 13706 - protein, 54 aa, Homo sapiens
MGTPPGLVAQSCCYSRHGGVNSSSPNTGKYSLLPTLKSSRPHSLSTPAFPFTCL

SEQ ID NO: 13707 - DNA, 460 bp, Homo sapiens
atcaagtaggccacattcactgtctactcctgccttcccattcacatgcctgatatttccacaggcaaccaagactccaagcagggagaacaggaaacaaagaataggtctgccagtgaggagcaggccttgtcacaggatgggtctggggagaagcccatgcacacagctcctccacaggccccggccccgccagcccagtcctggacagtgggtggggacatactcaacgccaggttcattcgaaacctgcaggaacgtcgcagcaccaggccttggtgaccgcagccccgtcaaacatcttcaaagtattatttctccctcactacaggaaagagccaaagcccaaccctcataatagatggatacattcattcattcattcattcagcaggcttatcagattcaagtcatttgtatcttttaaccagaccaataaaagtatttatttttatcacaa

SEQ ID NO: 13708 - protein, 78 aa, Homo sapiens
MPDISTGNQDSKQGEQETKNRSASEEQALSQDGSGEKPMHTAPPQAPAPPAQSWTVGGDILNARFIRNLQERRSTRPW

SEQ ID NO: 13709 - DNA, 1317 bp, Homo sapiens
cgagcctgcagtgcgcaagcgcgggacatctccgtttccctccctcagccccttccccccctacccccccgccccggcctcctttccccttcacgaagccggctctggggcgcgctcacccctgtgaggaggccggaggtcggactcaggaggctccttctccactcccggaagatcatgtaccagcccagccggggtgcggcccggcgtctcggcccttgcctgcgcgcctaccaggctcgaccccaggaccagctttatccagggactctaccattcccacccctttggccccactccacgacaaccacttccccatcttctcctctattctggtctcccctgcccccacgccttcccacccagcgtcttccccaggttcccccactacctctccctcagatccaggccctcagctcagcatgggtggttctccctccaggaaagggggaggagggaccaggacctgagttgcatagcggctgcctggatgggcttagaagcctttttgagggacctccctgcccctatcctggggcttggatacctttccaagtccctggaactgcccacccttcccctgccaccccgtcaggagatcctagtatggaggaacatctgtctgtcatgtatgagagactgagacaagagcttcccaagctcttccttcagtcccacgactacagtctgtattccttggatgtggaattcatcaatgagatcctcaacatacgtaccaagggccggacatggtacattctttcactgaccctctgccgtttcctggcctggaattattttgcacaccttcgtttggaggttttacagctgacccgccaccctgagaactggaccctgcaagcccggtggcggcttgtggggctgcccgtccacttgctctttttgcggttctacaagcgtgacaaagacgagcattaccggacctatgatgcctactccactttctacctgaattccagtggcctcatttgtcgccatcgtctagataaactgatgccttcacactcacctccaacgcctgtgaagaagctgctagtgggagccctggtggccctggggctgtcagagccagaacctgacttaaacctgtgttccaagccctgatccttgaccttggagtggaggcagcactgaagactgctacgcccaagagaaggaggtggaggcagccaagaatctcaggagccagcttcctctcctcgtttctctccttccttcctttccatctcatgctgtgtaaagctgctgtgtaatttaacttgtaaataataaagtttaactgactatatgagatag

SEQ ID NO: 13710 - protein, 315 aa, Homo sapiens
MYQPSRGAARRLGPCLRAYQARPQDQLYPGTLPFPPLWPHSTTTTSPSSPLFWSPLPPRLPTQRLPQVPPLPLPQIQALSSAWVVLPPGKGEEGPGPELHSGCLDGLRSLFEGPPCPYPGAWIPFQVPGTAHPSPATPSGDPSMEEHLSVMYERLRQELPKLFLQSHDYSLYSLDVEFINEILNIRTKGRTWYILSLTLCRFLAWNYFAHLRLEVLQLTRHPENWTLQARWRLVGLPVHLLFLRFYKRDKDEHYRTYDAYSTFYLNSSGLICRHRLDKLMPSHSPPTPVKKLLVGALVALGLSEPEPDLNLCSKP

SEQ ID NO: 13711 - DNA, 1511 bp, Homo sapiens
cgagcctgcagtgcgcaagcgcgggacatctccgtttccctccctcagccccttccccccctacccccccgccccggcctcctttccccttcacgaagccggctctggggcgcgctcacccctgtgaggaggccggaggtcggactcaggaggctccttctccactcccggaagatcatgtaccagcccagccggggtgcggcccggcgtctcggcccttgcctgcgcgcctaccaggctcgaccccaggaccagctttatccagggactctaccattcccacccctttggccccactccacgacaaccacttccccatcttctcctctattctggtctcccctgcccccacgccttcccacccagcgtcttccccaggttcccccactacctctccctcagatccaggccctcagctcagcatgggtggttctccctccaggaaagggggaggagggaccaggacctgagttgcatagcggctgcctggatgggcttagaagcctttttgagggacctccctgcccctatcctggggcttggatacctttccaagtccctggaactgcccacccttcccctgccaccccgtcaggagatcctagtatggaggaacatctgtctgtcatgtatgagagactgagacaagagcttcccaagctcttccttcagtcccacgactacagtctgtattccttggatgtggaattcatcaatgagatcctcaacatacgtaccaagggccggacatggtacattctttcactgaccctctgccgtttcctggcctggaattattttgcacaccttcgtttggaggttttacagctgacccgccaccctgagaactggaccctgcaagcccggtggcggcttgtggggctgcccgtccacttgctctttttgcggttctacaagcgtgacaaagacgagcattaccggacctatgatgcctactccactttctacctgaattccagtggcctcatttgtcgccatcgtctagataaactgatgccttcacactcacctccaacgcctgtgaagaagctgctagtgggagccctggtggccctggggctgtcagagccagaacctgacttaaacctgtgttccaagccctgatccttgaccttggagtggaggcagcactgaagactgctacgcccaagagaaggaggtggaggcagccaagaatctcaggagccagcttcctctcctcgtttctctccttccttcctttccatctcatgctgtgtaaagctgctgtgtaatttaacttgtaaataataaagtttaactgactatatgagatagaatttcacatatcactttctctagatcccaaatgttcccacaagctttattccaaaaataattttatttaataggtattaaataatgtatagaaggaaaaggagctggtgtcaggttctgtttacgtccttctcttaccctagctcttctcgtgttttgcctatttttttgggcattttcttagcatggggatc

SEQ ID NO: 13712 - protein, 315 aa, Homo sapiens; identical to SEQ ID NO: 13710

SEQ ID NO: 13713 - DNA, 806 bp, Homo sapiens
gcgcgctcacccctgtgaggaggccggaggtcggactcaggaggctccttctccactcccggaagatcatgtaccagcccagccggggtgcggcccggcgtctcggcccttgcctgcgcgcctaccaggctcgaccccagcttcccaagctcttccttcagtcccacgactacagtctgtattccttggatgtggaattcatcaatgagatcctcaacatacgtaccaagggccggacatggtacattctttcactgaccctctgccgtttcctggcctggaattattttgcacaccttcgtttggaggttttacagctgacccgccaccctgagaactggaccctgcaagcccggtggcggcttgtggggctgcccgtccacttgctctttttgcggttctacaagcgtgacaaagacgagcattaccggacctatgatgcctactccactttctacctgaattccagtggcctcatttgtcgccatcgtctagataaactgatgccttcacactcacctccaacgcctgtgaagaagctgctagtgggagccctggtggccctggggctgtcagagccagaacctgacttaaacctgtgttccaagccctgatccttgaccttggagtggaggcagcactgaagactgctacgcccaagagaaggaggtggaggcagccaagaatctcaggagccagcttcctctcctcgtttctctccttccttcctttccatctcatgctgtgtaaagctgctgtgtaatttaacttgtaaataataaagtttaactgactatatgagatag

SEQ ID NO: 13714 - protein, 181 aa, Homo sapiens
MYQPSRGAARRLGPCLRAYQARPQLPKLFLQSHDYSLYSLDVEFINEILNIRTKGRTWYILSLTLCRFLAWNYFAHLRLEVLQLTRHPENWTLQARWRLVGLPVHLLFLRFYKRDKDEHYRTYDAYSTFYLNSSGLICRHRLDKLMPSHSPPTPVKKLLVGALVALGLSEPEPDLNLCSKP

SEQ ID NO: 13715 - DNA, 1000 bp, Homo sapiens
gcgcgctcacccctgtgaggaggccggaggtcggactcaggaggctccttctccactcccggaagatcatgtaccagcccagccggggtgcggcccggcgtctcggcccttgcctgcgcgcctaccaggctcgaccccagcttcccaagctcttccttcagtcccacgactacagtctgtattccttggatgtggaattcatcaatgagatcctcaacatacgtaccaagggccggacatggtacattctttcactgaccctctgccgtttcctggcctggaattattttgcacaccttcgtttggaggttttacagctgacccgccaccctgagaactggaccctgcaagcccggtggcggcttgtggggctgcccgtccacttgctctttttgcggttctacaagcgtgacaaagacgagcattaccggacctatgatgcctactccactttctacctgaattccagtggcctcatttgtcgccatcgtctagataaactgatgccttcacactcacctccaacgcctgtgaagaagctgctagtgggagccctggtggccctggggctgtcagagccagaacctgacttaaacctgtgttccaagccctgatccttgaccttggagtggaggcagcactgaagactgctacgcccaagagaaggaggtggaggcagccaagaatctcaggagccagcttcctctcctcgtttctctccttccttcctttccatctcatgctgtgtaaagctgctgtgtaatttaacttgtaaataataaagtttaactgactatatgagatagaatttcacatatcactttctctagatcccaaatgttcccacaagctttattccaaaaataattttatttaataggtattaaataatgtatagaaggaaaaggagctggtgtcaggttctgtttacgtccttctcttaccctagctcttctcgtgttttgcctatttttttgggcattttcttagcatggggatc

SEQ ID NO: 13716 - protein, 181 aa, Homo sapiens; identical to SEQ ID NO: 13714

SEQ ID NO: 13717 - DNA, 1494 bp, Homo sapiens
cttcccacctgtgccctgcagcgcgtggacaggctaggggtcgcgggagcgggagggaggcgctgccgggcctgtcgcgcaaggacgtcggtcctcccaggtttgagggcggtcaggcggggtcaaggccaggcagcggggcgcgtctgcgttgcgcccgactctccgcggttacctgtgcctagaggtgatttgaagggcaggggccgagagattcgtagccctgctgcggcgccgtcccggagttccccggcccagaccagacccgcggggcgccctcagcagcccgcccgtcttgcactcggagagcggtcctggcaggaaggccggccagtgtgcacccggttcgggcccctgcgcccgggctggcaagatggccacgcccccagcagagacggcgcctctaggacaccatcggggaccgaggaccagctttatccagggactctaccattcccacccctttggccccactccacgacaaccacttccccatcttctcctctattctggtctcccctgcccccacgccttcccacccagcgtcttccccaggttcccccactacctctccctcagatccaggccctcagctcagcatgggtggttctccctccaggaaagggggaggagggaccaggacctgagttgcatagcggctgcctggatgggcttagaagcctttttgagggacctccctgcccctatcctggggcttggatacctttccaagtccctggaactgcccacccttcccctgccaccccgtcaggagatcctagtatggaggaacatctgtctgtcatgtatgagagactgagacaagagcttcccaagctcttccttcagtcccacgactacagtctgtattccttggatgtggaattcatcaatgagatcctcaacatacgtaccaagggccggacatggtacattctttcactgaccctctgccgtttcctggcctggaattattttgcacaccttcgtttggaggttttacagctgacccgccaccctgagaactggaccctgcaagcccggtggcggcttgtggggctgcccgtccacttgctctttttgcggttctacaagcgtgacaaagacgagcattaccggacctatgatgcctactccactttctacctgaattccagtggcctcatttgtcgccatcgtctagataaactgatgccttcacactcacctccaacgcctgtgaagaagctgctagtgggagccctggtggccctggggctgtcagagccagaacctgacttaaacctgtgttccaagccctgatccttgaccttggagtggaggcagcactgaagactgctacgcccaagagaaggaggtggaggcagccaagaatctcaggagccagcttcctctcctcgtttctctccttccttcctttccatctcatgctgtgtaaagctgctgtgtaatttaacttgtaaataataaagtttaactgactatatgagatag

SEQ ID NO: 13718 - protein, 172 aa, Homo sapiens; identical to SEQ ID NO: 1439

SEQ ID NO: 13719 - DNA, 926 bp, Homo sapiens
tgctctaccacgaacttgtcttgaccaccaaagagttcatgagacaggtactggagattgagagcagttggcttctggaggtggctccccattattataaggccaaggagctagaagatccccatgctaagaaaatgcccaaaaaaataggcaaaacacgagaagagctagggtaagagaaggacgtaaacagaacctgacaccagctccttttccttctatacattatttaatacctattaaataaaattatttttggaataaagcttgtgggaacatttgggatctagagaaagtgatatgtgaaattctatctcatatagtcagttaaactttattatttacaagttaaattacacagcagctttacacagcatgagatggaaaggaaggaaggagagaaacgaggagaggaagctggctcctgagattcttggctgcctccacctccttctcttgggcgtagcagtcttcagtgctgcctccactccaaggtcaaggatcagggcttggaacacaggtttaagtcaggttctggctctgacagccccagggccaccagggctcccactagcagcttcttcacaggcgttggaggtgagtgtgaaggcatcagctgcagggagaaaggttaatgccagttgggggaggcacacaaatgttctaccctttaccccacccagccctacctaggactcactttatctagacgatggcgacaaatgaggccactggaattcaggtagaaagtggagtaggcatcataggtcctggggaatagagggaggcttactgagggagaaggtgactggtcccaaagctgaattcaagcatttgtttaaacgagtagtccctaaattctgctacatattagatcacctgggcaacttacaaacatctcagtgcttaggttgtgccctgtctca

SEQ ID NO: 13720 - protein, 45 aa, Homo sapiens
MRQVLEIESSWLLEVAPHYYKAKELEDPHAKKMPKKIGKTREELG

SEQ ID NO: 13721 - DNA, 4072 bp, Homo sapiens
ggccgaaaaagtacagccccttccgggctccgcggtacgggaagacagctttgggatgtcggaagatcctagaggtcccaaggtagctgacttgcgaagctgaggctccagccgagggctccaggcctctgaccggcccagcagtgagcgcggctgcccgacgcttcagggccgggagcagggagcgtgagtcgccatggcgacgccggcgggtctggagcgctgggttcaggacgagctgcactcggtgttggggctgagcgagcggcacgtcgcccagtttctgatcggtaccgcacagcgctgcacctctgccgaggagttcgtgcagcgcctacgagacactgataccttggatctcagtgggccggcccgggacttcgccctgagactctggaacaaggtaccacgaaaggcagtggtagaaaagccagctcgggcagcagagcgagaggcccgggccctgctggagaagaaccgatcttataggttactggaagacagtgaagagagcagtgaggagactgtgagtagggctggaagcagcctccagaagaaacgtaaaaagcggaaacacctcaggaagaagcgtgaggaagaagaggaggaagaggcttctgagaaagggaagaagaaaacaggggggagtaaacagcagacagagaagccagagtcggaagatgagtgggaacggacagagcgtgaacgccttcaggacctggaggagcgtgatgcctttgctgagcgggttcgacagcgggacaaggatcggactcgaaatgtcctggaacggtcagacaagaaggcttatgaagaggctcagaagcgcctcaagatggccgaggaagaccggaaggccatggtccctgagctgcggaagaaatctcgccgagagtacctggctaagcgggagcgagagaagcttgaggacctggaggcggagctggctgatgaggagttcctttttggggacgtggagctgagccggcacgagcggcaggagctcaaatataagcggcgagtgcgggatctcgcccgggagtaccgggcagctggggagcaggagaagctggaggccaccaatcgctaccacatgcccaaggaaacccgaggacagccagcccgagctgtggatctagtggaggaggaatcaggagcccctggggaggagcagcggcgctgggaggaggcgcggcttggggcagcgtccctgaagtttggggcccgagatgctgcctctcaggagcccaagtatcaactggtgctggaggaggaggagaccattgagtttgtccgggccactcagctccagggtgatgaggagccgtcagctccacccacttcaactcaggcccagcagaaagagtccatccaggccgtccgccgcagcctcccggtgttcccatttcgagaggagctcctggctgctattgcaaatcaccaagtcctcatcattgaaggcgagacaggctcagggaagaccacccagatcccgcagtatctctttgaggagggttatacaaacaagggtatgaagattgcctgcacccaaccccggagagtggctgccatgagtgtggccgcccgagtggcccgggagatgggtgtgaagcttgggaatgaggttggctacagcatccgctttgaggactgcacatcagagcgaactgtcctccgctacatgacagatgggatgcttctccgggagttcctctctgagcctgacctggcgagttacagcgtggtgatggtggatgaggcacacgaaaggaccctacacacagacattctctttggattgatcaaggatgttgctcgcttccgacctgagctcaaggtcctggtggcttcagccacaatggacactgcccgtttttccaccttctttgatgacgcccctgtgtttcgaatccccggacgcaggtttcctgtggacatcttctacaccaaggctccagaggctgactacttggaagcttgtgtagtatctgtgttgcagatccatgtgacccagccccctggggatatcctggtgttcctgacaggacaggaggagattgaggctgcctgtgagatgctccaggatcgctgccgccgcctgggctccaaaatccgggagctcctggtgctgcccatttatgccaatctgccctctgacatgcaggcccgtatcttccagcccacaccacctggggcacgaaaggtggttgtggcaacgaacattgctgagacatcactcaccattgagggcatcatttatgtgctggatccagggttctgtaagcagaagagctacaacccccgcacaggcatggaatcgctcactgtcacaccctgcagcaaggcctcagccaatcagcgagctggcagggcaggtcgggtggctgcagggaagtgcttccgcctgtataccgcctgggcctatcagcacgagcttgaggaaaccacagtgcctgagatccagaggaccagcttgggcaatgtcgtgttgctgctcaagagcttagggatccatgacctaatgcactttgatttcctggaccctccaccatatgagacactgctgctggctttggagcagctgtatgctctgggagccctcaaccaccttggggagctcaccacgtctggtcgaaagatggcagagctgccggtggaccccatgctgtccaaaatgatcttagcctctgagaagtacagctgttcagaggagatcctgacagtggctgccatgctctctgtcaacaactccatcttctaccgaccaaaggacaaggtcgtccatgctgacaatgcccgtgtcaacttctttctccctggcggtgaccacctggttctgctaaatgtttacacacagtgggctgagagtggttactcttcccagtggtgctatgagaactttgtacagttcagatcgatgcgccgagcccgggatgtgcgggaacagctggaagggctcttggaacgtgtggaagttggtctcagttcctgccagggggactatatccgtgtacgcaaggccatcactgctggttacttttaccacacggcacggttgactcggagtggctaccgcacagtgaaacagcagcagacagtcttcattcatcccaactcctccctctttgagcaacagccacgctggctgctctaccacgaacttgtcttgaccaccaaagagttcatgagacaggtactggagattgagagcagttggcttctggaggtggctccccattattataaggccaaggagctagaagatccccatgctaagaaaatgcccaaaaaaataggcaaaacacgagaagagctagggtaagagaaggacgtaaacagaacctgacaccagctccttttccttctatacattatttaatacctattaaataaaattatttttggaataaagcttgtgggaacatttgggatctagagaaagtgatatgtgaaattctatctcatatagtcagttaaactttattatttacaagttaaattacacagcagctttacacagcatgagatggaaaggaaggaaggagagaaacgaggagaggaagctggctcctgagattcttggctgcctccacctccttctcttgggcgtagcagtcttcagtgctgcctccactccaaggtcaaggatcagggcttggaacacaggtttaagtcaggttctggctctgacagccccagggccaccagggctcccactagcagcttcttcacaggcgttggaggtgagtgtgaaggcatcagctgcagggagaaaggttaatgccagttgggggaggcacacaaatgttctaccctttaccccacccagccctacctaggactcactttatctagacgatggcgacaaatgaggccactggaattcaggtagaaagtggagtaggcatcataggtcctggggaatagagggaggcttactgagggagaaggtgactggtcccaaagctgaattcaagcatttgtttaaacgagtagtccctaaattctgctacatattagatcacctgggcaacttacaaacatctcagtgcttaggttgtgccctgtctca

SEQ ID NO: 13722 - protein, 1041 aa, Homo sapiens
MATPAGLERWVQDELHSVLGLSERHVAQFLIGTAQRCTSAEEFVQRLRDTDTLDLSGPARDFALRLWNKVPRKAVVEKPARAAEREARALLEKNRSYRLLEDSEESSEETVSRAGSSLQKKRKKRKHLRKKREEEEEEEASEKGKKKTGGSKQQTEKPESEDEWERTERERLQDLEERDAFAERVRQRDKDRTRNVLERSDKKAYEEAQKRLKMAEEDRKAMVPELRKKSRREYLAKREREKLEDLEAELADEEFLFGDVELSRHERQELKYKRRVRDLAREYRAAGEQEKLEATNRYHMPKETRGQPARAVDLVEEESGAPGEEQRRWEEARLGAASLKFGARDAASQEPKYQLVLEEEETIEFVRATQLQGDEEPSAPPTSTQAQQKESIQAVRRSLPVFPFREELLAAIANHQVLIIEGETGSGKTTQIPQYLFEEGYTNKGMKIACTQPRRVAAMSVAARVAREMGVKLGNEVGYSIRFEDCTSERTVLRYMTDGMLLREFLSEPDLASYSVVMVDEAHERTLHTDILFGLIKDVARFRPELKVLVASATMDTARFSTFFDDAPVFRIPGRRFPVDIFYTKAPEADYLEACVVSVLQIHVTQPPGDILVFLTGQEEIEAACEMLQDRCRRLGSKIRELLVLPIYANLPSDMQARIFQPTPPGARKVVVATNIAETSLTIEGIIYVLDPGFCKQKSYNPRTGMESLTVTPCSKASANQRAGRAGRVAAGKCFRLYTAWAYQHELEETTVPEIQRTSLGNVVLLLKSLGIHDLMHFDFLDPPPYETLLLALEQLYALGALNHLGELTTSGRKMAELPVDPMLSKMILASEKYSCSEEILTVAAMLSVNNSIFYRPKDKVVHADNARVNFFLPGGDHLVLLNVYTQWAESGYSSQWCYENFVQFRSMRRARDVREQLEGLLERVEVGLSSCQGDYIRVRKAITAGYFYHTARLTRSGYRTVKQQQTVFIHPNSSLFEQQPRWLLYHELVLTTKEFMRQVLEIESSWLLEVAPHYYKAKELEDPHAKKMPKKIGKTREELG

SEQ ID NO: 13723 - DNA, 413 bp, Homo sapiens
caccttctccctcagtaagcctccctctattccccaggacctatgatgcctactccactttctacctgaattccagtggcctcatttgtcgccatcgtctagataaactgatgccttcacactcacctccaacgcctgtgaagaagctgctagtgggagccctggtggccctggggctgtcagagccagaacctgacttaaacctgtgttccaagccctgatccttgaccttggagtggaggcagcactgaagactgctacgcccaagagaaggaggtggaggcagccaagaatctcaggagccagcttcctctcctcgtttctctccttccttcctttccatctcatgctgtgtaaagctgctgtgtaatttaacttgtaaataataaagtttaactgactatatgagatag

SEQ ID NO: 13724 - protein, 36 aa, Homo sapiens
MPSHSPPTPVKKLLVGALVALGLSEPEPDLNLCSKP

SEQ ID NO: 13725 - DNA, 607 bp, Homo sapiens
caccttctccctcagtaagcctccctctattccccaggacctatgatgcctactccactttctacctgaattccagtggcctcatttgtcgccatcgtctagataaactgatgccttcacactcacctccaacgcctgtgaagaagctgctagtgggagccctggtggccctggggctgtcagagccagaacctgacttaaacctgtgttccaagccctgatccttgaccttggagtggaggcagcactgaagactgctacgcccaagagaaggaggtggaggcagccaagaatctcaggagccagcttcctctcctcgtttctctccttccttcctttccatctcatgctgtgtaaagctgctgtgtaatttaacttgtaaataataaagtttaactgactatatgagatagaatttcacatatcactttctctagatcccaaatgttcccacaagctttattccaaaaataattttatttaataggtattaaataatgtatagaaggaaaaggagctggtgtcaggttctgtttacgtccttctcttaccctagctcttctcgtgttttgcctatttttttgggcattttcttagcatggggatc

SEQ ID NO: 13726 - protein, 36 aa, Homo sapiens; identical to SEQ ID NO: 13724

SEQ ID NO: 13727 - DNA, 1932 bp, Homo sapiens
ctgaacaatatgtgcctttttgactcttcagaggctgtgaatttctggtcttggaagatcacagtggagcaattggacagataggattttatccttcatatcccttgcaaaagatctctaagaacccatggagagccagccagcgcaagagtgtctgatgcagatgtttttgcccatcgagccagcctgctttgtggaatggctggggacttcaccatcacagttaggcgtggtgatggtggatgaggcacacgaaaggaccctacacacagacattctctttggattgatcaaggatgttgctcgcttccgacctgagctcaaggtcctggtggcttcagccacaatggacactgcccgtttttccaccttctttgatgacgcccctgtgtttcgaatccccggacgcaggtttcctgtggacatcttctacaccaaggctccagaggctgactacttggaagcttgtgtagtatctgtgttgcagatccatgtgacccagccccctggggatatcctggtgttcctgacaggacaggaggagattgaggctgcctgtgagatgctccaggatcgctgccgccgcctgggctccaaaatccgggagctcctggtgctgcccatttatgccaatctgccctctgacatgcaggcccgtatcttccagcccacaccacctggggcacgaaaggtggttgtggcaacgaacattgctgagacatcactcaccattgagggcatcatttatgtgctggatccagggttctgtaagcagaagagctacaacccccgcacaggcatggaatcgctcactgtcacaccctgcagcaaggcctcagccaatcagcgagctggcagggcaggtcgggtggctgcagggaagtgcttccgcctgtataccgcctgggcctatcagcacgagcttgaggaaaccacagtgcctgagatccagaggaccagcttgggcaatgtcgtgttgctgctcaagagcttagggatccatgacctaatgcactttgatttcctggaccctccaccatatgagacactgctgctggctttggagcagctgtatgctctgggagccctcaaccaccttggggagctcaccacgtctggtcgaaagatggcagagctgccggtggaccccatgctgtccaaaatgatcttagcctctgagaagtacagctgttcagaggagatcctgacagtggctgccatgctctctgtcaacaactccatcttctaccgaccaaaggacaaggtcgtccatgctgacaatgcccgtgtcaacttctttctccctggcggtgaccacctggttctgctaaatgtttacacacagtgggctgagagtggttactcttcccagtggtgctatgagaactttgtacagttcagatcgatgcgccgagcccgggatgtgcgggaacagctggaagggctcttggaacgtgtggaagttggtctcagttcctgccagggggactatatccgtgtacgcaaggccatcactgctggttacttttaccacacggcacggttgactcggagtggctaccgcacagtgaaacagcagcagacagtcttcattcatcccaactcctccctctttgagcaacagccacgctggctgctctaccacgaacttgtcttgaccaccaaagagttcatgagacaggtactggagattgagagcagttggcttctggaggtggctccccattattataaggccaaggagctagaagatccccatgctaagaaaatgcccaaaaaaataggcaaaacacgagaagagctagggtaagagaaggacgtaaacagaacctgacaccagctccttttccttctatacattatttaatacctattaaataaaattatttttggaataaagcttgtgggaacatttgggatctagagaaagtg

SEQ ID NO: 13728 - protein, 560 aa, Homo sapiens
MESQPAQECLMQMFLPIEPACFVEWLGTSPSQLGVVMVDEAHERTLHTDILFGLIKDVARFRPELKVLVASATMDTARFSTFFDDAPVFRIPGRRFPVDIFYTKAPEADYLEACVVSVLQIHVTQPPGDILVFLTGQEEIEAACEMLQDRCRRLGSKIRELLVLPIYANLPSDMQARIFQPTPPGARKVVVATNIAETSLTIEGIIYVLDPGFCKQKSYNPRTGMESLTVTPCSKASANQRAGRAGRVAAGKCFRLYTAWAYQHELEETTVPEIQRTSLGNVVLLLKSLGIHDLMHFDFLDPPPYETLLLALEQLYALGALNHLGELTTSGRKMAELPVDPMLSKMILASEKYSCSEEILTVAAMLSVNNSIFYRPKDKVVHADNARVNFFLPGGDHLVLLNVYTQWAESGYSSQWCYENFVQFRSMRRARDVREQLEGLLERVEVGLSSCQGDYIRVRKAITAGYFYHTARLTRSGYRTVKQQQTVFIHPNSSLFEQQPRWLLYHELVLTTKEFMRQVLEIESSWLLEVAPHYYKAKELEDPHAKKMPKKIGKTREELG

SEQ ID NO: 13729 - DNA, 3444 bp, Homo sapiens
ggccgaaaaagtacagccccttccgggctccgcggtacgggaagacagctttgggatgtcggaagatcctagaggtcccaaggtagctgacttgcgaagctgaggctccagccgagggctccaggcctctgaccggcccagcagtgagcgcggctgcccgacgcttcagggccgggagcagggagcgtgagtcgccatggcgacgccggcgggtctggagcgctgggttcaggacgagctgcactcggtgttggggctgagcgagcggcacgtcgcccagtttctgatcggtaccgcacagcgctgcacctctgccgaggagttcgtgcagcgcctacgagacactgataccttggatctcagtgggccggcccgggacttcgccctgagactctggaacaaggtaccacgaaaggcagtggtagaaaagccagctcgggcagcagagcgagaggcccgggccctgctggagaagaaccgatcttataggttactggaagacagtgaagagagcagtgaggagactgtgagtagggctggaagcagcctccagaagaaacgtaaaaagcggaaacacctcaggaagaagcgtgaggaagaagaggaggaagaggcttctgagaaagggaagaagaaaacaggggggagtaaacagcagacagagaagccagagtcggaagatgagtgggaacggacagagcgtgaacgccttcaggacctggaggagcgtgatgcctttgctgagcgggttcgacagcgggacaaggatcggactcgaaatgtcctggaacggtcagacaagaaggcttatgaagaggctcagaagcgcctcaagatggccgaggaagaccggaaggccatggtccctgagctgcggaagaaatctcgccgagagtacctggctaagcgggagcgagagaagcttgaggacctggaggcggagctggctgatgaggagttcctttttggggacgtggagctgagccggcacgagcggcaggagctcaaatataagcggcgagtgcgggatctcgcccgggagtaccgggcagctggggagcaggagaagctggaggccaccaatcgctaccacatgcccaaggaaacccgaggacagccagcccgagctgtggatctagtggaggaggaatcaggagcccctggggaggagcagcggcgctgggaggaggcgcggcttggggcagcgtccctgaagtttggggcccgagatgctgcctctcaggagcccaagtatcaactggtgctggaggaggaggagaccattgagtttgtccgggccactcagctccagggtgatgaggagccgtcagctccacccacttcaactcaggcccagcagaaagagtccatccaggccgtccgccgcagcctcccggtgttcccatttcgagaggagctcctggctgctattgcaaatcaccaagtcctcatcattgaaggcgagacaggctcagggaagaccacccagatcccgcagtatctctttgaggagggttatacaaacaagggtatgaagattgcctgcacccaaccccggagagtggctgccatgagtgtggccgcccgagtggcccgggagatgggtgtgaagcttgggaatgaggttggctacagcatccgctttgaggactgcacatcagagcgaactgtcctccgctacatgacagatgggatgcttctccgggagttcctctctgagcctgacctggcgagttacagcgtggtgatggtggatgaggcacacgaaaggaccctacacacagacattctctttggattgatcaaggatgttgctcgcttccgacctgagctcaaggtcctggtggcttcagccacaatggacactgcccgtttttccaccttctttgatgacgcccctgtgtttcgaatccccggacgcaggtttcctgtggacatcttctacaccaaggctccagaggctgactacttggaagcttgtgtagtatctgtgttgcagatccatgtgacccagccccctggggatatcctggtgttcctgacaggacaggaggagattgaggctgcctgtgagatgctccaggatcgctgccgccgcctgggctccaaaatccgggagctcctggtgctgcccatttatgccaatctgccctctgacatgcaggcccgtatcttccagcccacaccacctggggcacgaaaggtggttgtggcaacgaacattgctgagacatcactcaccattgagggcatcatttatgtgctggatccagggttctgtaagcagaagagctacaacccccgcacaggcatggaatcgctcactgtcacaccctgcagcaaggcctcagccaatcagcgagctggcagggcaggtcgggtggctgcagggaagtgcttccgcctgtataccgcctgggcctatcagcacgagcttgaggaaaccacagtgcctgagatccagaggaccagcttgggcaatgtcgtgttgctgctcaagagcttagggatccatgacctaatgcactttgatttcctggaccctccaccatatgagacactgctgctggctttggagcagctgtatgctctgggagccctcaaccaccttggggagctcaccacgtctggtcgaaagatggcagagctgccggtggaccccatgctgtccaaaatgatcttagcctctgagaagtacagctgttcagaggagatcctgacagtggctgccatgctctctgtcaacaactccatcttctaccgaccaaaggacaaggtcgtccatgctgacaatgcccgtgtcaacttctttctccctggcggtgaccacctggttctgctaaatgtttacacacagtgggctgagagtggttactcttcccagtggtgctatgagaactttgtacagttcagatcgatgcgccgagcccgggatgtgcgggaacagctggaagggctcttggaacgtgtggaagttggtctcagttcctgccagggggactatatccgtgtacgcaaggccatcactgctggttacttttaccacacggcacggttgactcggagtggctaccgcacagtgaaacagcagcagacagtcttcattcatcccaactcctccctctttgagcaacagccacgctggctgctctaccacgaacttgtcttgaccaccaaagagttcatgagacaggtactggagattgagagcagttggcttctggaggtggctccccattattataaggccaaggagctagaagatccccatgctaagaaaatgcccaaaaaaataggcaaaacacgagaagagctagggtaagagaaggacgtaaacagaacctgacaccagctccttttccttctatacattatttaatacctattaaataaaattatttttggaataaagcttgtgggaacatttgggatctagagaaagtg

SEQ ID NO: 13730 - protein, 1041 aa, Homo sapiens; identical to SEQ ID NO: 13722

SEQ ID NO: 13731 - DNA, 860 bp, Homo sapiens
acatcttgtctcctattatctgctgaggctgggataggttgcagatcatggggccctggccttctctgactttctgttgctctacataagtgggatggctgacttctccttagagccccctccgtcaacagtcattcttgaactctttgtgtccattactcccctctcatccagttaactctggtgtctgatactgcattgcctagcgctcttccctcattgctctcctattccctccccagcgtggtgatggtggatgaggcacacgaaaggaccctacacacagacattctctttggattgatcaaggatgttgctcgcttccgacctgagctcaaggtcctggtggcttcagccacaatggacactgcccgtttttccaccttctttgatgacgcccctgtgtttcgaatccccggacgcaggtttcctgtggacatcttctacaccaaggctccagaggctgactacttggaagcttgtgtagtatctgtgttgcagatccatgtgacccagccccctggggatatcctggttcctccctctttgagcaacagccacgctggctgctctaccacgaacttgtcttgaccaccaaagagttcatgagacaggtactggagattgagagcagttggcttctggaggtggctccccattattataaggccaaggagctagaagatccccatgctaagaaaatgcccaaaaaaataggcaaaacacgagaagagctagggtaagagaaggacgtaaacagaacctgacaccagctccttttccttctatacattatttaatacctattaaataaaattatttttggaataaagcttgtgggaacatttgggatctagaga

SEQ ID NO: 13732 - protein, 113 aa, Homo sapiens
MVDEAHERTLHTDILFGLIKDVARFRPELKVLVASATMDTARFSTFFDDAPVFRIPGRRFPVDIFYTKAPEADYLEACVVSVLQIHVTQPPGDILVPPSLSNSHAGCSTTNLS

SEQ ID NO: 13733 - DNA, 1207 bp, Homo sapiens
aatgggggtggggtcaggccagctgaacaatatgtgcctttttgactcttcagaggctgtgaatttctggtcttggaagatcacagtggagcaattggacagataggattttatccttcatatcccttgcaaaagatctctaagaacccatggagagccagccagcgcaagagtgtctgatgcagatgtttttgcccatcgagccagcctgctttgtggaatggctggggacttcaccatcacagttagggttaggcacaaagagttgaggtcagggaggtgggtaggggaagatggggatgagttcctgggacttggctgccacccagaaaagccaaagaacaaagagaaagaaggtgtcatgcacataactgagttaggaggaaaccaaggagcatgcagagtcctgtgagagttgaggtagaaaggcttaacttgctcctgtctccaaaagaagaaacagtcaagaatgatgccagcagcagttgtcccacaggacaccaggagcttctaggctatttgaatcacagcagctcaggtctattacccccagtcagccttgctggcccacccttattgaaagggaccctgccttccactttttttttcctttaaaacgtatcagccgggagcgctaccaccatgcccagcctaaaacatatccttcaactttttctagtaagagcagctgctgagtctaagcagactcttgactgaactagagggtatggctaacttgtcctggcctcagtgtgcagcctctacatcttgtctcctattatctgctgaggctgggataggttgcagatcatggggccctggccttctctgactttctgttgctctacataagtgggatggctgacttctccttagagccccctccgtcaacagtcattcttgaactctttgtgtccattactcccctctcatccagttaactctggtgtctgatactgcattgcctagcgctcttccctcattgctctcctattccctccccagcgtggtgatggtggatgaggcacacgaaaggaccctacacacagacattctctttggattgatcaaggatgttgctcgcttccgacctgagctcaaggtcctggtggcttcagccacaatggacactgcccgtttttccaccttctttgatgacgcccctgtgtttcgaatccccggacgcaggtttcctgtggacatcttc

SEQ ID NO: 13734 - protein, 72 aa, Homo sapiens [sequence omitted]

SEQ ID NO: 13735 - DNA, 1045 bp, Homo sapiens
ggccgaaaaagtacagccccttccgggctccgcggtacgggaagacagctttgggatgtcggaagatcctagaggtcccaaggtagctgacttgcgaagctgaggctccagccgagggctccaggcctctgaccggcccagcagtgagcgcggctgcccgacgcttcagggccgggagcagggagcgtgagtcgccatggcgacgccggcgggtctggagcgctgggttcaggacgagctgcactcggtgttggggctgagcgagcggcacgtcgcccagtttctgatcggtaccgcacagcgctgcacctctgccgaggagttcgtgcagcgcctacgagacactgataccttggatctcagtgggccggcccgggacttcgccctgagactctggaacaaggtaccacgaaaggcagtggtagaaaagccagctcgggcagcagagcgagaggcccgggccctgctggagaagaaccgatcttataggttactggaagacagtgaagagagcagtgaggagactgtgagtagggctggaagcagcctccagaagaaacgtaaaaagcggaaacacctcaggaagaagcgtgaggaagaagaggaggaagaggcttctgagaaagggaagaagaaaacaggggggagtaaacagcagacagagaagccagagtcggaagatgagtgggaacggacagagcgtgaacgccttcaggacctggaggagcgtgatgcctttgctgagcgggttcgacagcgggacaaggatcggactcgaaatgtcctggaacggtcagacaagaaggcttatgaagaggctcagaagcgcctcaagatggccgaggaagaccggaaggccatgaccatttaaaagagtcttagacatcatggcgttttatctctaagtacatcagtgtgtacctgctaaggataaagatattgtcctctaaaatcagaatgctcttgtcacagtcaggaagttgaacagtaattcttatgtatcgactaagatctctctacaataaaagataccctcattaccctc

SEQ ID NO: 13736 - protein, 224 aa, Homo sapiens
MATPAGLERWVQDELHSVLGLSERHVAQFLIGTAQRCTSAEEFVQRLRDTDTLDLSGPARDFALRLWNKVPRKAVVEKPARAAEREARALLEKNRSYRLLEDSEESSEETVSRAGSSLQKKRKKRKHLRKKREEEEEEEASEKGKKKTGGSKQQTEKPESEDEWERTERERLQDLEERDAFAERVRQRDKDRTRNVLERSDKKAYEEAQKRLKMAEEDRKAMTI

SEQ ID NO: 13737 - DNA, 496 bp, Homo sapiens
ggcgagaggggcatgaagccaacagaagggtggaaatggaccctgaactcctcccttgaccacagcctggtttacaaattccatcagctcccagccccacctgccaaagtcccaggtttacaagccacgcttacttgctgtgtctgcgtggaattctctcctctgtcccctccagtctcctcattggagtgacctgaaggtgtggcttcctccactttttctcagtattactttgccttagttttccccaagagggaaggctggaactcttaactctgtaccccttgatagttatttaattctgtttctcctagtggttcacaattgaactgaattgagatggtgtcgggtggctaaggagacacctcacctctccttccccattgtgccgcctttatcaattgcctgttttgttttgtttgttttttaactttccataataaaatggagttctcttcaactcgtctgcttctccttctttgggaaaaaaaaaggg

SEQ ID NO: 13738 - protein, 59 aa, Homo sapiens
MKPTEGWKWTLNSSLDHSLVYKFHQLPAPPAKVPGLQATLTCCVCVEFSPLSPPVSSLE

SEQ ID NO: 13739 - DNA, 1177 bp, Homo sapiens
gcaccccctcccccgggggtcccgcggcctcttaagatctccttcagcgagacagccctggagaccacgtaccaatacccctccgagagttcggtactggaggagctgggcccggagcctgaggtccccagtgcccccaaccctccagcagcccaacccgacgacgaagaggatgaggaagagctgctgctgctgcagccagagctccagggcgggctgcgcaccaaggccctgattgtggatgagtcctgccggcggtgaccatcttccaacatagggatatacctccctccttcttataactgaagatcctggagcccggaagattcagggcagacagaccctgataatgagcctggcagggaagggcaaccaacatcttgtaacttgctttccccaccctgtttctgggggcagagccaattgcccaatttctaccctaatccaaagtccctggtgtgggtggggttaaacgtgctggtgcatcctaggtcatccaagagtgagcgccaagtcctgagaaggggcacagaactccctggagggtggagatggagcacctgccccccatggcagggtacactctccccacagccttcctccccaccatcccgtggggactctcgggatttaagcactcgtctctctgggaggcccagaccccactccatttataggcacatctccttcatttcctaggtcactgcccctttgtttacagctcctgcctcctcccttgaccacagcctggtttacaaattccatcagctcccagccccacctgccaaagtcccaggtttacaagccacgcttacttgctgtgtctgcgtggaattctctcctctgtcccctccagtctcctcattggagtgacctgaaggtgtggcttcctccactttttctcagtattactttgccttagttttccccaagagggaaggctggaactcttaactctgtaccccttgatagttatttaattctgtttctcctagtggttcacaattgaactgaattgagatggtgtcgggtggctaaggagacacctcacctctccttccccattgtgccgcctttatcaattgcctgttttgttttgtttgttttttaactttccataataaaatggagttctcttcaactcgtctgcttctccttctttgggaaaaaaaaaggg

SEQ ID NO: 13740 - protein, 41 aa, Homo sapiens [sequence omitted]

SEQ ID NO: 13741 - DNA, 1329 bp, Homo sapiens
acgcccggctcctccgcaccccctcccccgggggtcccgcggcctccacagttgatgctgcagtcccgggggctgggaagaagcggtacccaactgccgaggagatcttggttctggggggctacctccgtctcagccgcagctgccttgccaaggggtcccccgaaagacaccacaaacagcttaagatctccttcagcgagacagccctggagaccacgtaccaatacccctccgagagttcggtactggaggagctgggcccggagcctgaggtccccagtgcccccaaccctccagcagcccaacccgacgacgaagaggatgaggaagagctgctgctgctgcagccagagctccagggcgggctgcgcaccaaggccctgattgtggatgagtcctgccggcggtgaccatcttccaacatagggatatacctccctccttcttataactgaagatcctggagcccggaagattcagggcagacagaccctgataatgagcctggcagggaagggcaaccaacatcttgtaacttgctttccccaccctgtttctgggggcagagccaattgcccaatttctaccctaatccaaagtccctggtgtgggtggggttaaacgtgctggtgcatcctaggtcatccaagagtgagcgccaagtcctgagaaggggcacagaactccctggagggtggagatggagcacctgccccccatggcagggtacactctccccacagccttcctccccaccatcccgtggggactctcgggatttaagcactcgtctctctgggaggcccagaccccactccatttataggcacatctccttcatttcctaggtcactgcccctttgtttacagctcctgcctcctcccttgaccacagcctggtttacaaattccatcagctcccagccccacctgccaaagtcccaggtttacaagccacgcttacttgctgtgtctgcgtggaattctctcctctgtcccctccagtctcctcattggagtgacctgaaggtgtggcttcctccactttttctcagtattactttgccttagttttccccaagagggaaggctggaactcttaactctgtaccccttgatagttatttaattctgtttctcctagtggttcacaattgaactgaattgagatggtgtcgggtggctaaggagacacctcacctctccttccccattgtgccgcctttatcaattgcctgttttgttttgtttgttttttaactttccataataaaatggagttctcttcaactcgtctgcttctccttctttgggaaaaaaaaaggg

SEQ ID NO: 13742 - protein, 110 aa, Homo sapiens
MLQSRGLGRSGTQLPRRSWFWGATSVSAAAALPRGPPKDTTNSLRSPSARQPWRPRTNTPPRVRYWRSWARSLRSPVPPTLQQPNPTTKRMRKSCCCCSQSSRAGCAPRP

SEQ ID NO: 13743 - DNA, 2889 bp, Homo sapiens
cctccctccagtctccggatctccctcggtccctctctcctcctcttcctctctctggacgcccggctcctccgcaccccctcccccgggggtcccgcggccttgctccctaccctcacctcaagacgaccatggccaccatcccagactggaagctacagctgctagcccggcgccggcaggaggaggcgtccgttcgaggccgagagaaagcagaacgggagcgcctgtcccagatgccagcctggaaacgagggctcctggagcgccgccgggccaagcttgggctgtcccctggggagcctagccctgtgctagggactgtagaggctggacctccagacccggatgagtctgcggtccttctggaggccatcgggccagtgcaccagaaccgattcatccggcaggagcggcagcagcagcagcagcaacaacaacggagtgaagagctgctagcagagagaaagcctgggcctctggaggcccgggagcggagacccagccctggggagatgcgggatcagagccccaagggaagagagtcaagagaagagagactaagtccgagggagaccagagagaggaggctggggatagggggagcccaagagttgagcctgaggcctctggaggctcgggactggaggcaaagcccaggagaggtgggagacaggagctcccgactgtcagaggcatggaaatggaggctgagtcctggagaaactccagagcggagtctgagactagcagagtctcgagagcaaagccccaggagaaaagaggtggaaagtagactgagcccaggggaatctgcctaccagaagttgggcctgacagaggcccataaatggagacctgactccagagagtctcaggaacagagtttggtacaactggaggcaacagagtggaggctgaggtcaggagaagaaagacaagactactcggaagaatgtgggagaaaagaagagtggccagttccaggggtagctccaaaagagactgcagagctgtccgagaccctgacaagggaggcccaaggcaacagttccgcaggagtggaggcagcagagcagaggcctgtggaagatggcgagaggggcatgaagccaacagaagggtggaaatggaccctgaactccgggaaggctcgagaatggacacccagggacatagaggctcaaactcagaaaccagaacctccagagtcagcagagaagcttctggaatctcccggtgtggaggctggagaaggggaggctgagaaggaggaggcgggggctcagggcaggcctctgagagccctgcagaactgctgctctgtgccctcccccctcccaccagaggacgctgggactggaggcctgagacagcaggaagaggaagcagtggagctccagcccccaccaccagcccctctgtctcccccacccccagccccaactgccccccaacctcctggggatcccctcatgagccgcctgttctatggggtgaaggcagggccaggggtgggggccccccgccgcagtggacacaccttcaccgtcaacccccggcggtctgtgccccctgcgaccccagccaccccaacctctccagccacagttgatgctgcagtcccgggggctgggaagaagcggtacccaactgccgaggagatcttggttctggggggctacctccgtctcagccgcagctgccttgccaaggggtcccccgaaagacaccacaaacagcttaagatctccttcagcgagacagccctggagaccacgtaccaatacccctccgagagttcggtactggaggagctgggcccggagcctgaggtccccagtgcccccaaccctccagcagcccaacccgacgacgaagaggatgaggaagagctgctgctgctgcagccagagctccagggcgggctgcgcaccaaggccctgattgtggatgagtcctgccggcggtgaccatcttccaacatagggatatacctccctccttcttataactgaagatcctggagcccggaagattcagggcagacagaccctgataatgagcctggcagggaagggcaaccaacatcttgtaacttgctttccccaccctgtttctgggggcagagccaattgcccaatttctaccctaatccaaagtccctggtgtgggtggggttaaacgtgctggtgcatcctaggtcatccaagagtgagcgccaagtcctgagaaggggcacagaactccctggagggtggagatggagcacctgccccccatggcagggtacactctccccacagccttcctccccaccatcccgtggggactctcgggatttaagcactcgtctctctgggaggcccagaccccactccatttataggcacatctccttcatttcctaggtcactgcccctttgtttacagctcctgcctcctcccttgaccacagcctggtttacaaattccatcagctcccagccccacctgccaaagtcccaggtttacaagccacgcttacttgctgtgtctgcgtggaattctctcctctgtcccctccagtctcctcattggagtgacctgaaggtgtggcttcctccactttttctcagtattactttgccttagttttccccaagagggaaggctggaactcttaactctgtaccccttgatagttatttaattctgtttctcctagtggttcacaattgaactgaattgagatggtgtcgggtggctaaggagacacctcacctctccttccccattgtgccgcctttatcaattgcctgttttgttttgtttgttttttaactttccataataaaatggagttctcttcaactcgtctgcttctccttctttgggaaaaaaaaaggg

SEQ ID NO: 13744 - protein, 613 aa, Homo sapiens; identical to SEQ ID NO: 4721

SEQ ID NO: 13745 - DNA, 2798 bp, Homo sapiens
gtccttagacaaagcggtcgccgcccccgcccggccccctggtctctgtctccgtccctcctcctttgctgcctctttccctcctcctctccctccctcctcccctccctccagtctccggatctccctcggtccctctctcctcctcttcctctctctggacgcccggctcctccgcaccccctcccccgggggtcccgcggcctgtgagttgactgaggggctcagacttggggagtgggtgtctcctcgcccctgtccttgctcccgtccctggcccggaccttggctgtctcctctttgtgccgagattgtcagtctgtgcggctacagcggggtggagacggccggctctgtcacggcttcatgagagcggggacggggcgcaggacttgcaggcgccggggagaagagacatggagccggcccttggcactctggggtcgcgtggggcagtcggtgggggaggcaggcggtggtgacaggacagggtgggggtggacgccagggttctgggaacgcgctggcagccctgacgcccgggttcccctcacccctgccacatttctctcttctccctcacgccaactttccttttcgcccttctctctctttctcacatcctagagacggtctttaatacgcattaaccctgtgctgccacatctggctcctgccctcattgcctccaatccggactcttcctctcacatcacccccaccacccccaacttgggctcacaacttctcttcactttttccatttccccagttctctgccttccgtctttccctctgtcctcatccttagcccctctgccctgctttgtgtcccacctctccccctccacttcctctcctcccaccctcagtctcacccccgggctgtctcactctctggagcctctccttcctgttctctgtccccagtgctccctaccctcacctcaagacgaccatggccaccatcccagactggaagctacagctgctagcccggcgccggcaggaggaggcgtccgttcgaggccgagagaaagcagaacgggagcgcctgtcccagatgccagcctggaaacgagggctcctggagcgccgccgggccaagcttgggctgtcccctggggagcctagccctgtgctagggactgtagaggctggacctccagacccggatgagtctgcggtccttctggaggccatcgggccagtgcaccagaaccgattcatccggcaggagcggcagcagcagcagcagcaacaacaacggagtgaagagctgctagcagagagaaagcctgggcctctggaggcccgggagcggagacccagccctggggagatgcgggatcagagccccaagggaagagagtcaagagaagagagactaagtccgagggagaccagagagaggaggctggggatagggggagcccaagagttgagcctgaggcctctggaggctcgggactggaggcaaagcccaggagaggtgggagacaggagctcccgactgtcagaggcatggaaatggaggctgagtcctggagaaactccagagcggagtctgagactagcagagtctcgagagcaaagccccaggagaaaagaggtggaaagtagactgagcccaggggaatctgcctaccagaagttgggcctgacagaggcccataaatggagacctgactccagagagtctcaggaacagagtttggtacaactggaggcaacagagtggaggctgaggtcaggagaagaaagacaagactactcggaagaatgtgggagaaaagaagagtggccagttccaggggtagctccaaaagagactgcagagctgtccgagaccctgacaagggaggcccaaggcaacagttccgcaggagtggaggcagcagagcagaggcctgtggaagatggcgagaggggcatgaagccaacagaagggtggaaatggacccctgataatgagcctggcagggaagggcaaccaacatcttgtaacttgctttccccaccctgtttctgggggcagagccaattgcccaatttctaccctaatccaaagtccctggtgtgggtggggttaaacgtgctggtgcatcctaggtcatccaagagtgagcgccaagtcctgagaaggggcacagaactccctggagggtggagatggagcacctgccccccatggcagggtacactctccccacagccttcctccccaccatcccgtggggactctcgggatttaagcactcgtctctctgggaggcccagaccccactccatttataggcacatctccttcatttcctaggtcactgcccctttgtttacagctcctgcctcctcccttgaccacagcctggtttacaaattccatcagctcccagccccacctgccaaagtcccaggtttacaagccacgcttacttgctgtgtctgcgtggaattctctcctctgtcccctccagtctcctcattggagtgacctgaaggtgtggcttcctccactttttctcagtattactttgccttagttttccccaagagggaaggctggaactcttaactctgtaccccttgatagttatttaattctgtttctcctagtggttcacaattgaactgaattgagatggtgtcgggtggctaaggagacacctcacctctccttccccattgtgccgcctttatcaattgcctgttttgttttgtttgttttttaactttccataataaaatggagttctcttcaactcgtctgcttctccttctttgggaaaaaaaaaggg

SEQ ID NO: 13746 - protein, 453 aa, Homo sapiens
MATIPDWKLQLLARRRQEEASVRGREKAERERLSQMPAWKRGLLERRRAKLGLSPGEPSPVLGTVEAGPPDPDESAVLLEAIGPVHQNRFIRQERQQQQQQQQRSEELLAERKPGPLEARERRPSPGEMRDQSPKGRESREERLSPRETRERRLGIGGAQELSLRPLEARDWRQSPGEVGDRSSRLSEAWKWRLSPGETPERSLRLAESREQSPRRKEVESRLSPGESAYQKLGLTEAHKWRPDSRESQEQSLVQLEATEWRLRSGEERQDYSEECGRKEEWPVPGVAPKETAELSETLTREAQGNSSAGVEAAEQRPVEDGERGMKPTEGWKWTPDNEPGREGQPTSCNLLSPPCFWGQSQLPNFYPNPKSLVWVGLNVLVHPRSSKSERQVLRRGTELPGGWRWSTCPPWQGTLSPQPSSPPSRGDSRDLSTRLSGRPRPHSIYRHISFIS

SEQ ID NO: 13747 - DNA, 4635 bp, Homo sapiens
actttgccagagcggccgggtccccattcccattccttcaaatcccctttttcccggcagccgacctgtagacccaagggagacaggttgaagctagaaagagtcggggcagcagctctggtaggggagggagcatccaaaacctctggcttctgagcgcctctcctgccgcccatccacaaagccccccacagcctggcggctgccctcgaccccgcaaaacaaaggacttcagaggctggacctacagacccagatgagaaggcaaaagcgtagggaggagcggcaggagatgggaagggcgggccccgctcggagcagctgccgcttcctcccaaagtcccacgaggggcctgagtcacgggccaccgccctgggtcggcgagctgggggaagggatctggacacctggcgtgtccgggcgggaagctggtgagggcccctggggacagagcggaggaccagtggttggggcgagaagagggcagtcccgcagcgagtcccacgcggggtgggagggatctaggccccgccctctcctcggctccgccctgcgcccccttccctctcctcattgtccttagacaaagcggtcgccgcccccgcccggccccctggtctctgtctccgtccctcctcctttgctgcctctttccctcctcctctccctccctcctcccctccctccagtctccggatctccctcggtccctctctcctcctcttcctctctctggacgcccggctcctccgcaccccctcccccgggggtcccgcggcctgtgagttgactgaggggctcagacttggggagtgggtgtctcctcgcccctgtccttgctcccgtccctggcccggaccttggctgtctcctctttgtgccgagattgtcagtctgtgcggctacagcggggtggagacggccggctctgtcacggcttcatgagagcggggacggggcgcaggacttgcaggcgccggggagaagagacatggagccggcccttggcactctggggtcgcgtggggcagtcggtgggggaggcaggcggtggtgacaggacagggtgggggtggacgccagggttctgggaacgcgctggcagccctgacgcccgggttccgaaagtctcgggggtggctatttcccccgacccgcctcgggggcggagtgcggggcagaggggtgggggctggggagaggcgtggcccgagcggtgctggaagcggagccgggacctttggggcccgcgctgagacgcgcccggctgctgccgccgccctcctttcccctcttccctggtttcccttctcctctagacctgttcgctctccgcccctccttgcctccccaacaccccctcaggtcccgttgcctcctggtcctttcagggattcctggtccttccttcccacactagcctccctggggtatcgctgaggcagcctggcctgcacccaggttcccctcacccctgccacatttctctcttctccctcacgccaactttccttttcgcccttctctctctttctcacatcctagagacggtctttaatacgcattaaccctgtgctgccacatctggctcctgccctcattgcctccaatccggactcttcctctcacatcacccccaccacccccaacttgggctcacaacttctcttcactttttccatttccccagttctctgccttccgtctttccctctgtcctcatccttagcccctctgccctgctttgtgtcccacctctccccctccacttcctctcctcccaccctcagtctcacccccgggctgtctcactctctggagcctctccttcctgttctctgtccccagtgctccctaccctcacctcaagacgaccatggccaccatcccagactggaagctacagctgctagcccggcgccggcaggaggaggcgtccgttcgaggccgagagaaagcagaacgggagcgcctgtcccagatgccagcctggaaacgagggctcctggagcgccgccgggccaagcttgggctgtcccctggggagcctagccctgtgctagggactgtagaggctggacctccagacccggatgagtctgcggtccttctggaggccatcgggccagtgcaccagaaccgattcatccggcaggagcggcagcagcagcagcagcaacaacaacggagtgaagagctgctagcagagagaaagcctgggcctctggaggcccgggagcggagacccagccctggggagatgcgggatcagagccccaagggaagagagtcaagagaagagagactaagtccgagggagaccagagagaggaggctggggatagggggagcccaagagttgagcctgaggcctctggaggctcgggactggaggcaaagcccaggagaggtgggagacaggagctcccgactgtcagaggcatggaaatggaggctgagtcctggagaaactccagagcggagtctgagactagcagagtctcgagagcaaagccccaggagaaaagaggtggaaagtagactgagcccaggggaatctgcctaccagaagttgggcctgacagaggcccataaatggagacctgactccagagagtctcaggaacagagtttggtacaactggaggcaacagagtggaggctgaggtcaggagaagaaagacaagactactcggaagaatgtgggagaaaagaagagtggccagttccaggggtagctccaaaagagactgcagagctgtccgagaccctgacaagggaggcccaaggcaacagttccgcaggagtggaggcagcagagcagaggcctgtggaagatggcgagaggggcatgaagccaacagaagggtggaaatggaccctgaactccgggaaggctcgagaatggacacccagggacatagaggctcaaactcagaaaccagaacctccagagtcagcagagaagcttctggaatctcccggtgtggaggctggagaaggggaggctgagaaggaggaggcgggggctcagggcaggcctctgagagccctgcagaactgctgctctgtgccctcccccctcccaccagaggacgctgggactggaggcctgagacagcaggaagaggaagcagtggagctccagcccccaccaccagcccctctgtctcccccacccccagccccaactgccccccaacctcctggggatcccctcatgagccgcctgttctatggggtgaaggcagggccaggggtgggggccccccgccgcagtggacacaccttcaccgtcaacccccggcggtctgtgccccctgcgaccccagccaccccaacctctccagccacagttgatgctgcagtcccgggggctgggaagaagcggtacccaactgccgaggagatcttggttctggggggctacctccgtctcagccgcagctgccttgccaaggggtcccccgaaagacaccacaaacagcttaagatctccttcagcgagacagccctggagaccacgtaccaatacccctccgagagttcggtactggaggagctgggcccggagcctgaggtccccagtgcccccaaccctccagcagcccaacccgacgacgaagaggatgaggaagagctgctgctgctgcagccagagctccagggcgggctgcgcaccaaggccctgattgtggatgagtcctgccggcggtgaccatcttccaacatagggatatacctccctccttcttataactgaagatcctggagcccggaagattcagggcagacagaccctgataatgagcctggcagggaagggcaaccaacatcttgtaacttgctttccccaccctgtttctgggggcagagccaattgcccaatttctaccctaatccaaagtccctggtgtgggtggggttaaacgtgctggtgcatcctaggtcatccaagagtgagcgccaagtcctgagaaggggcacagaactccctggagggtggagatggagcacctgccccccatggcagggtacactctccccacagccttcctccccaccatcccgtggggactctcgggatttaagcactcgtctctctgggaggcccagaccccactccatttataggcacatctccttcatttcctaggtcactgcccctttgtttacagctcctgcctcctcccttgaccacagcctggtttacaaattccatcagctcccagccccacctgccaaagtcccaggtttacaagccacgcttacttgctgtgtctgcgtggaattctctcctctgtcccctccagtctcctcattggagtgacctgaaggtgtggcttcctccactttttctcagtattactttgccttagttttccccaagagggaaggctggaactcttaactctgtaccccttgatagttatttaattctgtttctcctagtggttcacaattgaactgaattgagatggtgtcgggtggctaaggagacacctcacctctccttccccattgtgccgcctttatcaattgcctgttttgttttgtttgttttttaactttccataataaaatggagttctcttcaactcgtctgcttctccttctttgggaaaaaaaaaggg

SEQ ID NO: 13748 - protein, 613 aa, Homo sapiens; identical to SEQ ID NO: 4721

SEQ ID NO: 13749 - DNA, 710 bp, Homo sapiens
gaagatattataggacttcctgcatgccaactgcccttcaatttgtgtgggggggaagggtgggcagaaggcagaggctctcactcattctctaacattattgccccctctcccacagatgagtcctgccggcggtgaccatcttccaacatagggatatacctccctccttcttataactgaagatcctggagcccggaagattcagggcagacagaccctgataatgagcctggcagggaagggcaaccaacatcttgtaacttgctttccccaccctgtttctgggggcagagccaattgcccaatttctaccctaatccaaatcccaggtttacaagccacgcttacttgctgtgtctgcgtggaattctctcctctgtcccctccagtctcctcattggagtgacctgaaggtgtggcttcctccactttttctcagtattactttgccttagttttccccaagagggaaggctggaactcttaactctgtaccccttgatagttatttaattctgtttctcctagtggttcacaattgaactgaattgagatggtgtcgggtggctaaggagacacctcacctctccttccccattgtgccgcctttatcaattgcctgttttgttttgtttgttttttaactttccataataaaatggagttctcttcaactcgtctgcttctccttctttgggaaaaaaaaa

SEQ ID NO: 13750 - protein, 60 aa, Homo sapiens [sequence omitted]

SEQ ID NO: 13751 - DNA, 675 bp, Homo sapiens
gaagatattataggacttcctgcatgccaactgcccttcaatttgtgtgggggggaagggtgggcagaaggcagaggctctcactcattctctaacattattgccccctctcccacagatgagtcctgccggcggtgaccatcttccaacatagggatatacctccctccttcttataactgaagatcctggagcccggaagattcagggcagacagaccctgataatgagcctggcagggaagggcaaccaacatcttgtaacttgctttccccaccctgtttctgggggcagagccaattgcccaatttctaccctaatccaaatcccaggtttacaagccacgcttacttgctgtgtctgcgtggaattctctcctctgtcccctccagtctcctcattggagtgacctgaaggtgtggcttcctccactttttctcagtattactttgccttagttttccccaagagggaaggctggaactcttaactctgtaccccttgatagttatttaattctgtttctcctagtggttcacaattgaactgaattgagatggtgtcgggtggctaaggagacacctcacctctccttccccattgtgccgcctttatcaattgcctgttttgttttgtttgttttttaactttccataataaaatggagttctcttc

SEQ ID NO: 13752 - protein, 60 aa, Homo sapiens [sequence omitted]

SEQ ID NO: 13753 - DNA, 458 bp, Homo sapiens
ggcgagaggggcatgaagccaacagaagggtggaaatggaccctgaactcctcccttgaccacagcctggtttacaaattccatcagctcccagccccacctgccaaagtcccaggtttacaagccacgcttacttgctgtgtctgcgtggaattctctcctctgtcccctccagtctcctcattggagtgacctgaaggtgtggcttcctccactttttctcagtattactttgccttagttttccccaagagggaaggctggaactcttaactctgtaccccttgatagttatttaattctgtttctcctagtggttcacaattgaactgaattgagatggtgtcgggtggctaaggagacacctcacctctccttccccattgtgccgcctttatcaattgcctgttttgttttgtttgttttttaactttccataataaaatggagttctcttc

SEQ ID NO: 13754 - protein, 59 aa, Homo sapiens; identical to SEQ ID NO: 13738

SEQ ID NO: 13755 - DNA, 1139 bp, Homo sapiens
gcaccccctcccccgggggtcccgcggcctcttaagatctccttcagcgagacagccctggagaccacgtaccaatacccctccgagagttcggtactggaggagctgggcccggagcctgaggtccccagtgcccccaaccctccagcagcccaacccgacgacgaagaggatgaggaagagctgctgctgctgcagccagagctccagggcgggctgcgcaccaaggccctgattgtggatgagtcctgccggcggtgaccatcttccaacatagggatatacctccctccttcttataactgaagatcctggagcccggaagattcagggcagacagaccctgataatgagcctggcagggaagggcaaccaacatcttgtaacttgctttccccaccctgtttctgggggcagagccaattgcccaatttctaccctaatccaaagtccctggtgtgggtggggttaaacgtgctggtgcatcctaggtcatccaagagtgagcgccaagtcctgagaaggggcacagaactccctggagggtggagatggagcacctgccccccatggcagggtacactctccccacagccttcctccccaccatcccgtggggactctcgggatttaagcactcgtctctctgggaggcccagaccccactccatttataggcacatctccttcatttcctaggtcactgcccctttgtttacagctcctgcctcctcccttgaccacagcctggtttacaaattccatcagctcccagccccacctgccaaagtcccaggtttacaagccacgcttacttgctgtgtctgcgtggaattctctcctctgtcccctccagtctcctcattggagtgacctgaaggtgtggcttcctccactttttctcagtattactttgccttagttttccccaagagggaaggctggaactcttaactctgtaccccttgatagttatttaattctgtttctcctagtggttcacaattgaactgaattgagatggtgtcgggtggctaaggagacacctcacctctccttccccattgtgccgcctttatcaattgcctgttttgttttgtttgttttttaactttccataataaaatggagttctcttc

SEQ ID NO: 13756 - protein, 41 aa, Homo sapiens [sequence omitted]

SEQ ID NO: 13757 - DNA, 1291 bp, Homo sapiens
acgcccggctcctccgcaccccctcccccgggggtcccgcggcctccacagttgatgctgcagtcccgggggctgggaagaagcggtacccaactgccgaggagatcttggttctggggggctacctccgtctcagccgcagctgccttgccaaggggtcccccgaaagacaccacaaacagcttaagatctccttcagcgagacagccctggagaccacgtaccaatacccctccgagagttcggtactggaggagctgggcccggagcctgaggtccccagtgcccccaaccctccagcagcccaacccgacgacgaagaggatgaggaagagctgctgctgctgcagccagagctccagggcgggctgcgcaccaaggccctgattgtggatgagtcctgccggcggtgaccatcttccaacatagggatatacctccctccttcttataactgaagatcctggagcccggaagattcagggcagacagaccctgataatgagcctggcagggaagggcaaccaacatcttgtaacttgctttccccaccctgtttctgggggcagagccaattgcccaatttctaccctaatccaaagtccctggtgtgggtggggttaaacgtgctggtgcatcctaggtcatccaagagtgagcgccaagtcctgagaaggggcacagaactccctggagggtggagatggagcacctgccccccatggcagggtacactctccccacagccttcctccccaccatcccgtggggactctcgggatttaagcactcgtctctctgggaggcccagaccccactccatttataggcacatctccttcatttcctaggtcactgcccctttgtttacagctcctgcctcctcccttgaccacagcctggtttacaaattccatcagctcccagccccacctgccaaagtcccaggtttacaagccacgcttacttgctgtgtctgcgtggaattctctcctctgtcccctccagtctcctcattggagtgacctgaaggtgtggcttcctccactttttctcagtattactttgccttagttttccccaagagggaaggctggaactcttaactctgtaccccttgatagttatttaattctgtttctcctagtggttcacaattgaactgaattgagatggtgtcgggtggctaaggagacacctcacctctccttccccattgtgccgcctttatcaattgcctgttttgttttgtttgttttttaactttccataataaaatggagttctcttc

SEQ ID NO: 13758 - protein, 110 aa, Homo sapiens; identical to SEQ ID NO: 13742

SEQ ID NO: 13759 - DNA, 2851 bp, Homo sapiens
cctccctccagtctccggatctccctcggtccctctctcctcctcttcctctctctggacgcccggctcctccgcaccccctcccccgggggtcccgcggccttgctccctaccctcacctcaagacgaccatggccaccatcccagactggaagctacagctgctagcccggcgccggcaggaggaggcgtccgttcgaggccgagagaaagcagaacgggagcgcctgtcccagatgccagcctggaaacgagggctcctggagcgccgccgggccaagcttgggctgtcccctggggagcctagccctgtgctagggactgtagaggctggacctccagacccggatgagtctgcggtccttctggaggccatcgggccagtgcaccagaaccgattcatccggcaggagcggcagcagcagcagcagcaacaacaacggagtgaagagctgctagcagagagaaagcctgggcctctggaggcccgggagcggagacccagccctggggagatgcgggatcagagccccaagggaagagagtcaagagaagagagactaagtccgagggagaccagagagaggaggctggggatagggggagcccaagagttgagcctgaggcctctggaggctcgggactggaggcaaagcccaggagaggtgggagacaggagctcccgactgtcagaggcatggaaatggaggctgagtcctggagaaactccagagcggagtctgagactagcagagtctcgagagcaaagccccaggagaaaagaggtggaaagtagactgagcccaggggaatctgcctaccagaagttgggcctgacagaggcccataaatggagacctgactccagagagtctcaggaacagagtttggtacaactggaggcaacagagtggaggctgaggtcaggagaagaaagacaagactactcggaagaatgtgggagaaaagaagagtggccagttccaggggtagctccaaaagagactgcagagctgtccgagaccctgacaagggaggcccaaggcaacagttccgcaggagtggaggcagcagagcagaggcctgtggaagatggcgagaggggcatgaagccaacagaagggtggaaatggaccctgaactccgggaaggctcgagaatggacacccagggacatagaggctcaaactcagaaaccagaacctccagagtcagcagagaagcttctggaatctcccggtgtggaggctggagaaggggaggctgagaaggaggaggcgggggctcagggcaggcctctgagagccctgcagaactgctgctctgtgccctcccccctcccaccagaggacgctgggactggaggcctgagacagcaggaagaggaagcagtggagctccagcccccaccaccagcccctctgtctcccccacccccagccccaactgccccccaacctcctggggatcccctcatgagccgcctgttctatggggtgaaggcagggccaggggtgggggccccccgccgcagtggacacaccttcaccgtcaacccccggcggtctgtgccccctgcgaccccagccaccccaacctctccagccacagttgatgctgcagtcccgggggctgggaagaagcggtacccaactgccgaggagatcttggttctggggggctacctccgtctcagccgcagctgccttgccaaggggtcccccgaaagacaccacaaacagcttaagatctccttcagcgagacagccctggagaccacgtaccaatacccctccgagagttcggtactggaggagctgggcccggagcctgaggtccccagtgcccccaaccctccagcagcccaacccgacgacgaagaggatgaggaagagctgctgctgctgcagccagagctccagggcgggctgcgcaccaaggccctgattgtggatgagtcctgccggcggtgaccatcttccaacatagggatatacctccctccttcttataactgaagatcctggagcccggaagattcagggcagacagaccctgataatgagcctggcagggaagggcaaccaacatcttgtaacttgctttccccaccctgtttctgggggcagagccaattgcccaatttctaccctaatccaaagtccctggtgtgggtggggttaaacgtgctggtgcatcctaggtcatccaagagtgagcgccaagtcctgagaaggggcacagaactccctggagggtggagatggagcacctgccccccatggcagggtacactctccccacagccttcctccccaccatcccgtggggactctcgggatttaagcactcgtctctctgggaggcccagaccccactccatttataggcacatctccttcatttcctaggtcactgcccctttgtttacagctcctgcctcctcccttgaccacagcctggtttacaaattccatcagctcccagccccacctgccaaagtcccaggtttacaagccacgcttacttgctgtgtctgcgtggaattctctcctctgtcccctccagtctcctcattggagtgacctgaaggtgtggcttcctccactttttctcagtattactttgccttagttttccccaagagggaaggctggaactcttaactctgtaccccttgatagttatttaattctgtttctcctagtggttcacaattgaactgaattgagatggtgtcgggtggctaaggagacacctcacctctccttccccattgtgccgcctttatcaattgcctgttttgttttgtttgttttttaactttccataataaaatggagttctcttc

SEQ ID NO: 13760 - protein, 613 aa, Homo sapiens; identical to SEQ ID NO: 4721

SEQ ID NO: 13761 - DNA, 2760 bp, Homo sapiens
gtccttagacaaagcggtcgccgcccccgcccggccccctggtctctgtctccgtccctcctcctttgctgcctctttccctcctcctctccctccctcctcccctccctccagtctccggatctccctcggtccctctctcctcctcttcctctctctggacgcccggctcctccgcaccccctcccccgggggtcccgcggcctgtgagttgactgaggggctcagacttggggagtgggtgtctcctcgcccctgtccttgctcccgtccctggcccggaccttggctgtctcctctttgtgccgagattgtcagtctgtgcggctacagcggggtggagacggccggctctgtcacggcttcatgagagcggggacggggcgcaggacttgcaggcgccggggagaagagacatggagccggcccttggcactctggggtcgcgtggggcagtcggtgggggaggcaggcggtggtgacaggacagggtgggggtggacgccagggttctgggaacgcgctggcagccctgacgcccgggttcccctcacccctgccacatttctctcttctccctcacgccaactttccttttcgcccttctctctctttctcacatcctagagacggtctttaatacgcattaaccctgtgctgccacatctggctcctgccctcattgcctccaatccggactcttcctctcacatcacccccaccacccccaacttgggctcacaacttctcttcactttttccatttccccagttctctgccttccgtctttccctctgtcctcatccttagcccctctgccctgctttgtgtcccacctctccccctccacttcctctcctcccaccctcagtctcacccccgggctgtctcactctctggagcctctccttcctgttctctgtccccagtgctccctaccctcacctcaagacgaccatggccaccatcccagactggaagctacagctgctagcccggcgccggcaggaggaggcgtccgttcgaggccgagagaaagcagaacgggagcgcctgtcccagatgccagcctggaaacgagggctcctggagcgccgccgggccaagcttgggctgtcccctggggagcctagccctgtgctagggactgtagaggctggacctccagacccggatgagtctgcggtccttctggaggccatcgggccagtgcaccagaaccgattcatccggcaggagcggcagcagcagcagcagcaacaacaacggagtgaagagctgctagcagagagaaagcctgggcctctggaggcccgggagcggagacccagccctggggagatgcgggatcagagccccaagggaagagagtcaagagaagagagactaagtccgagggagaccagagagaggaggctggggatagggggagcccaagagttgagcctgaggcctctggaggctcgggactggaggcaaagcccaggagaggtgggagacaggagctcccgactgtcagaggcatggaaatggaggctgagtcctggagaaactccagagcggagtctgagactagcagagtctcgagagcaaagccccaggagaaaagaggtggaaagtagactgagcccaggggaatctgcctaccagaagttgggcctgacagaggcccataaatggagacctgactccagagagtctcaggaacagagtttggtacaactggaggcaacagagtggaggctgaggtcaggagaagaaagacaagactactcggaagaatgtgggagaaaagaagagtggccagttccaggggtagctccaaaagagactgcagagctgtccgagaccctgacaagggaggcccaaggcaacagttccgcaggagtggaggcagcagagcagaggcctgtggaagatggcgagaggggcatgaagccaacagaagggtggaaatggacccctgataatgagcctggcagggaagggcaaccaacatcttgtaacttgctttccccaccctgtttctgggggcagagccaattgcccaatttctaccctaatccaaagtccctggtgtgggtggggttaaacgtgctggtgcatcctaggtcatccaagagtgagcgccaagtcctgagaaggggcacagaactccctggagggtggagatggagcacctgccccccatggcagggtacactctccccacagccttcctccccaccatcccgtggggactctcgggatttaagcactcgtctctctgggaggcccagaccccactccatttataggcacatctccttcatttcctaggtcactgcccctttgtttacagctcctgcctcctcccttgaccacagcctggtttacaaattccatcagctcccagccccacctgccaaagtcccaggtttacaagccacgcttacttgctgtgtctgcgtggaattctctcctctgtcccctccagtctcctcattggagtgacctgaaggtgtggcttcctccactttttctcagtattactttgccttagttttccccaagagggaaggctggaactcttaactctgtaccccttgatagttatttaattctgtttctcctagtggttcacaattgaactgaattgagatggtgtcgggtggctaaggagacacctcacctctccttccccattgtgccgcctttatcaattgcctgttttgttttgtttgttttttaactttccataataaaatggagttctcttc

SEQ ID NO: 13762 - protein, 453 aa, Homo sapiens; identical to SEQ ID NO: 13746

SEQ ID NO: 13763 - DNA, 4597 bp, Homo sapiens
actttgccagagcggccgggtccccattcccattccttcaaatcccctttttcccggcagccgacctgtagacccaagggagacaggttgaagctagaaagagtcggggcagcagctctggtaggggagggagcatccaaaacctctggcttctgagcgcctctcctgccgcccatccacaaagccccccacagcctggcggctgccctcgaccccgcaaaacaaaggacttcagaggctggacctacagacccagatgagaaggcaaaagcgtagggaggagcggcaggagatgggaagggcgggccccgctcggagcagctgccgcttcctcccaaagtcccacgaggggcctgagtcacgggccaccgccctgggtcggcgagctgggggaagggatctggacacctggcgtgtccgggcgggaagctggtgagggcccctggggacagagcggaggaccagtggttggggcgagaagagggcagtcccgcagcgagtcccacgcggggtgggagggatctaggccccgccctctcctcggctccgccctgcgcccccttccctctcctcattgtccttagacaaagcggtcgccgcccccgcccggccccctggtctctgtctccgtccctcctcctttgctgcctctttccctcctcctctccctccctcctcccctccctccagtctccggatctccctcggtccctctctcctcctcttcctctctctggacgcccggctcctccgcaccccctcccccgggggtcccgcggcctgtgagttgactgaggggctcagacttggggagtgggtgtctcctcgcccctgtccttgctcccgtccctggcccggaccttggctgtctcctctttgtgccgagattgtcagtctgtgcggctacagcggggtggagacggccggctctgtcacggcttcatgagagcggggacggggcgcaggacttgcaggcgccggggagaagagacatggagccggcccttggcactctggggtcgcgtggggcagtcggtgggggaggcaggcggtggtgacaggacagggtgggggtggacgccagggttctgggaacgcgctggcagccctgacgcccgggttccgaaagtctcgggggtggctatttcccccgacccgcctcgggggcggagtgcggggcagaggggtgggggctggggagaggcgtggcccgagcggtgctggaagcggagccgggacctttggggcccgcgctgagacgcgcccggctgctgccgccgccctcctttcccctcttccctggtttcccttctcctctagacctgttcgctctccgcccctccttgcctccccaacaccccctcaggtcccgttgcctcctggtcctttcagggattcctggtccttccttcccacactagcctccctggggtatcgctgaggcagcctggcctgcacccaggttcccctcacccctgccacatttctctcttctccctcacgccaactttccttttcgcccttctctctctttctcacatcctagagacggtctttaatacgcattaaccctgtgctgccacatctggctcctgccctcattgcctccaatccggactcttcctctcacatcacccccaccacccccaacttgggctcacaacttctcttcactttttccatttccccagttctctgccttccgtctttccctctgtcctcatccttagcccctctgccctgctttgtgtcccacctctccccctccacttcctctcctcccaccctcagtctcacccccgggctgtctcactctctggagcctctccttcctgttctctgtccccagtgctccctaccctcacctcaagacgaccatggccaccatcccagactggaagctacagctgctagcccggcgccggcaggaggaggcgtccgttcgaggccgagagaaagcagaacgggagcgcctgtcccagatgccagcctggaaacgagggctcctggagcgccgccgggccaagcttgggctgtcccctggggagcctagccctgtgctagggactgtagaggctggacctccagacccggatgagtctgcggtccttctggaggccatcgggccagtgcaccagaaccgattcatccggcaggagcggcagcagcagcagcagcaacaacaacggagtgaagagctgctagcagagagaaagcctgggcctctggaggcccgggagcggagacccagccctggggagatgcgggatcagagccccaagggaagagagtcaagagaagagagactaagtccgagggagaccagagagaggaggctggggatagggggagcccaagagttgagcctgaggcctctggaggctcgggactggaggcaaagcccaggagaggtgggagacaggagctcccgactgtcagaggcatggaaatggaggctgagtcctggagaaactccagagcggagtctgagactagcagagtctcgagagcaaagccccaggagaaaagaggtggaaagtagactgagcccaggggaatctgcctaccagaagttgggcctgacagaggcccataaatggagacctgactccagagagtctcaggaacagagtttggtacaactggaggcaacagagtggaggctgaggtcaggagaagaaagacaagactactcggaagaatgtgggagaaaagaagagtggccagttccaggggtagctccaaaagagactgcagagctgtccgagaccctgacaagggaggcccaaggcaacagttccgcaggagtggaggcagcagagcagaggcctgtggaagatggcgagaggggcatgaagccaacagaagggtggaaatggaccctgaactccgggaaggctcgagaatggacacccagggacatagaggctcaaactcagaaaccagaacctccagagtcagcagagaagcttctggaatctcccggtgtggaggctggagaaggggaggctgagaaggaggaggcgggggctcagggcaggcctctgagagccctgcagaactgctgctctgtgccctcccccctcccaccagaggacgctgggactggaggcctgagacagcaggaagaggaagcagtggagctccagcccccaccaccagcccctctgtctcccccacccccagccccaactgccccccaacctcctggggatcccctcatgagccgcctgttctatggggtgaaggcagggccaggggtgggggccccccgccgcagtggacacaccttcaccgtcaacccccggcggtctgtgccccctgcgaccccagccaccccaacctctccagccacagttgatgctgcagtcccgggggctgggaagaagcggtacccaactgccgaggagatcttggttctggggggctacctccgtctcagccgcagctgccttgccaaggggtcccccgaaagacaccacaaacagcttaagatctccttcagcgagacagccctggagaccacgtaccaatacccctccgagagttcggtactggaggagctgggcccggagcctgaggtccccagtgcccccaaccctccagcagcccaacccgacgacgaagaggatgaggaagagctgctgctgctgcagccagagctccagggcgggctgcgcaccaaggccctgattgtggatgagtcctgccggcggtgaccatcttccaacatagggatatacctccctccttcttataactgaagatcctggagcccggaagattcagggcagacagaccctgataatgagcctggcagggaagggcaaccaacatcttgtaacttgctttccccaccctgtttctgggggcagagccaattgcccaatttctaccctaatccaaagtccctggtgtgggtggggttaaacgtgctggtgcatcctaggtcatccaagagtgagcgccaagtcctgagaaggggcacagaactccctggagggtggagatggagcacctgccccccatggcagggtacactctccccacagccttcctccccaccatcccgtggggactctcgggatttaagcactcgtctctctgggaggcccagaccccactccatttataggcacatctccttcatttcctaggtcactgcccctttgtttacagctcctgcctcctcccttgaccacagcctggtttacaaattccatcagctcccagccccacctgccaaagtcccaggtttacaagccacgcttacttgctgtgtctgcgtggaattctctcctctgtcccctccagtctcctcattggagtgacctgaaggtgtggcttcctccactttttctcagtattactttgccttagttttccccaagagggaaggctggaactcttaactctgtaccccttgatagttatttaattctgtttctcctagtggttcacaattgaactgaattgagatggtgtcgggtggctaaggagacacctcacctctccttccccattgtgccgcctttatcaattgcctgttttgttttgtttgttttttaactttccataataaaatggagttctcttc

SEQ ID NO: 13764 - protein, 613 aa, Homo sapiens; identical to SEQ ID NO: 4721

SEQ ID NO: 13765 - DNA, 474 bp, Homo sapiens
cagggatcggttttcccctcttttcctgccatcctggactttccctccccttagggtagcaaaagagagaagtgaatttggagacagttttgagaacaggcactggccagggagcacagtgggagttctggacaggggttggggctgaggccagcagagggtcagaggttagacttgcaacaaagacctgcaggaaagtgggggcagccaggatgactccccctggccctggcctcacttcttccctgtgcacatccatctgtttccagcttgaaaatctctagggagacagaggtcccatctctactaaaaatacaaaaaaaaattagctgggcgtggtggcgggcacctgtagtcccaactacttgggaggctgaggcaggagaatggcgtgaacctgggaggcggagcttgcagtgagccgaggtcgtgccactgcactccagccttgacaacagagtgagactccgtctc

SEQ ID NO: 13766 - protein, 67 aa, Homo sapiens
LPLALASLLPCAHPSVSSLKISRETEVPSLLKIQKKISWAWWRAPVVPTTWEAEAGEWREPGRRSLQ

SEQ ID NO: 13767 - DNA, 1203 bp, Homo sapiens
cttgaaagcagtaagggacatggcctggggatccaagaggagatgagggtgggggaaacattctgccactgtttcgatcttttgtctctttttccctcaacttcctgtagatgcccgccagggatggctggctgccctgcaggaccgcagcatccttgcccccctggcatgggatctggggctcctgcttctatttgttgggcagcacagcctcatggcagctgaaagagtgaaggcatggacatcccggtactttggggtccttcagaggtcactgtatgtggcctgcactgccctggccttgcaggtatactaccatgtgctggggctgggcgagcctctggccctgaagtctccccgggctctcagactcttctcccacctgcgccacccagtgtgtgtggagctgctgacagtgctgtgggtggtgcctaccctgggcacggaccgtctcctccttgctttcctccttaccctctacctgggcctggctcacgggcttgatcagcaagacctccgctacctccgggcccagctacaaagaaaactccacctgctctctcggccccaggatggggaggcagagtgaggagctcactctggttacaagccctgttcttcctctcccactgaattctaaatccttaacatccaggccctggctgcttcatgccagaggcccaaatccatggactgaaggagatgccccttctactacttgagactttattctctgggtccagctccataccctaaattctgagtttcagccactgaactccaaggtccacttctcaccagcaaggaagagtggggtatggaagtcatctgtcccttcactgtttagagcatgacactctccccctcaacagcctcctgagaaggaaaggatctgccctgaccactcccctggcactgttacttgcctctgcgcctcaggggtccccttctgcaccgctggcttccactccaagaaggtggaccagggtctgcaagttcaacggtcatagctgtccctccaggccccaaccttgcctcaccactcccggccctagtctctgcacctccttaggccctgcctctgggctcagaccccaacctagtcaaggggattctcctgctcttaactcgatgacttggggctccctgctctcccgaggaagatgctctgcaggaaaataaaagtcagcctttttctacata

SEQ ID NO: 13768 - protein, 124 aa, Homo sapiens [sequence omitted]

SEQ ID NO: 13769 - DNA, 1401 bp, Homo sapiens
tgaaagcggccgagaagctacaggggagggagacctgagttctaaattaggaactcaaggattagagttttggagaggcgggagagtgaggactgagggagccgaaaagggcggtgaccggagtattctaaatgcccgccagggatggctggctgccctgcaggaccgcagcatccttgcccccctggcatgggatctggggctcctgcttctatttgttgggcagcacagcctcatggcagctgaaagagtgaaggcatggacatcccggtactttggggtccttcagaggtcactgtatgtggcctgcactgccctggccttgcagctggtgatgcggtactgggagcccatacccaaaggccctgtgttgtgggaggctcgggctgagccatgggccacctgggtgccgctcctctgctttgtgctccatgtcatctcctggctcctcatctttagcatccttctcgtctttgactatgctgagctcatgggcctcaaacaggtatactaccatgtgctggggctgggcgagcctctggccctgaagtctccccgggctctcagactcttctcccacctgcgccacccagtgtgtgtggagctgctgacagtgctgtgggtggtgcctaccctgggcacggaccgtctcctccttgctttcctccttaccctctacctgggcctggctcacgggcttgatcagcaagacctccgctacctccgggcccagctacaaagaaaactccacctgctctctcggccccaggatggggaggcagagtgaggagctcactctggttacaagccctgttcttcctctcccactgaattctaaatccttaacatccaggccctggctgcttcatgccagaggcccaaatccatggactgaaggagatgccccttctactacttgagactttattctctgggtccagctccataccctaaattctgagtttcagccactgaactccaaggtccacttctcaccagcaaggaagagtggggtatggaagtcatctgtcccttcactgtttagagcatgacactctccccctcaacagcctcctgagaaggaaaggatctgccctgaccactcccctggcactgttacttgcctctgcgcctcaggggtccccttctgcaccgctggcttccactccaagaaggtggaccagggtctgcaagttcaacggtcatagctgtccctccaggccccaaccttgcctcaccactcccggccctagtctctgcacctccttaggccctgcctctgggctcagaccccaacctagtcaaggggattctcctgctcttaactcgatgacttggggctccctgctctcccgaggaagatgctctgcaggaaaataaaagtcagcctttttctacata

SEQ ID NO: 13770 - protein, 183 aa, Homo sapiens
MAAERVKAWTSRYFGVLQRSLYVACTALALQLVMRYWEPIPKGPVLWEARAEPWATWVPLLCFVLHVISWLLIFSILLVFDYAELMGLKQVYYHVLGLGEPLALKSPRALRLFSHLRHPVCVELLTVLWVVPTLGTDRLLLAFLLTLYLGLAHGLDQQDLRYLRAQLQRKLHLLSRPQDGEAE

SEQ ID NO: 13771 - DNA, 1134 bp, Homo sapiens
atggcccctgcactgctcctgatccctgctgccctcgcctctttcatcctggcctttggagctggtgatgcggtactgggagcccatacccaaaggccctgtgttgtgggaggctcgggctgagccatgggccacctgggtgccgctcctctgctttgtgctccatgtcatctcctggctcctcatctttagcatccttctcgtctttgactatgctgagctcatgggcctcaaacaggtatactaccatgtgctggggctgggcgagcctctggccctgaagtctccccgggctctcagactcttctcccacctgcgccacccagtgtgtgtggagctgctgacagtgctgtgggtggtgcctaccctgggcacggaccgtctcctccttgctttcctccttaccctctacctgggcctggctcacgggcttgatcagcaagacctccgctacctccgggcccagctacaaagaaaactccacctgctctctcggccccaggatggggaggcagagtgaggagctcactctggttacaagccctgttcttcctctcccactgaattctaaatccttaacatccaggccctggctgcttcatgccagaggcccaaatccatggactgaaggagatgccccttctactacttgagactttattctctgggtccagctccataccctaaattctgagtttcagccactgaactccaaggtccacttctcaccagcaaggaagagtggggtatggaagtcatctgtcccttcactgtttagagcatgacactctccccctcaacagcctcctgagaaggaaaggatctgccctgaccactcccctggcactgttacttgcctctgcgcctcaggggtccccttctgcaccgctggcttccactccaagaaggtggaccagggtctgcaagttcaacggtcatagctgtccctccaggccccaaccttgcctcaccactcccggccctagtctctgcacctccttaggccctgcctctgggctcagaccccaacctagtcaaggggattctcctgctcttaactcgatgacttggggctccctgctctcccgaggaagatgctctgcaggaaaataaaagtcagcctttttctacata

SEQ ID NO: 13772 - protein, 150 aa, Homo sapiens
MRYWEPIPKGPVLWEARAEPWATWVPLLCFVLHVISWLLIFSILLVFDYAELMGLKQVYYHVLGLGEPLALKSPRALRLFSHLRHPVCVELLTVLWVVPTLGTDRLLLAFLLTLYLGLAHGLDQQDLRYLRAQLQRKLHLLSRPQDGEAE

SEQ ID NO: 13773 - DNA, 1224 bp, Homo sapiens
acccctccatttctcgccatggcccctgcactgctcctgatccctgctgccctcgcctctttcatcctggcctttggcaccggagtggagttcgtgcgctttacctcccttcggccacttcttggagggatcccggagtctggtggtccggctggtgatgcggtactgggagcccatacccaaaggccctgtgttgtgggaggctcgggctgagccatgggccacctgggtgccgctcctctgctttgtgctccatgtcatctcctggctcctcatctttagcatccttctcgtctttgactatgctgagctcatgggcctcaaacaggtatactaccatgtgctggggctgggcgagcctctggccctgaagtctccccgggctctcagactcttctcccacctgcgccacccagtgtgtgtggagctgctgacagtgctgtgggtggtgcctaccctgggcacggaccgtctcctccttgctttcctccttaccctctacctgggcctggctcacgggcttgatcagcaagacctccgctacctccgggcccagctacaaagaaaactccacctgctctctcggccccaggatggggaggcagagtgaggagctcactctggttacaagccctgttcttcctctcccactgaattctaaatccttaacatccaggccctggctgcttcatgccagaggcccaaatccatggactgaaggagatgccccttctactacttgagactttattctctgggtccagctccataccctaaattctgagtttcagccactgaactccaaggtccacttctcaccagcaaggaagagtggggtatggaagtcatctgtcccttcactgtttagagcatgacactctccccctcaacagcctcctgagaaggaaaggatctgccctgaccactcccctggcactgttacttgcctctgcgcctcaggggtccccttctgcaccgctggcttccactccaagaaggtggaccagggtctgcaagttcaacggtcatagctgtccctccaggccccaaccttgcctcaccactcccggccctagtctctgcacctccttaggccctgcctctgggctcagaccccaacctagtcaaggggattctcctgctcttaactcgatgacttggggctccctgctctcccgaggaagatgctctgcaggaaaataaaagtcagcctttttctacata

SEQ ID NO: 13774 - protein, 150 aa, Homo sapiens; identical to SEQ ID NO: 13772

SEQ ID NO: 13775 - DNA, 1244 bp, Homo sapiens
acccctccatttctcgccatggcccctgcactgctcctgatccctgctgccctcgcctctttcatcctggcctttggcaccggagtggagttcgtgcgctttacctcccttcggccacttcttggagggatcccggagtctggtggtccggatgcccgccagggatggctggctgccctgcaggaccgcagcatccttgcccccctggcatgggatctggggctcctgcttctatttgttgggcagcacagcctcatggcagctgaaagagtgaaggcatggacatcccggtactttggggtccttcagaggtcactgtatgtggcctgcactgccctggccttgcaggtatactaccatgtgctggggctgggcgagcctctggccctgaagtctccccgggctctcagactcttctcccacctgcgccacccagtgtgtgtggagctgctgacagtgctgtgggtggtgcctaccctgggcacggaccgtctcctccttgctttcctccttaccctctacctgggcctggctcacgggcttgatcagcaagacctccgctacctccgggcccagctacaaagaaaactccacctgctctctcggccccaggatggggaggcagagtgaggagctcactctggttacaagccctgttcttcctctcccactgaattctaaatccttaacatccaggccctggctgcttcatgccagaggcccaaatccatggactgaaggagatgccccttctactacttgagactttattctctgggtccagctccataccctaaattctgagtttcagccactgaactccaaggtccacttctcaccagcaaggaagagtggggtatggaagtcatctgtcccttcactgtttagagcatgacactctccccctcaacagcctcctgagaaggaaaggatctgccctgaccactcccctggcactgttacttgcctctgcgcctcaggggtccccttctgcaccgctggcttccactccaagaaggtggaccagggtctgcaagttcaacggtcatagctgtccctccaggccccaaccttgcctcaccactcccggccctagtctctgcacctccttaggccctgcctctgggctcagaccccaacctagtcaaggggattctcctgctcttaactcgatgacttggggctccctgctctcccgaggaagatgctctgcaggaaaataaaagtcagcctttttctacata

SEQ ID NO: 13776 - protein, 203 aa, Homo sapiens
MAPALLLIPAALASFILAFGTGVEFVRFTSLRPLLGGIPESGGPDARQGWLAALQDRSILAPLAWDLGLLLLFVGQHSLMAAERVKAWTSRYFGVLQRSLYVACTALALQVYYHVLGLGEPLALKSPRALRLFSHLRHPVCVELLTVLWVVPTLGTDRLLLAFLLTLYLGLAHGLDQQDLRYLRAQLQRKLHLLSRPQDGEAE

SEQ ID NO: 13777 - DNA, 1047 bp, Homo sapiens
acccctccatttctcgccatggcccctgcactgctcctgatccctgctgccctcgcctctttcatcctggcctttggcaccggagtggagttcgtgcgctttacctcccttcggccacttcttggagggatcccggagtctggtggtccgggtatactaccatgtgctggggctgggcgagcctctggccctgaagtctccccgggctctcagactcttctcccacctgcgccacccagtgtgtgtggagctgctgacagtgctgtgggtggtgcctaccctgggcacggaccgtctcctccttgctttcctccttaccctctacctgggcctggctcacgggcttgatcagcaagacctccgctacctccgggcccagctacaaagaaaactccacctgctctctcggccccaggatggggaggcagagtgaggagctcactctggttacaagccctgttcttcctctcccactgaattctaaatccttaacatccaggccctggctgcttcatgccagaggcccaaatccatggactgaaggagatgccccttctactacttgagactttattctctgggtccagctccataccctaaattctgagtttcagccactgaactccaaggtccacttctcaccagcaaggaagagtggggtatggaagtcatctgtcccttcactgtttagagcatgacactctccccctcaacagcctcctgagaaggaaaggatctgccctgaccactcccctggcactgttacttgcctctgcgcctcaggggtccccttctgcaccgctggcttccactccaagaaggtggaccagggtctgcaagttcaacggtcatagctgtccctccaggccccaaccttgcctcaccactcccggccctagtctctgcacctccttaggccctgcctctgggctcagaccccaacctagtcaaggggattctcctgctcttaactcgatgacttggggctccctgctctcccgaggaagatgctctgcaggaaaataaaagtcagcctttttctacata

SEQ ID NO: 13778 - protein, 109 aa, Homo sapiens
MAPALLLIPAALASFILAFGTGVEFVRFTSLRPLLGGIPESGGPGILPCAGAGRASGPEVSPGSQTLLPPAPPSVCGAADSAVGGAYPGHGPSPPCFPPYPLPGPGSRA

SEQ ID NO: 13779 - DNA, 1755 bp, Homo sapiens
atttgccattcttagcaactggccagtcaacaactcaactttataatgggaaaactagacgagctgagattcaacccacgtgagcggctgcagagccgctacccttaacagctctctctcgggattctaacattcccttctgtgacggagagacagcaggccgggacacgcatcccaggacggatccacagctggatggggaaggctgcgccaggcgggccggaagcctggcggtggcgtgcaggagccccgccctcctgggctggattcagccgggggcggggccgcgggcggggcctgtggcagcgggaatcccgaccccgcccctttccccacccctccatttctcgccatggcccctgcactgctcctgatccctgctgccctcgcctctttcatcctggcctttggcaccggagtggagttcgtgcgctttacctcccttcggccacttcttggagggatcccggagtctggtggtccggatgcccgccagggatggctggctgccctgcaggaccgcagcatccttgcccccctggcatgggatctggggctcctgcttctatttgttgggcagcacagcctcatggcagctgaaagagtgaaggcatggacatcccggtactttggggtccttcagaggtcactgtatgtggcctgcactgccctggccttgcagctggtgatgcggtactgggagcccatacccaaaggccctgtgttgtgggaggctcgggctgagccatgggccacctgggtgccgctcctctgctttgtgctccatgtcatctcctggctcctcatctttagcatccttctcgtctttgactatgctgagctcatgggcctcaaacaggtatactaccatgtgctggggctgggcgagcctctggccctgaagtctccccgggctctcagactcttctcccacctgcgccacccagtgtgtgtggagctgctgacagtgctgtgggtggtgcctaccctgggcacggaccgtctcctccttgctttcctccttaccctctacctgggcctggctcacgggcttgatcagcaagacctccgctacctccgggcccagctacaaagaaaactccacctgctctctcggccccaggatggggaggcagagtgaggagctcactctggttacaagccctgttcttcctctcccactgaattctaaatccttaacatccaggccctggctgcttcatgccagaggcccaaatccatggactgaaggagatgccccttctactacttgagactttattctctgggtccagctccataccctaaattctgagtttcagccactgaactccaaggtccacttctcaccagcaaggaagagtggggtatggaagtcatctgtcccttcactgtttagagcatgacactctccccctcaacagcctcctgagaaggaaaggatctgccctgaccactcccctggcactgttacttgcctctgcgcctcaggggtccccttctgcaccgctggcttccactccaagaaggtggaccagggtctgcaagttcaacggtcatagctgtccctccaggccccaaccttgcctcaccactcccggccctagtctctgcacctccttaggccctgcctctgggctcagaccccaacctagtcaaggggattctcctgctcttaactcgatgacttggggctccctgctctcccgaggaagatgctctgcaggaaaataaaagtcagcctttttctacata

SEQ ID NO: 13780 - protein, 262 aa, Homo sapiens; identical to SEQ ID NO: 1443

SEQ ID NO: 13781 - DNA, 376 bp, Homo sapiens
tgggcacggaccgtctcctccttgctttcctccttaccctctacagcctcctgagaaggaaaggatctgccctgaccactcccctggcactgttacttgcctctgcgcctcaggggtccccttctgcaccgctggcttccactccaagaaggtggaccagggtctgcaagttcaacggtcatagctgtccctccaggccccaaccttgcctcaccactcccggccctagtctctgcacctccttaggccctgcctctgggctcagaccccaacctagtcaaggggattctcctgctcttaactcgatgacttggggctccctgctctcccgaggaagatgctctgcaggaaaataaaagtcagcctttttctacat

SEQ ID NO: 13782 - protein, 60 aa, Homo sapiens
GHGPSPPCFPPYPLQPPEKERICPDHSPGTVTCLCASGVPFCTAGFHSKKVDQGLQVQRS

SEQ ID NO: 13783 - DNA, 2626 bp, Homo sapiens
ccagcctgttacccctgagcctacgtctcaggctactaggggaagaacagatagatcctctgtcaagactcctgaaacagttgtccccacagcccctgagctacaggcttccgcctccacagaccagcctgtcacctctgagcccacatctcggaccactaggggaagaaaaaatcggtcctctgtcaagacccctgaaacagttgtgcccgcagcccctgagctccagccttccacctccacagaccaacctgtcacccctgagcccacatctcgggccactaggggcaggacaaataggtcctctgtcaagacccctgaatcaattgtccctatagcccctgagcttcagccttccacctccagaaaccagcttgtcacccctgagcccacatctcgggccactaggtgcaggacaaataggtcctctgtcaagacccctgagccagttgtccccacagcccctgagccccatcctaccacctccacagaccagcctgtcacccccaagctcacatctagggccactaggagaaagacaaataggtcctctgtcaagactcccaaaccagttgaaccagcagcctctgatcttgagccttttacccccacagaccagtccgtcacccctgaggccatagctcagggtggtcagagcaaaacactgaggtcttccacagtaagagctatgccggttcctaccacccctgaattccaatctcctgtcaccacagaccagcctatttcccctgagcctattactcaacccagttgcatcaagaggcagagagccgctgggaaccctggctccctcgcagctcccattgaccataagccttgctctgcacccttggaacctaaatcccaggcctcaaggaaccaaagatggggagcagtgagagcagctgaatcccttacagccattcctgagcctgcctctccccagcttcttgagacaccaattcatgcctcccagatccaaaaggtggaaccagcaggtagatctaggttcaccccggagctccagcctaaggcctctcaaagccgcaagaggtctttagctaccatggattcaccaccacatcaaaaacagccccaaagaggggaagtctcccagaagacagtgattatcaaggaagaggaagaagatactgcagagaagccagggaaggaagaggtgaggagagggttgggaccacaaagctgggaaaaatgacttcagggctctgaaactcccaccaagatttttctcaatctcaggatgtcgtgactccaaaaccaggcaagagaaagagagaccaggcagaggaggagcccaacagaataccaagccgcagcctccgacggaccaaacttaaccaagaatcaacagcccccaaagtgctcttcacaggagtggtggatgctcggggagagcgggctgtgctggcactggggggaagtctggctggttcagcggcagaggcttcccacctggtcactgatcgcatccgccggacagtcaagttcctgtgtgccctggggcggggaatccccattctgtccctggactggctgcatcagtcccgcaaggctggtttcttcttacccccggatgaatatgtggtgaccgaccctgagcaagagaagaactttggctttagccttcaagacgcactgagcagggctcgggagcgaaggctgctagagggctatgagatctatgtgacccctggagtccagccaccaccacctcagatgggagagattattagctgctgtggaggcacatacctacccagcatgcctcggtcctataagcctcagagagttgtgatcacatgccctcaggacttccctcattgctccattccactacgggttgggctgcccctcctctcgcctgagttcctgctgactggagtgctgaagcaggaagccaagccagaggcctttgtcctctcccctttggagatgtcatccacctgagaactccactacccttttccctcccagaccacgaattagaagatatgtggaagaaagaactcagggcgttagaaaggattggggtatattgatacaacttgtcctggaacatgggtgggaccagaaatctttatgaataaatgaaaagataagggatttggaagccacaggttgttttttgtttgtttgtttgtttttttaatggccattttattttatttgtatttatagttttttatttgtatagatttaggggatacaagatttcttacatgcatgtattaaatggccattttaaaattagctagtttcatgctcagatgtcataagtggcagctatctttagccagactgttgcagttattgctcgatgccactcatggtgtcctacctcctatttggaaaccatctctatttttttcttactgagattcttactttggggtcaggaacttgaagggatgcttggagtgagtagatttgagggtccagttatggagtgctactaaaacattttcttctctcctggcctctggaagcatctttagctttgactttgggcaagtctctgtacttttctggccagcttttccaggatttataaaattagagcttcggcttgacctctgtgataaataaatattcactctgtgcctta

SEQ ID NO: 13784 - protein, 76 aa, Homo sapiens
MGEIISCCGGTYLPSMPRSYKPQRVVITCPQDFPHCSIPLRVGLPLLSPEFLLTGVLKQEAKPEAFVLSPLEMSST

SEQ ID NO: 13785 - DNA, 7576 bp, Homo sapiens
ttggatttaagaaaatgacctcaaaatgtccgtcagagacgtattcccaggaagaaagatattacttctactacaaaccaaatcaaaaggaaatgaaattccaatgcaacaggagtgaactgccacgcctacgggctgttctccaaactgcagcctccagccacgactgcaacgcgcaacccactttcatttctcatgagtcagcggacaccatgtctaggaggaccgaggaaaggcgctctggccttaccagacacgtcggacgtctatgacacagcccctctatccgttgccggcagctggcgccagactctctggtcgcggtttggaactgcgcgggaagtgggtggtgggcgggcaagcggtagtgggttgtcccttggagctgcccaatcgacgtgcattattctgttggcgcacggcggccttcaattaccgtctcattaactgatctcagcagcctgggagacaccacctatttgaactctaagggggcggggctttgggtgtgcctccgctcgactggctgcggttgtgaaagacagcggcagaagccaatcagcaaataagctctttttcggcacacgcagtcgctccacctgggtcgcgaccgttactggtggcgcgcgcggggacttaaagtagatcatggaggacacccaggctattgactgggatgttgaagaagaggaggagacagagcaatccagtgaatccttgaggtgtaacgtggagccagtagggcggctacatatctttagtggtgcccatggaccagaaaaagatttcccactacacctcgggaagaatgtggtaggccgaatgcctgactgctctgtggccctgccctttccatctatctccaaacaacatgcagagattgaaatcttagcctgggacaaggcacctatcctccgagactgtgggagccttaatggtactcaaatcctgagacctcctaaggttttgagccctggggtgagtcaccgtctgagggaccaggaattgattctctttgctgacttgctctgccagtaccatcgcctggatgtctctctgccctttgtctcccggggccctctgacagtagaagagacacccagagtacagggagaaactcaaccccagaggcttctgttggctgaggactcggaggaggaagtagattttctttctgaaaggcgtatggtaaaaaaatcaaggaccacatcttcctctgtgatagttccagagagtgatgaagaggggcattccccggtcctgggcggccttgggccgccttttgccttcaatttgaacagtgacacagatgtggaagaaggtcagcaaccagccacagaggaggcctcctcagctgccagaagaggtgccactgtagaggcaaagcagtctgaagctgaagttgtaactgaaatccagcttgaaaaggatcagcctttagtgaaggagagggacaatgatacaaaagtcaagaggggtgcagggaatggggtggttccagctggggtgattctggagaggagccaacctcctggagaggacagtgacacagatgtggatgatgacagcaggcctcctggaaggccagctgaggtccatttggaaagggctcagccttttggcttcatcgacagcgacactgatgcggaagaagagaggatcccagcaaccccagttgtcattcctatgaagaagaggaagatcttccatggagtaggtacaaggggtcctggagcaccaggcctggcccatctgcaggagagccaggctggtagtgatacagatgtggaagaaggcaaggccccacaggctgtccctctggagaaaagccaagcttccatggttatcaacagcgatacagatgacgaggaagaagtctcagcagcgctgactttggcacatctgaaagagagccagcctgctatatggaacagagatgcagaagaggacatgccccaacgtgtggtccttctgcagcgaagccaaaccaccactgagagagacagtgacacagacgtggaggaggaagagctcccagtggaaaatagagaagctgtcctcaaggatcacacaaagattagagcccttgttagagcacattcagaaaaggaccaacctccttttggggacagtgatgacagtgtggaagcagataagagctcacctgggatccacctggagagaagccaagcctccaccacagtggacatcaacacacaagtggagaaggaagtcccgccagggtcagccattatacatataaagaagcatcaggtgtctgtggaggggacaaatcaaacagatgtgaaagcagttgggggaccagcaaagctgcttgtggtatctctagaggaagcctggcctctgcatggggactgtgaaacagatgcagaggagggcacctccctaacagcctcagtagttgcagatgtaagaaagagccagcttccagcagaaggggatgctggggcagagtgggctgcagctgttcttaagcaggagagagctcatgaggtgggggcccagggtgggccacctgtggcacaagtggagcaggacctccctatctcaagagagaacctcacagatctggtggtggacacagacactctaggggaatccacccagccacagagagagggagcccaggtccccacaggaagggagagagaacaacatgtgggtgggaccaaggactctgaagacaactatggtgattctgaagatctggacctacaagctacccagtgctttctggagaatcagggcctggaagcagtccagagcatggaggatgaacctacccaggccttcatgttgactccaccccaagagcttggcccttcccattgcagcttccagacaacaggtaccctagatgaaccatgggaggtcctggctacacagccattctgtctgagagagtctgaggactctgagacccagccttttgacacgcaccttgaggcctatggaccttgcctgtctccacctagggcaataccaggagaccaacatccagagagcccagttcacacagagccaatggggattcaaggcagagggaggcagactgtggataaagtcatgggtataccaaaagaaacagcagagagggtgggccctgagagagggccattggagagagaaactgagaaactgctaccagaaagacagacagatgtgacaggagaggaagaattaaccaaggggaaacaggacagagaacaaaaacagttgttagctagagacacccagagacaagaatctgacaaaaatggggaaagtgcaagtcctgaaagagatagggagagtttgaaggtagaaattgagacatctgaggaaatacaagagaaacaagtacagaagcagacccttccaagcaaagcatttgagagagaagtagagagaccagtagcaaacagagagtgcgatccagccgagttagaagagaaggtgcccaaagtgatcctggagagagatacacagagaggggagccagagggagggagccaggaccagaaagggcaggcctccagcccaacaccagagcctggggtgggggcgggggaccttccgggacctacctcagcccccgtaccttctgggagccagtcaggtggaaggggatccccagtgagccccaggaggcatcagaaaggcctcctgaattgcaagatgccacctgctgagaaggcttccaggatcagagctgctgagaaggtttccaggggcgatcaggaatctccagatgcttgtctgcctcctacagtacctgaagccccagccccaccccaaaagccccttaactctcagagccagaaacatcttgcacctccgccccttctttctccccttttaccttctatcaagccaaccgttcgtaagaccaggcaagatgggagtcaggaagctccagaggctcccttgtcctcagagctggagcctttccacccaaagcctaaaattagaactcggaagtcctccagaatgacaccctttccagctacctctgctgcccctgagccccacccttccacctccacagcccagccagtcactcccaagcccacatctcaggccactaggagcaggacaaataggtcctctgtcaagacccctgaaccagttgtccccacagcccctgagctccagccttccacctccacagaccagcctgtcacctctgagcccacatctcaggttactaggggaagaaaaagtagatcctctgtcaagacccctgaaacagttgtgcccacagcccttgagctccagccttccacctccaccgaccgacctgtcacctctgaacccacctctcaggctactaggggaagaaaaaatagatcctctgtcaagacccctgaaccagttgtccccacagcccctgagctccagccttccacctccacagaccagcctgtcacttctgagcccacatatcaggctactaggggaagaaaaaatagatcctctgtcaagacccctgaaccagttgtgcccacagcccctgagctccggccttccacctccacagaccgacctgtcacccccaagcccacatctcggaccactaggagcaggacaaatatgtcctctgtcaagacccctgaaacagttgtccccacagcccctgagctccagatttccacctccacagaccaacctgtcacccctaagcccacatctcggaccactaggagcaggacaaatatgtcctctgtgaagaaccctgaatcaactgtccctatagcccctgagctcccaccttccacctccacagagcagcctgtcacccctgagcccacatctcgggctactaggggaagaaaaaatagatcctctggcaagacccctgaaacacttgtccccacagcccctaagctcgagccttccacttccacagaccaacctgtcactcctgagcccacatctcaggccaccaggggcaggacaaataggtcctctgtgaagacccctgaaacagttgtccccacagcccctgagctccagccttccacctccacagaccagcctgttacccctgagcctacgtctcaggctactaggggaagaacagatagatcctctgtcaagactcctgaaacagttgtccccacagcccctgagctacaggcttccgcctccacagaccagcctgtcacctctgagcccacatctcggaccactaggggaagaaaaaatcggtcctctgtcaagacccctgaaacagttgtgcccgcagcccctgagctccagccttccacctccacagaccaacctgtcacccctgagcccacatctcgggccactaggggcaggacaaataggtcctctgtcaagacccctgaatcaattgtccctatagcccctgagcttcagccttccacctccagaaaccagcttgtcacccctgagcccacatctcgggccactaggtgcaggacaaataggtcctctgtcaagacccctgagccagttgtccccacagcccctgagccccatcctaccacctccacagaccagcctgtcacccccaagctcacatctagggccactaggagaaagacaaataggtcctctgtcaagactcccaaaccagttgaaccagcagcctctgatcttgagccttttacccccacagaccagtccgtcacccctgaggccatagctcagggtggtcagagcaaaacactgaggtcttccacagtaagagctatgccggttcctaccacccctgaattccaatctcctgtcaccacagaccagcctatttcccctgagcctattactcaacccagttgcatcaagaggcagagagccgctgggaaccctggctccctcgcagctcccattgaccataagccttgctctgcacccttggaacctaaatcccaggcctcaaggaaccaaagatggggagcagtgagagcagctgaatcccttacagccattcctgagcctgcctctccccagcttcttgagacaccaattcatgcctcccagatccaaaaggtggaaccagcaggtagatctaggttcaccccggagctccagcctaaggcctctcaaagccgcaagaggtctttagctaccatggattcaccaccacatcaaaaacagccccaaagaggggaagtctcccagaagacagtgattatcaaggaagaggaagaagatactgcagagaagccagggaaggaagaggatgtcgtgactccaaaaccaggcaagagaaagagagaccaggcagaggaggagcccaacagaataccaagccgcagcctccgacggaccaaacttaaccaagaatcaacagcccccaaagtgctcttcacaggagtggtggatgctcggggagagcgggctgtgctggcactggggggaagtctggctggttcagcggcagaggcttcccacctggtcactgatcgcatccgccggacagtcaagttcctgtgtgccctggggcggggaatccccattctgtccctggactggctgcatcagtcccgcaaggctggtttcttcttacccccggatgaatatgtggtgaccgaccctgagcaagagaagaactttggctttagccttcaagacgcactgagcagggctcgggagcgaaggctgctagagggctatgagatctatgtgacccctggagtccagccaccaccacctcagatgggagagattattagctgctgtggaggcacatacctacccagcatgcctcggtcctataagcctcagagagttgtgatcacatgccctcaggacttccctcattgctccattccactacgggttgggctgcccctcctctcgcctgagttcctgctgactggagtgctgaagcaggaagccaagccagaggcctttgtcctctcccctttggagatgtcatccacctgagaactccactacccttttccctcccagaccacgaattagaagatatgtggaagaaagaactcagggcgttagaaaggattggggtatattgatacaacttgtcctggaacatgggtgggaccagaaatctttatgaataaatgaaaagataagggatttggaagccacaggttgttttttgtttgtttgtttgtttttttaatggccattttattttatttgtatttatagttttttatttgtatagatttaggggatacaagatttcttacatgcatgtattaaatggccattttaaaattagctagtttcatgctcagatgtcataagtggcagctatctttagccagactgttgcagttattgctcgatgccactcatggtgtcctacctcctatttggaaaccatctctatttttttcttactgagattcttactttggggtcaggaacttgaagggatgcttggagtgagtagatttgagggtccagttatggagtgctactaaaacattttcttctctcctggcctctggaagcatctttagctttgactttgggcaagtctctgtacttttctggccagcttttccaggatttataaaattagagcttcggcttgacctctgtgataaataaatattcactctgtgcctta

SEQ ID NO: 13786 - protein, 2089 aa, Homo sapiens
MEDTQAIDWDVEEEEETEQSSESLRCNVEPVGRLHIFSGAHGPEKDFPLHLGKNVVGRMPDCSVALPFPSISKQHAEIEILAWDKAPILRDCGSLNGTQILRPPKVLSPGVSHRLRDQELILFADLLCQYHRLDVSLPFVSRGPLTVEETPRVQGETQPQRLLLAEDSEEEVDFLSERRMVKKSRTTSSSVIVPESDEEGHSPVLGGLGPPFAFNLNSDTDVEEGQQPATEEASSAARRGATVEAKQSEAEVVTEIQLEKDQPLVKERDNDTKVKRGAGNGVVPAGVILERSQPPGEDSDTDVDDDSRPPGRPAEVHLERAQPFGFIDSDTDAEEERIPATPVVIPMKKRKIFHGVGTRGPGAPGLAHLQESQAGSDTDVEEGKAPQAVPLEKSQASMVINSDTDDEEEVSAALTLAHLKESQPAIWNRDAEEDMPQRVVLLQRSQTTTERDSDTDVEEEELPVENREAVLKDHTKIRALVRAHSEKDQPPFGDSDDSVEADKSSPGIHLERSQASTTVDINTQVEKEVPPGSAIIHIKKHQVSVEGTNQTDVKAVGGPAKLLVVSLEEAWPLHGDCETDAEEGTSLTASVVADVRKSQLPAEGDAGAEWAAAVLKQERAHEVGAQGGPPVAQVEQDLPISRENLTDLVVDTDTLGESTQPQREGAQVPTGREREQHVGGTKDSEDNYGDSEDLDLQATQCFLENQGLEAVQSMEDEPTQAFMLTPPQELGPSHCSFQTTGTLDEPWEVLATQPFCLRESEDSETQPFDTHLEAYGPCLSPPRAIPGDQHPESPVHTEPMGIQGRGRQTVDKVMGIPKETAERVGPERGPLERETEKLLPERQTDVTGEEELTKGKQDREQKQLLARDTQRQESDKNGESASPERDRESLKVEIETSEEIQEKQVQKQTLPSKAFEREVERPVANRECDPAELEEKVPKVILERDTQRGEPEGGSQDQKGQASSPTPEPGVGAGDLPGPTSAPVPSGSQSGGRGSPVSPRRHQKGLLNCKMPPAEKASRIRAAEKVSRGDQESPDACLPPTVPEAPAPPQKPLNSQSQKHLAPPPLLSPLLPSIKPTVRKTRQDGSQEAPEAPLSSELEPFHPKPKIRTRKSSRMTPFPATSAAPEPHPSTSTAQPVTPKPTSQATRSRTNRSSVKTPEPVVPTAPELQPSTSTDQPVTSEPTSQVTRGRKSRSSVKTPETVVPTALELQPSTSTDRPVTSEPTSQATRGRKNRSSVKTPEPVVPTAPELQPSTSTDQPVTSEPTYQATRGRKNRSSVKTPEPVVPTAPELRPSTSTDRPVTPKPTSRTTRSRTNMSSVKTPETVVPTAPELQISTSTDQPVTPKPTSRTTRSRTNMSSVKNPESTVPIAPELPPSTSTEQPVTPEPTSRATRGRKNRSSGKTPETLVPTAPKLEPSTSTDQPVTPEPTSQATRGRTNRSSVKTPETVVPTAPELQPSTSTDQPVTPEPTSQATRGRTDRSSVKTPETVVPTAPELQASASTDQPVTSEPTSRTTRGRKNRSSVKTPETVVPAAPELQPSTSTDQPVTPEPTSRATRGRTNRSSVKTPESIVPIAPELQPSTSRNQLVTPEPTSRATRCRTNRSSVKTPEPVVPTAPEPHPTTSTDQPVTPKLTSRATRRKTNRSSVKTPKPVEPAASDLEPFTPTDQSVTPEAIAQGGQSKTLRSSTVRAMPVPTTPEFQSPVTTDQPISPEPITQPSCIKRQRAAGNPGSLAAPIDHKPCSAPLEPKSQASRNQRWGAVRAAESLTAIPEPASPQLLETPIHASQIQKVEPAGRSRFTPELQPKASQSRKRSLATMDSPPHQKQPQRGEVSQKTVIIKEEEEDTAEKPGKEEDVVTPKPGKRKRDQAEEEPNRIPSRSLRRTKLNQESTAPKVLFTGVVDARGERAVLALGGSLAGSAAEASHLVTDRIRRTVKFLCALGRGIPILSLDWLHQSRKAGFFLPPDEYVVTDPEQEKNFGFSLQDALSRARERRLLEGYEIYVTPGVQPPPPQMGEIISCCGGTYLPSMPRSYKPQRVVITCPQDFPHCSIPLRVGLPLLSPEFLLTGVLKQEAKPEAFVLSPLEMSST

SEQ ID NO: 13787 - DNA, 2134 bp, Homo sapiens
ccagcctgttacccctgagcctacgtctcaggctactaggggaagaacagatagatcctctgtcaagactcctgaaacagttgtccccacagcccctgagctacaggcttccgcctccacagaccagcctgtcacctctgagcccacatctcggaccactaggggaagaaaaaatcggtcctctgtcaagacccctgaaacagttgtgcccgcagcccctgagctccagccttccacctccacagaccaacctgtcacccctgagcccacatctcgggccactaggggcaggacaaataggtcctctgtcaagacccctgaatcaattgtccctatagcccctgagcttcagccttccacctccagaaaccagcttgtcacccctgagcccacatctcgggccactaggtgcaggacaaataggtcctctgtcaagacccctgagccagttgtccccacagcccctgagccccatcctaccacctccacagaccagcctgtcacccccaagctcacatctagggccactaggagaaagacaaataggtcctctgtcaagactcccaaaccagttgaaccagcagcctctgatcttgagccttttacccccacagaccagtccgtcacccctgaggccatagctcagggtggtcagagcaaaacactgaggtcttccacagtaagagctatgccggttcctaccacccctgaattccaatctcctgtcaccacagaccagcctatttcccctgagcctattactcaacccagttgcatcaagaggcagagagccgctgggaaccctggctccctcgcagctcccattgaccataagccttgctctgcacccttggaacctaaatcccaggcctcaaggaaccaaagatggggagcagtgagagcagctgaatcccttacagccattcctgagcctgcctctccccagcttcttgagacaccaattcatgcctcccagatccaaaaggtggaaccagcaggtagatctaggttcaccccggagctccagcctaaggcctctcaaagccgcaagaggtctttagctaccatggattcaccaccacatcaaaaacagccccaaagaggggaagtctcccagaagacagtgattatcaaggaagaggaagaagatactgcagagaagccagggaaggaagaggtgaggagagggttgggaccacaaagctgggaaaaatgacttcagggctctgaaactcccaccaagatttttctcaatctcaggatgtcgtgactccaaaaccaggcaagagaaagagagaccaggcagaggaggagcccaacagaataccaagccgcagcctccgacggaccaaacttaaccaagaatcaacagcccccaaagtgctcttcacaggagtggtggatgctcggggagagcgggctgtgctggcactggggggaagtctggctggttcagcggcagaggcttcccacctggtcactgatcgcatccgccggacagtcaagttcctgtgtgccctggggcggggaatccccattctgtccctggactggctgcatcagtcccgcaaggctggtttcttcttacccccggatgaatatgtggtgaccgaccctgagcaagagaagaactttggctttagccttcaagacgcactgagcagggctcgggagcgaaggctgctagagggctatgagatctatgtgacccctggagtccagccaccaccacctcagatgggagagattattagctgctgtggaggcacatacctacccagcatgcctcggtcctataagcctcagagagttgtgatcacatgccctcaggacttccctcattgctccattccactacgggttgggctgcccctcctctcgcctgagttcctgctgactggagtgctgaagcaggaagccaagccagaggcctttgtcctctcccctttggagatgtcatccacctgagaactccactacccttttccctcccagaccacgaattagaagatatgtggaagaaagaactcagggcgttagaaaggattggggtatattgatacaacttgtcctggaacatgggtgggaccagaaatctttatgaataaatgaaaagataagggatttggaagcc

SEQ ID NO: 13788 - protein, 76 aa, Homo sapiens; identical to SEQ ID NO: 13784

SEQ ID NO: 13789 - DNA, 737 bp, Homo sapiens
cactatatcggtctgtcatcatcccttggcctctcacctgatgcagccagtccagggacagaatggggattccccgccccagggcacacaggaacttgactgtccggcggatgcgatcagtgaccagacacctgatgcttctttatatgtataatggctgaccctggcgggacttccttctccacttgtgtgttgatgtccactgtggtggaggcttggcttctctccaggtggatcccagatgtgccaaagtcagcgctgctgagacttcttcctcgtcatctgtatcgctgttgataaccatggaagcttggcttttctccagagggacagcctgtggggccttgccttcttccacatctgtatcactaccagcctggctctcctgcagatgggccaggcctggtgctccaggaccccttgtacctactccatggaagatcttcctcttcttcataggaatgacaactggggttgctgggatcctctcttcttccgcatcagtgtcgctgtcgatgaagccaaaaggctgagccctttccaaatggacctcagctggccttccaggaggcctgctgtcatcatccacatctgtgtcactgtcctctccaggaggttggctcctctccagaatcaccccagctggaaccaccccattccctgcacccctcttgacttttgtatcattgtccctctccttcactaaaggctgatccttttcaagctggatttcagtt

SEQ ID NO: 13790 - protein, 47 aa, Homo sapiens
MADPGGTSFSTCVLMSTVVEAWLLSRWIPDVPKSALLRLLPRHLYRC

SEQ ID NO: 13791 - DNA, 1522 bp, Homo sapiens
gagcaggacaaatatgtcctctgtcaagacccctgaaacagttgtccccacagcccctgagctccagatttccacctccacagaccaacctgtcacccctaagcccacatctcggaccactaggagcaggacaaatatgtcctctgtgaagaaccctgaatcaactgtccctatagcccctgagctcccaccttccacctccacagagcagcctgtcacccctgagcccacatctcgggctactaggggaagaaaaaatagatcctctggcaagacccctgaaacacttgtccccacagcccctaagctcgagccttccacttccacagaccaacctgtcactcctgagcccacatctcaggccaccaggggcaggacaaataggtcctctgtgaagacccctgaaacagttgtccccacagcccctgagctccagccttccacctccacagaccagcctgttacccctgagcctacgtctcaggctactaggggaagaacagatagatcctctgtcaagactcctgaaacagttgtccccacagcccctgagctacaggcttccgcctccacagaccagcctgtcacccctgagctccagccttccacctccacagaccaacctgtcacccctgagcccacatctcgggccactaggggcaggacaaataggtcctctgtcaagacccctgaatcaattgtccctatagcccctgagcttcagccttccacctccagaaaccagcttgtcacccctgagcccacatctcgggccactaggtgcaggacaaataggtcctctgtcaagacccctgagccagttgtccccacagcccctgagccccatcctaccacctccacagaccagcctgtcacccccaagctcacatctagggccactaggagaaagacaaataggtcctctgtcaagactcccaaaccagttgaaccagcagcctctgatcttgagccttttacccccacagaccagtccgtcacccctgaggccatagctcagggtggtcagagcaaaacactgaggtcttccacagtaagagctatgccggttcctaccacccctgaattccaatctcctgtcaccacagaccagcctatttcccctgagcctattactcaacccagttgcatcaagaggcagagagccgctgggaaccctggctccctcgcagctcccattgaccataagccttgctctgcacccttggaacctaaatcccaggcctcaaggaaccaaagatggggagcagtgagagcagctgaatcccttacagccattcctgagcctgcctctccccagcttcttgagacaccaattcatgcctcccagatccaaaaggtggaaccagcaggtagatctaggttcaccccggagctccagcctaaggcctctcaaagccgcaagaggtctttagctaccatggattcaccaccacatcaaaaacagccccaaagaggggaagtctcccagaagacagtgattatcaaggaagaggaagaagat

SEQ ID NO: 13792 - protein, 502 aa, Homo sapiens
MSSVKTPETVVPTAPELQISTSTDQPVTPKPTSRTTRSRTNMSSVKNPESTVPIAPELPPSTSTEQPVTPEPTSRATRGRKNRSSGKTPETLVPTAPKLEPSTSTDQPVTPEPTSQATRGRTNRSSVKTPETVVPTAPELQPSTSTDQPVTPEPTSQATRGRTDRSSVKTPETVVPTAPELQASASTDQPVTPELQPSTSTDQPVTPEPTSRATRGRTNRSSVKTPESIVPIAPELQPSTSRNQLVTPEPTSRATRCRTNRSSVKTPEPVVPTAPEPHPTTSTDQPVTPKLTSRATRRKTNRSSVKTPKPVEPAASDLEPFTPTDQSVTPEAIAQGGQSKTLRSSTVRAMPVPTTPEFQSPVTTDQPISPEPITQPSCIKRQRAAGNPGSLAAPIDHKPCSAPLEPKSQASRNQRWGAVRAAESLTAIPEPASPQLLETPIHASQIQKVEPAGRSRFTPELQPKASQSRKRSLATMDSPPHQKQPQRGEVSQKTVIIKEEEE

SEQ ID NO: 13793 - DNA, 1122 bp, Homo sapiens
caggctactaggggaagaaaaaatagatcctctgtcaagacccctgaaccagttgtgcccacagcccctgagctccggccttccacctccacagaccgacctgtcacccccaagcccacatctcggaccactaggagcaggacaaatatgtcctctgtcaagacccctgaaacagttgtccccacagcccctgagctccagatttccacctccacagaccaacctgtcacccctaagcccacatctcggaccactaggagcaggacaaatatgtcctctgtgaagaaccctgaatcaactgtccctatagcccctgagctcccaccttccacctccagaaaccagcttgtcacccctgagcccacatctcgggccactaggtgcaggacaaataggtcctctgtcaagacccctgagccagttgtccccacagcccctgagccccatcctaccacctccacagaccagcctgtcacccccaagctcacatctagggccactaggagaaagacaaataggtcctctgtcaagactcccaaaccagttgaaccagcagcctctgatcttgagccttttacccccacagaccagtccgtcacccctgaggccatagctcagggtggtcagagcaaaacactgaggtcttccacagtaagagctatgccggttcctaccacccctgaattccaatctcctgtcaccacagaccagcctatttcccctgagcctattactcaacccagttgcatcaagaggcagagagccgctgggaaccctggctccctcgcagctcccattgaccataagccttgctctgcacccttggaacctaaatcccaggcctcaaggaaccaaagatggggagcagtgagagcagctgaatcccttacagccattcctgagcctgcctctccccagcttcttgagacaccaattcatgcctcccagatccaaaaggtggaaccagcaggtagatctaggttcaccccggagctccagcctaaggcctctcaaagccgcaagaggtctttagctaccatggattcaccaccacatcaaaaacagccccaaagaggggaagtctcccagaagacagtgattatcaaggaagaggaagaagat

SEQ ID NO: 13794 - protein, 324 aa, Homo sapiens
MSSVKTPETVVPTAPELQISTSTDQPVTPKPTSRTTRSRTNMSSVKNPESTVPIAPELPPSTSRNQLVTPEPTSRATRCRTNRSSVKTPEPVVPTAPEPHPTTSTDQPVTPKLTSRATRRKTNRSSVKTPKPVEPAASDLEPFTPTDQSVTPEAIAQGGQSKTLRSSTVRAMPVPTTPEFQSPVTTDQPISPEPITQPSCIKRQRAAGNPGSLAAPIDHKPCSAPLEPKSQASRNQRWGAVRAAESLTAIPEPASPQLLETPIHASQIQKVEPAGRSRFTPELQPKASQSRKRSLATMDSPPHQKQPQRGEVSQKTVIIKEEEE

SEQ ID NO: 13795 - DNA, 1405 bp, Homo sapiens
ctggagagaagccaagcctccaccacagtggacatcaacacacaagtggagaaggaagtcccgccagggtcagccattatacatataaagaagcatcaggtgtctgtggaggggacaaatcaaacagatgtgaaagcagttgggggaccagcaaagctgcttgtggtatctctagaggaagcctggcctctgcatggggactgtgaaacagatgcagaggagggcacctccctaacagcctcagtagttgcagatgtaagaaagagccagcttccagcagaaggggatgctggggcagagtgggctgcagctgttcttaagcaggagagagctcatgaggtgggggcccagggtgggccacctgtggcacaagtggagcaggacctccctatctcaagagagaacctcacagatctggtggtggacacagacactctaggggaatccacccagccacagagagagggagcccaggtccccacaggaagggagagagaacaacatgtgggtgggaccaaggactctgaagacaactatggtgattctgaagatctggacctacaagctacccagtgctttctggagaatcagggcctggaagcagtccagagcatggaggatgaacctacccaggccttcatgttgactccaccccaagagcttggcccttcccattgcagcttccagacaacaggcctcctgaattgcaagatgccacctgctgagaaggcttccaggatcagagctgctgagaaggtttccaggggcgatcaggaatctccagatgcttgtctgcctcctacagtacctgaagccccagccccaccccaaaagccccttaactctcagagccagaaacatcttgcacctccgccccttctttctccccttttaccttctatcaagccaaccgttcgtaagaccaggcaagatgggagtcaggaagctccagaggctcccttgtcctcagagctggagcctttccacccaaagcctaaaattagaactcggaagtcctccagaatgacaccctttccagctacctctgctgcccctgagccccacccttccacctccacagcccagccagtcactcccaagcccacatctcaggccactaggagcaggacaaataggtcctctgtcaagacccctgaaccagttgtccccacagcccctgagctccagccttccacctccacagaccagcctgtcacctctgagcccacatctcaggttactaggggaagaaaaagtagatcctctgtcaagacccctgaaacagttgtgcccacagcccttgagctccagccttccacctccaccgaccgacctgtcacctctgaacccacctctcaggctactaggggaagaaaaaatagatcctctgtcaagacccctgaac

SEQ ID NO: 13796 - protein, 263 aa, Homo sapiens
MEDEPTQAFMLTPPQELGPSHCSFQTTGLLNCKMPPAEKASRIRAAEKVSRGDQESPDACLPPTVPEAPAPPQKPLNSQSQKHLAPPPLLSPLLPSIKPTVRKTRQDGSQEAPEAPLSSELEPFHPKPKIRTRKSSRMTPFPATSAAPEPHPSTSTAQPVTPKPTSQATRSRTNRSSVKTPEPVVPTAPELQPSTSTDQPVTSEPTSQVTRGRKSRSSVKTPETVVPTALELQPSTSTDRPVTSEPTSQATRGRKNRSSVKTP

SEQ ID NO: 13797 - DNA, 1213 bp, Homo sapiens
gaatctgacaaaaatggggaaagtgcaagtcctgaaagagatagggagagtttgaaggtagaaattgagacatctgaggaaatacaagagaaacaagtacagaagcagacccttccaagcaaagcatttgagagagaagtagagagaccagtagcaaacagagagtgcgatccagccgagttagaagagaaggtgcccaaagtgatcctggagagagatacacagagaggggagccagagggagggagccaggaccagaaagggcaggcctccagcccaacaccagagcctggggtgggggcgggggaccttccgggacctacctcagcccccgtaccttctgggagccagtcaggtggaaggggatccccagtgagccccaggaggcatcagaaaggtaagtgaaggcagaggggaacccaaggtgatacacaggcctcgtgataatcaacccctgggcaaccagctgcttggaactcagccacctttgtgtttactttctgtctaggcctcctgaattgcaagatgccacctgctgagaaggcttccaggatcagagctgctgagaaggtttccaggggcgatcaggaatctccagatgcttgtctgcctcctacagtacctgaagccccagccccaccccaaaagccccttaactctcagagccagaaacatcttgcacctccgccccttctttctccccttttaccttctatcaagccaaccgttcgtaagaccaggcaagatgggagtcaggaagctccagaggctcccttgtcctcagagctggagcctttccacccaaagcctaaaattagaactcggaagtcctccagaatgacaccctttccagctacctctgctgcccctgagccccacccttccacctccacagcccagccagtcactcccaagcccacatctcaggccactaggagcaggacaaataggtcctctgtcaagacccctgaaccagttgtccccacagcccctgagctccagccttccacctccacagaccagcctgtcacctctgagcccacatctcaggttactaggggaagaaaaagtagatcctctgtcaagacccctgaaacagttgtgcccacagcccttgagctccagccttccacctccaccgaccgacctgtcacctctgaacccacctctcaggctactaggggaagaaaaaatagatcctctgtcaagaccc

SEQ ID NO: 13798 - protein, 228 aa, Homo sapiens
MPPAEKASRIRAAEKVSRGDQESPDACLPPTVPEAPAPPQKPLNSQSQKHLAPPPLLSPLLPSIKPTVRKTRQDGSQEAPEAPLSSELEPFHPKPKIRTRKSSRMTPFPATSAAPEPHPSTSTAQPVTPKPTSQATRSRTNRSSVKTPEPVVPTAPELQPSTSTDQPVTSEPTSQVTRGRKSRSSVKTPETVVPTALELQPSTSTDRPVTSEPTSQATRGRKNRSSVK

SEQ ID NO: 13799 - DNA, 1709 bp, Homo sapiens
gtacatgaccggcatcgactaatcagggccaggctcgatgaggctttgtctccctaccgcgcgcggggccgattctcccgcctcccagccccggcgcacgcgcgccccgcccagcctgctttccctccgcgccctcccctctcctttctccctctcagaaccttcctgccgtcgcgtttgcacctcgctgctccagcctctggggcgcattccaaccttccagcctgcgacctgcggagaaaaaaaattacttattttcttgccccatacataccttgaggcgagcaaaaaaattaaattttaaccatgagggaaatcgtgcacatccaggctggtcagtgtggcaaccagatcggtgccaagttctgggaggtgatcagtgatgaacatggcatcgaccccaccggcacctaccacggggacagcgacctgcagctggaccgcatctctgtgtactacaatgaagccacaggtggcaaatatgttcctcgtgccatcctggtggatctagaacctgggaccatggactctgttcgctcaggtccttttggccagatctttagaccagacaactttgtatttggtcagtctggggcaggtaacaactgggccaaaggccactacacagagggcgccgagctggttgattctgtcctggatgtggtacggaaggaggcagagagctgtgactgcctgcagggcttccagctgacccactcactgggcgggggcacaggctctggaatgggcactctccttatcagcaagatccgagaagaataccctgatcgcatcatgaataccttcagtgtggtgccttcacccaaagtgtctgacaccgtggtcgagccctacggggatctgaaccaccttgtctcagccaccatgagtggtgtcaccacctgcctccgtttccctggccagctcaatgctgacctccgcaagttggcagtcaacatggtccccttcccacgtctccatttctttatgcctggctttgcccctctcaccagccgtggaagccagcagtatcgagctctcacagtgccggaactcacccagcaggtcttcgatgccaagaacatgatggctgcctgtgacccccgccacggccgatacctcaccgtggctgctgtcttccgtggtcggatgtccatgaaggaggtcgatgagcagatgcttaacgtgcagaacaagaacagcagctactttgtggaatggatccccaacaatgtcaagacagccgtctgtgacatcccacctcgtggcctcaagatggcagtcaccttcattggcaatagcacagccatccaggagctcttcaagcgcatctcggagcagttcactgccatgttccgccggaaggccttcctccactggtacacaggcgagggcatggacgagatggagttcaccgaggctgagagcaacatgaacgacctcgtctctgagtatcagcagtaccaggatgccaccgcagaagaggaggaggatttcggtgaggaggccgaagaggaggcctaaggcagagcccccatcacctcaggcttctcagttcccttagccgtcttactcaactgcccctttcctctccctcagaatttgtgtttgctgcctctatcttgttttttgttttttcttctggggggggtctagaacagtgcctggcacatagtaggcgctcaataaatacttgtttgttgaatgtc

SEQ ID NO: 13800 - protein, 405 aa, Homo sapiens
MREIVHIQAGQCGNQIGAKFWEVISDEHGIDPTGTYHGDSDLQLDRISVYYNEATGGKYVPRAILVDLEPGTMDSVRSGPFGQIFRPDNFVFGQSGAGNNWAKGHYTEGAELVDSVLDVVRKEAESCDCLQGFQLTHSLGGGTGSGMGTLLISKIREEYPDRIMNTFSVVPSPKVSDTVVEPYGDLNHLVSATMSGVTTCLRFPGQLNADLRKLAVNMVPFPRLHFFMPGFAPLTSRGSQQYRALTVPELTQQVFDAKNMMAACDPRHGRYLTVAAVFRGRMSMKEVDEQMLNVQNKNSSYFVEWIPNNVKTAVCDIPPRGLKMAVTFIGNSTAIQELFKRISEQFTAMFRRKAFLHWYTGEGMDEMEFTEAESNMNDLVSEYQQYQDATAEEEEDFGEEAEEEA

SEQ ID NO: 13801 - DNA, 2553 bp, Homo sapiens
gtacatgaccggcatcgactaatcagggccaggctcgatgaggctttgtctccctaccgcgcgcggggccgattctcccgcctcccagccccggcgcacgcgcgccccgcccagcctgctttccctccgcgccctcccctctcctttctccctctcagaaccttcctgccgtcgcgtttgcacctcgctgctccagcctctggggcgcattccaaccttccagcctgcgacctgcggagaaaaaaaattacttattttcttgccccatacataccttgaggcgagcaaaaaaattaaattttaaccatgagggaaatcgtgcacatccaggctggtcagtgtggcaaccagatcggtgccaagttctgggaggtgatcagtgatgaacatggcatcgaccccaccggcacctaccacggggacagcgacctgcagctggaccgcatctctgtgtactacaatgaagccacaggtggcaaatatgttcctcgtgccatcctggtggatctagaacctgggaccatggactctgttcgctcaggtccttttggccagatctttagaccagacaactttgtatttggtcagtctggggcaggtaacaactgggccaaaggccactacacagagggcgccgagctggttgattctgtcctggatgtggtacggaaggaggcagagagctgtgactgcctgcagggcttccagctgacccactcactgggcgggggcacaggctctggaatgggcactctccttatcagcaagatccgagaagaataccctgatcgcatcatgaataccttcagtgtggtgccttcacccaaagtgtctgacaccgtggtcgagccctacggggatctgaaccaccttgtctcagccaccatgagtggtgtcaccacctgcctccgtttccctggccagctcaatgctgacctccgcaagttggcagtcaacatggtccccttcccacgtctccatttctttatgcctggctttgcccctctcaccagccgtggaagccagcagtatcgagctctcacagtgccggaactcacccagcaggtcttcgatgccaagaacatgatggctgcctgtgacccccgccacggccgatacctcaccgtggctgctgtcttccgtggtcggatgtccatgaaggaggtcgatgagcagatgcttaacgtgcagaacaagaacagcagctactttgtggaatggatccccaacaatgtcaagacagccgtctgtgacatcccacctcgtggcctcaagatggcagtcaccttcattggcaatagcacagccatccaggagctcttcaagcgcatctcggagcagttcactgccatgttccgccggaaggccttcctccactggtacacaggcgagggcatggacgagatggagttcaccgaggctgagagcaacatgaacgacctcgtctctgagtatcagcagtaccaggatgccaccgcagaagaggaggaggatttcggtgaggaggccgaagaggaggcctaaggcagagcccccatcacctcaggcttctcagttcccttagccgtcttactcaactgcccctttcctctccctcagaatttgtgtttgctgcctctatcttgttttttgttttttcttctggggggggtctagaacagtgcctggcacatagtaggcgctcaataaatacttgtttgttgaatgtctcctctctctttccactctgggaaacctaggtttctgccattctgggtgaccctgtatttctttctggtgcccattccatttgtccagttaatacttcctcttaaaaatctccaagaagctgggtctccagatcccatttagaaccaaccaggtgctgaaaacacatgtagataatggccatcatcctaagcccaaagtagaaaatggtagaaggtagtgggtagaagtcactatataaggaaggggatgggattttccattctaaaagttttggagagggaaatccaggctattaaagtcactaaatttctaagtatgtccatttcccatctcagcttcaagggaggtgtcagcagtattatctccactttcaatctccctccaagctctactctggaggagtctgtcccactctgtcaagtggaatccttccctttccaactctacctccctcactcagctcctttcccctgatcagagaaagggatcaagggggttgggaggggggaaagagaccagccttggtccctaagcctccagaaacgtcttcttaatccccaccttttcttactcccaaaaaagaatgaacacccctgactctggagtggtgtatactgccacatcagtgtttgagtcagtccccagaggagaggggaaccctcctccatcttttttgcaacatctcatttcttccttttgctgttgcttcccccctcacacacttggttttgttctatcctacatttgagatttctattttatgttgaacttgctgctttttttcatattgaaaagatgacatcgccccaagagccaaaaataaatgggaattgaaaaaagctg

SEQ ID NO: 13802 - protein, 405 aa, Homo sapiens; identical to SEQ ID NO: 13800

SEQ ID NO: 13803 - DNA, 1532 bp, Homo sapiens
atcagggccaggctcgatgaggctttgtctccctaccgcgcgcggggccgattctcccgcctcccagccccggcgcacgcgcgccccgcccagcctgctttccctccgcgccctcccctctcctttctccctctcagaaccttcctgccgtcgcgtttgcacctcgctgctccagcctctggggcgcattccaaccttccagcctgcgacctgcggagaaaaaaaattacttattttcttgccccatacataccttgaggcgagcaaaaaaattaaattttaaccatgagggaaatcgtgcacatccaggctggtcagtgtggcaaccagatcggtgccaagttctgggaggtgatcagtgatgaacatggcatcgaccccaccggcacctaccacggggacagcgacttccagctgacccactcactgggcgggggcacaggctctggaatgggcactctccttatcagcaagatccgagaagaataccctgatcgcatcatgaataccttcagtgtggtgccttcacccaaagtgtctgacaccgtggtcgagccctacaatgccaccctctccgtccatcagttggtagagaatactgatgagacctattgcattgacaacgaggccctctatgatatctgcttccgcactctgaagctgaccacaccaacctacggggatctgaaccaccttgtctcagccaccatgagtggtgtcaccacctgcctccgtttccctggccagctcaatgctgacctccgcaagttggcagtcaacatggtccccttcccacgtctccatttctttatgcctggctttgcccctctcaccagccgtggaagccagcagtatcgagctctcacagtgccggaactcacccagcaggtcttcgatgccaagaacatgatggctgcctgtgacccccgccacggccgatacctcaccgtggctgctgtcttccgtggtcggatgtccatgaaggaggtcgatgagcagatgcttaacgtgcagaacaagaacagcagctactttgtggaatggatccccaacaatgtcaagacagccgtctgtgacatcccacctcgtggcctcaagatggcagtcaccttcattggcaatagcacagccatccaggagctcttcaagcgcatctcggagcagttcactgccatgttccgccggaaggccttcctccactggtacacaggcgagggcatggacgagatggagttcaccgaggctgagagcaacatgaacgacctcgtctctgagtatcagcagtaccaggatgccaccgcagaagaggaggaggatttcggtgaggaggccgaagaggaggcctaaggcagagcccccatcacctcaggcttctcagttcccttagccgtcttactcaactgcccctttcctctccctcagaatttgtgtttgctgcctctatcttgttttttgttttttcttctggggggggtctagaacagtgcctggcacatagtaggcgctcaataaatacttgtttgttgaatgtc

SEQ ID NO: 13804 - protein, 353 aa, Homo sapiens
MREIVHIQAGQCGNQIGAKFWEVISDEHGIDPTGTYHGDSDFQLTHSLGGGTGSGMGTLLISKIREEYPDRIMNTFSVVPSPKVSDTVVEPYNATLSVHQLVENTDETYCIDNEALYDICFRTLKLTTPTYGDLNHLVSATMSGVTTCLRFPGQLNADLRKLAVNMVPFPRLHFFMPGFAPLTSRGSQQYRALTVPELTQQVFDAKNMMAACDPRHGRYLTVAAVFRGRMSMKEVDEQMLNVQNKNSSYFVEWIPNNVKTAVCDIPPRGLKMAVTFIGNSTAIQELFKRISEQFTAMFRRKAFLHWYTGEGMDEMEFTEAESNMNDLVSEYQQYQDATAEEEEDFGEEAEEEA

SEQ ID NO: 13805 - DNA, 2376 bp, Homo sapiens
atcagggccaggctcgatgaggctttgtctccctaccgcgcgcggggccgattctcccgcctcccagccccggcgcacgcgcgccccgcccagcctgctttccctccgcgccctcccctctcctttctccctctcagaaccttcctgccgtcgcgtttgcacctcgctgctccagcctctggggcgcattccaaccttccagcctgcgacctgcggagaaaaaaaattacttattttcttgccccatacataccttgaggcgagcaaaaaaattaaattttaaccatgagggaaatcgtgcacatccaggctggtcagtgtggcaaccagatcggtgccaagttctgggaggtgatcagtgatgaacatggcatcgaccccaccggcacctaccacggggacagcgacttccagctgacccactcactgggcgggggcacaggctctggaatgggcactctccttatcagcaagatccgagaagaataccctgatcgcatcatgaataccttcagtgtggtgccttcacccaaagtgtctgacaccgtggtcgagccctacaatgccaccctctccgtccatcagttggtagagaatactgatgagacctattgcattgacaacgaggccctctatgatatctgcttccgcactctgaagctgaccacaccaacctacggggatctgaaccaccttgtctcagccaccatgagtggtgtcaccacctgcctccgtttccctggccagctcaatgctgacctccgcaagttggcagtcaacatggtccccttcccacgtctccatttctttatgcctggctttgcccctctcaccagccgtggaagccagcagtatcgagctctcacagtgccggaactcacccagcaggtcttcgatgccaagaacatgatggctgcctgtgacccccgccacggccgatacctcaccgtggctgctgtcttccgtggtcggatgtccatgaaggaggtcgatgagcagatgcttaacgtgcagaacaagaacagcagctactttgtggaatggatccccaacaatgtcaagacagccgtctgtgacatcccacctcgtggcctcaagatggcagtcaccttcattggcaatagcacagccatccaggagctcttcaagcgcatctcggagcagttcactgccatgttccgccggaaggccttcctccactggtacacaggcgagggcatggacgagatggagttcaccgaggctgagagcaacatgaacgacctcgtctctgagtatcagcagtaccaggatgccaccgcagaagaggaggaggatttcggtgaggaggccgaagaggaggcctaaggcagagcccccatcacctcaggcttctcagttcccttagccgtcttactcaactgcccctttcctctccctcagaatttgtgtttgctgcctctatcttgttttttgttttttcttctggggggggtctagaacagtgcctggcacatagtaggcgctcaataaatacttgtttgttgaatgtctcctctctctttccactctgggaaacctaggtttctgccattctgggtgaccctgtatttctttctggtgcccattccatttgtccagttaatacttcctcttaaaaatctccaagaagctgggtctccagatcccatttagaaccaaccaggtgctgaaaacacatgtagataatggccatcatcctaagcccaaagtagaaaatggtagaaggtagtgggtagaagtcactatataaggaaggggatgggattttccattctaaaagttttggagagggaaatccaggctattaaagtcactaaatttctaagtatgtccatttcccatctcagcttcaagggaggtgtcagcagtattatctccactttcaatctccctccaagctctactctggaggagtctgtcccactctgtcaagtggaatccttccctttccaactctacctccctcactcagctcctttcccctgatcagagaaagggatcaagggggttgggaggggggaaagagaccagccttggtccctaagcctccagaaacgtcttcttaatccccaccttttcttactcccaaaaaagaatgaacacccctgactctggagtggtgtatactgccacatcagtgtttgagtcagtccccagaggagaggggaaccctcctccatcttttttgcaacatctcatttcttccttttgctgttgcttcccccctcacacacttggttttgttctatcctacatttgagatttctattttatgttgaacttgctgctttttttcatattgaaaagatgacatcgccccaagagccaaaaataaatgggaattgaaaaaagctg

SEQ ID NO: 13806 - protein, 353 aa, Homo sapiens; identical to SEQ ID NO: 13804

SEQ ID NO: 13807 - DNA, 962 bp, Homo sapiens
gaggctttgtctccctaccgcgcgcggggccgattctcccgcctcccagccccggcgcacgcgcgccccgcccagcctgctttccctccgcgccctcccctctcctttctccctctcagaaccttcctgccgtcgcgtttgcacctcgctgctccagcctctggggcgcattccaaccttccagcctgcgacctgcggagaaaaaaaattacttattttcttgccccatacataccttgaggcgagcaaaaaaattaaattttaaccatgagggaaatcgtgcacatccaggctggtcagtgtggcaaccagatcggtgccaagttctgggaggtgatcagtgatgaacatggcatcgaccccaccggcacctaccacggggacagcgacctgcagctggaccgcatctctgtgtactacaatgaagccacaggtggcaaatatgttcctcgtgccatcctggtggatctagaacctgggaccatggactctacagccgtctgtgacatcccacctcgtggcctcaagatggcagtcaccttcattggcaatagcacagccatccaggagctcttcaagcgcatctcggagcagttcactgccatgttccgccggaaggccttcctccactggtacacaggcgagggcatggacgagatggagttcaccgaggctgagagcaacatgaacgacctcgtctctgagtatcagcagtaccaggatgccaccgcagaagaggaggaggatttcggtgaggaggccgaagaggaggcctaaggcagagcccccatcacctcaggcttctcagttcccttagccgtcttactcaactgcccctttcctctccctcagaatttgtgtttgctgcctctatcttgttttttgttttttcttctggggggggtctagaacagtgcctggcacatagtaggcgctcaataaatacttgtttgttgaatgtc

SEQ ID NO: 13808 - protein, 169 aa, Homo sapiens
MREIVHIQAGQCGNQIGAKFWEVISDEHGIDPTGTYHGDSDLQLDRISVYYNEATGGKYVPRAILVDLEPGTMDSTAVCDIPPRGLKMAVTFIGNSTAIQELFKRISEQFTAMFRRKAFLHWYTGEGMDEMEFTEAESNMNDLVSEYQQYQDATAEEEEDFGEEAEEEA

SEQ ID NO: 13809 - DNA, 1806 bp, Homo sapiens
gaggctttgtctccctaccgcgcgcggggccgattctcccgcctcccagccccggcgcacgcgcgccccgcccagcctgctttccctccgcgccctcccctctcctttctccctctcagaaccttcctgccgtcgcgtttgcacctcgctgctccagcctctggggcgcattccaaccttccagcctgcgacctgcggagaaaaaaaattacttattttcttgccccatacataccttgaggcgagcaaaaaaattaaattttaaccatgagggaaatcgtgcacatccaggctggtcagtgtggcaaccagatcggtgccaagttctgggaggtgatcagtgatgaacatggcatcgaccccaccggcacctaccacggggacagcgacctgcagctggaccgcatctctgtgtactacaatgaagccacaggtggcaaatatgttcctcgtgccatcctggtggatctagaacctgggaccatggactctacagccgtctgtgacatcccacctcgtggcctcaagatggcagtcaccttcattggcaatagcacagccatccaggagctcttcaagcgcatctcggagcagttcactgccatgttccgccggaaggccttcctccactggtacacaggcgagggcatggacgagatggagttcaccgaggctgagagcaacatgaacgacctcgtctctgagtatcagcagtaccaggatgccaccgcagaagaggaggaggatttcggtgaggaggccgaagaggaggcctaaggcagagcccccatcacctcaggcttctcagttcccttagccgtcttactcaactgcccctttcctctccctcagaatttgtgtttgctgcctctatcttgttttttgttttttcttctggggggggtctagaacagtgcctggcacatagtaggcgctcaataaatacttgtttgttgaatgtctcctctctctttccactctgggaaacctaggtttctgccattctgggtgaccctgtatttctttctggtgcccattccatttgtccagttaatacttcctcttaaaaatctccaagaagctgggtctccagatcccatttagaaccaaccaggtgctgaaaacacatgtagataatggccatcatcctaagcccaaagtagaaaatggtagaaggtagtgggtagaagtcactatataaggaaggggatgggattttccattctaaaagttttggagagggaaatccaggctattaaagtcactaaatttctaagtatgtccatttcccatctcagcttcaagggaggtgtcagcagtattatctccactttcaatctccctccaagctctactctggaggagtctgtcccactctgtcaagtggaatccttccctttccaactctacctccctcactcagctcctttcccctgatcagagaaagggatcaagggggttgggaggggggaaagagaccagccttggtccctaagcctccagaaacgtcttcttaatccccaccttttcttactcccaaaaaagaatgaacacccctgactctggagtggtgtatactgccacatcagtgtttgagtcagtccccagaggagaggggaaccctcctccatcttttttgcaacatctcatttcttccttttgctgttgcttcccccctcacacacttggttttgttctatcctacatttgagatttctattttatgttgaacttgctgctttttttcatattgaaaagatgacatcgccccaagagccaaaaataaatgggaattgaaaaaagctg

SEQ ID NO: 13810 - protein, 169 aa, Homo sapiens; identical to SEQ ID NO: 13808

SEQ ID NO: 13811 - DNA, 1389 bp, Homo sapiens
gattctcccgcctcccagccccggcgcacgcgcgccccgcccagcctgctttccctccgcgccctcccctctcctttctccctctcagaaccttcctgccgtcgcgtttgcacctcgctgctccagcctctggggcgcattccaaccttccagcctgcgacctgcggagaaaaaaaattacttattttcttgccccatacataccttgaggcgagcaaaaaaattaaattttaaccatgagggaaatcgtgcacatccaggctggtcagtgtggcaaccagatcggtgccaagttctgggaggtgatcagtgatgaacatggcatcgaccccaccggcacctaccacggggacagcgacctgcagctggaccgcatctctgtgtactacaatgaagccacaggtggcaaatatgttcctcgtgccatcctggtggatctagaacctgggaccatggactctgttcgctcaggtccttttggccagatctttagaccagacaactttgtatttggtcagtctggggcaggtaacaactgggccaaaggccactacacagagggcgccgagctggttgattctgtcctggatgtggtacggaaggaggcagagagctgtgactgcctgcagggcttccagctgacccactcactgggcgggggcacaggctctggaatgggcactctccttatcaccgtggaagccagcagtatcgagctctcacagtgccggaactcacccagcaggtcttcgatgccaagaacatgatggctgcctgtgacccccgccacggccgatacctcaccgtggctgctgtcttccgtggtcggatgtccatgaaggaggtcgatgagcagatgcttaacgtgcagaacaagaacagcagctactttgtggaatggatccccaacaatgtcaagacagccgtctgtgacatcccacctcgtggcctcaagatggcagtcaccttcattggcaatagcacagccatccaggagctcttcaagcgcatctcggagcagttcactgccatgttccgccggaaggccttcctccactggtacacaggcgagggcatggacgagatggagttcaccgaggctgagagcaacatgaacgacctcgtctctgagtatcagcagtaccaggatgccaccgcagaagaggaggaggatttcggtgaggaggccgaagaggaggcctaaggcagagcccccatcacctcaggcttctcagttcccttagccgtcttactcaactgcccctttcctctccctcagaatttgtgtttgctgcctctatcttgttttttgttttttcttctggggggggtctagaacagtgcctggcacatagtaggcgctcaataaatacttgtttgttgaatgtc

SEQ ID NO: 13812 - protein, 176 aa, Homo sapiens
MREIVHIQAGQCGNQIGAKFWEVISDEHGIDPTGTYHGDSDLQLDRISVYYNEATGGKYVPRAILVDLEPGTMDSVRSGPFGQIFRPDNFVFGQSGAGNNWAKGHYTEGAELVDSVLDVVRKEAESCDCLQGFQLTHSLGGGTGSGMGTLLITVEASSIELSQCRNSPSRSSMPRT

SEQ ID NO: 13813 - DNA, 2233 bp, Homo sapiens
gattctcccgcctcccagccccggcgcacgcgcgccccgcccagcctgctttccctccgcgccctcccctctcctttctccctctcagaaccttcctgccgtcgcgtttgcacctcgctgctccagcctctggggcgcattccaaccttccagcctgcgacctgcggagaaaaaaaattacttattttcttgccccatacataccttgaggcgagcaaaaaaattaaattttaaccatgagggaaatcgtgcacatccaggctggtcagtgtggcaaccagatcggtgccaagttctgggaggtgatcagtgatgaacatggcatcgaccccaccggcacctaccacggggacagcgacctgcagctggaccgcatctctgtgtactacaatgaagccacaggtggcaaatatgttcctcgtgccatcctggtggatctagaacctgggaccatggactctgttcgctcaggtccttttggccagatctttagaccagacaactttgtatttggtcagtctggggcaggtaacaactgggccaaaggccactacacagagggcgccgagctggttgattctgtcctggatgtggtacggaaggaggcagagagctgtgactgcctgcagggcttccagctgacccactcactgggcgggggcacaggctctggaatgggcactctccttatcaccgtggaagccagcagtatcgagctctcacagtgccggaactcacccagcaggtcttcgatgccaagaacatgatggctgcctgtgacccccgccacggccgatacctcaccgtggctgctgtcttccgtggtcggatgtccatgaaggaggtcgatgagcagatgcttaacgtgcagaacaagaacagcagctactttgtggaatggatccccaacaatgtcaagacagccgtctgtgacatcccacctcgtggcctcaagatggcagtcaccttcattggcaatagcacagccatccaggagctcttcaagcgcatctcggagcagttcactgccatgttccgccggaaggccttcctccactggtacacaggcgagggcatggacgagatggagttcaccgaggctgagagcaacatgaacgacctcgtctctgagtatcagcagtaccaggatgccaccgcagaagaggaggaggatttcggtgaggaggccgaagaggaggcctaaggcagagcccccatcacctcaggcttctcagttcccttagccgtcttactcaactgcccctttcctctccctcagaatttgtgtttgctgcctctatcttgttttttgttttttcttctggggggggtctagaacagtgcctggcacatagtaggcgctcaataaatacttgtttgttgaatgtctcctctctctttccactctgggaaacctaggtttctgccattctgggtgaccctgtatttctttctggtgcccattccatttgtccagttaatacttcctcttaaaaatctccaagaagctgggtctccagatcccatttagaaccaaccaggtgctgaaaacacatgtagataatggccatcatcctaagcccaaagtagaaaatggtagaaggtagtgggtagaagtcactatataaggaaggggatgggattttccattctaaaagttttggagagggaaatccaggctattaaagtcactaaatttctaagtatgtccatttcccatctcagcttcaagggaggtgtcagcagtattatctccactttcaatctccctccaagctctactctggaggagtctgtcccactctgtcaagtggaatccttccctttccaactctacctccctcactcagctcctttcccctgatcagagaaagggatcaagggggttgggaggggggaaagagaccagccttggtccctaagcctccagaaacgtcttcttaatccccaccttttcttactcccaaaaaagaatgaacacccctgactctggagtggtgtatactgccacatcagtgtttgagtcagtccccagaggagaggggaaccctcctccatcttttttgcaacatctcatttcttccttttgctgttgcttcccccctcacacacttggttttgttctatcctacatttgagatttctattttatgttgaacttgctgctttttttcatattgaaaagatgacatcgccccaagagccaaaaataaatgggaattgaaaaaagctg

SEQ ID NO: 13814 - protein, 176 aa, Homo sapiens; identical to SEQ ID NO: 13812

SEQ ID NO: 13815 - DNA, 1533 bp, Homo sapiens
attctcccgcctcccagccccggcgcacgcgcgccccgcccagcctgctttccctccgcgccctcccctctcctttctccctctcagaaccttcctgccgtcgcgtttgcacctcgctgctccagcctctggggcgcattccaaccttccagcctgcgacctgcggagaaaaaaaattacttattttcttgccccatacataccttgaggcgagcaaaaaaattaaattttaaccatgagggaaatcgtgcacatccaggctggtcagtgtggcaaccagatcggtgccaagttctgggaggtgatcagtgatgaacatggcatcgaccccaccggcacctaccacggggacagcgacctgcagctggaccgcatctctgtgtactacaatgaagccacaggtggcaaatatgttcctcgtgccatcctggtggatctagaacgctctggaatgggcactctccttatcagcaagatccgagaagaataccctgatcgcatcatgaataccttcagtgtggtgccttcacccaaagtgtctgacaccgtggtcgagccctacaatgccaccctctccgtccatcagttggtagagaatactgatgagacctattgcattgacaacgaggccctctatgatatctgcttccgcactctgaagctgaccacaccaacctacggggatctgaaccaccttgtctcagccaccatgagtggtgtcaccacctgcctccgtttccctggccagctcaatgctgacctccgcaagttggcagtcaacatggtccccttcccacgtctccatttctttatgcctggctttgcccctctcaccagccgtggaagccagcagtatcgagctctcacagtgccggaactcacccagcaggtcttcgatgccaagaacatgatggctgcctgtgacccccgccacggccgatacctcaccgtggctgctgtcttccgtggtcggatgtccatgaaggaggtcgatgagcagatgcttaacgtgcagaacaagaacagcagctactttgtggaatggatccccaacaatgtcaagacagccgtctgtgacatcccacctcgtggcctcaagatggcagtcaccttcattggcaatagcacagccatccaggagctcttcaagcgcatctcggagcagttcactgccatgttccgccggaaggccttcctccactggtacacaggcgagggcatggacgagatggagttcaccgaggctgagagcaacatgaacgacctcgtctctgagtatcagcagtaccaggatgccaccgcagaagaggaggaggatttcggtgaggaggccgaagaggaggcctaaggcagagcccccatcacctcaggcttctcagttcccttagccgtcttactcaactgcccctttcctctccctcagaatttgtgtttgctgcctctatcttgttttttgttttttcttctggggggggtctagaacagtgcctggcacatagtaggcgctcaataaatacttgtttgttgaatgtc

SEQ ID NO: 13816 - protein, 370 aa, Homo sapiens
MREIVHIQAGQCGNQIGAKFWEVISDEHGIDPTGTYHGDSDLQLDRISVYYNEATGGKYVPRAILVDLERSGMGTLLISKIREEYPDRIMNTFSVVPSPKVSDTVVEPYNATLSVHQLVENTDETYCIDNEALYDICFRTLKLTTPTYGDLNHLVSATMSGVTTCLRFPGQLNADLRKLAVNMVPFPRLHFFMPGFAPLTSRGSQQYRALTVPELTQQVFDAKNMMAACDPRHGRYLTVAAVFRGRMSMKEVDEQMLNVQNKNSSYFVEWIPNNVKTAVCDIPPRGLKMAVTFIGNSTAIQELFKRISEQFTAMFRRKAFLHWYTGEGMDEMEFTEAESNMNDLVSEYQQYQDATAEEEEDFGEEAEEEA

SEQ ID NO: 13817 - DNA, 1191 bp, Homo sapiens
attctcccgcctcccagccccggcgcacgcgcgccccgcccagcctgctttccctccgcgccctcccctctcctttctccctctcagaaccttcctgccgtcgcgtttgcacctcgctgctccagcctctggggcgcattccaaccttccagcctgcgacctgcggagaaaaaaaattacttattttcttgccccatacataccttgaggcgagcaaaaaaattaaattttaaccatgagggaaatcgtgcacatccaggctggtcagtgtggcaaccagatcggtgccaagttctgggaggtgatcagtgatgaacatggcatcgaccccaccggcacctaccacggggacagcgacctgcagctggaccgcatctctgtgtactacaatgaagccacaggtggcaaatatgttcctcgtgccatcctggtggatctagaactccccttcccacgtctccatttctttatgcctggctttgcccctctcaccagccgtggaagccagcagtatcgagctctcacagtgccggaactcacccagcaggtcttcgatgccaagaacatgatggctgcctgtgacccccgccacggccgatacctcaccgtggctgctgtcttccgtggtcggatgtccatgaaggaggtcgatgagcagatgcttaacgtgcagaacaagaacagcagctactttgtggaatggatccccaacaatgtcaagacagccgtctgtgacatcccacctcgtggcctcaagatggcagtcaccttcattggcaatagcacagccatccaggagctcttcaagcgcatctcggagcagttcactgccatgttccgccggaaggccttcctccactggtacacaggcgagggcatggacgagatggagttcaccgaggctgagagcaacatgaacgacctcgtctctgagtatcagcagtaccaggatgccaccgcagaagaggaggaggatttcggtgaggaggccgaagaggaggcctaaggcagagcccccatcacctcaggcttctcagttcccttagccgtcttactcaactgcccctttcctctccctcagaatttgtgtttgctgcctctatcttgttttttgttttttcttctggggggggtctagaacagtgcctggcacatagtaggcgctcaataaatacttgtttgttgaatgtc

SEQ ID NO: 13818 - protein, 256 aa, Homo sapiens
MREIVHIQAGQCGNQIGAKFWEVISDEHGIDPTGTYHGDSDLQLDRISVYYNEATGGKYVPRAILVDLELPFPRLHFFMPGFAPLTSRGSQQYRALTVPELTQQVFDAKNMMAACDPRHGRYLTVAAVFRGRMSMKEVDEQMLNVQNKNSSYFVEWIPNNVKTAVCDIPPRGLKMAVTFIGNSTAIQELFKRISEQFTAMFRRKAFLHWYTGEGMDEMEFTEAESNMNDLVSEYQQYQDATAEEEEDFGEEAEEEA

SEQ ID NO: 13819 - DNA, 2035 bp, Homo sapiens
attctcccgcctcccagccccggcgcacgcgcgccccgcccagcctgctttccctccgcgccctcccctctcctttctccctctcagaaccttcctgccgtcgcgtttgcacctcgctgctccagcctctggggcgcattccaaccttccagcctgcgacctgcggagaaaaaaaattacttattttcttgccccatacataccttgaggcgagcaaaaaaattaaattttaaccatgagggaaatcgtgcacatccaggctggtcagtgtggcaaccagatcggtgccaagttctgggaggtgatcagtgatgaacatggcatcgaccccaccggcacctaccacggggacagcgacctgcagctggaccgcatctctgtgtactacaatgaagccacaggtggcaaatatgttcctcgtgccatcctggtggatctagaactccccttcccacgtctccatttctttatgcctggctttgcccctctcaccagccgtggaagccagcagtatcgagctctcacagtgccggaactcacccagcaggtcttcgatgccaagaacatgatggctgcctgtgacccccgccacggccgatacctcaccgtggctgctgtcttccgtggtcggatgtccatgaaggaggtcgatgagcagatgcttaacgtgcagaacaagaacagcagctactttgtggaatggatccccaacaatgtcaagacagccgtctgtgacatcccacctcgtggcctcaagatggcagtcaccttcattggcaatagcacagccatccaggagctcttcaagcgcatctcggagcagttcactgccatgttccgccggaaggccttcctccactggtacacaggcgagggcatggacgagatggagttcaccgaggctgagagcaacatgaacgacctcgtctctgagtatcagcagtaccaggatgccaccgcagaagaggaggaggatttcggtgaggaggccgaagaggaggcctaaggcagagcccccatcacctcaggcttctcagttcccttagccgtcttactcaactgcccctttcctctccctcagaatttgtgtttgctgcctctatcttgttttttgttttttcttctggggggggtctagaacagtgcctggcacatagtaggcgctcaataaatacttgtttgttgaatgtctcctctctctttccactctgggaaacctaggtttctgccattctgggtgaccctgtatttctttctggtgcccattccatttgtccagttaatacttcctcttaaaaatctccaagaagctgggtctccagatcccatttagaaccaaccaggtgctgaaaacacatgtagataatggccatcatcctaagcccaaagtagaaaatggtagaaggtagtgggtagaagtcactatataaggaaggggatgggattttccattctaaaagttttggagagggaaatccaggctattaaagtcactaaatttctaagtatgtccatttcccatctcagcttcaagggaggtgtcagcagtattatctccactttcaatctccctccaagctctactctggaggagtctgtcccactctgtcaagtggaatccttccctttccaactctacctccctcactcagctcctttcccctgatcagagaaagggatcaagggggttgggaggggggaaagagaccagccttggtccctaagcctccagaaacgtcttcttaatccccaccttttcttactcccaaaaaagaatgaacacccctgactctggagtggtgtatactgccacatcagtgtttgagtcagtccccagaggagaggggaaccctcctccatcttttttgcaacatctcatttcttccttttgctgttgcttcccccctcacacacttggttttgttctatcctacatttgagatttctattttatgttgaacttgctgctttttttcatattgaaaagatgacatcgccccaagagccaaaaataaatgggaattgaaaaaagctg

SEQ ID NO: 13820 - protein, 256 aa, Homo sapiens; identical to SEQ ID NO: 13818

SEQ ID NO: 13821 - DNA, 2377 bp, Homo sapiens
attctcccgcctcccagccccggcgcacgcgcgccccgcccagcctgctttccctccgcgccctcccctctcctttctccctctcagaaccttcctgccgtcgcgtttgcacctcgctgctccagcctctggggcgcattccaaccttccagcctgcgacctgcggagaaaaaaaattacttattttcttgccccatacataccttgaggcgagcaaaaaaattaaattttaaccatgagggaaatcgtgcacatccaggctggtcagtgtggcaaccagatcggtgccaagttctgggaggtgatcagtgatgaacatggcatcgaccccaccggcacctaccacggggacagcgacctgcagctggaccgcatctctgtgtactacaatgaagccacaggtggcaaatatgttcctcgtgccatcctggtggatctagaacgctctggaatgggcactctccttatcagcaagatccgagaagaataccctgatcgcatcatgaataccttcagtgtggtgccttcacccaaagtgtctgacaccgtggtcgagccctacaatgccaccctctccgtccatcagttggtagagaatactgatgagacctattgcattgacaacgaggccctctatgatatctgcttccgcactctgaagctgaccacaccaacctacggggatctgaaccaccttgtctcagccaccatgagtggtgtcaccacctgcctccgtttccctggccagctcaatgctgacctccgcaagttggcagtcaacatggtccccttcccacgtctccatttctttatgcctggctttgcccctctcaccagccgtggaagccagcagtatcgagctctcacagtgccggaactcacccagcaggtcttcgatgccaagaacatgatggctgcctgtgacccccgccacggccgatacctcaccgtggctgctgtcttccgtggtcggatgtccatgaaggaggtcgatgagcagatgcttaacgtgcagaacaagaacagcagctactttgtggaatggatccccaacaatgtcaagacagccgtctgtgacatcccacctcgtggcctcaagatggcagtcaccttcattggcaatagcacagccatccaggagctcttcaagcgcatctcggagcagttcactgccatgttccgccggaaggccttcctccactggtacacaggcgagggcatggacgagatggagttcaccgaggctgagagcaacatgaacgacctcgtctctgagtatcagcagtaccaggatgccaccgcagaagaggaggaggatttcggtgaggaggccgaagaggaggcctaaggcagagcccccatcacctcaggcttctcagttcccttagccgtcttactcaactgcccctttcctctccctcagaatttgtgtttgctgcctctatcttgttttttgttttttcttctggggggggtctagaacagtgcctggcacatagtaggcgctcaataaatacttgtttgttgaatgtctcctctctctttccactctgggaaacctaggtttctgccattctgggtgaccctgtatttctttctggtgcccattccatttgtccagttaatacttcctcttaaaaatctccaagaagctgggtctccagatcccatttagaaccaaccaggtgctgaaaacacatgtagataatggccatcatcctaagcccaaagtagaaaatggtagaaggtagtgggtagaagtcactatataaggaaggggatgggattttccattctaaaagttttggagagggaaatccaggctattaaagtcactaaatttctaagtatgtccatttcccatctcagcttcaagggaggtgtcagcagtattatctccactttcaatctccctccaagctctactctggaggagtctgtcccactctgtcaagtggaatccttccctttccaactctacctccctcactcagctcctttcccctgatcagagaaagggatcaagggggttgggaggggggaaagagaccagccttggtccctaagcctccagaaacgtcttcttaatccccaccttttcttactcccaaaaaagaatgaacacccctgactctggagtggtgtatactgccacatcagtgtttgagtcagtccccagaggagaggggaaccctcctccatcttttttgcaacatctcatttcttccttttgctgttgcttcccccctcacacacttggttttgttctatcctacatttgagatttctattttatgttgaacttgctgctttttttcatattgaaaagatgacatcgccccaagagccaaaaataaatgggaattgaaaaaagctg

SEQ ID NO: 13822 - protein, 370 aa, Homo sapiens; identical to SEQ ID NO: 13816

SEQ ID NO: 13823 - DNA, 1696 bp, Homo sapiens
ctcccagccccggcgcacgcgcgccccgcccagcctgctttccctccgcgccctcccctctcctttctccctctcagaaccttcctgccgtcgcgtttgcacctcgctgctccagcctctggggcgcattccaaccttccagcctgcgacctgcggagaaaaaaaattacttattttcttgccccatacataccttgaggcgagcaaaaaaattaaattttaaccatgagggaaatcgtgcacatccaggctggtcagtgtggcaaccagatcggtgccaagttctgggaggtgatcagtgatgaacatggcatcgaccccaccggcacctaccacggggacagcgacctgcagctggaccgcatctctgtgtactacaatgaagccacaggtggcaaatatgttcctcgtgccatcctggtggatctagaacctgggaccatggactctgttcgctcaggtccttttggccagatctttagaccagacaactttgtatttggtcagtctggggcaggtaacaactgggccaaaggccactacacagagggcgccgagctggttgattctgtcctggatgtggtacggaaggaggcagagagctgtgactgcctgcagggcttccagctgacccactcactgggcgggggcacaggctctggaatgggcactctccttatcagcaagatccgagaagaataccctgatcgcatcatgaataccttcagtgtggtgccttcacccaaagtgtctgacaccgtggtcgagccctacaatgccaccctctccgtccatcagttggtagagaatactgatgagacctattgcattgacaacgaggccctctatgatatctgcttgtctcagccaccatgagtggtgtcaccacctgcctccgtttccctggccagctcaatgctgacctccgcaagttggcagtcaacatggtccccttcccacgtctccatttctttatgcctggctttgcccctctcaccagccgtggaagccagcagtatcgagctctcacagtgccggaactcacccagcaggtcttcgatgccaagaacatgatggctgcctgtgacccccgccacggccgatacctcaccgtggctgctgtcttccgtggtcggatgtccatgaaggaggtcgatgagcagatgcttaacgtgcagaacaagaacagcagctactttgtggaatggatccccaacaatgtcaagacagccgtctgtgacatcccacctcgtggcctcaagatggcagtcaccttcattggcaatagcacagccatccaggagctcttcaagcgcatctcggagcagttcactgccatgttccgccggaaggccttcctccactggtacacaggcgagggcatggacgagatggagttcaccgaggctgagagcaacatgaacgacctcgtctctgagtatcagcagtaccaggatgccaccgcagaagaggaggaggatttcggtgaggaggccgaagaggaggcctaaggcagagcccccatcacctcaggcttctcagttcccttagccgtcttactcaactgcccctttcctctccctcagaatttgtgtttgctgcctctatcttgttttttgttttttcttctggggggggtctagaacagtgcctggcacatagtaggcgctcaataaatacttgtttgttgaatgtc

SEQ ID NO: 13824 - protein, 216 aa, Homo sapiens
MREIVHIQAGQCGNQIGAKFWEVISDEHGIDPTGTYHGDSDLQLDRISVYYNEATGGKYVPRAILVDLEPGTMDSVRSGPFGQIFRPDNFVFGQSGAGNNWAKGHYTEGAELVDSVLDVVRKEAESCDCLQGFQLTHSLGGGTGSGMGTLLISKIREEYPDRIMNTFSVVPSPKVSDTVVEPYNATLSVHQLVENTDETYCIDNEALYDICLSQPP

SEQ ID NO: 13825 - DNA, 2540 bp, Homo sapiens
ctcccagccccggcgcacgcgcgccccgcccagcctgctttccctccgcgccctcccctctcctttctccctctcagaaccttcctgccgtcgcgtttgcacctcgctgctccagcctctggggcgcattccaaccttccagcctgcgacctgcggagaaaaaaaattacttattttcttgccccatacataccttgaggcgagcaaaaaaattaaattttaaccatgagggaaatcgtgcacatccaggctggtcagtgtggcaaccagatcggtgccaagttctgggaggtgatcagtgatgaacatggcatcgaccccaccggcacctaccacggggacagcgacctgcagctggaccgcatctctgtgtactacaatgaagccacaggtggcaaatatgttcctcgtgccatcctggtggatctagaacctgggaccatggactctgttcgctcaggtccttttggccagatctttagaccagacaactttgtatttggtcagtctggggcaggtaacaactgggccaaaggccactacacagagggcgccgagctggttgattctgtcctggatgtggtacggaaggaggcagagagctgtgactgcctgcagggcttccagctgacccactcactgggcgggggcacaggctctggaatgggcactctccttatcagcaagatccgagaagaataccctgatcgcatcatgaataccttcagtgtggtgccttcacccaaagtgtctgacaccgtggtcgagccctacaatgccaccctctccgtccatcagttggtagagaatactgatgagacctattgcattgacaacgaggccctctatgatatctgcttgtctcagccaccatgagtggtgtcaccacctgcctccgtttccctggccagctcaatgctgacctccgcaagttggcagtcaacatggtccccttcccacgtctccatttctttatgcctggctttgcccctctcaccagccgtggaagccagcagtatcgagctctcacagtgccggaactcacccagcaggtcttcgatgccaagaacatgatggctgcctgtgacccccgccacggccgatacctcaccgtggctgctgtcttccgtggtcggatgtccatgaaggaggtcgatgagcagatgcttaacgtgcagaacaagaacagcagctactttgtggaatggatccccaacaatgtcaagacagccgtctgtgacatcccacctcgtggcctcaagatggcagtcaccttcattggcaatagcacagccatccaggagctcttcaagcgcatctcggagcagttcactgccatgttccgccggaaggccttcctccactggtacacaggcgagggcatggacgagatggagttcaccgaggctgagagcaacatgaacgacctcgtctctgagtatcagcagtaccaggatgccaccgcagaagaggaggaggatttcggtgaggaggccgaagaggaggcctaaggcagagcccccatcacctcaggcttctcagttcccttagccgtcttactcaactgcccctttcctctccctcagaatttgtgtttgctgcctctatcttgttttttgttttttcttctggggggggtctagaacagtgcctggcacatagtaggcgctcaataaatacttgtttgttgaatgtctcctctctctttccactctgggaaacctaggtttctgccattctgggtgaccctgtatttctttctggtgcccattccatttgtccagttaatacttcctcttaaaaatctccaagaagctgggtctccagatcccatttagaaccaaccaggtgctgaaaacacatgtagataatggccatcatcctaagcccaaagtagaaaatggtagaaggtagtgggtagaagtcactatataaggaaggggatgggattttccattctaaaagttttggagagggaaatccaggctattaaagtcactaaatttctaagtatgtccatttcccatctcagcttcaagggaggtgtcagcagtattatctccactttcaatctccctccaagctctactctggaggagtctgtcccactctgtcaagtggaatccttccctttccaactctacctccctcactcagctcctttcccctgatcagagaaagggatcaagggggttgggaggggggaaagagaccagccttggtccctaagcctccagaaacgtcttcttaatccccaccttttcttactcccaaaaaagaatgaacacccctgactctggagtggtgtatactgccacatcagtgtttgagtcagtccccagaggagaggggaaccctcctccatcttttttgcaacatctcatttcttccttttgctgttgcttcccccctcacacacttggttttgttctatcctacatttgagatttctattttatgttgaacttgctgctttttttcatattgaaaagatgacatcgccccaagagccaaaaataaatgggaattgaaaaaagctg

SEQ ID NO: 13826 - protein, 216 aa, Homo sapiens; identical to SEQ ID NO: 13824

SEQ ID NO: 13827 - DNA, 1736 bp, Homo sapiens
ccggcgcacgcgcgccccgcccagcctgctttccctccgcgccctcccctctcctttctccctctcagaaccttcctgccgtcgcgtttgcacctcgctgctccagcctctggggcgcattccaaccttccagcctgcgacctgcggagaaaaaaaattacttattttcttgccccatacataccttgaggcgagcaaaaaaattaaattttaaccatgagggaaatcgtgcacatccaggctggtcagtgtggcaaccagatcggtgccaagttctgggaggtgatcagtgatgaacatggcatcgaccccaccggcacctaccacggggacagcgacctgcagctggaccgcatctctgtgtactacaatgaagccacaggtggcaaatatgttcctcgtgccatcctggtggatctagaacctgggaccatggactctgttcgctcaggtccttttggccagatctttagaccagacaactttgtatttggtcagtctggggcaggtaacaactgggccaaaggccactacacagagggcgccgagctggttgattctgtcctggatgtggtacggaaggaggcagagagctgtgactgcctgcagggcttccagctgacccactcactgggcgggggcacaggctctggaatgggcactctccttatcagcaagatccgagaagaataccctgatcgcatcatgaataccttcagtgtggtgccttcacccaaagtgtctgacaccgtggtcgagccctacaatgccaccctctccgtccatcagttggtagagaatactgatgagacctattgcattgacaacgaggccctctatgatatctgcttccgcactctgaagctgaccacaccaacctacggggatctgaaccaccttgtctcagccaccatgagtggtgtcaccacctgcctccgtttccctggccagctcaatgctgacctccgcaagttggcagtcaacatggtccccttcccacgtctccatttctttatgcctggctttgcccctctcaccagccgtggaagccagcagtatcgagctctcacagtgccggaactcacccagcaggtcttcgatgccaagaacatgatggctgcctgtgacccccgccacggccgatacctcaccgtggctgctgtcttccgtggtcggatgtccatgaaggaggtcgatgagcagatgcttaacgtgcagaacaagaacagcagctactttgtggaatggatccccaacaatgtcaagacagccgtctgtgacatcccacctcgtggcctcaagatggcagtcaccttcattggcaatagcacagccatccaggagctcttcaagcgcatctcggagcagttcactgccatgttccgccggaaggccttcctccactggtacacaggcgagggcatggacgagatggagttcaccgaggctgagagcaacatgaacgacctcgtctctgagtatcagcagtaccaggatgccaccgcagaagaggaggaggatttcggtgaggaggccgaagaggaggcctaaggcagagcccccatcacctcaggcttctcagttcccttagccgtcttactcaactgcccctttcctctccctcagaatttgtgtttgctgcctctatcttgttttttgttttttcttctggggggggtctagaacagtgcctggcacatagtaggcgctcaataaatacttgtttgttgaatgtc

SEQ ID NO: 13828 - protein, 444 aa, Homo sapiens; identical to SEQ ID NO: 1447

SEQ ID NO: 13829 - DNA, 2580 bp, Homo sapiens
ccggcgcacgcgcgccccgcccagcctgctttccctccgcgccctcccctctcctttctccctctcagaaccttcctgccgtcgcgtttgcacctcgctgctccagcctctggggcgcattccaaccttccagcctgcgacctgcggagaaaaaaaattacttattttcttgccccatacataccttgaggcgagcaaaaaaattaaattttaaccatgagggaaatcgtgcacatccaggctggtcagtgtggcaaccagatcggtgccaagttctgggaggtgatcagtgatgaacatggcatcgaccccaccggcacctaccacggggacagcgacctgcagctggaccgcatctctgtgtactacaatgaagccacaggtggcaaatatgttcctcgtgccatcctggtggatctagaacctgggaccatggactctgttcgctcaggtccttttggccagatctttagaccagacaactttgtatttggtcagtctggggcaggtaacaactgggccaaaggccactacacagagggcgccgagctggttgattctgtcctggatgtggtacggaaggaggcagagagctgtgactgcctgcagggcttccagctgacccactcactgggcgggggcacaggctctggaatgggcactctccttatcagcaagatccgagaagaataccctgatcgcatcatgaataccttcagtgtggtgccttcacccaaagtgtctgacaccgtggtcgagccctacaatgccaccctctccgtccatcagttggtagagaatactgatgagacctattgcattgacaacgaggccctctatgatatctgcttccgcactctgaagctgaccacaccaacctacggggatctgaaccaccttgtctcagccaccatgagtggtgtcaccacctgcctccgtttccctggccagctcaatgctgacctccgcaagttggcagtcaacatggtccccttcccacgtctccatttctttatgcctggctttgcccctctcaccagccgtggaagccagcagtatcgagctctcacagtgccggaactcacccagcaggtcttcgatgccaagaacatgatggctgcctgtgacccccgccacggccgatacctcaccgtggctgctgtcttccgtggtcggatgtccatgaaggaggtcgatgagcagatgcttaacgtgcagaacaagaacagcagctactttgtggaatggatccccaacaatgtcaagacagccgtctgtgacatcccacctcgtggcctcaagatggcagtcaccttcattggcaatagcacagccatccaggagctcttcaagcgcatctcggagcagttcactgccatgttccgccggaaggccttcctccactggtacacaggcgagggcatggacgagatggagttcaccgaggctgagagcaacatgaacgacctcgtctctgagtatcagcagtaccaggatgccaccgcagaagaggaggaggatttcggtgaggaggccgaagaggaggcctaaggcagagcccccatcacctcaggcttctcagttcccttagccgtcttactcaactgcccctttcctctccctcagaatttgtgtttgctgcctctatcttgttttttgttttttcttctggggggggtctagaacagtgcctggcacatagtaggcgctcaataaatacttgtttgttgaatgtctcctctctctttccactctgggaaacctaggtttctgccattctgggtgaccctgtatttctttctggtgcccattccatttgtccagttaatacttcctcttaaaaatctccaagaagctgggtctccagatcccatttagaaccaaccaggtgctgaaaacacatgtagataatggccatcatcctaagcccaaagtagaaaatggtagaaggtagtgggtagaagtcactatataaggaaggggatgggattttccattctaaaagttttggagagggaaatccaggctattaaagtcactaaatttctaagtatgtccatttcccatctcagcttcaagggaggtgtcagcagtattatctccactttcaatctccctccaagctctactctggaggagtctgtcccactctgtcaagtggaatccttccctttccaactctacctccctcactcagctcctttcccctgatcagagaaagggatcaagggggttgggaggggggaaagagaccagccttggtccctaagcctccagaaacgtcttcttaatccccaccttttcttactcccaaaaaagaatgaacacccctgactctggagtggtgtatactgccacatcagtgtttgagtcagtccccagaggagaggggaaccctcctccatcttttttgcaacatctcatttcttccttttgctgttgcttcccccctcacacacttggttttgttctatcctacatttgagatttctattttatgttgaacttgctgctttttttcatattgaaaagatgacatcgccccaagagccaaaaataaatgggaattgaaaaaagctg

SEQ ID NO: 13830 - protein, 444 aa, Homo sapiens; identical to SEQ ID NO: 1447

SEQ ID NO: 13831 - DNA, 1022 bp, Homo sapiens
gcacgcgcgccccgcccagcctgctttccctccgcgccctcccctctcctttctccctctcagaaccttcctgccgtcgcgtttgcacctcgctgctccagcctctggggcgcattccaaccttccagcctgcgacctgcggagaaaaaaaattacttattttcttgccccatacataccttgaggcgagcaaaaaaattaaattttaaccatgagggaaatcgtgcacatccaggctggtcagtgtggcaaccagatcggtgccaagttctgggaggtgatcagtgatgaacatggcatcgaccccaccggcacctaccacggggacagcgacctgcagctggaccgcatctctgtgtactacaatgaagccacaggtggcaaatatgttcctcgtgccatcctggtggatctagaacctgggaccatggactctgttcgctcaggtccttttggccagatctttagaccagacaactttgtatttggtcagtctggggcaggtaacaactgggccaaaggccactacacagagggcgccgagctggttgattctgtcctggatgtggtacggaaggaggcagagagctgtgactgcctgcagggcttccagctgacccactcactgggcgggggcacaggctctggaatgggcactctccttatcagcaagatccgagaagaataccctgatcgcatcatgaataccttcagtgtgatggagttcaccgaggctgagagcaacatgaacgacctcgtctctgagtatcagcagtaccaggatgccaccgcagaagaggaggaggatttcggtgaggaggccgaagaggaggcctaaggcagagcccccatcacctcaggcttctcagttcccttagccgtcttactcaactgcccctttcctctccctcagaatttgtgtttgctgcctctatcttgttttttgttttttcttctggggggggtctagaacagtgcctggcacatagtaggcgctcaataaatacttgtttgttgaatgt

SEQ ID NO: 13832 - protein, 208 aa, Homo sapiens
MREIVHIQAGQCGNQIGAKFWEVISDEHGIDPTGTYHGDSDLQLDRISVYYNEATGGKYVPRAILVDLEPGTMDSVRSGPFGQIFRPDNFVFGQSGAGNNWAKGHYTEGAELVDSVLDVVRKEAESCDCLQGFQLTHSLGGGTGSGMGTLLISKIREEYPDRIMNTFSVMEFTEAESNMNDLVSEYQQYQDATAEEEEDFGEEAEEEA

SEQ ID NO: 13833 - DNA, 1697 bp, Homo sapiens
gcacgcgcgccccgcccagcctgctttccctccgcgccctcccctctcctttctccctctcagaaccttcctgccgtcgcgtttgcacctcgctgctccagcctctggggcgcattccaaccttccagcctgcgacctgcggagaaaaaaaattacttattttcttgccccatacataccttgaggcgagcaaaaaaattaaattttaaccatgagggaaatcgtgcacatccaggctggtcagtgtggcaaccagatcggtgccaagttctgggaggtgatcagtgatgaacatggcatcgaccccaccggcacctaccacggggacagcgacctgcagctggaccgcatctctgtgtactacaatgaagccacaggtggcaaatatgttcctcgtgccatcctggtggatctagaacctgggaccatggactctgttcgctcaggtccttttggccagatctttagaccagacaactttgtatttggtcagtctggggcaggtaacaactgggccaaaggccactacacagagggcgccgagctggttgattctgtcctggatgtggtacggaaggaggcagagagctgtgactgcctgcagggcttccagctgacccactcactgggcgggggcacaggctctggaatgggcactctccttatcagcaagatccgagaagaataccctgatcgcatcatgaataccttcagtgtggtgccttcacccaaagtgtctgacaccgtggtcgagccctacaatgccaccctctccgtccatcagttggtagagaatactgatgagacctattgcattgacaacgaggccctctatgatatctgcttccgcactctgaagctgaccacaccaacctacggggatctgaaccaccttgtctcagccaccatgagtggtgtcaccacctccgcaagttggcagtcaacatggtccccttcccacgtctccatttctttatgcctggctttgcccctctcaccagccgtggaagccagcagtatcgagctctcacagtgccggaactcacccagcaggtcttcgatgccaagaacatgatggctgcctgtgacccccgccacggccgatacctcaccgtggctgctgtcttccgtggtcggatgtccatgaaggaggtcgatgagcagatgcttaacgtgcagaacaagaacagcagctactttgtggaatggatccccaacaatgtcaagacagccgtctgtgacatcccacctcgtggcctcaagatggcagtcaccttcattggcaatagcacagccatccaggagctcttcaagcgcatctcggagcagttcactgccatgttccgccggaaggccttcctccactggtacacaggcgagggcatggacgagatggagttcaccgaggctgagagcaacatgaacgacctcgtctctgagtatcagcagtaccaggatgccaccgcagaagaggaggaggatttcggtgaggaggccgaagaggaggcctaaggcagagcccccatcacctcaggcttctcagttcccttagccgtcttactcaactgcccctttcctctccctcagaatttgtgtttgctgcctctatcttgttttttgttttttcttctggggggggtctagaacagtgcctggcacatagtaggcgctcaataaatacttgtttgttgaatgtc

SEQ ID NO: 13834 - protein, 287 aa, Homo sapiens
MREIVHIQAGQCGNQIGAKFWEVISDEHGIDPTGTYHGDSDLQLDRISVYYNEATGGKYVPRAILVDLEPGTMDSVRSGPFGQIFRPDNFVFGQSGAGNNWAKGHYTEGAELVDSVLDVVRKEAESCDCLQGFQLTHSLGGGTGSGMGTLLISKIREEYPDRIMNTFSVVPSPKVSDTVVEPYNATLSVHQLVENTDETYCIDNEALYDICFRTLKLTTPTYGDLNHLVSATMSGVTTSASWQSTWSPSHVSISLCLALPLSPAVEASSIELSQCRNSPSRSSMPRT

SEQ ID NO: 13835 - DNA, 1867 bp, Homo sapiens
gcacgcgcgccccgcccagcctgctttccctccgcgccctcccctctcctttctccctctcagaaccttcctgccgtcgcgtttgcacctcgctgctccagcctctggggcgcattccaaccttccagcctgcgacctgcggagaaaaaaaattacttattttcttgccccatacataccttgaggcgagcaaaaaaattaaattttaaccatgagggaaatcgtgcacatccaggctggtcagtgtggcaaccagatcggtgccaagttctgggaggtgatcagtgatgaacatggcatcgaccccaccggcacctaccacggggacagcgacctgcagctggaccgcatctctgtgtactacaatgaagccacaggtggcaaatatgttcctcgtgccatcctggtggatctagaacctgggaccatggactctgttcgctcaggtccttttggccagatctttagaccagacaactttgtatttggtcagtctggggcaggtaacaactgggccaaaggccactacacagagggcgccgagctggttgattctgtcctggatgtggtacggaaggaggcagagagctgtgactgcctgcagggcttccagctgacccactcactgggcgggggcacaggctctggaatgggcactctccttatcagcaagatccgagaagaataccctgatcgcatcatgaataccttcagtgtgatggagttcaccgaggctgagagcaacatgaacgacctcgtctctgagtatcagcagtaccaggatgccaccgcagaagaggaggaggatttcggtgaggaggccgaagaggaggcctaaggcagagcccccatcacctcaggcttctcagttcccttagccgtcttactcaactgcccctttcctctccctcagaatttgtgtttgctgcctctatcttgttttttgttttttcttctggggggggtctagaacagtgcctggcacatagtaggcgctcaataaatacttgtttgttgaatgtctcctctctctttccactctgggaaacctaggtttctgccattctgggtgaccctgtatttctttctggtgcccattccatttgtccagttaatacttcctcttaaaaatctccaagaagctgggtctccagatcccatttagaaccaaccaggtgctgaaaacacatgtagataatggccatcatcctaagcccaaagtagaaaatggtagaaggtagtgggtagaagtcactatataaggaaggggatgggattttccattctaaaagttttggagagggaaatccaggctattaaagtcactaaatttctaagtatgtccatttcccatctcagcttcaagggaggtgtcagcagtattatctccactttcaatctccctccaagctctactctggaggagtctgtcccactctgtcaagtggaatccttccctttccaactctacctccctcactcagctcctttcccctgatcagagaaagggatcaagggggttgggaggggggaaagagaccagccttggtccctaagcctccagaaacgtcttcttaatccccaccttttcttactcccaaaaaagaatgaacacccctgactctggagtggtgtatactgccacatcagtgtttgagtcagtccccagaggagaggggaaccctcctccatcttttttgcaacatctcatttcttccttttgctgttgcttcccccctcacacacttggttttgttctatcctacatttgagatttctattttatgttgaacttgctgctttttttcatattgaaaagatgacatcgccccaagagccaaaaataaatgggaattgaaaaaagctg

SEQ ID NO: 13836 - protein, 208 aa, Homo sapiens; identical to SEQ ID NO: 13832

SEQ ID NO: 13837 - DNA, 2541 bp, Homo sapiens
gcacgcgcgccccgcccagcctgctttccctccgcgccctcccctctcctttctccctctcagaaccttcctgccgtcgcgtttgcacctcgctgctccagcctctggggcgcattccaaccttccagcctgcgacctgcggagaaaaaaaattacttattttcttgccccatacataccttgaggcgagcaaaaaaattaaattttaaccatgagggaaatcgtgcacatccaggctggtcagtgtggcaaccagatcggtgccaagttctgggaggtgatcagtgatgaacatggcatcgaccccaccggcacctaccacggggacagcgacctgcagctggaccgcatctctgtgtactacaatgaagccacaggtggcaaatatgttcctcgtgccatcctggtggatctagaacctgggaccatggactctgttcgctcaggtccttttggccagatctttagaccagacaactttgtatttggtcagtctggggcaggtaacaactgggccaaaggccactacacagagggcgccgagctggttgattctgtcctggatgtggtacggaaggaggcagagagctgtgactgcctgcagggcttccagctgacccactcactgggcgggggcacaggctctggaatgggcactctccttatcagcaagatccgagaagaataccctgatcgcatcatgaataccttcagtgtggtgccttcacccaaagtgtctgacaccgtggtcgagccctacaatgccaccctctccgtccatcagttggtagagaatactgatgagacctattgcattgacaacgaggccctctatgatatctgcttccgcactctgaagctgaccacaccaacctacggggatctgaaccaccttgtctcagccaccatgagtggtgtcaccacctccgcaagttggcagtcaacatggtccccttcccacgtctccatttctttatgcctggctttgcccctctcaccagccgtggaagccagcagtatcgagctctcacagtgccggaactcacccagcaggtcttcgatgccaagaacatgatggctgcctgtgacccccgccacggccgatacctcaccgtggctgctgtcttccgtggtcggatgtccatgaaggaggtcgatgagcagatgcttaacgtgcagaacaagaacagcagctactttgtggaatggatccccaacaatgtcaagacagccgtctgtgacatcccacctcgtggcctcaagatggcagtcaccttcattggcaatagcacagccatccaggagctcttcaagcgcatctcggagcagttcactgccatgttccgccggaaggccttcctccactggtacacaggcgagggcatggacgagatggagttcaccgaggctgagagcaacatgaacgacctcgtctctgagtatcagcagtaccaggatgccaccgcagaagaggaggaggatttcggtgaggaggccgaagaggaggcctaaggcagagcccccatcacctcaggcttctcagttcccttagccgtcttactcaactgcccctttcctctccctcagaatttgtgtttgctgcctctatcttgttttttgttttttcttctggggggggtctagaacagtgcctggcacatagtaggcgctcaataaatacttgtttgttgaatgtctcctctctctttccactctgggaaacctaggtttctgccattctgggtgaccctgtatttctttctggtgcccattccatttgtccagttaatacttcctcttaaaaatctccaagaagctgggtctccagatcccatttagaaccaaccaggtgctgaaaacacatgtagataatggccatcatcctaagcccaaagtagaaaatggtagaaggtagtgggtagaagtcactatataaggaaggggatgggattttccattctaaaagttttggagagggaaatccaggctattaaagtcactaaatttctaagtatgtccatttcccatctcagcttcaagggaggtgtcagcagtattatctccactttcaatctccctccaagctctactctggaggagtctgtcccactctgtcaagtggaatccttccctttccaactctacctccctcactcagctcctttcccctgatcagagaaagggatcaagggggttgggaggggggaaagagaccagccttggtccctaagcctccagaaacgtcttcttaatccccaccttttcttactcccaaaaaagaatgaacacccctgactctggagtggtgtatactgccacatcagtgtttgagtcagtccccagaggagaggggaaccctcctccatcttttttgcaacatctcatttcttccttttgctgttgcttcccccctcacacacttggttttgttctatcctacatttgagatttctattttatgttgaacttgctgctttttttcatattgaaaagatgacatcgccccaagagccaaaaataaatgggaattgaaaaaagctg

SEQ ID NO: 13838 - protein, 287 aa, Homo sapiens; identical to SEQ ID NO: 13834

SEQ ID NO: 13839 - DNA, 1632 bp, Homo sapiens
tccctccgcgccctcccctctcctttctccctctcagaaccttcctgccgtcgcgtttgcacctcgctgctccagcctctggggcgcattccaaccttccagcctgcgacctgcggagaaaaaaaattacttattttcttgccccatacataccttgaggcgagcaaaaaaattaaattttaaccatgagggaaatcgtgcacatccaggctggtcagtgtggcaaccagatcggtgccaagttctgggaggtgatcagtgatgaacatggcatcgaccccaccggcacctaccacggggacagcgacctgcagctggaccgcatctctgtgtactacaatgaagccacaggtggcaaatatgttcctcgtgccatcctggtggatctagaacctgggaccatggactctgttcgctcaggtccttttggccagatctttagaccagacaactttgtatttggtcagtctggggcaggtaacaactgggccaaaggccactacacagagggcgccgagctggttgattctgtcctggatgtggtacggaaggaggcagagagctgtgactgcctgcagggcttccagctgacccactcactgggcgggggcacaggctctggaatgggcactctccttatcagcaagatccgagaagaataccctgatcgcatcatgaataccttcagtgtggtgccttcacccaaagtgtctgacaccgtggtcgagccctctatgatatctgcttccgcactctgaagctgaccacaccaacctacggggatctgaaccaccttgtctcagccaccatgagtggtgtcaccacctgcctccgtttccctggccagctcaatgctgacctccgcaagttggcagtcaacatggtccccttcccacgtctccatttctttatgcctggctttgcccctctcaccagccgtggaagccagcagtatcgagctctcacagtgccggaactcacccagcaggtcttcgatgccaagaacatgatggctgcctgtgacccccgccacggccgatacctcaccgtggctgctgtcttccgtggtcggatgtccatgaaggaggtcgatgagcagatgcttaacgtgcagaacaagaacagcagctactttgtggaatggatccccaacaatgtcaagacagccgtctgtgacatcccacctcgtggcctcaagatggcagtcaccttcattggcaatagcacagccatccaggagctcttcaagcgcatctcggagcagttcactgccatgttccgccggaaggccttcctccactggtacacaggcgagggcatggacgagatggagttcaccgaggctgagagcaacatgaacgacctcgtctctgagtatcagcagtaccaggatgccaccgcagaagaggaggaggatttcggtgaggaggccgaagaggaggcctaaggcagagcccccatcacctcaggcttctcagttcccttagccgtcttactcaactgcccctttcctctccctcagaatttgtgtttgctgcctctatcttgttttttgttttttcttctggggggggtctagaacagtgcctggcacatagtaggcgctcaataaatacttgtttgttgaatgtc

SEQ ID NO: 13840 - protein, 190 aa, Homo sapiens
MREIVHIQAGQCGNQIGAKFWEVISDEHGIDPTGTYHGDSDLQLDRISVYYNEATGGKYVPRAILVDLEPGTMDSVRSGPFGQIFRPDNFVFGQSGAGNNWAKGHYTEGAELVDSVLDVVRKEAESCDCLQGFQLTHSLGGGTGSGMGTLLISKIREEYPDRIMNTFSVVPSPKVSDTVVEPSMISASAL

SEQ ID NO: 13841 - DNA, 2476 bp, Homo sapiens
tccctccgcgccctcccctctcctttctccctctcagaaccttcctgccgtcgcgtttgcacctcgctgctccagcctctggggcgcattccaaccttccagcctgcgacctgcggagaaaaaaaattacttattttcttgccccatacataccttgaggcgagcaaaaaaattaaattttaaccatgagggaaatcgtgcacatccaggctggtcagtgtggcaaccagatcggtgccaagttctgggaggtgatcagtgatgaacatggcatcgaccccaccggcacctaccacggggacagcgacctgcagctggaccgcatctctgtgtactacaatgaagccacaggtggcaaatatgttcctcgtgccatcctggtggatctagaacctgggaccatggactctgttcgctcaggtccttttggccagatctttagaccagacaactttgtatttggtcagtctggggcaggtaacaactgggccaaaggccactacacagagggcgccgagctggttgattctgtcctggatgtggtacggaaggaggcagagagctgtgactgcctgcagggcttccagctgacccactcactgggcgggggcacaggctctggaatgggcactctccttatcagcaagatccgagaagaataccctgatcgcatcatgaataccttcagtgtggtgccttcacccaaagtgtctgacaccgtggtcgagccctctatgatatctgcttccgcactctgaagctgaccacaccaacctacggggatctgaaccaccttgtctcagccaccatgagtggtgtcaccacctgcctccgtttccctggccagctcaatgctgacctccgcaagttggcagtcaacatggtccccttcccacgtctccatttctttatgcctggctttgcccctctcaccagccgtggaagccagcagtatcgagctctcacagtgccggaactcacccagcaggtcttcgatgccaagaacatgatggctgcctgtgacccccgccacggccgatacctcaccgtggctgctgtcttccgtggtcggatgtccatgaaggaggtcgatgagcagatgcttaacgtgcagaacaagaacagcagctactttgtggaatggatccccaacaatgtcaagacagccgtctgtgacatcccacctcgtggcctcaagatggcagtcaccttcattggcaatagcacagccatccaggagctcttcaagcgcatctcggagcagttcactgccatgttccgccggaaggccttcctccactggtacacaggcgagggcatggacgagatggagttcaccgaggctgagagcaacatgaacgacctcgtctctgagtatcagcagtaccaggatgccaccgcagaagaggaggaggatttcggtgaggaggccgaagaggaggcctaaggcagagcccccatcacctcaggcttctcagttcccttagccgtcttactcaactgcccctttcctctccctcagaatttgtgtttgctgcctctatcttgttttttgttttttcttctggggggggtctagaacagtgcctggcacatagtaggcgctcaataaatacttgtttgttgaatgtctcctctctctttccactctgggaaacctaggtttctgccattctgggtgaccctgtatttctttctggtgcccattccatttgtccagttaatacttcctcttaaaaatctccaagaagctgggtctccagatcccatttagaaccaaccaggtgctgaaaacacatgtagataatggccatcatcctaagcccaaagtagaaaatggtagaaggtagtgggtagaagtcactatataaggaaggggatgggattttccattctaaaagttttggagagggaaatccaggctattaaagtcactaaatttctaagtatgtccatttcccatctcagcttcaagggaggtgtcagcagtattatctccactttcaatctccctccaagctctactctggaggagtctgtcccactctgtcaagtggaatccttccctttccaactctacctccctcactcagctcctttcccctgatcagagaaagggatcaagggggttgggaggggggaaagagaccagccttggtccctaagcctccagaaacgtcttcttaatccccaccttttcttactcccaaaaaagaatgaacacccctgactctggagtggtgtatactgccacatcagtgtttgagtcagtccccagaggagaggggaaccctcctccatcttttttgcaacatctcatttcttccttttgctgttgcttcccccctcacacacttggttttgttctatcctacatttgagatttctattttatgttgaacttgctgctttttttcatattgaaaagatgacatcgccccaagagccaaaaataaatgggaattgaaaaaagctg

SEQ ID NO: 13842 - protein, 190 aa, Homo sapiens; identical to SEQ ID NO: 13840

SEQ ID NO: 13843 - DNA, 1628 bp, Homo sapiens
cctccgcgccctcccctctcctttctccctctcagaaccttcctgccgtcgcgtttgcacctcgctgctccagcctctggggcgcattccaaccttccagcctgcgacctgcggagaaaaaaaattacttattttcttgccccatacataccttgaggcgagcaaaaaaattaaattttaaccatgagggaaatcgtgcacatccaggctggtcagtgtggcaaccagatcggtgccaagttctgggaggtgatcagtgatgaacatggcatcgaccccaccggcacctaccacggggacagcgacctgcagctggaccgcatctctgtgtactacaatgaagccacaggtggcaaatatgttcctcgtgccatcctggtggatctagaacctgggaccatggactctgttcgctcaggtccttttggccagatctttagaccagacaactttgtatttggtcagtctggggcaggtaacaactgggccaaaggccactacacagagggcctgacccactcactgggcgggggcacaggctctggaatgggcactctccttatcagcaagatccgagaagaataccctgatcgcatcatgaataccttcagtgtggtgccttcacccaaagtgtctgacaccgtggtcgagccctacaatgccaccctctccgtccatcagttggtagagaatactgatgagacctattgcattgacaacgaggccctctatgatatctgcttccgcactctgaagctgaccacaccaacctacggggatctgaaccaccttgtctcagccaccatgagtggtgtcaccacctgcctccgtttccctggccagctcaatgctgacctccgcaagttggcagtcaacatggtccccttcccacgtctccatttctttatgcctggctttgcccctctcaccagccgtggaagccagcagtatcgagctctcacagtgccggaactcacccagcaggtcttcgatgccaagaacatgatggctgcctgtgacccccgccacggccgatacctcaccgtggctgctgtcttccgtggtcggatgtccatgaaggaggtcgatgagcagatgcttaacgtgcagaacaagaacagcagctactttgtggaatggatccccaacaatgtcaagacagccgtctgtgacatcccacctcgtggcctcaagatggcagtcaccttcattggcaatagcacagccatccaggagctcttcaagcgcatctcggagcagttcactgccatgttccgccggaaggccttcctccactggtacacaggcgagggcatggacgagatggagttcaccgaggctgagagcaacatgaacgacctcgtctctgagtatcagcagtaccaggatgccaccgcagaagaggaggaggatttcggtgaggaggccgaagaggaggcctaaggcagagcccccatcacctcaggcttctcagttcccttagccgtcttactcaactgcccctttcctctccctcagaatttgtgtttgctgcctctatcttgttttttgttttttcttctggggggggtctagaacagtgcctggcacatagtaggcgctcaataaatacttgtttgttgaatgtc

SEQ ID NO: 13844 - protein, 419 aa, Homo sapiens
MREIVHIQAGQCGNQIGAKFWEVISDEHGIDPTGTYHGDSDLQLDRISVYYNEATGGKYVPRAILVDLEPGTMDSVRSGPFGQIFRPDNFVFGQSGAGNNWAKGHYTEGLTHSLGGGTGSGMGTLLISKIREEYPDRIMNTFSVVPSPKVSDTVVEPYNATLSVHQLVENTDETYCIDNEALYDICFRTLKLTTPTYGDLNHLVSATMSGVTTCLRFPGQLNADLRKLAVNMVPFPRLHFFMPGFAPLTSRGSQQYRALTVPELTQQVFDAKNMMAACDPRHGRYLTVAAVFRGRMSMKEVDEQMLNVQNKNSSYFVEWIPNNVKTAVCDIPPRGLKMAVTFIGNSTAIQELFKRISEQFTAMFRRKAFLHWYTGEGMDEMEFTEAESNMNDLVSEYQQYQDATAEEEEDFGEEAEEEA

SEQ ID NO: 13845 - DNA, 1196 bp, Homo sapiens
cctccgcgccctcccctctcctttctccctctcagaaccttcctgccgtcgcgtttgcacctcgctgctccagcctctggggcgcattccaaccttccagcctgcgacctgcggagaaaaaaaattacttattttcttgccccatacataccttgaggcgagcaaaaaaattaaattttaaccatgagggaaatcgtgcacatccaggctggtcagtgtggcaaccagatcggtgccaagttctgggaggtgatcagtgatgaacatggcatcgaccccaccggcacctaccacggggacagcgacctgcagctggaccgcatctctgtgtactacaatgaagccacaggtggcaaatatgttcctcgtgccatcctggtggatctagaacctgggaccatggactctgttcgctcaggtccttttggccagatctttagaccagacaactttgtatttggtcagtctggggcaggtaacaactgggccaaaggccactacacagagggcgccgagctggttgattctgtcctggatgtggtacggaaggaggcagagagctgtgactgcctgcagggcttccatgacccccgccacggccgatacctcaccgtggctgctgtcttccgtggtcggatgtccatgaaggaggtcgatgagcagatgcttaacgtgcagaacaagaacagcagctactttgtggaatggatccccaacaatgtcaagacagccgtctgtgacatcccacctcgtggcctcaagatggcagtcaccttcattggcaatagcacagccatccaggagctcttcaagcgcatctcggagcagttcactgccatgttccgccggaaggccttcctccactggtacacaggcgagggcatggacgagatggagttcaccgaggctgagagcaacatgaacgacctcgtctctgagtatcagcagtaccaggatgccaccgcagaagaggaggaggatttcggtgaggaggccgaagaggaggcctaaggcagagcccccatcacctcaggcttctcagttcccttagccgtcttactcaactgcccctttcctctccctcagaatttgtgtttgctgcctctatcttgttttttgttttttcttctggggggggtctagaacagtgcctggcacatagtaggcgctcaataaatacttgtttgttgaatgtc

SEQ ID NO: 13846 - protein, 275 aa, Homo sapiens
MREIVHIQAGQCGNQIGAKFWEVISDEHGIDPTGTYHGDSDLQLDRISVYYNEATGGKYVPRAILVDLEPGTMDSVRSGPFGQIFRPDNFVFGQSGAGNNWAKGHYTEGAELVDSVLDVVRKEAESCDCLQGFHDPRHGRYLTVAAVFRGRMSMKEVDEQMLNVQNKNSSYFVEWIPNNVKTAVCDIPPRGLKMAVTFIGNSTAIQELFKRISEQFTAMFRRKAFLHWYTGEGMDEMEFTEAESNMNDLVSEYQQYQDATAEEEEDFGEEAEEEA

SEQ ID NO: 13847 - DNA, 1104 bp, Homo sapiens
cctccgcgccctcccctctcctttctccctctcagaaccttcctgccgtcgcgtttgcacctcgctgctccagcctctggggcgcattccaaccttccagcctgcgacctgcggagaaaaaaaattacttattttcttgccccatacataccttgaggcgagcaaaaaaattaaattttaaccatgagggaaatcgtgcacatccaggctggtcagtgtggcaaccagatcggtgccaagttctgggaggtgatcagtgatgaacatggcatcgaccccaccggcacctaccacggggacagcgacctgcagctggaccgcatctctgtgtactacaatgaagccacaggtggcaaatatgttcctcgtgccatcctggtggatctagaacctgggaccatggactctgttcgctcaggtccttttggccagatctttagaccagacaactttgtatttggtcttcgatgccaagaacatgatggctgcctgtgacccccgccacggccgatacctcaccgtggctgctgtcttccgtggtcggatgtccatgaaggaggtcgatgagcagatgcttaacgtgcagaacaagaacagcagctactttgtggaatggatccccaacaatgtcaagacagccgtctgtgacatcccacctcgtggcctcaagatggcagtcaccttcattggcaatagcacagccatccaggagctcttcaagcgcatctcggagcagttcactgccatgttccgccggaaggccttcctccactggtacacaggcgagggcatggacgagatggagttcaccgaggctgagagcaacatgaacgacctcgtctctgagtatcagcagtaccaggatgccaccgcagaagaggaggaggatttcggtgaggaggccgaagaggaggcctaaggcagagcccccatcacctcaggcttctcagttcccttagccgtcttactcaactgcccctttcctctccctcagaatttgtgtttgctgcctctatcttgttttttgttttttcttctggggggggtctagaacagtgcctggcacatagtaggcgctcaataaatacttgtttgttgaatgtc

SEQ ID NO: 13848 - protein, 103 aa, Homo sapiens
MREIVHIQAGQCGNQIGAKFWEVISDEHGIDPTGTYHGDSDLQLDRISVYYNEATGGKYVPRAILVDLEPGTMDSVRSGPFGQIFRPDNFVFGLRCQEHDGCL

SEQ ID NO: 13849 - DNA, 1596 bp, Homo sapiens
cctccgcgccctcccctctcctttctccctctcagaaccttcctgccgtcgcgtttgcacctcgctgctccagcctctggggcgcattccaaccttccagcctgcgacctgcggagaaaaaaaattacttattttcttgccccatacataccttgaggcgagcaaaaaaattaaattttaaccatgagggaaatcgtgcacatccaggctggtcagtgtggcaaccagatcggtgccaagttctgggaggtgatcagtgatgaacatggcatcgaccccaccggcacctaccacggggacagcgacctgcagctggaccgcatctctgtgtactacaatgaagccacaggtggcaaatatgttcctcgtgccatcctggtggatctagaacctgggaccatggactctgttcgctcaggtccttttggccagatctttagaccagacaactttgtatttggtcagtctggggcaggtaacaactgggccaaaggccactacacagagggcgccgagctggttgattctgtcctggatgtggtacggaaggaggcagagagctgtgactgcctgcagggcttccagctgacccaccaaagtgtctgacaccgtggtcgagccctacaatgccaccctctccgtccatcagttggtagagaatactgatgagacctattgcattgacaacgaggccctctatgatatctgcttccgcactctgaagctgaccacaccaacctacggggatctgaaccaccttgtctcagccaccatgagtggtgtcaccacctgcctccgtttccctggccagctcaatgctgacctccgcaagttggcagtcaacatggtccccttcccacgtctccatttctttatgcctggctttgcccctctcaccagccgtggaagccagcagtatcgagctctcacagtgccggaactcacccagcaggtcttcgatgccaagaacatgatggctgcctgtgacccccgccacggccgatacctcaccgtggctgctgtcttccgtggtcggatgtccatgaaggaggtcgatgagcagatgcttaacgtgcagaacaagaacagcagctactttgtggaatggatccccaacaatgtcaagacagccgtctgtgacatcccacctcgtggcctcaagatggcagtcaccttcattggcaatagcacagccatccaggagctcttcaagcgcatctcggagcagttcactgccatgttccgccggaaggccttcctccactggtacacaggcgagggcatggacgagatggagttcaccgaggctgagagcaacatgaacgacctcgtctctgagtatcagcagtaccaggatgccaccgcagaagaggaggaggatttcggtgaggaggccgaagaggaggcctaaggcagagcccccatcacctcaggcttctcagttcccttagccgtcttactcaactgcccctttcctctccctcagaatttgtgtttgctgcctctatcttgttttttgttttttcttctggggggggtctagaacagtgcctggcacatagtaggcgctcaataaatacttgtttgttgaatgtc

SEQ ID NO: 13850 - protein, 140 aa, Homo sapiens
MREIVHIQAGQCGNQIGAKFWEVISDEHGIDPTGTYHGDSDLQLDRISVYYNEATGGKYVPRAILVDLEPGTMDSVRSGPFGQIFRPDNFVFGQSGAGNNWAKGHYTEGAELVDSVLDVVRKEAESCDCLQGFQLTHQSV

SEQ ID NO: 13851 - DNA, 1232 bp, Homo sapiens
cctccgcgccctcccctctcctttctccctctcagaaccttcctgccgtcgcgtttgcacctcgctgctccagcctctggggcgcattccaaccttccagcctgcgacctgcggagaaaaaaaattacttattttcttgccccatacataccttgaggcgagcaaaaaaattaaattttaaccatgagggaaatcgtgcacatccaggctggtcagtgtggcaaccagatcggtgccaagttctgggaggtgatcagtgatgaacatggcatcgaccccaccggcacctaccacggggacagcgacctgcagctggaccgcatctctgtgtactacaatgaagccacaggtggcaaatatgttcctcgtgccatcctggtggatctagaacctgggaccatggactctgttcgctcaggtccttttggccagatctttagaccagacaactttgtatttggtcagtctggggcaggtaacaactgggccaaaggccactacacagagggcgccgagctggttgattctgtcctggatgtggtacggaaggaggcagagagctgtgactgcctgcagggcttccagcaggtcttcgatgccaagaacatgatggctgcctgtgacccccgccacggccgatacctcaccgtggctgctgtcttccgtggtcggatgtccatgaaggaggtcgatgagcagatgcttaacgtgcagaacaagaacagcagctactttgtggaatggatccccaacaatgtcaagacagccgtctgtgacatcccacctcgtggcctcaagatggcagtcaccttcattggcaatagcacagccatccaggagctcttcaagcgcatctcggagcagttcactgccatgttccgccggaaggccttcctccactggtacacaggcgagggcatggacgagatggagttcaccgaggctgagagcaacatgaacgacctcgtctctgagtatcagcagtaccaggatgccaccgcagaagaggaggaggatttcggtgaggaggccgaagaggaggcctaaggcagagcccccatcacctcaggcttctcagttcccttagccgtcttactcaactgcccctttcctctccctcagaatttgtgtttgctgcctctatcttgttttttgttttttcttctggggggggtctagaacagtgcctggcacatagtaggcgctcaataaatacttgtttgttgaatgtc

SEQ ID NO: 13852 - protein, 287 aa, Homo sapiens
MREIVHIQAGQCGNQIGAKFWEVISDEHGIDPTGTYHGDSDLQLDRISVYYNEATGGKYVPRAILVDLEPGTMDSVRSGPFGQIFRPDNFVFGQSGAGNNWAKGHYTEGAELVDSVLDVVRKEAESCDCLQGFQQVFDAKNMMAACDPRHGRYLTVAAVFRGRMSMKEVDEQMLNVQNKNSSYFVEWIPNNVKTAVCDIPPRGLKMAVTFIGNSTAIQELFKRISEQFTAMFRRKAFLHWYTGEGMDEMEFTEAESNMNDLVSEYQQYQDATAEEEEDFGEEAEEEA

SEQ ID NO: 13853 - DNA, 2472 bp, Homo sapiens
cctccgcgccctcccctctcctttctccctctcagaaccttcctgccgtcgcgtttgcacctcgctgctccagcctctggggcgcattccaaccttccagcctgcgacctgcggagaaaaaaaattacttattttcttgccccatacataccttgaggcgagcaaaaaaattaaattttaaccatgagggaaatcgtgcacatccaggctggtcagtgtggcaaccagatcggtgccaagttctgggaggtgatcagtgatgaacatggcatcgaccccaccggcacctaccacggggacagcgacctgcagctggaccgcatctctgtgtactacaatgaagccacaggtggcaaatatgttcctcgtgccatcctggtggatctagaacctgggaccatggactctgttcgctcaggtccttttggccagatctttagaccagacaactttgtatttggtcagtctggggcaggtaacaactgggccaaaggccactacacagagggcctgacccactcactgggcgggggcacaggctctggaatgggcactctccttatcagcaagatccgagaagaataccctgatcgcatcatgaataccttcagtgtggtgccttcacccaaagtgtctgacaccgtggtcgagccctacaatgccaccctctccgtccatcagttggtagagaatactgatgagacctattgcattgacaacgaggccctctatgatatctgcttccgcactctgaagctgaccacaccaacctacggggatctgaaccaccttgtctcagccaccatgagtggtgtcaccacctgcctccgtttccctggccagctcaatgctgacctccgcaagttggcagtcaacatggtccccttcccacgtctccatttctttatgcctggctttgcccctctcaccagccgtggaagccagcagtatcgagctctcacagtgccggaactcacccagcaggtcttcgatgccaagaacatgatggctgcctgtgacccccgccacggccgatacctcaccgtggctgctgtcttccgtggtcggatgtccatgaaggaggtcgatgagcagatgcttaacgtgcagaacaagaacagcagctactttgtggaatggatccccaacaatgtcaagacagccgtctgtgacatcccacctcgtggcctcaagatggcagtcaccttcattggcaatagcacagccatccaggagctcttcaagcgcatctcggagcagttcactgccatgttccgccggaaggccttcctccactggtacacaggcgagggcatggacgagatggagttcaccgaggctgagagcaacatgaacgacctcgtctctgagtatcagcagtaccaggatgccaccgcagaagaggaggaggatttcggtgaggaggccgaagaggaggcctaaggcagagcccccatcacctcaggcttctcagttcccttagccgtcttactcaactgcccctttcctctccctcagaatttgtgtttgctgcctctatcttgttttttgttttttcttctggggggggtctagaacagtgcctggcacatagtaggcgctcaataaatacttgtttgttgaatgtctcctctctctttccactctgggaaacctaggtttctgccattctgggtgaccctgtatttctttctggtgcccattccatttgtccagttaatacttcctcttaaaaatctccaagaagctgggtctccagatcccatttagaaccaaccaggtgctgaaaacacatgtagataatggccatcatcctaagcccaaagtagaaaatggtagaaggtagtgggtagaagtcactatataaggaaggggatgggattttccattctaaaagttttggagagggaaatccaggctattaaagtcactaaatttctaagtatgtccatttcccatctcagcttcaagggaggtgtcagcagtattatctccactttcaatctccctccaagctctactctggaggagtctgtcccactctgtcaagtggaatccttccctttccaactctacctccctcactcagctcctttcccctgatcagagaaagggatcaagggggttgggaggggggaaagagaccagccttggtccctaagcctccagaaacgtcttcttaatccccaccttttcttactcccaaaaaagaatgaacacccctgactctggagtggtgtatactgccacatcagtgtttgagtcagtccccagaggagaggggaaccctcctccatcttttttgcaacatctcatttcttccttttgctgttgcttcccccctcacacacttggttttgttctatcctacatttgagatttctattttatgttgaacttgctgctttttttcatattgaaaagatgacatcgccccaagagccaaaaataaatgggaattgaaaaaagctg

SEQ ID NO: 13854 - protein, 419 aa, Homo sapiens; identical to SEQ ID NO: 13844

SEQ ID NO: 13855 - DNA, 2040 bp, Homo sapiens
cctccgcgccctcccctctcctttctccctctcagaaccttcctgccgtcgcgtttgcacctcgctgctccagcctctggggcgcattccaaccttccagcctgcgacctgcggagaaaaaaaattacttattttcttgccccatacataccttgaggcgagcaaaaaaattaaattttaaccatgagggaaatcgtgcacatccaggctggtcagtgtggcaaccagatcggtgccaagttctgggaggtgatcagtgatgaacatggcatcgaccccaccggcacctaccacggggacagcgacctgcagctggaccgcatctctgtgtactacaatgaagccacaggtggcaaatatgttcctcgtgccatcctggtggatctagaacctgggaccatggactctgttcgctcaggtccttttggccagatctttagaccagacaactttgtatttggtcagtctggggcaggtaacaactgggccaaaggccactacacagagggcgccgagctggttgattctgtcctggatgtggtacggaaggaggcagagagctgtgactgcctgcagggcttccatgacccccgccacggccgatacctcaccgtggctgctgtcttccgtggtcggatgtccatgaaggaggtcgatgagcagatgcttaacgtgcagaacaagaacagcagctactttgtggaatggatccccaacaatgtcaagacagccgtctgtgacatcccacctcgtggcctcaagatggcagtcaccttcattggcaatagcacagccatccaggagctcttcaagcgcatctcggagcagttcactgccatgttccgccggaaggccttcctccactggtacacaggcgagggcatggacgagatggagttcaccgaggctgagagcaacatgaacgacctcgtctctgagtatcagcagtaccaggatgccaccgcagaagaggaggaggatttcggtgaggaggccgaagaggaggcctaaggcagagcccccatcacctcaggcttctcagttcccttagccgtcttactcaactgcccctttcctctccctcagaatttgtgtttgctgcctctatcttgttttttgttttttcttctggggggggtctagaacagtgcctggcacatagtaggcgctcaataaatacttgtttgttgaatgtctcctctctctttccactctgggaaacctaggtttctgccattctgggtgaccctgtatttctttctggtgcccattccatttgtccagttaatacttcctcttaaaaatctccaagaagctgggtctccagatcccatttagaaccaaccaggtgctgaaaacacatgtagataatggccatcatcctaagcccaaagtagaaaatggtagaaggtagtgggtagaagtcactatataaggaaggggatgggattttccattctaaaagttttggagagggaaatccaggctattaaagtcactaaatttctaagtatgtccatttcccatctcagcttcaagggaggtgtcagcagtattatctccactttcaatctccctccaagctctactctggaggagtctgtcccactctgtcaagtggaatccttccctttccaactctacctccctcactcagctcctttcccctgatcagagaaagggatcaagggggttgggaggggggaaagagaccagccttggtccctaagcctccagaaacgtcttcttaatccccaccttttcttactcccaaaaaagaatgaacacccctgactctggagtggtgtatactgccacatcagtgtttgagtcagtccccagaggagaggggaaccctcctccatcttttttgcaacatctcatttcttccttttgctgttgcttcccccctcacacacttggttttgttctatcctacatttgagatttctattttatgttgaacttgctgctttttttcatattgaaaagatgacatcgccccaagagccaaaaataaatgggaattgaaaaaagctg

SEQ ID NO: 13856 - protein, 275 aa, Homo sapiens; identical to SEQ ID NO: 13846

SEQ ID NO: 13857 - DNA, 1948 bp, Homo sapiens
cctccgcgccctcccctctcctttctccctctcagaaccttcctgccgtcgcgtttgcacctcgctgctccagcctctggggcgcattccaaccttccagcctgcgacctgcggagaaaaaaaattacttattttcttgccccatacataccttgaggcgagcaaaaaaattaaattttaaccatgagggaaatcgtgcacatccaggctggtcagtgtggcaaccagatcggtgccaagttctgggaggtgatcagtgatgaacatggcatcgaccccaccggcacctaccacggggacagcgacctgcagctggaccgcatctctgtgtactacaatgaagccacaggtggcaaatatgttcctcgtgccatcctggtggatctagaacctgggaccatggactctgttcgctcaggtccttttggccagatctttagaccagacaactttgtatttggtcttcgatgccaagaacatgatggctgcctgtgacccccgccacggccgatacctcaccgtggctgctgtcttccgtggtcggatgtccatgaaggaggtcgatgagcagatgcttaacgtgcagaacaagaacagcagctactttgtggaatggatccccaacaatgtcaagacagccgtctgtgacatcccacctcgtggcctcaagatggcagtcaccttcattggcaatagcacagccatccaggagctcttcaagcgcatctcggagcagttcactgccatgttccgccggaaggccttcctccactggtacacaggcgagggcatggacgagatggagttcaccgaggctgagagcaacatgaacgacctcgtctctgagtatcagcagtaccaggatgccaccgcagaagaggaggaggatttcggtgaggaggccgaagaggaggcctaaggcagagcccccatcacctcaggcttctcagttcccttagccgtcttactcaactgcccctttcctctccctcagaatttgtgtttgctgcctctatcttgttttttgttttttcttctggggggggtctagaacagtgcctggcacatagtaggcgctcaataaatacttgtttgttgaatgtctcctctctctttccactctgggaaacctaggtttctgccattctgggtgaccctgtatttctttctggtgcccattccatttgtccagttaatacttcctcttaaaaatctccaagaagctgggtctccagatcccatttagaaccaaccaggtgctgaaaacacatgtagataatggccatcatcctaagcccaaagtagaaaatggtagaaggtagtgggtagaagtcactatataaggaaggggatgggattttccattctaaaagttttggagagggaaatccaggctattaaagtcactaaatttctaagtatgtccatttcccatctcagcttcaagggaggtgtcagcagtattatctccactttcaatctccctccaagctctactctggaggagtctgtcccactctgtcaagtggaatccttccctttccaactctacctccctcactcagctcctttcccctgatcagagaaagggatcaagggggttgggaggggggaaagagaccagccttggtccctaagcctccagaaacgtcttcttaatccccaccttttcttactcccaaaaaagaatgaacacccctgactctggagtggtgtatactgccacatcagtgtttgagtcagtccccagaggagaggggaaccctcctccatcttttttgcaacatctcatttcttccttttgctgttgcttcccccctcacacacttggttttgttctatcctacatttgagatttctattttatgttgaacttgctgctttttttcatattgaaaagatgacatcgccccaagagccaaaaataaatgggaattgaaaaaagctg

SEQ ID NO: 13858 - protein, 103 aa, Homo sapiens; identical to SEQ ID NO: 13848

SEQ ID NO: 13859 - DNA, 2440 bp, Homo sapiens
cctccgcgccctcccctctcctttctccctctcagaaccttcctgccgtcgcgtttgcacctcgctgctccagcctctggggcgcattccaaccttccagcctgcgacctgcggagaaaaaaaattacttattttcttgccccatacataccttgaggcgagcaaaaaaattaaattttaaccatgagggaaatcgtgcacatccaggctggtcagtgtggcaaccagatcggtgccaagttctgggaggtgatcagtgatgaacatggcatcgaccccaccggcacctaccacggggacagcgacctgcagctggaccgcatctctgtgtactacaatgaagccacaggtggcaaatatgttcctcgtgccatcctggtggatctagaacctgggaccatggactctgttcgctcaggtccttttggccagatctttagaccagacaactttgtatttggtcagtctggggcaggtaacaactgggccaaaggccactacacagagggcgccgagctggttgattctgtcctggatgtggtacggaaggaggcagagagctgtgactgcctgcagggcttccagctgacccaccaaagtgtctgacaccgtggtcgagccctacaatgccaccctctccgtccatcagttggtagagaatactgatgagacctattgcattgacaacgaggccctctatgatatctgcttccgcactctgaagctgaccacaccaacctacggggatctgaaccaccttgtctcagccaccatgagtggtgtcaccacctgcctccgtttccctggccagctcaatgctgacctccgcaagttggcagtcaacatggtccccttcccacgtctccatttctttatgcctggctttgcccctctcaccagccgtggaagccagcagtatcgagctctcacagtgccggaactcacccagcaggtcttcgatgccaagaacatgatggctgcctgtgacccccgccacggccgatacctcaccgtggctgctgtcttccgtggtcggatgtccatgaaggaggtcgatgagcagatgcttaacgtgcagaacaagaacagcagctactttgtggaatggatccccaacaatgtcaagacagccgtctgtgacatcccacctcgtggcctcaagatggcagtcaccttcattggcaatagcacagccatccaggagctcttcaagcgcatctcggagcagttcactgccatgttccgccggaaggccttcctccactggtacacaggcgagggcatggacgagatggagttcaccgaggctgagagcaacatgaacgacctcgtctctgagtatcagcagtaccaggatgccaccgcagaagaggaggaggatttcggtgaggaggccgaagaggaggcctaaggcagagcccccatcacctcaggcttctcagttcccttagccgtcttactcaactgcccctttcctctccctcagaatttgtgtttgctgcctctatcttgttttttgttttttcttctggggggggtctagaacagtgcctggcacatagtaggcgctcaataaatacttgtttgttgaatgtctcctctctctttccactctgggaaacctaggtttctgccattctgggtgaccctgtatttctttctggtgcccattccatttgtccagttaatacttcctcttaaaaatctccaagaagctgggtctccagatcccatttagaaccaaccaggtgctgaaaacacatgtagataatggccatcatcctaagcccaaagtagaaaatggtagaaggtagtgggtagaagtcactatataaggaaggggatgggattttccattctaaaagttttggagagggaaatccaggctattaaagtcactaaatttctaagtatgtccatttcccatctcagcttcaagggaggtgtcagcagtattatctccactttcaatctccctccaagctctactctggaggagtctgtcccactctgtcaagtggaatccttccctttccaactctacctccctcactcagctcctttcccctgatcagagaaagggatcaagggggttgggaggggggaaagagaccagccttggtccctaagcctccagaaacgtcttcttaatccccaccttttcttactcccaaaaaagaatgaacacccctgactctggagtggtgtatactgccacatcagtgtttgagtcagtccccagaggagaggggaaccctcctccatcttttttgcaacatctcatttcttccttttgctgttgcttcccccctcacacacttggttttgttctatcctacatttgagatttctattttatgttgaacttgctgctttttttcatattgaaaagatgacatcgccccaagagccaaaaataaatgggaattgaaaaaagctg

SEQ ID NO: 13860 - protein, 140 aa, Homo sapiens; identical to SEQ ID NO: 13850

SEQ ID NO: 13861 - DNA, 2076 bp, Homo sapiens
cctccgcgccctcccctctcctttctccctctcagaaccttcctgccgtcgcgtttgcacctcgctgctccagcctctggggcgcattccaaccttccagcctgcgacctgcggagaaaaaaaattacttattttcttgccccatacataccttgaggcgagcaaaaaaattaaattttaaccatgagggaaatcgtgcacatccaggctggtcagtgtggcaaccagatcggtgccaagttctgggaggtgatcagtgatgaacatggcatcgaccccaccggcacctaccacggggacagcgacctgcagctggaccgcatctctgtgtactacaatgaagccacaggtggcaaatatgttcctcgtgccatcctggtggatctagaacctgggaccatggactctgttcgctcaggtccttttggccagatctttagaccagacaactttgtatttggtcagtctggggcaggtaacaactgggccaaaggccactacacagagggcgccgagctggttgattctgtcctggatgtggtacggaaggaggcagagagctgtgactgcctgcagggcttccagcaggtcttcgatgccaagaacatgatggctgcctgtgacccccgccacggccgatacctcaccgtggctgctgtcttccgtggtcggatgtccatgaaggaggtcgatgagcagatgcttaacgtgcagaacaagaacagcagctactttgtggaatggatccccaacaatgtcaagacagccgtctgtgacatcccacctcgtggcctcaagatggcagtcaccttcattggcaatagcacagccatccaggagctcttcaagcgcatctcggagcagttcactgccatgttccgccggaaggccttcctccactggtacacaggcgagggcatggacgagatggagttcaccgaggctgagagcaacatgaacgacctcgtctctgagtatcagcagtaccaggatgccaccgcagaagaggaggaggatttcggtgaggaggccgaagaggaggcctaaggcagagcccccatcacctcaggcttctcagttcccttagccgtcttactcaactgcccctttcctctccctcagaatttgtgtttgctgcctctatcttgttttttgttttttcttctggggggggtctagaacagtgcctggcacatagtaggcgctcaataaatacttgtttgttgaatgtctcctctctctttccactctgggaaacctaggtttctgccattctgggtgaccctgtatttctttctggtgcccattccatttgtccagttaatacttcctcttaaaaatctccaagaagctgggtctccagatcccatttagaaccaaccaggtgctgaaaacacatgtagataatggccatcatcctaagcccaaagtagaaaatggtagaaggtagtgggtagaagtcactatataaggaaggggatgggattttccattctaaaagttttggagagggaaatccaggctattaaagtcactaaatttctaagtatgtccatttcccatctcagcttcaagggaggtgtcagcagtattatctccactttcaatctccctccaagctctactctggaggagtctgtcccactctgtcaagtggaatccttccctttccaactctacctccctcactcagctcctttcccctgatcagagaaagggatcaagggggttgggaggggggaaagagaccagccttggtccctaagcctccagaaacgtcttcttaatccccaccttttcttactcccaaaaaagaatgaacacccctgactctggagtggtgtatactgccacatcagtgtttgagtcagtccccagaggagaggggaaccctcctccatcttttttgcaacatctcatttcttccttttgctgttgcttcccccctcacacacttggttttgttctatcctacatttgagatttctattttatgttgaacttgctgctttttttcatattgaaaagatgacatcgccccaagagccaaaaataaatgggaattgaaaaaagctg

SEQ ID NO: 13862 - protein, 287 aa, Homo sapiens; identical to SEQ ID NO: 13852

SEQ ID NO: 13863 - DNA, 1016 bp, Homo sapiens
ccctctcctttctccctctcagaaccttcctgccgtcgcgtttgcacctcgctgctccagcctctggggcgcattccaaccttccagcctgcgacctgcggagaaaaaaaattacttattttcttgccccatacataccttgaggcgagcaaaaaaattaaattttaaccatgagggaaatcgtgcacatccaggctggtcagtgtggcaaccagatcggtgccaagttctgggaggtgatcagtgatgaacatggcatcgaccccaccggcacctaccacggggacagcgacctgcagctggaccgcatctctgtgtactacaatgaaccagcagtatcgagctctcacagtgccggaactcacccagcaggtcttcgatgccaagaacatgatggctgcctgtgacccccgccacggccgatacctcaccgtggctgctgtcttccgtggtcggatgtccatgaaggaggtcgatgagcagatgcttaacgtgcagaacaagaacagcagctactttgtggaatggatccccaacaatgtcaagacagccgtctgtgacatcccacctcgtggcctcaagatggcagtcaccttcattggcaatagcacagccatccaggagctcttcaagcgcatctcggagcagttcactgccatgttccgccggaaggccttcctccactggtacacaggcgagggcatggacgagatggagttcaccgaggctgagagcaacatgaacgacctcgtctctgagtatcagcagtaccaggatgccaccgcagaagaggaggaggatttcggtgaggaggccgaagaggaggcctaaggcagagcccccatcacctcaggcttctcagttcccttagccgtcttactcaactgcccctttcctctccctcagaatttgtgtttgctgcctctatcttgttttttgttttttcttctggggggggtctagaacagtgcctggcacatagtaggcgctcaataaatacttgtttgttgaatgtc

SEQ ID NO: 13864 - protein, 194 aa, Homo sapiens
MNMASTPPAPTTGTATCSWTASLCTTMNQQYRALTVPELTQQVFDAKNMMAACDPRHGRYLTVAAVFRGRMSMKEVDEQMLNVQNKNSSYFVEWIPNNVKTAVCDIPPRGLKMAVTFIGNSTAIQELFKRISEQFTAMFRRKAFLHWYTGEGMDEMEFTEAESNMNDLVSEYQQYQDATAEEEEDFGEEAEEEA

SEQ ID NO: 13865 - DNA, 1860 bp, Homo sapiens
ccctctcctttctccctctcagaaccttcctgccgtcgcgtttgcacctcgctgctccagcctctggggcgcattccaaccttccagcctgcgacctgcggagaaaaaaaattacttattttcttgccccatacataccttgaggcgagcaaaaaaattaaattttaaccatgagggaaatcgtgcacatccaggctggtcagtgtggcaaccagatcggtgccaagttctgggaggtgatcagtgatgaacatggcatcgaccccaccggcacctaccacggggacagcgacctgcagctggaccgcatctctgtgtactacaatgaaccagcagtatcgagctctcacagtgccggaactcacccagcaggtcttcgatgccaagaacatgatggctgcctgtgacccccgccacggccgatacctcaccgtggctgctgtcttccgtggtcggatgtccatgaaggaggtcgatgagcagatgcttaacgtgcagaacaagaacagcagctactttgtggaatggatccccaacaatgtcaagacagccgtctgtgacatcccacctcgtggcctcaagatggcagtcaccttcattggcaatagcacagccatccaggagctcttcaagcgcatctcggagcagttcactgccatgttccgccggaaggccttcctccactggtacacaggcgagggcatggacgagatggagttcaccgaggctgagagcaacatgaacgacctcgtctctgagtatcagcagtaccaggatgccaccgcagaagaggaggaggatttcggtgaggaggccgaagaggaggcctaaggcagagcccccatcacctcaggcttctcagttcccttagccgtcttactcaactgcccctttcctctccctcagaatttgtgtttgctgcctctatcttgttttttgttttttcttctggggggggtctagaacagtgcctggcacatagtaggcgctcaataaatacttgtttgttgaatgtctcctctctctttccactctgggaaacctaggtttctgccattctgggtgaccctgtatttctttctggtgcccattccatttgtccagttaatacttcctcttaaaaatctccaagaagctgggtctccagatcccatttagaaccaaccaggtgctgaaaacacatgtagataatggccatcatcctaagcccaaagtagaaaatggtagaaggtagtgggtagaagtcactatataaggaaggggatgggattttccattctaaaagttttggagagggaaatccaggctattaaagtcactaaatttctaagtatgtccatttcccatctcagcttcaagggaggtgtcagcagtattatctccactttcaatctccctccaagctctactctggaggagtctgtcccactctgtcaagtggaatccttccctttccaactctacctccctcactcagctcctttcccctgatcagagaaagggatcaagggggttgggaggggggaaagagaccagccttggtccctaagcctccagaaacgtcttcttaatccccaccttttcttactcccaaaaaagaatgaacacccctgactctggagtggtgtatactgccacatcagtgtttgagtcagtccccagaggagaggggaaccctcctccatcttttttgcaacatctcatttcttccttttgctgttgcttcccccctcacacacttggttttgttctatcctacatttgagatttctattttatgttgaacttgctgctttttttcatattgaaaagatgacatcgccccaagagccaaaaataaatgggaattgaaaaaagctg

SEQ ID NO: 13866 - protein, 194 aa, Homo sapiens; identical to SEQ ID NO: 13864

SEQ ID NO: 13867 - DNA, 471 bp, Homo sapiens
cctttctccctctcagaaccttcctgccgtcgcgtttgcacctcgctgctccagcctctggggcgcattccaaccttccagcctgcgacctgcggagaaaaaaaattacttattttcttgccccatacataccttgaggcgagcaaaaaaattaaattttaaccatgagggaaatcgtgcacatccaggctggtcagtgtggcaaccagatcggtgccaagttctgggaggtgatcagtgatgaacatggcatcgaccccaccggcacctaccacggggacagcgacctgcagctggaccgcatctctgtgtactacaatgaagccacaggtaagggcaggagcccgggcagctcaggttcccttccctgtctcccacttatctgggatctctttccatttctgggcacgccttatcccctttgggtgaatctgtcattttgtccctttcgtgaaccaccgtcggggccaa

SEQ ID NO: 13868 - protein, 101 aa, Homo sapiens
MREIVHIQAGQCGNQIGAKFWEVISDEHGIDPTGTYHGDSDLQLDRISVYYNEATGKGRSPGSSGSLPCLPLIWDLFPFLGTPYPLWVNLSFCPFREPPSG

SEQ ID NO: 13869 - DNA, 1287 bp, Homo sapiens
cctttctccctctcagaaccttcctgccgtcgcgtttgcacctcgctgctccagcctctggggcgcattccaaccttccagcctgcgacctgcggagaaaaaaaattacttattttcttgccccatacataccttgaggcgagcaaaaaaattaaattttaaccatgagggaaatcgtgcacatccaggctggtcagtgtggcaaccagatcggtgccaagttctgggaggtgatcagtgatgaacatggcatcgaccccaccggcacctaccacggggacagcgacctgcagctggaccgcatctctgtccctacaatgccaccctctccgtccatcagttggtagagaatactgatgagacctattgcattgacaacgaggccctctatgatatctgcttccgcactctgaagctgaccacaccaacctacggggatctgaaccaccttgtctcagccaccatgagtggtgtcaccacctgcctccgtttccctggccagctcaatgctgacctccgcaagttggcagtcaacatggtccccttcccacgtctccatttctttatgcctggctttgcccctctcaccagccgtggaagccagcagtatcgagctctcacagtgccggaactcacccagcaggtcttcgatgccaagaacatgatggctgcctgtgacccccgccacggccgatacctcaccgtggctgctgtcttccgtggtcggatgtccatgaaggaggtcgatgagcagatgcttaacgtgcagaacaagaacagcagctactttgtggaatggatccccaacaatgtcaagacagccgtctgtgacatcccacctcgtggcctcaagatggcagtcaccttcattggcaatagcacagccatccaggagctcttcaagcgcatctcggagcagttcactgccatgttccgccggaaggccttcctccactggtacacaggcgagggcatggacgagatggagttcaccgaggctgagagcaacatgaacgacctcgtctctgagtatcagcagtaccaggatgccaccgcagaagaggaggaggatttcggtgaggaggccgaagaggaggcctaaggcagagcccccatcacctcaggcttctcagttcccttagccgtcttactcaactgcccctttcctctccctcagaatttgtgtttgctgcctctatcttgttttttgttttttcttctggggggggtctagaacagtgcctggcacatagtaggcgctcaataaatacttgtttgttgaatgtc

SEQ ID NO: 13870 - protein, 60 aa, Homo sapiens
MREIVHIQAGQCGNQIGAKFWEVISDEHGIDPTGTYHGDSDLQLDRISVPTMPPSPSISW

SEQ ID NO: 13871 - DNA, 806 bp, Homo sapiens
cctttctccctctcagaaccttcctgccgtcgcgtttgcacctcgctgctccagcctctggggcgcattccaaccttccagcctgcgacctgcggagaaaaaaaattacttattttcttgccccatacataccttgaggcgagcaaaaaaattaaattttaaccatgagggaaatcgtgcacatccaggctggtcagtgtggcaaccagatcggtgccaagttctgggaggtgatcagtgatgaacatgtccatgaaggaggtcgatgagcagatgcttaacgtgcagaacaagaacagcagctactttgtggaatggatccccaacaatgtcaagacagccgtctgtgacatcccacctcgtggcctcaagatggcagtcaccttcattggcaatagcacagccatccaggagctcttcaagcgcatctcggagcagttcactgccatgttccgccggaaggccttcctccactggtacacaggcgagggcatggacgagatggagttcaccgaggctgagagcaacatgaacgacctcgtctctgagtatcagcagtaccaggatgccaccgcagaagaggaggaggatttcggtgaggaggccgaagaggaggcctaaggcagagcccccatcacctcaggcttctcagttcccttagccgtcttactcaactgcccctttcctctccctcagaatttgtgtttgctgcctctatcttgttttttgttttttcttctggggggggtctagaacagtgcctggcacatagtaggcgctcaataaatacttgtttgttgaatgtc

SEQ ID NO: 13872 - protein, 126 aa, Homo sapiens
MNMSMKEVDEQMLNVQNKNSSYFVEWIPNNVKTAVCDIPPRGLKMAVTFIGNSTAIQELFKRISEQFTAMFRRKAFLHWYTGEGMDEMEFTEAESNMNDLVSEYQQYQDATAEEEEDFGEEAEEEA

SEQ ID NO: 13873 - DNA, 2131 bp, Homo sapiens
cctttctccctctcagaaccttcctgccgtcgcgtttgcacctcgctgctccagcctctggggcgcattccaaccttccagcctgcgacctgcggagaaaaaaaattacttattttcttgccccatacataccttgaggcgagcaaaaaaattaaattttaaccatgagggaaatcgtgcacatccaggctggtcagtgtggcaaccagatcggtgccaagttctgggaggtgatcagtgatgaacatggcatcgaccccaccggcacctaccacggggacagcgacctgcagctggaccgcatctctgtccctacaatgccaccctctccgtccatcagttggtagagaatactgatgagacctattgcattgacaacgaggccctctatgatatctgcttccgcactctgaagctgaccacaccaacctacggggatctgaaccaccttgtctcagccaccatgagtggtgtcaccacctgcctccgtttccctggccagctcaatgctgacctccgcaagttggcagtcaacatggtccccttcccacgtctccatttctttatgcctggctttgcccctctcaccagccgtggaagccagcagtatcgagctctcacagtgccggaactcacccagcaggtcttcgatgccaagaacatgatggctgcctgtgacccccgccacggccgatacctcaccgtggctgctgtcttccgtggtcggatgtccatgaaggaggtcgatgagcagatgcttaacgtgcagaacaagaacagcagctactttgtggaatggatccccaacaatgtcaagacagccgtctgtgacatcccacctcgtggcctcaagatggcagtcaccttcattggcaatagcacagccatccaggagctcttcaagcgcatctcggagcagttcactgccatgttccgccggaaggccttcctccactggtacacaggcgagggcatggacgagatggagttcaccgaggctgagagcaacatgaacgacctcgtctctgagtatcagcagtaccaggatgccaccgcagaagaggaggaggatttcggtgaggaggccgaagaggaggcctaaggcagagcccccatcacctcaggcttctcagttcccttagccgtcttactcaactgcccctttcctctccctcagaatttgtgtttgctgcctctatcttgttttttgttttttcttctggggggggtctagaacagtgcctggcacatagtaggcgctcaataaatacttgtttgttgaatgtctcctctctctttccactctgggaaacctaggtttctgccattctgggtgaccctgtatttctttctggtgcccattccatttgtccagttaatacttcctcttaaaaatctccaagaagctgggtctccagatcccatttagaaccaaccaggtgctgaaaacacatgtagataatggccatcatcctaagcccaaagtagaaaatggtagaaggtagtgggtagaagtcactatataaggaaggggatgggattttccattctaaaagttttggagagggaaatccaggctattaaagtcactaaatttctaagtatgtccatttcccatctcagcttcaagggaggtgtcagcagtattatctccactttcaatctccctccaagctctactctggaggagtctgtcccactctgtcaagtggaatccttccctttccaactctacctccctcactcagctcctttcccctgatcagagaaagggatcaagggggttgggaggggggaaagagaccagccttggtccctaagcctccagaaacgtcttcttaatccccaccttttcttactcccaaaaaagaatgaacacccctgactctggagtggtgtatactgccacatcagtgtttgagtcagtccccagaggagaggggaaccctcctccatcttttttgcaacatctcatttcttccttttgctgttgcttcccccctcacacacttggttttgttctatcctacatttgagatttctattttatgttgaacttgctgctttttttcatattgaaaagatgacatcgccccaagagccaaaaataaatgggaattgaaaaaagctg

SEQ ID NO: 13874 - protein, 60 aa, Homo sapiens; identical to SEQ ID NO: 13870

SEQ ID NO: 13875 - DNA, 1650 bp, Homo sapiens
cctttctccctctcagaaccttcctgccgtcgcgtttgcacctcgctgctccagcctctggggcgcattccaaccttccagcctgcgacctgcggagaaaaaaaattacttattttcttgccccatacataccttgaggcgagcaaaaaaattaaattttaaccatgagggaaatcgtgcacatccaggctggtcagtgtggcaaccagatcggtgccaagttctgggaggtgatcagtgatgaacatgtccatgaaggaggtcgatgagcagatgcttaacgtgcagaacaagaacagcagctactttgtggaatggatccccaacaatgtcaagacagccgtctgtgacatcccacctcgtggcctcaagatggcagtcaccttcattggcaatagcacagccatccaggagctcttcaagcgcatctcggagcagttcactgccatgttccgccggaaggccttcctccactggtacacaggcgagggcatggacgagatggagttcaccgaggctgagagcaacatgaacgacctcgtctctgagtatcagcagtaccaggatgccaccgcagaagaggaggaggatttcggtgaggaggccgaagaggaggcctaaggcagagcccccatcacctcaggcttctcagttcccttagccgtcttactcaactgcccctttcctctccctcagaatttgtgtttgctgcctctatcttgttttttgttttttcttctggggggggtctagaacagtgcctggcacatagtaggcgctcaataaatacttgtttgttgaatgtctcctctctctttccactctgggaaacctaggtttctgccattctgggtgaccctgtatttctttctggtgcccattccatttgtccagttaatacttcctcttaaaaatctccaagaagctgggtctccagatcccatttagaaccaaccaggtgctgaaaacacatgtagataatggccatcatcctaagcccaaagtagaaaatggtagaaggtagtgggtagaagtcactatataaggaaggggatgggattttccattctaaaagttttggagagggaaatccaggctattaaagtcactaaatttctaagtatgtccatttcccatctcagcttcaagggaggtgtcagcagtattatctccactttcaatctccctccaagctctactctggaggagtctgtcccactctgtcaagtggaatccttccctttccaactctacctccctcactcagctcctttcccctgatcagagaaagggatcaagggggttgggaggggggaaagagaccagccttggtccctaagcctccagaaacgtcttcttaatccccaccttttcttactcccaaaaaagaatgaacacccctgactctggagtggtgtatactgccacatcagtgtttgagtcagtccccagaggagaggggaaccctcctccatcttttttgcaacatctcatttcttccttttgctgttgcttcccccctcacacacttggttttgttctatcctacatttgagatttctattttatgttgaacttgctgctttttttcatattgaaaagatgacatcgccccaagagccaaaaataaatgggaattgaaaaaagctg

SEQ ID NO: 13876 - protein, 126 aa, Homo sapiens; identical to SEQ ID NO: 13872

SEQ ID NO: 13877 - DNA, 1461 bp, Homo sapiens
gccgtcgcgtttgcacctcgctgctccagcctctggggcgcattccaaccttccagcctgcgacctgcagctggaccgcatctctgtgtactacaatgaagccacaggtggcaaatatgttcctcgtgccatcctggtggatctagaacctgggaccatggactctgttcgctcaggtccttttggccagatctttagaccagacaactttgtatttggtcagtctggggcaggtaacaactgggccaaaggccactacacagagggcgccgagctggttgattctgtcctggatgtggtacggaaggaggcagagagctgtgactgcctgcagggcttccagctgacccactcactgggcgggggcacaggctctggaatgggcactctccttatcagcaagatccgagaagaataccctgatcgcatcatgaataccttcagtgtggtgccttcacccaaagtgtctgacaccgtggtcgagccctacaatgccaccctctccgtccatcagttggtagagaatactgatgagacctattgcattgacaacgaggccctctatgatatctgcttccgcactctgaagctgaccacaccaacctacggggatctgaaccaccttgtctcagccaccatgagtggtgtcaccacctgcctccgtttccctggccagctcaatgctgacctccgcaagttggcagtcaacatggtccccttcccacgtctccatttctttatgcctggctttgcccctctcaccagccgtggaagccagcagtatcgagctctcacagtgccggaactcacccagcaggtcttcgatgccaagaacatgatggctgcctgtgacccccgccacggccgatacctcaccgtggctgctgtcttccgtggtcggatgtccatgaaggaggtcgatgagcagatgcttaacgtgcagaacaagaacagcagctactttgtggaatggatccccaacaatgtcaagacagccgtctgtgacatcccacctcgtggcctcaagatggcagtcaccttcattggcaatagcacagccatccaggagctcttcaagcgcatctcggagcagttcactgccatgttccgccggaaggccttcctccactggtacacaggcgagggcatggacgagatggagttcaccgaggctgagagcaacatgaacgacctcgtctctgagtatcagcagtaccaggatgccaccgcagaagaggaggaggatttcggtgaggaggccgaagaggaggcctaaggcagagcccccatcacctcaggcttctcagttcccttagccgtcttactcaactgcccctttcctctccctcagaatttgtgtttgctgcctctatcttgttttttgttttttcttctggggggggtctagaacagtgcctggcacatagtaggcgctcaataaatacttgtttgttgaatgtc

SEQ ID NO: 13878 - protein, 372 aa, Homo sapiens
MDSVRSGPFGQIFRPDNFVFGQSGAGNNWAKGHYTEGAELVDSVLDVVRKEAESCDCLQGFQLTHSLGGGTGSGMGTLLISKIREEYPDRIMNTFSVVPSPKVSDTVVEPYNATLSVHQLVENTDETYCIDNEALYDICFRTLKLTTPTYGDLNHLVSATMSGVTTCLRFPGQLNADLRKLAVNMVPFPRLHFFMPGFAPLTSRGSQQYRALTVPELTQQVFDAKNMMAACDPRHGRYLTVAAVFRGRMSMKEVDEQMLNVQNKNSSYFVEWIPNNVKTAVCDIPPRGLKMAVTFIGNSTAIQELFKRISEQFTAMFRRKAFLHWYTGEGMDEMEFTEAESNMNDLVSEYQQYQDATAEEEEDFGEEAEEEA

SEQ ID NO: 13879 - DNA, 2305 bp, Homo sapiens
gccgtcgcgtttgcacctcgctgctccagcctctggggcgcattccaaccttccagcctgcgacctgcagctggaccgcatctctgtgtactacaatgaagccacaggtggcaaatatgttcctcgtgccatcctggtggatctagaacctgggaccatggactctgttcgctcaggtccttttggccagatctttagaccagacaactttgtatttggtcagtctggggcaggtaacaactgggccaaaggccactacacagagggcgccgagctggttgattctgtcctggatgtggtacggaaggaggcagagagctgtgactgcctgcagggcttccagctgacccactcactgggcgggggcacaggctctggaatgggcactctccttatcagcaagatccgagaagaataccctgatcgcatcatgaataccttcagtgtggtgccttcacccaaagtgtctgacaccgtggtcgagccctacaatgccaccctctccgtccatcagttggtagagaatactgatgagacctattgcattgacaacgaggccctctatgatatctgcttccgcactctgaagctgaccacaccaacctacggggatctgaaccaccttgtctcagccaccatgagtggtgtcaccacctgcctccgtttccctggccagctcaatgctgacctccgcaagttggcagtcaacatggtccccttcccacgtctccatttctttatgcctggctttgcccctctcaccagccgtggaagccagcagtatcgagctctcacagtgccggaactcacccagcaggtcttcgatgccaagaacatgatggctgcctgtgacccccgccacggccgatacctcaccgtggctgctgtcttccgtggtcggatgtccatgaaggaggtcgatgagcagatgcttaacgtgcagaacaagaacagcagctactttgtggaatggatccccaacaatgtcaagacagccgtctgtgacatcccacctcgtggcctcaagatggcagtcaccttcattggcaatagcacagccatccaggagctcttcaagcgcatctcggagcagttcactgccatgttccgccggaaggccttcctccactggtacacaggcgagggcatggacgagatggagttcaccgaggctgagagcaacatgaacgacctcgtctctgagtatcagcagtaccaggatgccaccgcagaagaggaggaggatttcggtgaggaggccgaagaggaggcctaaggcagagcccccatcacctcaggcttctcagttcccttagccgtcttactcaactgcccctttcctctccctcagaatttgtgtttgctgcctctatcttgttttttgttttttcttctggggggggtctagaacagtgcctggcacatagtaggcgctcaataaatacttgtttgttgaatgtctcctctctctttccactctgggaaacctaggtttctgccattctgggtgaccctgtatttctttctggtgcccattccatttgtccagttaatacttcctcttaaaaatctccaagaagctgggtctccagatcccatttagaaccaaccaggtgctgaaaacacatgtagataatggccatcatcctaagcccaaagtagaaaatggtagaaggtagtgggtagaagtcactatataaggaaggggatgggattttccattctaaaagttttggagagggaaatccaggctattaaagtcactaaatttctaagtatgtccatttcccatctcagcttcaagggaggtgtcagcagtattatctccactttcaatctccctccaagctctactctggaggagtctgtcccactctgtcaagtggaatccttccctttccaactctacctccctcactcagctcctttcccctgatcagagaaagggatcaagggggttgggaggggggaaagagaccagccttggtccctaagcctccagaaacgtcttcttaatccccaccttttcttactcccaaaaaagaatgaacacccctgactctggagtggtgtatactgccacatcagtgtttgagtcagtccccagaggagaggggaaccctcctccatcttttttgcaacatctcatttcttccttttgctgttgcttcccccctcacacacttggttttgttctatcctacatttgagatttctattttatgttgaacttgctgctttttttcatattgaaaagatgacatcgccccaagagccaaaaataaatgggaattgaaaaaagctg

SEQ ID NO: 13880 - protein, 372 aa, Homo sapiens; identical to SEQ ID NO: 13878

SEQ ID NO: 13881 - DNA, 1162 bp, Homo sapiens
gcacctcgctgctccagcctctggggcgcattccaaccttccagctgacccactcactgggcgggggcacaggctctggaatgggcactctccttatcagcaagatccgagaagaataccctgatcgcatcatgaataccttcagtgtggtgccttcacccaaagtgtctgacaccgtggtcgagccctacaatgccaccctctccgtccatcagttggtagagaatactgatgagacctattgcattgacaacgaggccctctatgatatctgcttccgcactctgaagctgaccacaccaacctacggggatctgaaccaccttgtctcagccaccatgagtggtgtcaccacctgcctccgtttccctggccagctcaatgctgacctccgcaagttggcagtcaacatggtccccttcccacgtctccatttctttatgcctggctttgcccctctcaccagccgtggaagccagcagtatcgagctctcacagtgccggaactcacccagcaggtcttcgatgccaagaacatgatggctgcctgtgacccccgccacggccgatacctcaccgtggctgctgtcttccgtggtcggatgtccatgaaggaggtcgatgagcagatgcttaacgtgcagaacaagaacagcagctactttgtggaatggatccccaacaatgtcaagacagccgtctgtgacatcccacctcgtggcctcaagatggcagtcaccttcattggcaatagcacagccatccaggagctcttcaagcgcatctcggagcagttcactgccatgttccgccggaaggccttcctccactggtacacaggcgagggcatggacgagatggagttcaccgaggctgagagcaacatgaacgacctcgtctctgagtatcagcagtaccaggatgccaccgcagaagaggaggaggatttcggtgaggaggccgaagaggaggcctaaggcagagcccccatcacctcaggcttctcagttcccttagccgtcttactcaactgcccctttcctctccctcagaatttgtgtttgctgcctctatcttgttttttgttttttcttctggggggggtctagaacagtgcctggcacatagtaggcgctcaataaatacttgtttgttgaatgtc

SEQ ID NO: 13882 - protein, 298 aa, Homo sapiens
MGTLLISKIREEYPDRIMNTFSVVPSPKVSDTVVEPYNATLSVHQLVENTDETYCIDNEALYDICFRTLKLTTPTYGDLNHLVSATMSGVTTCLRFPGQLNADLRKLAVNMVPFPRLHFFMPGFAPLTSRGSQQYRALTVPELTQQVFDAKNMMAACDPRHGRYLTVAAVFRGRMSMKEVDEQMLNVQNKNSSYFVEWIPNNVKTAVCDIPPRGLKMAVTFIGNSTAIQELFKRISEQFTAMFRRKAFLHWYTGEGMDEMEFTEAESNMNDLVSEYQQYQDATAEEEEDFGEEAEEEA

SEQ ID NO: 13883 - DNA, 2006 bp, Homo sapiens
gcacctcgctgctccagcctctggggcgcattccaaccttccagctgacccactcactgggcgggggcacaggctctggaatgggcactctccttatcagcaagatccgagaagaataccctgatcgcatcatgaataccttcagtgtggtgccttcacccaaagtgtctgacaccgtggtcgagccctacaatgccaccctctccgtccatcagttggtagagaatactgatgagacctattgcattgacaacgaggccctctatgatatctgcttccgcactctgaagctgaccacaccaacctacggggatctgaaccaccttgtctcagccaccatgagtggtgtcaccacctgcctccgtttccctggccagctcaatgctgacctccgcaagttggcagtcaacatggtccccttcccacgtctccatttctttatgcctggctttgcccctctcaccagccgtggaagccagcagtatcgagctctcacagtgccggaactcacccagcaggtcttcgatgccaagaacatgatggctgcctgtgacccccgccacggccgatacctcaccgtggctgctgtcttccgtggtcggatgtccatgaaggaggtcgatgagcagatgcttaacgtgcagaacaagaacagcagctactttgtggaatggatccccaacaatgtcaagacagccgtctgtgacatcccacctcgtggcctcaagatggcagtcaccttcattggcaatagcacagccatccaggagctcttcaagcgcatctcggagcagttcactgccatgttccgccggaaggccttcctccactggtacacaggcgagggcatggacgagatggagttcaccgaggctgagagcaacatgaacgacctcgtctctgagtatcagcagtaccaggatgccaccgcagaagaggaggaggatttcggtgaggaggccgaagaggaggcctaaggcagagcccccatcacctcaggcttctcagttcccttagccgtcttactcaactgcccctttcctctccctcagaatttgtgtttgctgcctctatcttgttttttgttttttcttctggggggggtctagaacagtgcctggcacatagtaggcgctcaataaatacttgtttgttgaatgtctcctctctctttccactctgggaaacctaggtttctgccattctgggtgaccctgtatttctttctggtgcccattccatttgtccagttaatacttcctcttaaaaatctccaagaagctgggtctccagatcccatttagaaccaaccaggtgctgaaaacacatgtagataatggccatcatcctaagcccaaagtagaaaatggtagaaggtagtgggtagaagtcactatataaggaaggggatgggattttccattctaaaagttttggagagggaaatccaggctattaaagtcactaaatttctaagtatgtccatttcccatctcagcttcaagggaggtgtcagcagtattatctccactttcaatctccctccaagctctactctggaggagtctgtcccactctgtcaagtggaatccttccctttccaactctacctccctcactcagctcctttcccctgatcagagaaagggatcaagggggttgggaggggggaaagagaccagccttggtccctaagcctccagaaacgtcttcttaatccccaccttttcttactcccaaaaaagaatgaacacccctgactctggagtggtgtatactgccacatcagtgtttgagtcagtccccagaggagaggggaaccctcctccatcttttttgcaacatctcatttcttccttttgctgttgcttcccccctcacacacttggttttgttctatcctacatttgagatttctattttatgttgaacttgctgctttttttcatattgaaaagatgacatcgccccaagagccaaaaataaatgggaattgaaaaaagctg

SEQ ID NO: 13884 - protein, 298 aa, Homo sapiens; identical to SEQ ID NO: 13882

SEQ ID NO: 13885 - DNA, 1781 bp, Homo sapiens
gccgcagtcacgtggagggcggggggggtggtcgactgcggcggcagctctttcctcagacccccagccttttgtgcgccgcgcggtggggcggtgcccagcttgggggaaggagagcggcgcttatcgaagtgtggtcgacctccatccgcccaccgagcacttgggacccgctgcacatatccagagcagggaaagctgtggctttctcgggggagcgagtgtctaggggaagggtgtggcaggcccacgggatgccatgccctagaacaacggcctgagcgcttgtggaattaaaatgggagatgtggggccgagttctgggaggtgatcagtgatgaacatggcatcgaccccaccggcacctaccacggggacagcgacctgcagctggaccgcatctctgtgtactacaatgaagccacaggtggcaaatatgttcctcgtgccatcctggtggatctagaacctgggaccatggactctgttcgctcaggtccttttggccagatctttagaccagacaactttgtatttggtcagtctggggcaggtaacaactgggccaaaggccactacacagagggcgccgagctggttgattctgtcctggatgtggtacggaaggaggcagagagctgtgactgcctgcagggcttccagctgacccactcactgggcgggggcacaggctctggaatgggcactctccttatcagcaagatccgagaagaataccctgatcgcatcatgaataccttcagtgtggtgccttcacccaaagtgtctgacaccgtggtcgagccctacaatgccaccctctccgtccatcagttggtagagaatactgatgagacctattgcattgacaacgaggccctctatgatatctgcttccgcactctgaagctgaccacaccaacctacggggatctgaaccaccttgtctcagccaccatgagtggtgtcaccacctgcctccgtttccctggccagctcaatgctgacctccgcaagttggcagtcaacatggtccccttcccacgtctccatttctttatgcctggctttgcccctctcaccagccgtggaagccagcagtatcgagctctcacagtgccggaactcacccagcaggtcttcgatgccaagaacatgatggctgcctgtgacccccgccacggccgatacctcaccgtggctgctgtcttccgtggtcggatgtccatgaaggaggtcgatgagcagatgcttaacgtgcagaacaagaacagcagctactttgtggaatggatccccaacaatgtcaagacagccgtctgtgacatcccacctcgtggcctcaagatggcagtcaccttcattggcaatagcacagccatccaggagctcttcaagcgcatctcggagcagttcactgccatgttccgccggaaggccttcctccactggtacacaggcgagggcatggacgagatggagttcaccgaggctgagagcaacatgaacgacctcgtctctgagtatcagcagtaccaggatgccaccgcagaagaggaggaggatttcggtgaggaggccgaagaggaggcctaaggcagagcccccatcacctcaggcttctcagttcccttagccgtcttactcaactgcccctttcctctccctcagaatttgtgtttgctgcctctatcttgttttttgttttttcttctggggggggtctagaacagtgcctggcacatagtaggcgctcaataaatacttgtttgttgaatgtc

SEQ ID NO: 13886 - protein, 372 aa, Homo sapiens; identical to SEQ ID NO: 13878

SEQ ID NO: 13887 - DNA, 2625 bp, Homo sapiens
gccgcagtcacgtggagggcggggggggtggtcgactgcggcggcagctctttcctcagacccccagccttttgtgcgccgcgcggtggggcggtgcccagcttgggggaaggagagcggcgcttatcgaagtgtggtcgacctccatccgcccaccgagcacttgggacccgctgcacatatccagagcagggaaagctgtggctttctcgggggagcgagtgtctaggggaagggtgtggcaggcccacgggatgccatgccctagaacaacggcctgagcgcttgtggaattaaaatgggagatgtggggccgagttctgggaggtgatcagtgatgaacatggcatcgaccccaccggcacctaccacggggacagcgacctgcagctggaccgcatctctgtgtactacaatgaagccacaggtggcaaatatgttcctcgtgccatcctggtggatctagaacctgggaccatggactctgttcgctcaggtccttttggccagatctttagaccagacaactttgtatttggtcagtctggggcaggtaacaactgggccaaaggccactacacagagggcgccgagctggttgattctgtcctggatgtggtacggaaggaggcagagagctgtgactgcctgcagggcttccagctgacccactcactgggcgggggcacaggctctggaatgggcactctccttatcagcaagatccgagaagaataccctgatcgcatcatgaataccttcagtgtggtgccttcacccaaagtgtctgacaccgtggtcgagccctacaatgccaccctctccgtccatcagttggtagagaatactgatgagacctattgcattgacaacgaggccctctatgatatctgcttccgcactctgaagctgaccacaccaacctacggggatctgaaccaccttgtctcagccaccatgagtggtgtcaccacctgcctccgtttccctggccagctcaatgctgacctccgcaagttggcagtcaacatggtccccttcccacgtctccatttctttatgcctggctttgcccctctcaccagccgtggaagccagcagtatcgagctctcacagtgccggaactcacccagcaggtcttcgatgccaagaacatgatggctgcctgtgacccccgccacggccgatacctcaccgtggctgctgtcttccgtggtcggatgtccatgaaggaggtcgatgagcagatgcttaacgtgcagaacaagaacagcagctactttgtggaatggatccccaacaatgtcaagacagccgtctgtgacatcccacctcgtggcctcaagatggcagtcaccttcattggcaatagcacagccatccaggagctcttcaagcgcatctcggagcagttcactgccatgttccgccggaaggccttcctccactggtacacaggcgagggcatggacgagatggagttcaccgaggctgagagcaacatgaacgacctcgtctctgagtatcagcagtaccaggatgccaccgcagaagaggaggaggatttcggtgaggaggccgaagaggaggcctaaggcagagcccccatcacctcaggcttctcagttcccttagccgtcttactcaactgcccctttcctctccctcagaatttgtgtttgctgcctctatcttgttttttgttttttcttctggggggggtctagaacagtgcctggcacatagtaggcgctcaataaatacttgtttgttgaatgtctcctctctctttccactctgggaaacctaggtttctgccattctgggtgaccctgtatttctttctggtgcccattccatttgtccagttaatacttcctcttaaaaatctccaagaagctgggtctccagatcccatttagaaccaaccaggtgctgaaaacacatgtagataatggccatcatcctaagcccaaagtagaaaatggtagaaggtagtgggtagaagtcactatataaggaaggggatgggattttccattctaaaagttttggagagggaaatccaggctattaaagtcactaaatttctaagtatgtccatttcccatctcagcttcaagggaggtgtcagcagtattatctccactttcaatctccctccaagctctactctggaggagtctgtcccactctgtcaagtggaatccttccctttccaactctacctccctcactcagctcctttcccctgatcagagaaagggatcaagggggttgggaggggggaaagagaccagccttggtccctaagcctccagaaacgtcttcttaatccccaccttttcttactcccaaaaaagaatgaacacccctgactctggagtggtgtatactgccacatcagtgtttgagtcagtccccagaggagaggggaaccctcctccatcttttttgcaacatctcatttcttccttttgctgttgcttcccccctcacacacttggttttgttctatcctacatttgagatttctattttatgttgaacttgctgctttttttcatattgaaaagatgacatcgccccaagagccaaaaataaatgggaattgaaaaaagctg

SEQ ID NO: 13888 - protein, 372 aa, Homo sapiens; identical to SEQ ID NO: 13878

SEQ ID NO: 13889 - DNA, 846 bp, Homo sapiens
tggggcggtgcccagcttgggggaaggagagcggcgcttatcgaagtgtggtcgacctccatccgcccaccgagcacttgggacccgctgcacatatccagagcagggaaagctgtggctttctcgggggagcgagtgtctaggggaagggtgtggcaggcccacgggatgccatgccctagaacaacggcctgagcgcttgtggaattaaaatgggagatgtggggccgaggtgggcgaattgggatccctccaggtcaggggttcgagaccatcctgggcaacaaagcgagaccctcccccatgccacgtttctacaaaaaataaaagtaaaaaattagctgggcgtggtggcgcgcgtctgtggtcccagctactcgagaggctgagatgggaggatcggttgagcctgggagttccacgctgtagtcatccgtgattgcaccactgcactgcaggctgggcaacaggaagaccctgtcttaaaaattagaagaagctgggcgcggtggctcacccttgtaatcccagcactttgggaggccaaggtgggcggatcacgaggtcaagagatctagaccatcctggccaacatgttctgggaggtgatcagtgatgaacatggcatcgaccccaccggcacctaccacggggacagcgacctgcagctggaccgcatctctgtgtactacaatgaagccacaggtaagggcaggagcccgggcagctcaggttcccttccctgtctcccacttatctgggatctctttccatttctgggcacgccttatcccctttgggtgaatctgtcattttgtccctttcgtgaaccaccgtcggggccaa

SEQ ID NO: 13890 - protein, 83 aa, Homo sapiens
MFWEVISDEHGIDPTGTYHGDSDLQLDRISVYYNEATGKGRSPGSSGSLPCLPLIWDLFPFLGTPYPLWVNLSFCPFREPPSG

SEQ ID NO: 13891 - DNA, 1470 bp, Homo sapiens
ggccaagttctgggaggtgatcagtgatgaacatggcatcgaccccaccggcacctaccacggggacagcgacctgcagctggaccgcatctctgtgtactacaatgaagccacaggtggcaaatatgttcctcgtgccatcctggtggatctagaacctgggaccatggactctgttcgctcaggtccttttggccagatctttagaccagacaactttgtatttggtcagtctggggcaggtaacaactgggccaaaggccactacacagagggcgccgagctggttgattctgtcctggatgtggtacggaaggaggcagagagctgtgactgcctgcagggcttccagctgacccactcactgggcgggggcacaggctctggaatgggcactctccttatcagcaagatccgagaagaataccctgatcgcatcatgaataccttcagtgtggtgccttcacccaaagtgtctgacaccgtggtcgagccctacaatgccaccctctccgtccatcagttggtagagaatactgatgagacctattgcattgacaacgaggccctctatgatatctgcttccgcactctgaagctgaccacaccaacctacggggatctgaaccaccttgtctcagccaccatgagtggtgtcaccacctgcctccgtttccctggccagctcaatgctgacctccgcaagttggcagtcaacatggtccccttcccacgtctccatttctttatgcctggctttgcccctctcaccagccgtggaagccagcagtatcgagctctcacagtgccggaactcacccagcaggtcttcgatgccaagaacatgatggctgcctgtgacccccgccacggccgatacctcaccgtggctgctgtcttccgtggtcggatgtccatgaaggaggtcgatgagcagatgcttaacgtgcagaacaagaacagcagctactttgtggaatggatccccaacaatgtcaagacagccgtctgtgacatcccacctcgtggcctcaagatggcagtcaccttcattggcaatagcacagccatccaggagctcttcaagcgcatctcggagcagttcactgccatgttccgccggaaggccttcctccactggtacacaggcgagggcatggacgagatggagttcaccgaggctgagagcaacatgaacgacctcgtctctgagtatcagcagtaccaggatgccaccgcagaagaggaggaggatttcggtgaggaggccgaagaggaggcctaaggcagagcccccatcacctcaggcttctcagttcccttagccgtcttactcaactgcccctttcctctccctcagaatttgtgtttgctgcctctatcttgttttttgttttttcttctggggggggtctagaacagtgcctggcacatagtaggcgctcaataaatacttgtttgttgaatgtc

SEQ ID NO: 13892 - protein, 372 aa, Homo sapiens; identical to SEQ ID NO: 13878

SEQ ID NO: 13893 - DNA, 2314 bp, Homo sapiens
ggccaagttctgggaggtgatcagtgatgaacatggcatcgaccccaccggcacctaccacggggacagcgacctgcagctggaccgcatctctgtgtactacaatgaagccacaggtggcaaatatgttcctcgtgccatcctggtggatctagaacctgggaccatggactctgttcgctcaggtccttttggccagatctttagaccagacaactttgtatttggtcagtctggggcaggtaacaactgggccaaaggccactacacagagggcgccgagctggttgattctgtcctggatgtggtacggaaggaggcagagagctgtgactgcctgcagggcttccagctgacccactcactgggcgggggcacaggctctggaatgggcactctccttatcagcaagatccgagaagaataccctgatcgcatcatgaataccttcagtgtggtgccttcacccaaagtgtctgacaccgtggtcgagccctacaatgccaccctctccgtccatcagttggtagagaatactgatgagacctattgcattgacaacgaggccctctatgatatctgcttccgcactctgaagctgaccacaccaacctacggggatctgaaccaccttgtctcagccaccatgagtggtgtcaccacctgcctccgtttccctggccagctcaatgctgacctccgcaagttggcagtcaacatggtccccttcccacgtctccatttctttatgcctggctttgcccctctcaccagccgtggaagccagcagtatcgagctctcacagtgccggaactcacccagcaggtcttcgatgccaagaacatgatggctgcctgtgacccccgccacggccgatacctcaccgtggctgctgtcttccgtggtcggatgtccatgaaggaggtcgatgagcagatgcttaacgtgcagaacaagaacagcagctactttgtggaatggatccccaacaatgtcaagacagccgtctgtgacatcccacctcgtggcctcaagatggcagtcaccttcattggcaatagcacagccatccaggagctcttcaagcgcatctcggagcagttcactgccatgttccgccggaaggccttcctccactggtacacaggcgagggcatggacgagatggagttcaccgaggctgagagcaacatgaacgacctcgtctctgagtatcagcagtaccaggatgccaccgcagaagaggaggaggatttcggtgaggaggccgaagaggaggcctaaggcagagcccccatcacctcaggcttctcagttcccttagccgtcttactcaactgcccctttcctctccctcagaatttgtgtttgctgcctctatcttgttttttgttttttcttctggggggggtctagaacagtgcctggcacatagtaggcgctcaataaatacttgtttgttgaatgtctcctctctctttccactctgggaaacctaggtttctgccattctgggtgaccctgtatttctttctggtgcccattccatttgtccagttaatacttcctcttaaaaatctccaagaagctgggtctccagatcccatttagaaccaaccaggtgctgaaaacacatgtagataatggccatcatcctaagcccaaagtagaaaatggtagaaggtagtgggtagaagtcactatataaggaaggggatgggattttccattctaaaagttttggagagggaaatccaggctattaaagtcactaaatttctaagtatgtccatttcccatctcagcttcaagggaggtgtcagcagtattatctccactttcaatctccctccaagctctactctggaggagtctgtcccactctgtcaagtggaatccttccctttccaactctacctccctcactcagctcctttcccctgatcagagaaagggatcaagggggttgggaggggggaaagagaccagccttggtccctaagcctccagaaacgtcttcttaatccccaccttttcttactcccaaaaaagaatgaacacccctgactctggagtggtgtatactgccacatcagtgtttgagtcagtccccagaggagaggggaaccctcctccatcttttttgcaacatctcatttcttccttttgctgttgcttcccccctcacacacttggttttgttctatcctacatttgagatttctattttatgttgaacttgctgctttttttcatattgaaaagatgacatcgccccaagagccaaaaataaatgggaattgaaaaaagctg

SEQ ID NO: 13894 - protein, 372 aa, Homo sapiens; identical to SEQ ID NO: 13878

SEQ ID NO: 13895 - DNA, 1417 bp, Homo sapiens
cctaccacggggacagcgacctgcagctggaccgcatctctgtgtactacaatgaagccacaggtggcaaatatgttcctcgtgccatcctggtggatctagaacctgggaccatggactctgttcgctcaggtccttttggccagatctttagaccagacaactttgtatttggtcagtctggggcaggtaacaactgggccaaaggccactacacagagggcgccgagctggttgattctgtcctggatgtggtacggaaggaggcagagagctgtgactgcctgcagggcttccagctgacccactcactgggcgggggcacaggctctggaatgggcactctccttatcagcaagatccgagaagaataccctgatcgcatcatgaataccttcagtgtggtgccttcacccaaagtgtctgacaccgtggtcgagccctacaatgccaccctctccgtccatcagttggtagagaatactgatgagacctattgcattgacaacgaggccctctatgatatctgcttccgcactctgaagctgaccacaccaacctacggggatctgaaccaccttgtctcagccaccatgagtggtgtcaccacctgcctccgtttccctggccagctcaatgctgacctccgcaagttggcagtcaacatggtccccttcccacgtctccatttctttatgcctggctttgcccctctcaccagccgtggaagccagcagtatcgagctctcacagtgccggaactcacccagcaggtcttcgatgccaagaacatgatggctgcctgtgacccccgccacggccgatacctcaccgtggctgctgtcttccgtggtcggatgtccatgaaggaggtcgatgagcagatgcttaacgtgcagaacaagaacagcagctactttgtggaatggatccccaacaatgtcaagacagccgtctgtgacatcccacctcgtggcctcaagatggcagtcaccttcattggcaatagcacagccatccaggagctcttcaagcgcatctcggagcagttcactgccatgttccgccggaaggccttcctccactggtacacaggcgagggcatggacgagatggagttcaccgaggctgagagcaacatgaacgacctcgtctctgagtatcagcagtaccaggatgccaccgcagaagaggaggaggatttcggtgaggaggccgaagaggaggcctaaggcagagcccccatcacctcaggcttctcagttcccttagccgtcttactcaactgcccctttcctctccctcagaatttgtgtttgctgcctctatcttgttttttgttttttcttctggggggggtctagaacagtgcctggcacatagtaggcgctcaataaatacttgtttgttgaatgtc

SEQ ID NO: 13896 - protein, 372 aa, Homo sapiens; identical to SEQ ID NO: 13878

SEQ ID NO: 13897 - DNA, 2261 bp, Homo sapiens
cctaccacggggacagcgacctgcagctggaccgcatctctgtgtactacaatgaagccacaggtggcaaatatgttcctcgtgccatcctggtggatctagaacctgggaccatggactctgttcgctcaggtccttttggccagatctttagaccagacaactttgtatttggtcagtctggggcaggtaacaactgggccaaaggccactacacagagggcgccgagctggttgattctgtcctggatgtggtacggaaggaggcagagagctgtgactgcctgcagggcttccagctgacccactcactgggcgggggcacaggctctggaatgggcactctccttatcagcaagatccgagaagaataccctgatcgcatcatgaataccttcagtgtggtgccttcacccaaagtgtctgacaccgtggtcgagccctacaatgccaccctctccgtccatcagttggtagagaatactgatgagacctattgcattgacaacgaggccctctatgatatctgcttccgcactctgaagctgaccacaccaacctacggggatctgaaccaccttgtctcagccaccatgagtggtgtcaccacctgcctccgtttccctggccagctcaatgctgacctccgcaagttggcagtcaacatggtccccttcccacgtctccatttctttatgcctggctttgcccctctcaccagccgtggaagccagcagtatcgagctctcacagtgccggaactcacccagcaggtcttcgatgccaagaacatgatggctgcctgtgacccccgccacggccgatacctcaccgtggctgctgtcttccgtggtcggatgtccatgaaggaggtcgatgagcagatgcttaacgtgcagaacaagaacagcagctactttgtggaatggatccccaacaatgtcaagacagccgtctgtgacatcccacctcgtggcctcaagatggcagtcaccttcattggcaatagcacagccatccaggagctcttcaagcgcatctcggagcagttcactgccatgttccgccggaaggccttcctccactggtacacaggcgagggcatggacgagatggagttcaccgaggctgagagcaacatgaacgacctcgtctctgagtatcagcagtaccaggatgccaccgcagaagaggaggaggatttcggtgaggaggccgaagaggaggcctaaggcagagcccccatcacctcaggcttctcagttcccttagccgtcttactcaactgcccctttcctctccctcagaatttgtgtttgctgcctctatcttgttttttgttttttcttctggggggggtctagaacagtgcctggcacatagtaggcgctcaataaatacttgtttgttgaatgtctcctctctctttccactctgggaaacctaggtttctgccattctgggtgaccctgtatttctttctggtgcccattccatttgtccagttaatacttcctcttaaaaatctccaagaagctgggtctccagatcccatttagaaccaaccaggtgctgaaaacacatgtagataatggccatcatcctaagcccaaagtagaaaatggtagaaggtagtgggtagaagtcactatataaggaaggggatgggattttccattctaaaagttttggagagggaaatccaggctattaaagtcactaaatttctaagtatgtccatttcccatctcagcttcaagggaggtgtcagcagtattatctccactttcaatctccctccaagctctactctggaggagtctgtcccactctgtcaagtggaatccttccctttccaactctacctccctcactcagctcctttcccctgatcagagaaagggatcaagggggttgggaggggggaaagagaccagccttggtccctaagcctccagaaacgtcttcttaatccccaccttttcttactcccaaaaaagaatgaacacccctgactctggagtggtgtatactgccacatcagtgtttgagtcagtccccagaggagaggggaaccctcctccatcttttttgcaacatctcatttcttccttttgctgttgcttcccccctcacacacttggttttgttctatcctacatttgagatttctattttatgttgaacttgctgctttttttcatattgaaaagatgacatcgccccaagagccaaaaataaatgggaattgaaaaaagctg

SEQ ID NO: 13898 - protein, 372 aa, Homo sapiens; identical to SEQ ID NO: 13878

SEQ ID NO: 13899 - DNA, 1573 bp, Homo sapiens
taggtggcaaatatgttcctcgtgccatcctggtggatctagaacctgggaccatggactctgttcgctcaggtccttttggccagatctttagaccagacaactttgtatttggtgagttatacagatgatattagcagatgatataccatcgtgttcaacttatttgggtgcaaggacacagcaaaagttaggagatgattgttgtattggagtgctaatacagaaatgtgttctgaaatctaacggagggtagaggtagtgcctactattgctggtaaattatggggcagtagggggagaatatatcacagtgaaggagaaagaagatacatccgagggaattatttgaaaagttgaaagatggaaacatcatgtatcttccataccctgttaattgagcttttctcctgactgcattccaggtcagtctggggcaggtaacaactgggccaaaggccactacacagagggcgccgagctggttgattctgtcctggatgtggtacggaaggaggcagagagctgtgactgcctgcagggcttccagctgacccactcactgggcgggggcacaggctctggaatgggcactctccttatcagcaagatccgagaagaataccctgatcgcatcatgaataccttcagtgtggtgccttcacccaaagtgtctgacaccgtggtcgagccctacaatgccaccctctccgtccatcagttggtagagaatactgatgagacctattgcattgacaacgaggccctctatgatatctgcttccgcactctgaagtgacctccgcaagttggcagtcaacatggtccccttcccacgtctccatttctttatgcctggctttgcccctctcaccagccgtggaagccagcagtatcgagctctcacagtgccggaactcacccagcaggtcttcgatgccaagaacatgatggctgcctgtgacccccgccacggccgatacctcaccgtggctgctgtcttccgtggtcggatgtccatgaaggaggtcgatgagcagatgcttaacgtgcagaacaagaacagcagctactttgtggaatggatccccaacaatgtcaagacagccgtctgtgacatcccacctcgtggcctcaagatggcagtcaccttcattggcaatagcacagccatccaggagctcttcaagcgcatctcggagcagttcactgccatgttccgccggaaggccttcctccactggtacacaggcgagggcatggacgagatggagttcaccgaggctgagagcaacatgaacgacctcgtctctgagtatcagcagtaccaggatgccaccgcagaagaggaggaggatttcggtgaggaggccgaagaggaggcctaaggcagagcccccatcacctcaggcttctcagttcccttagccgtcttactcaactgcccctttcctctccctcagaatttgtgtttgctgcctctatcttgttttttgttttttcttctggggggggtctagaacagtgcctggcacatagtaggcgctcaataaatacttgtttgttgaatgtc

SEQ ID NO: 13900 - protein, 70 aa, Homo sapiens
MGTLLISKIREEYPDRIMNTFSVVPSPKVSDTVVEPYNATLSVHQLVENTDETYCIDNEALYDICFRTLK

SEQ ID NO: 13901 - DNA, 2417 bp, Homo sapiens
taggtggcaaatatgttcctcgtgccatcctggtggatctagaacctgggaccatggactctgttcgctcaggtccttttggccagatctttagaccagacaactttgtatttggtgagttatacagatgatattagcagatgatataccatcgtgttcaacttatttgggtgcaaggacacagcaaaagttaggagatgattgttgtattggagtgctaatacagaaatgtgttctgaaatctaacggagggtagaggtagtgcctactattgctggtaaattatggggcagtagggggagaatatatcacagtgaaggagaaagaagatacatccgagggaattatttgaaaagttgaaagatggaaacatcatgtatcttccataccctgttaattgagcttttctcctgactgcattccaggtcagtctggggcaggtaacaactgggccaaaggccactacacagagggcgccgagctggttgattctgtcctggatgtggtacggaaggaggcagagagctgtgactgcctgcagggcttccagctgacccactcactgggcgggggcacaggctctggaatgggcactctccttatcagcaagatccgagaagaataccctgatcgcatcatgaataccttcagtgtggtgccttcacccaaagtgtctgacaccgtggtcgagccctacaatgccaccctctccgtccatcagttggtagagaatactgatgagacctattgcattgacaacgaggccctctatgatatctgcttccgcactctgaagtgacctccgcaagttggcagtcaacatggtccccttcccacgtctccatttctttatgcctggctttgcccctctcaccagccgtggaagccagcagtatcgagctctcacagtgccggaactcacccagcaggtcttcgatgccaagaacatgatggctgcctgtgacccccgccacggccgatacctcaccgtggctgctgtcttccgtggtcggatgtccatgaaggaggtcgatgagcagatgcttaacgtgcagaacaagaacagcagctactttgtggaatggatccccaacaatgtcaagacagccgtctgtgacatcccacctcgtggcctcaagatggcagtcaccttcattggcaatagcacagccatccaggagctcttcaagcgcatctcggagcagttcactgccatgttccgccggaaggccttcctccactggtacacaggcgagggcatggacgagatggagttcaccgaggctgagagcaacatgaacgacctcgtctctgagtatcagcagtaccaggatgccaccgcagaagaggaggaggatttcggtgaggaggccgaagaggaggcctaaggcagagcccccatcacctcaggcttctcagttcccttagccgtcttactcaactgcccctttcctctccctcagaatttgtgtttgctgcctctatcttgttttttgttttttcttctggggggggtctagaacagtgcctggcacatagtaggcgctcaataaatacttgtttgttgaatgtctcctctctctttccactctgggaaacctaggtttctgccattctgggtgaccctgtatttctttctggtgcccattccatttgtccagttaatacttcctcttaaaaatctccaagaagctgggtctccagatcccatttagaaccaaccaggtgctgaaaacacatgtagataatggccatcatcctaagcccaaagtagaaaatggtagaaggtagtgggtagaagtcactatataaggaaggggatgggattttccattctaaaagttttggagagggaaatccaggctattaaagtcactaaatttctaagtatgtccatttcccatctcagcttcaagggaggtgtcagcagtattatctccactttcaatctccctccaagctctactctggaggagtctgtcccactctgtcaagtggaatccttccctttccaactctacctccctcactcagctcctttcccctgatcagagaaagggatcaagggggttgggaggggggaaagagaccagccttggtccctaagcctccagaaacgtcttcttaatccccaccttttcttactcccaaaaaagaatgaacacccctgactctggagtggtgtatactgccacatcagtgtttgagtcagtccccagaggagaggggaaccctcctccatcttttttgcaacatctcatttcttccttttgctgttgcttcccccctcacacacttggttttgttctatcctacatttgagatttctattttatgttgaacttgctgctttttttcatattgaaaagatgacatcgccccaagagccaaaaataaatgggaattgaaaaaagctg

SEQ ID NO: 13902 - protein, 70 aa, Homo sapiens; identical to SEQ ID NO: 13900

SEQ ID NO: 13903 - DNA, 2479 bp, Homo sapiens
taggtggcaaatatgttcctcgtgccatcctggtggatctagaacctgggaccatggactctgttcgctcaggtccttttggccagatctttagaccagacaactttgtatttggtgagttatacagatgatattagcagatgatataccatcgtgttcaacttatttgggtgcaaggacacagcaaaagttaggagatgattgttgtattggagtgctaatacagaaatgtgttctgaaatctaacggagggtagaggtagtgcctactattgctggtaaattatggggcagtagggggagaatatatcacagtgaaggagaaagaagatacatccgagggaattatttgaaaagttgaaagatggaaacatcatgtatcttccataccctgttaattgagcttttctcctgactgcattccaggtcagtctggggcaggtaacaactgggccaaaggccactacacagagggcgccgagctggttgattctgtcctggatgtggtacggaaggaggcagagagctgtgactgcctgcagggcttccagctgacccactcactgggcgggggcacaggctctggaatgggcactctccttatcagcaagatccgagaagaataccctgatcgcatcatgaataccttcagtgtggtgccttcacccaaagtgtctgacaccgtggtcgagccctacaatgccaccctctccgtccatcagttggtagagaatactgatgagacctattgcattgacaacgaggccctctatgatatctgcttccgcactctgaagctgaccacaccaacctacggggatctgaaccaccttgtctcagccaccatgagtggtgtcaccacctgcctccgtttccctggccagctcaatgctgacctccgcaagttggcagtcaacatggtccccttcccacgtctccatttctttatgcctggctttgcccctctcaccagccgtggaagccagcagtatcgagctctcacagtgccggaactcacccagcaggtcttcgatgccaagaacatgatggctgcctgtgacccccgccacggccgatacctcaccgtggctgctgtcttccgtggtcggatgtccatgaaggaggtcgatgagcagatgcttaacgtgcagaacaagaacagcagctactttgtggaatggatccccaacaatgtcaagacagccgtctgtgacatcccacctcgtggcctcaagatggcagtcaccttcattggcaatagcacagccatccaggagctcttcaagcgcatctcggagcagttcactgccatgttccgccggaaggccttcctccactggtacacaggcgagggcatggacgagatggagttcaccgaggctgagagcaacatgaacgacctcgtctctgagtatcagcagtaccaggatgccaccgcagaagaggaggaggatttcggtgaggaggccgaagaggaggcctaaggcagagcccccatcacctcaggcttctcagttcccttagccaatttgtgtttgctgcctctatcttgttttttgttttttcttctggggggggtctagaacagtgcctggcacatagtaggcgctcaataaatacttgtttgttgaatgtctcctctctctttccactctgggaaacctaggtttctgccattctgggtgaccctgtatttctttctggtgcccattccatttgtccagttaatacttcctcttaaaaatctccaagaagctgggtctccagatcccatttagaaccaaccaggtgctgaaaacacatgtagataatggccatcatcctaagcccaaagtagaaaatggtagaaggtagtgggtagaagtcactatataaggaaggggatgggattttccattctaaaagttttggagagggaaatccaggctattaaagtcactaaatttctaagtatgtccatttcccatctcagcttcaagggaggtgtcagcagtattatctccactttcaatctccctccaagctctactctggaggagtctgtcccactctgtcaagtggaatccttccctttccaactctacctccctcactcagctcctttcccctgatcagagaaagggatcaagggggttgggaggggggaaagagaccagccttggtccctaagcctccagaaacgtcttcttaatccccaccttttcttactcccaaaaaagaatgaacacccctgactctggagtggtgtatactgccacatcagtgtttgagtcagtccccagaggagaggggaaccctcctccatcttttttgcaacatctcatttcttccttttgctgttgcttcccccctcacacacttggttttgttctatcctacatttgagatttctattttatgttgaacttgctgctttttttcatattgaaaagatgacatcgccccaagagccaaaaataaatgggaattgaaaaaagctg

SEQ ID NO: 13904 - protein, 298 aa, Homo sapiens; identical to SEQ ID NO: 13882

SEQ ID NO: 13905 - DNA, 1918 bp, Homo sapiens
taggtggcaaatatgttcctcgtgccatcctggtggatctagaacctgggaccatggactctgttcgctcaggtccttttggccagatctttagaccagacaactttgtatttggtgagttatacagatgatattagcagatgatataccatcgtgttcaacttatttgggtgcaaggacacagcaaaagttaggagatgattgttgtattggagtgctaatacagaaatgtgttctgaaatctaacggagggtagaggtagtgcctactattgctggtaaattatggggcagtagggggagaatatatcacagtgaaggagaaagaagatacatccgagggaattatttgaaaagttgaaagatggaaacatcatgtatcttccataccctgttaattgagcttttctcctgactgcattccaggtcagtctggggcaggtaacaactgggccaaaggccactacacagagggcgccgagctggttgattctgtcctggatgtggtacggaaggaggcagagagctgtgactgcctgcagggcttccagctgacccactcactgggcgggggcacaggctctggaatgggcactctccttatcagcaagatccgagaagaataccctgatcgcatcatgaataccttcagtgtggtgccttcacccaaagtgtctgacaccgtggtcgagccctacaatgccaccctctccgtccatcagttggtagagaatactgatgagacctattgcattgacaacgaggccctctatgatatctgcttccgcactctgaagctgaccacaccaacctacggggatctgaaccaccaggatgccaccgcagaagaggaggaggatttcggtgaggaggccgaagaggaggcctaaggcagagcccccatcacctcaggcttctcagttcccttagccgtcttactcaactgcccctttcctctccctcagaatttgtgtttgctgcctctatcttgttttttgttttttcttctggggggggtctagaacagtgcctggcacatagtaggcgctcaataaatacttgtttgttgaatgtctcctctctctttccactctgggaaacctaggtttctgccattctgggtgaccctgtatttctttctggtgcccattccatttgtccagttaatacttcctcttaaaaatctccaagaagctgggtctccagatcccatttagaaccaaccaggtgctgaaaacacatgtagataatggccatcatcctaagcccaaagtagaaaatggtagaaggtagtgggtagaagtcactatataaggaaggggatgggattttccattctaaaagttttggagagggaaatccaggctattaaagtcactaaatttctaagtatgtccatttcccatctcagcttcaagggaggtgtcagcagtattatctccactttcaatctccctccaagctctactctggaggagtctgtcccactctgtcaagtggaatccttccctttccaactctacctccctcactcagctcctttcccctgatcagagaaagggatcaagggggttgggaggggggaaagagaccagccttggtccctaagcctccagaaacgtcttcttaatccccaccttttcttactcccaaaaaagaatgaacacccctgactctggagtggtgtatactgccacatcagtgtttgagtcagtccccagaggagaggggaaccctcctccatcttttttgcaacatctcatttcttccttttgctgttgcttcccccctcacacacttggttttgttctatcctacatttgagatttctattttatgttgaacttgctgctttttttcatattgaaaagatgacatcgccccaagagccaaaaataaatgggaattgaaaaaagctg

SEQ ID NO: 13906 - protein, 100 aa, Homo sapiens
MGTLLISKIREEYPDRIMNTFSVVPSPKVSDTVVEPYNATLSVHQLVENTDETYCIDNEALYDICFRTLKLTTPTYGDLNHQDATAEEEEDFGEEAEEEA

SEQ ID NO: 13907 - DNA, 2032 bp, Homo sapiens
gcgggagcggggccagctcccaggaaagctggtctgcgagcggcccctgcccggctcccaggtccctgcgcgaccccgcccttcccgagaccccaccaaagtgactggggaagtactggacattctaactcgcctgccagagagtgtggaaagactcacaggcgtgagcatctcccaggatgatggccattatctacatgtgttttcagcacctggttggttctaaatgggatctggagacccagcttcttggagatttttaagaggaagtattaactggacaaatggaatgggcaccagaaagaaatacagggtcacccagaatggcagaaacctaggtttcccagagtggaaagagagaggagacattcaacaaacaagtatttattgagcgcctactatgtgccaggcactgttctagaccccccccagaagaaaaaacaaaaaacaagatagaggcagcaaacacaaattctgagggagaggaaaggggcagttgagtaagacggctaagggaactgagaagcctgaggtgatgggggctctgccttaggcctcctcttcggcctcctcaccgaaatcctcctcctcttctgcggtggcatcctggtactgctgatactcagagacgaggtcgttcatgttgctctcagcctcggtgaactccatctcgtccatgccctcgcctgtgtaccagtggaggaaggccttccggcggaacatggcagtgaactgctccgagatgcgcttgaagagctcctggatggctgtgctattgccaatgaaggtgactgccatcttgaggccacgaggtgggatgtcacagacggctgtcttgacattgttggggatccattccacaaagtagctgctgttcttgttctgcacgttaagcatctgctcatcgacctccttcatggacatccgaccacggaagacagcagccacggtgaggtatcggccgtggcgggggtcacaggcagccatcatgttcttggcatcgaagacctgctgggtgagttccggcactgtgagagctcgatactgctggcttccacggctggtgagaggggcaaagccaggcataaagaaatggagacgtgggaaggggaccatgttgactgccaacttgcggaggtcagcattgagctggccagggaaacggaggcaggtggtgacaccactcatggtggctgagacaaggtggttcagatccccgtaggttggtgtggtcagcttcagagtgcggaagcagatatcatagagggcctcgttgtcaatgcaataggtctcatcagtattctctaccaactgatggacggagagggtggcattgtagggctcgaccacggtgtcagacactttgggtgaaggcaccacactgaaggtattcatgatgcgatcagggtattcttctcggatcttgctgataaggagagtgcccattccagagcctgtgcccccgcccagtgagtgggtcagctggaagccctgcaggcagtcacagctctctgcctccttccgtaccacatccaggacagaatcaaccagctcggcgccctctgtgtagtggcctttggcccagttgttacctgccccagactgacctggaatgcagtcaggagaaaagctcaattaacagggtatggaagatacatgatgtttccatctttcaacttttcaaataattccctcggatgtatcttctttctccttcactgtgatatattctccccctactgccccataatttaccagcaatagtaggcactacctctaccctccgttagatttcagaacacatttctgtattagcactccaatacaacaatcatctcctaacttttgctgtgtccttgcacccaaataagttgaacacgatggtatatcatctgctaatatcatctgtataactcaccaaatacaaagttgtctggtctaaagatctggccaaaaggacctgagcgaacagagtccatggtcccaggttctagatccaccaggatggcacgaggaacatatttgccaccta

SEQ ID NO: 13908 - protein, 101 aa, Homo sapiens
MDIRPRKTAATVRYRPWRGSQAAIMFLASKTCWVSSGTVRARYCWLPRLVRGAKPGIKKWRRGKGTMLTANLRRSALSWPGKRRQVVTPLMVAETRWFRSP

SEQ ID NO: 13909 - DNA, 1463 bp, Homo sapiens
cgtgccatcctggtggatctagaacctgggaccatggactctgttcgctcaggtccttttggccagatctttagaccagacaactttgtatttggtgagttatacagatgatattagcagatgatataccatcgtgttcaacttatttgggtgcaaggacacagcaaaagttaggagatgattgttgtattggagtgctaatacagaaatgtgttctgaaatctaacggagggtagaggtagtgcctactattgctggtaaattatggggcagtagggggagaatatatcacagtgaaggagaaagaagatacatccgagggaattatttgaaaagttgaaagatggaaacatcatgtatcttccataccctgttaattgagcttttctcctgactgcattccaggtcagtctggggcaggtaacaactgggccaaaggccactacacagagggcgccgagctggttgattctgtcctggatgtggtacggaaggaggcagagagctgtgactgcctgcagggcttccagctgacccactcactgggcgggggcacaggctctggaatgggcactctccttatcagcaagatccgagaagaatacctgatgagacctattgcattgacaacgaggccctctatgatatctgcttccgcactctgaagctgaccacaccaacctacggggatctgaaccaccttgtctcagccaccatgagtggtgtcaccacctgcctccgtttccctggccagctcaatgctgacctccgcaagttggcagtcaacatggtccccttcccacgtctccatttctttatgcctggctttgcccctctcaccagccgtggaagccagcagtatcgagctctcacagtgccggaactcacccagcaggtcttcgatgccaagaacatgatggctgcctgtgacccccgccacggccgatacctcaccgtggctgctgtcttccgtggtcggatgtccatgaaggaggtcgatgagcagatgcttaacgtgcagaacaagaacagcagctactttgtggaatggatccccaacaatgtcaagacagccgtctgtgacatcccacctcgtggcctcaagatggcagtcaccttcattggcaatagcacagccatccaggagctcttcaagcgcatctcggagcagttcacgaggctgagagcaacatgaacgacctcgtctctgagtatcagcagtaccaggatgccaccgcagaagaggaggaggatttcggtgaggaggccgaagaggaggcctaaggcagagcccccatcacctcaggcttctcagttcccttagccgtcttactcaactgcccctttcctctccctcagaatttgtgtttgctgcctctatcttgttttttgttttttcttctggggggggtctagaacagtgcctggcacatagtaggcgctcaataaatacttgtttgttg

SEQ ID NO: 13910 - protein, 159 aa, Homo sapiens
MSGVTTCLRFPGQLNADLRKLAVNMVPFPRLHFFMPGFAPLTSRGSQQYRALTVPELTQQVFDAKNMMAACDPRHGRYLTVAAVFRGRMSMKEVDEQMLNVQNKNSSYFVEWIPNNVKTAVCDIPPRGLKMAVTFIGNSTAIQELFKRISEQFTRLRAT

SEQ ID NO: 13911 - DNA, 2313 bp, Homo sapiens
cgtgccatcctggtggatctagaacctgggaccatggactctgttcgctcaggtccttttggccagatctttagaccagacaactttgtatttggtgagttatacagatgatattagcagatgatataccatcgtgttcaacttatttgggtgcaaggacacagcaaaagttaggagatgattgttgtattggagtgctaatacagaaatgtgttctgaaatctaacggagggtagaggtagtgcctactattgctggtaaattatggggcagtagggggagaatatatcacagtgaaggagaaagaagatacatccgagggaattatttgaaaagttgaaagatggaaacatcatgtatcttccataccctgttaattgagcttttctcctgactgcattccaggtcagtctggggcaggtaacaactgggccaaaggccactacacagagggcgccgagctggttgattctgtcctggatgtggtacggaaggaggcagagagctgtgactgcctgcagggcttccagctgacccactcactgggcgggggcacaggctctggaatgggcactctccttatcagcaagatccgagaagaatacctgatgagacctattgcattgacaacgaggccctctatgatatctgcttccgcactctgaagctgaccacaccaacctacggggatctgaaccaccttgtctcagccaccatgagtggtgtcaccacctgcctccgtttccctggccagctcaatgctgacctccgcaagttggcagtcaacatggtccccttcccacgtctccatttctttatgcctggctttgcccctctcaccagccgtggaagccagcagtatcgagctctcacagtgccggaactcacccagcaggtcttcgatgccaagaacatgatggctgcctgtgacccccgccacggccgatacctcaccgtggctgctgtcttccgtggtcggatgtccatgaaggaggtcgatgagcagatgcttaacgtgcagaacaagaacagcagctactttgtggaatggatccccaacaatgtcaagacagccgtctgtgacatcccacctcgtggcctcaagatggcagtcaccttcattggcaatagcacagccatccaggagctcttcaagcgcatctcggagcagttcacgaggctgagagcaacatgaacgacctcgtctctgagtatcagcagtaccaggatgccaccgcagaagaggaggaggatttcggtgaggaggccgaagaggaggcctaaggcagagcccccatcacctcaggcttctcagttcccttagccgtcttactcaactgcccctttcctctccctcagaatttgtgtttgctgcctctatcttgttttttgttttttcttctggggggggtctagaacagtgcctggcacatagtaggcgctcaataaatacttgtttgttgaatgtctcctctctctttccactctgggaaacctaggtttctgccattctgggtgaccctgtatttctttctggtgcccattccatttgtccagttaatacttcctcttaaaaatctccaagaagctgggtctccagatcccatttagaaccaaccaggtgctgaaaacacatgtagataatggccatcatcctaagcccaaagtagaaaatggtagaaggtagtgggtagaagtcactatataaggaaggggatgggattttccattctaaaagttttggagagggaaatccaggctattaaagtcactaaatttctaagtatgtccatttcccatctcagcttcaagggaggtgtcagcagtattatctccactttcaatctccctccaagctctactctggaggagtctgtcccactctgtcaagtggaatccttccctttccaactctacctccctcactcagctcctttcccctgatcagagaaagggatcaagggggttgggaggggggaaagagaccagccttggtccctaagcctccagaaacgtcttcttaatccccaccttttcttactcccaaaaaagaatgaacacccctgactctggagtggtgtatactgccacatcagtgtttgagtcagtccccagaggagaggggaaccctcctccatcttttttgcaacatctcatttcttccttttgctgttgcttcccccctcacacacttggttttgttctatcctacatttgagatttctattttatgttgaacttgctgctttttttcatattgaaaagatgacatcgccccaagagccaaaaataaatgggaattgaaaaaagctg

SEQ ID NO: 13912 - protein, 159 aa, Homo sapiens; identical to SEQ ID NO: 13910

SEQ ID NO: 13913 - DNA, 1408 bp, Homo sapiens
aggagatgattgttgtattggagtgctaatacagaaatgtgttctgaaatctaacggagggtagaggtagtgcctactattgctggtaaattatggggcagtagggggagaatatatcacagtgaaggagaaagaagatacatccgagggaattatttgaaaagttgaaagatggaaacatcatgtatcttccataccctgttaattgagcttttctcctgactgcattccaggtcagtctggggcaggtaacaactgggccaaaggccactacacagagggcgccgagctggttgattctgtcctggatgtggtacggaaggaggcagagagctgtgactgcctgcagggcttccagctgacccactcactgggcgggggcacaggctctggaatgggcactctccttatcagcaagatccgagaagaataccctgatcgcatcatgaataccttcagtgtggtgccttcacccaaagtgtctgacaccgtggtcgagccctacaatgccaccctctccgtccatcagttggtagagaatactgatgagacctattgcattgacaacgaggccctctatgatatctgcttccgcactctgaagctgaccacaccaacctacggggatctgaaccaccttgtctcagccaccatgagtggtgtcaccacctgcctccgtttcctttatgcctggctttgcccctctcaccagccgtggaagccagcagtatcgagctctcacagtgccggaactcacccagcaggtcttcgatgccaagaacatgatggctgcctgtgacccccgccacggccgatacctcaccgtggctgctgtcttccgtggtcggatgtccatgaaggaggtcgatgagcagatgcttaacgtgcagaacaagaacagcagctactttgtggaatggatccccaacaatgtcaagacagccgtctgtgacatcccacctcgtggcctcaagatggcagtcaccttcattggcaatagcacagccatccaggagctcttcaagcgcatctcggagcagttcactgccatgttccgccggaaggccttcctccactggtacacaggcgagggcatggacgagatggagttcaccgaggctgagagcaacatgaacgacctcgtctctgagtatcagcagtaccaggatgccaccgcagaagaggaggaggatttcggtgaggaggccgaagaggaggcctaaggcagagcccccatcacctcaggcttctcagttcccttagccgtcttactcaactgcccctttcctctccctcagaatttgtgtttgctgcctctatcttgttttttgttttttcttctggggggggtctagaacagtgcctggcacatagtaggcgctcaataaatacttgtttgttgaatgtc

SEQ ID NO: 13914 - protein, 134 aa, Homo sapiens
MGTLLISKIREEYPDRIMNTFSVVPSPKVSDTVVEPYNATLSVHQLVENTDETYCIDNEALYDICFRTLKLTTPTYGDLNHLVSATMSGVTTCLRFLYAWLCPSHQPWKPAVSSSHSAGTHPAGLRCQEHDGCL

SEQ ID NO: 13915 - DNA, 2227 bp, Homo sapiens
aggagatgattgttgtattggagtgctaatacagaaatgtgttctgaaatctaacggagggtagaggtagtgcctactattgctggtaaattatggggcagtagggggagaatatatcacagtgaaggagaaagaagatacatccgagggaattatttgaaaagttgaaagatggaaacatcatgtatcttccataccctgttaattgagcttttctcctgactgcattccaggtcagtctggggcaggtaacaactgggccaaaggccactacacagagggcgccgagctggttgattctgtcctggatgtggtacggaaggaggcagagagctgtgactgcctgcagggcttccagctgacccactcactgggcgggggcacaggctctggaatgggcactctccttatcagcaagatccgagaagaataccctgatcgcatcatgaataccttcagtgtggtgccttcacccaaagtgtctgacaccgtggtcgagccctacaatgccaccctctccgtccatcagttggtagagaatactgatgagacctattgcattgacaacgaggccctctatgatatctgcttccgcactctgaagctgaccacaccaacctacggggatctgaaccaccttgtctcagccaccatgagtggtgtcaccacctgcctccgtttccctggccagctcaatgctgacctccgcaagttggcagtcaacatggtccccttcccacgtctccatttctttatgcctggctttgcccctctcaccagccgtggaagccagcagtatcgagctctcacagtgccggaactcacccagcaggtcttcgatgccaagaacatgatggctgcctgtgacccccgccacggccgatacctcaccgtggctgctgtcttccgtggtcggatgtccatgaaggaggtcgatgagcagatgcttaacgtgcagaacaagaacagcagctactttgtggaatggatccccaacaatgtcaagacagccgtctgtgacatcccacctcgtggcctcaagatggcagtcaccttcattggcaatagcacagccatccaggagctcttcaagcgcatctcggagcagttcactgccatgttccgccggaaggccttcctccactggtacacaggcgagggcatggacgagatggagttcaccgaggctgagagcaacatgaacgacctcgtctctgagtatcagcagtaccaggatgccaccgcagaagaggaggaggatttcggtgaggaggccgaagaggaggcctaaggcagagcccccatcacctcaggcttctcaggggtctagaacagtgcctggcacatagtaggcgctcaataaatacttgtttgttgaatgtctcctctctctttccactctgggaaacctaggtttctgccattctgggtgaccctgtatttctttctggtgcccattccatttgtccagttaatacttcctcttaaaaatctccaagaagctgggtctccagatcccatttagaaccaaccaggtgctgaaaacacatgtagataatggccatcatcctaagcccaaagtagaaaatggtagaaggtagtgggtagaagtcactatataaggaaggggatgggattttccattctaaaagttttggagagggaaatccaggctattaaagtcactaaatttctaagtatgtccatttcccatctcagcttcaagggaggtgtcagcagtattatctccactttcaatctccctccaagctctactctggaggagtctgtcccactctgtcaagtggaatccttccctttccaactctacctccctcactcagctcctttcccctgatcagagaaagggatcaagggggttgggaggggggaaagagaccagccttggtccctaagcctccagaaacgtcttcttaatccccaccttttcttactcccaaaaaagaatgaacacccctgactctggagtggtgtatactgccacatcagtgtttgagtcagtccccagaggagaggggaaccctcctccatcttttttgcaacatctcatttcttccttttgctgttgcttcccccctcacacacttggttttgttctatcctacatttgagatttctattttatgttgaacttgctgctttttttcatattgaaaagatgacatcgccccaagagccaaaaataaatgggaattgaaaaaagctg

SEQ ID NO: 13916 - protein, 37 aa, Homo sapiens
MPPQKRRRISVRRPKRRPKAEPPSPQASQGSRTVPGT

SEQ ID NO: 13917 - DNA, 2252 bp, Homo sapiens
aggagatgattgttgtattggagtgctaatacagaaatgtgttctgaaatctaacggagggtagaggtagtgcctactattgctggtaaattatggggcagtagggggagaatatatcacagtgaaggagaaagaagatacatccgagggaattatttgaaaagttgaaagatggaaacatcatgtatcttccataccctgttaattgagcttttctcctgactgcattccaggtcagtctggggcaggtaacaactgggccaaaggccactacacagagggcgccgagctggttgattctgtcctggatgtggtacggaaggaggcagagagctgtgactgcctgcagggcttccagctgacccactcactgggcgggggcacaggctctggaatgggcactctccttatcagcaagatccgagaagaataccctgatcgcatcatgaataccttcagtgtggtgccttcacccaaagtgtctgacaccgtggtcgagccctacaatgccaccctctccgtccatcagttggtagagaatactgatgagacctattgcattgacaacgaggccctctatgatatctgcttccgcactctgaagctgaccacaccaacctacggggatctgaaccaccttgtctcagccaccatgagtggtgtcaccacctgcctccgtttcctttatgcctggctttgcccctctcaccagccgtggaagccagcagtatcgagctctcacagtgccggaactcacccagcaggtcttcgatgccaagaacatgatggctgcctgtgacccccgccacggccgatacctcaccgtggctgctgtcttccgtggtcggatgtccatgaaggaggtcgatgagcagatgcttaacgtgcagaacaagaacagcagctactttgtggaatggatccccaacaatgtcaagacagccgtctgtgacatcccacctcgtggcctcaagatggcagtcaccttcattggcaatagcacagccatccaggagctcttcaagcgcatctcggagcagttcactgccatgttccgccggaaggccttcctccactggtacacaggcgagggcatggacgagatggagttcaccgaggctgagagcaacatgaacgacctcgtctctgagtatcagcagtaccaggatgccaccgcagaagaggaggaggatttcggtgaggaggccgaagaggaggcctaaggcagagcccccatcacctcaggcttctcagttcccttagccgtcttactcaactgcccctttcctctccctcagaatttgtgtttgctgcctctatcttgttttttgttttttcttctggggggggtctagaacagtgcctggcacatagtaggcgctcaataaatacttgtttgttgaatgtctcctctctctttccactctgggaaacctaggtttctgccattctgggtgaccctgtatttctttctggtgcccattccatttgtccagttaatacttcctcttaaaaatctccaagaagctgggtctccagatcccatttagaaccaaccaggtgctgaaaacacatgtagataatggccatcatcctaagcccaaagtagaaaatggtagaaggtagtgggtagaagtcactatataaggaaggggatgggattttccattctaaaagttttggagagggaaatccaggctattaaagtcactaaatttctaagtatgtccatttcccatctcagcttcaagggaggtgtcagcagtattatctccactttcaatctccctccaagctctactctggaggagtctgtcccactctgtcaagtggaatccttccctttccaactctacctccctcactcagctcctttcccctgatcagagaaagggatcaagggggttgggaggggggaaagagaccagccttggtccctaagcctccagaaacgtcttcttaatccccaccttttcttactcccaaaaaagaatgaacacccctgactctggagtggtgtatactgccacatcagtgtttgagtcagtccccagaggagaggggaaccctcctccatcttttttgcaacatctcatttcttccttttgctgttgcttcccccctcacacacttggttttgttctatcctacatttgagatttctattttatgttgaacttgctgctttttttcatattgaaaagatgacatcgccccaagagccaaaaataaatgggaattgaaaaaagctg

SEQ ID NO: 13918 - protein, 134 aa, Homo sapiens; identical to SEQ ID NO: 13914

SEQ ID NO: 13919 - DNA, 1158 bp, Homo sapiens
ggtcagtctggggcaggtaacaactgggccaaaggccactacacagagggcgccgagctggttgattctgtcctggatgtggtacggaaggaggcagagagctgtgactgcctgcagggcttccagctgacccactcactgggcgggggcacaggctctggaatgggcactctccttatcagcaagatccgagaagaataccctgatcgcatcatgaataccttcagtgtggtgccttcacccaaagtgtctgacaccgtggtcgagccctacaatgccaccctctccgtccatcagttggtagagaatactgatgagacctattgcattgacaacgaggccctctatgatatctgcttccgcactctgaagctgaccacaccaacctacggggatctgaaccaccttgtctcagccaccatgagtggtgtcaccacctgcctccgtttccctggccagctcaatgctgacctccgcaagttggcagtcaacatggtccccttcccacgtctccatttctttatgcctggctttgcccctctcaccagccgtggaagccagcagtatcgagctctcacagtgccggaactcacccagcaggtccatgaaggaggtcgatgagcagatgcttaacgtgcagaacaagaacagcagctactttgtggaatggatccccaacaatgtcaagacagccgtctgtgacatcccacctcgtggcctcaagatggcagtcaccttcattggcaatagcacagccatccaggagctcttcaagcgcatctcggagcagttcactgccatgttccgccggaaggccttcctccactggtacacaggcgagggcatggacgagatggagttcaccgaggctgagagcaacatgaacgacctcgtctctgagtatcagcagtaccaggatgccaccgcagaagaggaggaggatttcggtgaggaggccgaagaggaggcctaaggcagagcccccatcacctcaggcttctcagttcccttagccgtcttactcaactgcccctttcctctccctcagaatttgtgtttgctgcctctatcttgttttttgttttttcttctggggggggtctagaacagtgcctggcacatagtaggcgctcaataaatacttgtttgttgaatgtc

SEQ ID NO: 13920 - protein, 169 aa, Homo sapiens
MLTSASWQSTWSPSHVSISLCLALPLSPAVEASSIELSQCRNSPSRSMKEVDEQMLNVQNKNSSYFVEWIPNNVKTAVCDIPPRGLKMAVTFIGNSTAIQELFKRISEQFTAMFRRKAFLHWYTGEGMDEMEFTEAESNMNDLVSEYQQYQDATAEEEEDFGEEAEEEA

SEQ ID NO: 13921 - DNA, 1179 bp, Homo sapiens
ggtcagtctggggcaggtaacaactgggccaaaggccactacacagagggcgccgagctggttgattctgtcctggatgtggtacggaaggaggcagagagctgtgactgcctgcagggcttccagctgacccactcactgggcgggggcacaggctctggaatgggcactctccttatcagcaagatccgagaagaataccctgatcgcatcatgaataccttcagtgtggtgccttcacccaaagtgtctgacaccgtggtcgagccctacaatgccaccctctccgtccatcagttggtagagaatactgatgagacctattgcattgacaacgaggccctctatgatatctgcttccgcactctgaagctgaccacaccaacctacggggatctgaaccaccttgtctcagccaccatgagtggtgtcaccacctgcctccgtttccctggccagctcaatgctgacctccgcaagttggcagtcaacatggtccccttcccacgtctccatttctttatgcctggctttgcccctctcaccagccgtggaagccagcagtatcgagctctcacagtgccgatacctcaccgtggctgctgtcttccgtggtcggatgtccatgaaggaggtcgatgagcagatgcttaacgtgcagaacaagaacagcagctactttgtggaatggatccccaacaatgtcaagacagccgtctgtgacatcccacctcgtggcctcaagatggcagtcaccttcattggcaatagcacagccatccaggagctcttcaagcgcatctcggagcagttcactgccatgttccgccggaaggccttcctccactggtacacaggcgagggcatggacgagatggagttcaccgaggctgagagcaacatgaacgacctcgtctctgagtatcagcagtaccaggatgccaccgcagaagaggaggaggatttcggtgaggaggccgaagaggaggcctaaggcagagcccccatcacctcaggcttctcagttcccttagccgtcttactcaactgcccctttcctctccctcagaatttgtgtttgctgcctctatcttgttttttgttttttcttctggggggggtctagaacagtgcctggcacatagtaggcgctcaataaatacttgtttgttgaatgtc

SEQ ID NO: 13922 - protein, 176 aa, Homo sapiens
MLTSASWQSTWSPSHVSISLCLALPLSPAVEASSIELSQCRYLTVAAVFRGRMSMKEVDEQMLNVQNKNSSYFVEWIPNNVKTAVCDIPPRGLKMAVTFIGNSTAIQELFKRISEQFTAMFRRKAFLHWYTGEGMDEMEFTEAESNMNDLVSEYQQYQDATAEEEEDFGEEAEEEA

SEQ ID NO: 13923 - DNA, 1616 bp, Homo sapiens
ggtcagtctggggcaggtaacaactgggccaaaggccactacacagagggcgccgagctggttgattctgtcctggatgtggtacggaaggaggcagagagctgtgactgcctgcagggcttccagctgacccactcactgggcgggggcacaggctctggaatgggcactctccttatcagcaagatccgagaagaataccctgatcgcatcatgaataccttcagtgtggtgccttcacccaaagtgtctgacaccgtggtcgagccctacaatgccaccctctccgtccatcagttggtagagaatactgatgagacctattgcattgacaacgaggccctctatgatatctgcttccgcactctgaagctgaccacaccaacctacggggatctgaaccaccttgtctcagccaccatgagtggtgtcaccacctgcctccgtttccctggccagctcaatgctgacctccgcaagttggcagtcaacatggtccccttcccacgtctccatttctttatgcctggctttgcccctctcaccagccgtggaagccagcagtatcgagctctcacagtgccggaactcacccagcaggtcttcgatgccaagaacatgatggctgcctgtgacccccgccacggccgatacctcaccgtggctgctgtcttccgtggtcggatgtccatgaaggaggtcgatgagcagatgcttaacgtgcagaacaagaacagcagctactttgtggaatggatccccaacaatgtcaagacagccgtctgtgacatcccacctcgtggcctcaagatggcagtcaccttcattggcaatagcacagccatccaggagctcttcaagcgcatctcggagcagttcactgccatgttccgccggaaggccttcctccactggtacacaggcgagggcatggacgagatggagttcaccgaggctgagagcaacatgaacgacctcgtctctgagtatcagcagtaccaggatgccaccgcagaagaggaggaggatttcggtgaggaggccgaagaggaggcctaaggcagagcccccatcacctcaggcttctcagttcccttagccgtcttactcaactgcccctttcctctccctcagaatttgtgtttgctgcctctatcttgttttttgttttttcttctggggggggtctagaacagtgcctggcacatagtaggcgctcaataaatacttgtttgttgaatgtctcctctctctttccactctgggaaacctaggtttctgccattctgggtgaccctgtatttctttctggtgcccattccatttgtccagttaatacttcctcttaaaaatctccaagaagctgggtctccagatcccatttagaaccaaccaggtgctgaaaacacatgtagataatggccatcatcctaagcccaaagtagaaaatggtagaaggtagtgggtagaagtcactatataaggaaggggatgggattttccattctaaaagttttggagagggaaatccaggttctattttatgttgaacttgctgctttttttcatattgaaaagatgacatcgccccaagagccaaaaataaatgggaattg

SEQ ID NO: 13924 - protein, 40 aa, Homo sapiens
MGFSILKVLEREIQVLFYVELAAFFHIEKMTSPQEPKING

SEQ ID NO: 13925 - DNA, 2002 bp, Homo sapiens
ggtcagtctggggcaggtaacaactgggccaaaggccactacacagagggcgccgagctggttgattctgtcctggatgtggtacggaaggaggcagagagctgtgactgcctgcagggcttccagctgacccactcactgggcgggggcacaggctctggaatgggcactctccttatcagcaagatccgagaagaataccctgatcgcatcatgaataccttcagtgtggtgccttcacccaaagtgtctgacaccgtggtcgagccctacaatgccaccctctccgtccatcagttggtagagaatactgatgagacctattgcattgacaacgaggccctctatgatatctgcttccgcactctgaagctgaccacaccaacctacggggatctgaaccaccttgtctcagccaccatgagtggtgtcaccacctgcctccgtttccctggccagctcaatgctgacctccgcaagttggcagtcaacatggtccccttcccacgtctccatttctttatgcctggctttgcccctctcaccagccgtggaagccagcagtatcgagctctcacagtgccggaactcacccagcaggtccatgaaggaggtcgatgagcagatgcttaacgtgcagaacaagaacagcagctactttgtggaatggatccccaacaatgtcaagacagccgtctgtgacatcccacctcgtggcctcaagatggcagtcaccttcattggcaatagcacagccatccaggagctcttcaagcgcatctcggagcagttcactgccatgttccgccggaaggccttcctccactggtacacaggcgagggcatggacgagatggagttcaccgaggctgagagcaacatgaacgacctcgtctctgagtatcagcagtaccaggatgccaccgcagaagaggaggaggatttcggtgaggaggccgaagaggaggcctaaggcagagcccccatcacctcaggcttctcagttcccttagccgtcttactcaactgcccctttcctctccctcagaatttgtgtttgctgcctctatcttgttttttgttttttcttctggggggggtctagaacagtgcctggcacatagtaggcgctcaataaatacttgtttgttgaatgtctcctctctctttccactctgggaaacctaggtttctgccattctgggtgaccctgtatttctttctggtgcccattccatttgtccagttaatacttcctcttaaaaatctccaagaagctgggtctccagatcccatttagaaccaaccaggtgctgaaaacacatgtagataatggccatcatcctaagcccaaagtagaaaatggtagaaggtagtgggtagaagtcactatataaggaaggggatgggattttccattctaaaagttttggagagggaaatccaggctattaaagtcactaaatttctaagtatgtccatttcccatctcagcttcaagggaggtgtcagcagtattatctccactttcaatctccctccaagctctactctggaggagtctgtcccactctgtcaagtggaatccttccctttccaactctacctccctcactcagctcctttcccctgatcagagaaagggatcaagggggttgggaggggggaaagagaccagccttggtccctaagcctccagaaacgtcttcttaatccccaccttttcttactcccaaaaaagaatgaacacccctgactctggagtggtgtatactgccacatcagtgtttgagtcagtccccagaggagaggggaaccctcctccatcttttttgcaacatctcatttcttccttttgctgttgcttcccccctcacacacttggttttgttctatcctacatttgagatttctattttatgttgaacttgctgctttttttcatattgaaaagatgacatcgccccaagagccaaaaataaatgggaattgaaaaaagctg

SEQ ID NO: 13926 - protein, 169 aa, Homo sapiens; identical to SEQ ID NO: 13920

SEQ ID NO: 13927 - DNA, 2023 bp, Homo sapiens
ggtcagtctggggcaggtaacaactgggccaaaggccactacacagagggcgccgagctggttgattctgtcctggatgtggtacggaaggaggcagagagctgtgactgcctgcagggcttccagctgacccactcactgggcgggggcacaggctctggaatgggcactctccttatcagcaagatccgagaagaataccctgatcgcatcatgaataccttcagtgtggtgccttcacccaaagtgtctgacaccgtggtcgagccctacaatgccaccctctccgtccatcagttggtagagaatactgatgagacctattgcattgacaacgaggccctctatgatatctgcttccgcactctgaagctgaccacaccaacctacggggatctgaaccaccttgtctcagccaccatgagtggtgtcaccacctgcctccgtttccctggccagctcaatgctgacctccgcaagttggcagtcaacatggtccccttcccacgtctccatttctttatgcctggctttgcccctctcaccagccgtggaagccagcagtatcgagctctcacagtgccgatacctcaccgtggctgctgtcttccgtggtcggatgtccatgaaggaggtcgatgagcagatgcttaacgtgcagaacaagaacagcagctactttgtggaatggatccccaacaatgtcaagacagccgtctgtgacatcccacctcgtggcctcaagatggcagtcaccttcattggcaatagcacagccatccaggagctcttcaagcgcatctcggagcagttcactgccatgttccgccggaaggccttcctccactggtacacaggcgagggcatggacgagatggagttcaccgaggctgagagcaacatgaacgacctcgtctctgagtatcagcagtaccaggatgccaccgcagaagaggaggaggatttcggtgaggaggccgaagaggaggcctaaggcagagcccccatcacctcaggcttctcagttcccttagccgtcttactcaactgcccctttcctctccctcagaatttgtgtttgctgcctctatcttgttttttgttttttcttctggggggggtctagaacagtgcctggcacatagtaggcgctcaataaatacttgtttgttgaatgtctcctctctctttccactctgggaaacctaggtttctgccattctgggtgaccctgtatttctttctggtgcccattccatttgtccagttaatacttcctcttaaaaatctccaagaagctgggtctccagatcccatttagaaccaaccaggtgctgaaaacacatgtagataatggccatcatcctaagcccaaagtagaaaatggtagaaggtagtgggtagaagtcactatataaggaaggggatgggattttccattctaaaagttttggagagggaaatccaggctattaaagtcactaaatttctaagtatgtccatttcccatctcagcttcaagggaggtgtcagcagtattatctccactttcaatctccctccaagctctactctggaggagtctgtcccactctgtcaagtggaatccttccctttccaactctacctccctcactcagctcctttcccctgatcagagaaagggatcaagggggttgggaggggggaaagagaccagccttggtccctaagcctccagaaacgtcttcttaatccccaccttttcttactcccaaaaaagaatgaacacccctgactctggagtggtgtatactgccacatcagtgtttgagtcagtccccagaggagaggggaaccctcctccatcttttttgcaacatctcatttcttccttttgctgttgcttcccccctcacacacttggttttgttctatcctacatttgagatttctattttatgttgaacttgctgctttttttcatattgaaaagatgacatcgccccaagagccaaaaataaatgggaattgaaaaaagctg

SEQ ID NO: 13928 - protein, 176 aa, Homo sapiens; identical to SEQ ID NO: 13922

SEQ ID NO: 13929 - DNA, 1557 bp, Homo sapiens
ggtcagtctggggcaggtaacaactgggccaaaggccactacacagagggcgccgagctggttgattctgtcctggatgtggtacggaaggaggcagagagctgtgactgcctgcagggcttccagctgacccactcactgggcgggggcacaggctctggaatgggcactctccttatcagcaagatccgagaagaataccctgatcgcatcatgaataccttcagtgtggtgccttcacccaaagtgtctgacaccgtggtcgagccctacaatgccaccctctccgtccatcagttggtagagaatactgatgagacctattgcattgacaacgaggccctctatgatatctgcttccgcactctgaagctgaccacaccaacctacggggatctgaaccaccttgtctcagccaccatgagtggtgtcaccacctgcctccgtttccctggccagctcaatgctgacctccgcaagttggcagtcaacatggtccccttcccacgtctccatttctttatgcctggctttgcccctctcaccagccgtggaagccagcagtatcgagctctcacagtgccggaactcacccagcaggtcttcgatgccaagaacatgatggctgcctgtgacccccgccacggccgatacctcaccgtggctgctgtcttccgtggtcggatgtccatgaaggaggtcgatgagcagatgcttaacgtgcagaacaagaacagcagctactttgtggaatggatccccaacaatgtcaagacagccgtctgtgacatcccacctcgtggcctcaagatggcagtcaccttcattggcaatagcacagccatccaggagctcttcaagcgcatctcggagcagttcactgccatgttccgccggaaggccttcctccactggtacacaggcgagggcatggacgagatggagttcaccgaggctgagagcaacatgaacgacctcgtctctgagtatcagcagtaccaggctattaaagtcactaaatttctaagtatgtccatttcccatctcagcttcaagggaggtgtcagcagtattatctccactttcaatctccctccaagctctactctggaggagtctgtcccactctgtcaagtggaatccttccctttccaactctacctccctcactcagctcctttcccctgatcagagaaagggatcaagggggttgggaggggggaaagagaccagccttggtccctaagcctccagaaacgtcttcttaatccccaccttttcttactcccaaaaaagaatgaacacccctgactctggagtggtgtatactgccacatcagtgtttgagtcagtccccagaggagaggggaaccctcctccatcttttttgcaacatctcatttcttccttttgctgttgcttcccccctcacacacttggttttgttctatcctacatttgagatttctattttatgttgaacttgctgctttttttcatattgaaaagatgacatcgccccaagagccaaaaataaatgggaattgaaaaaagctg

SEQ ID NO: 13930 - protein, 341 aa, Homo sapiens
MGTLLISKIREEYPDRIMNTFSVVPSPKVSDTVVEPYNATLSVHQLVENTDETYCIDNEALYDICFRTLKLTTPTYGDLNHLVSATMSGVTTCLRFPGQLNADLRKLAVNMVPFPRLHFFMPGFAPLTSRGSQQYRALTVPELTQQVFDAKNMMAACDPRHGRYLTVAAVFRGRMSMKEVDEQMLNVQNKNSSYFVEWIPNNVKTAVCDIPPRGLKMAVTFIGNSTAIQELFKRISEQFTAMFRRKAFLHWYTGEGMDEMEFTEAESNMNDLVSEYQQYQAIKVTKFLSMSISHLSFKGGVSSIISTFNLPPSSTLEESVPLCQVESFPFQLYLPHSAPFP

SEQ ID NO: 13931 - DNA, 791 bp, Homo sapiens
aaaggccactacacagagggcgccgagctggttgattctgtcctggatgtggtacggaaggaggcagagagctgtgactgcctgcagggcttccagctgacccactcactgggcgggggcacaggctctggaatgggcactctccttatcagcaagatccgagaagaataccctgatcgcatcatgaataccttcagtgtggtgccttcacccaaagtgtctgacaccgtggtcgagccctacaatgccaccctctccgtccatcagttggtagagaatactgatgagacctattgcattgacaacgaggccctctatgatatctgcttccgcactctgaagctgaccacaccaacaatgtcaagacagccgtctgtgacatcccacctcgtggcctcaagatggcagtcaccttcattggcaatagcacagccatccaggagctcttcaagcgcatctcggagcagttcactgccatgttccgccggaaggccttcctccactggtacacaggcgagggcatggacgagatggagttcaccgaggctgagagcaacatgaacgacctcgtctctgagtatcagcagtaccaggatgccaccgcagaagaggaggaggatttcggtgaggaggccgaagaggaggcctaaggcagagcccccatcacctcaggcttctcagttcccttagccgtcttactcaactgcccctttcctctccctcagaatttgtgtttgctgcctctatcttgttttttgttttttcttctggggggggtctagaacagtgcc

SEQ ID NO: 13932 - protein, 142 aa, Homo sapiens
MGTLLISKIREEYPDRIMNTFSVVPSPKVSDTVVEPYNATLSVHQLVENTDETYCIDNEALYDICFRTLKLTTPTMSRQPSVTSHLVASRWQSPSLAIAQPSRSSSSASRSSSLPCSAGRPSSTGTQARAWTRWSSPRLRAT

SEQ ID NO: 13933 - DNA, 620 bp, Homo sapiens
gttgattctgtcctggatgtggtacggaaggaggcagagagctgtgactgcctgcagggcttccagctgacccactcactgggcgggggcacaggctctggaatgggcactctccttatcagcaagatccgagaagaataccctgatcgcatcatgaataccttcagtgtggtgccttcacccaaagtgtctgacaccgtggtcgagccctacaatgccaccctctccgtccatcagttggtagagaatactgatgagacctattgcattgacaacgaggccctctatgatatctgcttccgcactctgaagctgaccacaccaacctacggggatctgaaccaccttgtctcagccaccatgagtggtgtcaccacctgcctccgtttccctggccagctcaatgctgacctccgcaagttggcagtcaacatggtccccttcccacgtcctcctccatcttttttgcaacatctcatttcttccttttgctgttgcttcccccctcacacacttggttttgttctatcctacatttgagatttctattttatgttgaacttgctgctttttttcatattgaaaagatgacatcgccccaagagccaaaaataaatggg

SEQ ID NO: 13934 - protein, 145 aa, Homo sapiens
MGTLLISKIREEYPDRIMNTFSVVPSPKVSDTVVEPYNATLSVHQLVENTDETYCIDNEALYDICFRTLKLTTPTYGDLNHLVSATMSGVTTCLRFPGQLNADLRKLAVNMVPFPRPPPSFLQHLISSFCCCFPPHTLGFVLSYI

SEQ ID NO: 13935 - DNA, 1634 bp, Homo sapiens
cctgcagggcttccagctgacccactcactgggcgggggcacaggctctggaatgggcactctccttatcagcaagatccgagaagaataccctgatcgcatcatgaataccttcagtgtggtgccttcacccaaagtgtctgacaccgtggtcgagccctacaatgccaccctctccgtccatcagttggtagagaatactgatgagacctattgcattgacaacgaggccctctatgatatctgcttccgcactctgaagctgaccacaccaacctacggggatctgaaccaccttgtctcagccaccatgagtggtgtcaccacctgcctccgtttccctggccagctcaatgctgacctccgcaagttggcagtcaacatggtccccttcccacgtctccatttctttatgcctggctttgcccctctcaccagccgtggaagccagcagtatcgagctctcacagtgccggaactcacccagcaggtcttcgatgccaagaacatgatggctgcctgtgacccccgccacggccgatacctcaccgtggctgctgtcttccgtggtcggatgtccatgaaggaggtcgatgagcagatgcttaacgtgcagaacaagaacagcagctactttgtggaatggatccccaacaatgtcaagacagccgtctgtgacatcccacctcgtggcctcaagatggcagtcaccttcattggcaatagcacagccatccaggagctcttcaagcgcatctcggagcagttcactgccatgttccgccggaaggccttcctccactggtacacaggcgagggcatggacgagatggagttcaccgaggctgagagcaacatgaacgacctcgtctctgagtatcagcagtaccaggatgccaccgcagaagaggaggaggatttcggtgaggaggccgaagaggaggcctaaggcagagcccccatcacctcaggcttctcagttcccttagccgtcttactcaactgcccctttcctctccctcagaatttgtgtttgctgcctctatcttgttttttgttttttcttctggggggggtctagaacagtgcctggcacatagtaggcgctcaataaatacttgtttgttgaatgtctcctctctctttccactctgggaaacctaggtttctgccattctgggtgaccctgtatttctttctggtgcccattccatttgtccagttaatacttcctcttaaaaatctccaagaagctgggtctccagatcccatttagaaccaaccaggtgctgaaaacacatgtagataatggccatcatcctaacctccagaaacgtcttcttaatccccaccttttcttactcccaaaaaagaatgaacacccctgactctggagtggtgtatactgccacatcagtgtttgagtcagtccccagaggagaggggaaccctcctccatcttttttgcaacatctcatttcttccttttgctgttgcttcccccctcacacacttggttttgttctatcctacatttgagatttctattttatgttgaacttgctgctttttttcatattgaaaagatgacatcgccccaagagccaaaaataaatgggaattgaaaaaagctg

SEQ ID NO: 13936 - protein, 76 aa, Homo sapiens [sequence omitted]

SEQ ID NO: 13937 - DNA, 1567 bp, Homo sapiens
cctgcagggcttccagctgacccactcactgggcgggggcacaggctctggaatgggcactctccttatcagcaagatccgagaagaataccctgatcgcatcatgaataccttcagtgtggtgccttcacccaaagtgtctgacaccgtggtcgagccctacaatgccaccctctccgtccatcagttggtagagaatactgatgagacctattgcattgacaacgaggccctctatgatatctgcttccgcactctgaagctgaccacaccaacctacggggatctgaaccaccttgtctcagccaccatgagtggtgtcaccacctgcctccgtttccctggccagctcaatgctgacctccgcaagttggcagtcaacatggtccccttcccacgtctccatttctttatgcctggctttgcccctctcaccagccgtggaagccagcagtatcgagctctcacagtgccggaactcacccagcaggtcttcgatgccaagaacatgatggctgcctgtgacccccgccacggccgatacctcaccgtggctgctgtcttccgtggtcggatgtccatgaaggaggtcgatgagcagatgcttaacgtgcagaacaagaacagcagctactttgtggaatggatccccaacaatgtcaagacagccgtctgtgacatcccacctcgtggcctcaagatggcagtcaccttcattggcaatagcacagccatccaggagctcttcaagcgcatctcggagcagttcactgccatgttccgccggaaggccttcctccactggtacacaggcgagggcatggacgagatggagttcaccgaggctgagagcaacatgaacgacctcgtctctgagtatcagcagtaccaggatgccaccgcagaagaggaggaggatttcggtgaggaggccgaagaggaggcctaaggcagagcccccatcacctcaggcttctcagttcccttagccgtcttactcaactgcccctttcctctccctcagaatttgtgtttgctgcctctatcttgttttttgttttttcttctggggggggtctagaacagtgcctggcacatagtaggcgctcaataaatacttgtttgttgaatgtctcctctctctttccactctgggaaacctaggtttctgccattctgggtgaccctgtatttctttctggtgcccattccatttgtccagttaatacttcctcttaaaaatctccaagaagctggcctccagaaacgtcttcttaatccccaccttttcttactcccaaaaaagaatgaacacccctgactctggagtggtgtatactgccacatcagtgtttgagtcagtccccagaggagaggggaaccctcctccatcttttttgcaacatctcatttcttccttttgctgttgcttcccccctcacacacttggttttgttctatcctacatttgagatttctattttatgttgaacttgctgctttttttcatattgaaaagatgacatcgccccaagagccaaaaataaatgggaattgaaaaaagctg

SEQ ID NO: 13938 - protein, 63 aa, Homo sapiens
MSPLSFHSGKPRFLPFWVTLYFFLVPIPFVQLILPLKNLQEAGLQKRLLNPHLFLLPKKNEHP

SEQ ID NO: 13939 - DNA, 1258 bp, Homo sapiens
tcaatgctgacctccgcaagttggcagtcaacatggtccccttcccacgtctccatttctttatgcctggctttgcccctctcaccagccgtggaagccagcagtatcgagctctcacagtgccggaactcacccagcaggtcttcgatgccaagaacatgatggctgcctgtgacccccgccacggccgatacctcaccgtggctgctgtcttccgtggtcggatgtccatgaaggaggtcgatgagcagatgcttaacgtgcagaacaagaacagcagctactttgtggaatggatccccaacaatgtcaagacagccgtctgtgacatcccacctcgtggcctcaagatggcagtcaccttcattggcaatagcacagccatccaggagctcttcaagcgcatctcggagcagttcactgccatgttccgccggaaggccttcctccactggtacacaggcgagggcatggacgagatggagttcaccgaggctgagagcaacatgaacgacctcgtctctgagtatcagcagtaccaggatgccaccgcagaagaggaggaggatttcggtgaggaggccgaagaggaggcctaaggcagagcccccatcacctcaggcttctcagttcccttagccgtcttactcaactgcccctttcctctccctcagaatttgtgtttgctgcctctatcttgttttttgttttttcttctggggggggtctagaacagtgcctggcacatagtaggcgctcaataaatacttgtttgttgaatgtctcctctctctttccactctgggaaacctaggtttctgccattctgggtgaccctgtatttctttctggtgcccattccatttgtccagttaatacttcctcttaaaaatctccaagaagctgggtctccagatcccatttagaaccaaccaggtgctgaaaacacatgtagataatggccatcatcctaagcccaaagtagaaaatggtagaaggtagtgggtagaagtcactatataaggaaggggatgggattttccattctaaaagttttggagagggaaatccaggctattaaagtcactaaatttctaagtatgtccatttcccatttccttttgctgttgcttcccccctcacacacttggttttgttctatcctacatttgagatttctattttatgttgaacttgctgctttttttcatattgaaaagatgacatcgccccaagagccaaaaataaatgggaattg

SEQ ID NO: 13940 - protein, 74 aa, Homo sapiens
MGFSILKVLEREIQAIKVTKFLSMSISHFLLLLLPPSHTWFCSILHLRFLFYVELAAFFHIEKMTSPQEPKING

SEQ ID NO: 13941 - DNA, 1384 bp, Homo sapiens
tgacccccgccacggccgatacctcaccgtggctgctgtcttccgtggtcggatgtccatgaaggaggtcgatgagcagatgcttaacgtgcagaacaagaacagcagctactttgtggaatggatccccaacaatgtcaagacagccgtctgtgacatcccacctcgtggcctcaagatggcagtcaccttcattggcaatagcacagccatccaggagctcttcaagcgcatctcggagcagttcactgccatgttccgccggaaggccttcctccactggtacacaggcgagggcatggacgagatggagttcaccgaggctgagagcaacatgaacgacctcgtctctgagtatcagcagtaccaggatgccaccgcagaagaggaggaggatttcggtgaggaggccgaagaggaggcctaaggcagagcccccatcacctcaggcttctcagttcccttagccgtcttactcaactgcccctttcctctccctcagaatttgtgtttgctgcctctatcttgttttttgttttttcttctggggggggtctagaacagtgcctggcacatagtaggcgctcaataaatacttgtttgttgaatgtctcctctctctttccactctgggaaacctaggtttctgccattctgggtgaccctgtatttctttctggtgcccattccatttgtccagttaatacttcctcttaaaaatctccaagaagctgggtctccagatcccatttagaaccaaccaggtgctgaaaacacatgtagataatggccatcatcctaagcccaaagtagaaaatggtagaaggtagtgggtagaagtcactatataaggaaggggatgggattttccattctaaaagttttggagagggaaatccaggctattaaagtcactaaatttctaagtatgtccatttcccatctcagcttcaagggaggtgtcagcagtattatctccactttcaatctccctccaagctctactctggaggagtctgtcccactctgtcaagtggaatccttccctttccaactctacctccctcactcagctctccagaaacgtcttcttaatccccaccttttcttactcccaaaaaagaatgaacacccctgactctggagtggtgtatactgccacatcagtgtttgagtcagtccccagaggagaggggaaccctcctccatcttttttgcaacatctcatttcttccttttgctgttgcttcccccctcacacacttggttttgttctatcctacatttgagatttctattttatgttgaacttgctgctttttttcatattgaaaagatgacatcgccccaagagccaaaaataaatgggaattgaaaaaagctg

SEQ ID NO: 13942 - protein, 92 aa, Homo sapiens
MGFSILKVLEREIQAIKVTKFLSMSISHLSFKGGVSSIISTFNLPPSSTLEESVPLCQVESFPFQLYLPHSALQKRLLNPHLFLLPKKNEHP

SEQ ID NO: 13943 - DNA, 286 bp, Homo sapiens
aggtgtcagcagtattatctccactttcaatctccctccaagctctactctggaggagtctgtcccactctgtcaagtggaatccttccctttccaactctacctccctcacctcctccatcttttttgcaacatctcatttcttccttttgctgttgcttcccccctcacacacttggttttgttctatcctacatttgagatttctattttatgttgaacttgctgctttttttcatattgaaaagatgacatcgccccaagagccaaaaataaatgggaattg

SEQ ID NO: 13944 - protein, 72 aa, Homo sapiens
GVSSIISTFNLPPSSTLEESVPLCQVESFPFQLYLPHLLHLFCNISFLPFAVASPLTHLVLFYPTFEISILC

SEQ ID NO: 13945 - DNA, 693 bp, Homo sapiens
gccgaggctgagcagatggccaagaaggcagaagccttccagctgtaccaagaggctgctcagctggacatgctgctagagaagctgccccaggtggcagaggagatcagtggtcccttgacttcagccaataagatcacactggtgtccagcggcagtgggaccatgggggcagccaaagtgactggggaagtactggacattctaactcgcctgccagagagtgtggaaagactcacaggcgtgagcatctcccaggtgaatcacaagcctttgagaacagcctgagccttcagccctcacagatgcccagcctcatagctgaagttgcctgaatgatcctcctgttgcatgtaacccactggcctccctgagcatgtccattgacagtgaggtcccacccctcatctctccttgccaaatagtttgtgccttgtcttgaagggggttgctccccttgccaacctcacactgctatgattgccaactccagcggtcccatgtcagccttctgatgatcccactccaccccacctcaacttatttaacttcctaattaaatcagactgtttgagcctgttgtctagaatattttcctgaccaagactgagggatgggctggaggttttcaactttgctacccaaataaattgctgtaagtaagtactaataaaacagaagcaactggaaatt

SEQ ID NO: 13946 - protein, 90 aa, Homo sapiens [sequence omitted]

SEQ ID NO: 13947 - DNA, 1048 bp, Homo sapiens
tgctgcttgatcggggatttcttgttcttaatgatttccgtcaatctcacaagcatccttaaccctcagatgcgtggggaagctgaggcctttgccataggggcccgagcccgagccgaggctgagcagatggccaagaaggcagaagccttccagctgtaccaagaggctgctcagctggacatgctgctagagaagctgccccaggtctggaggtcatgtgggcaccaagaaaggaggaaatagaaccagggactaaggggtggggtgtagtgaggggcttagggagaaacagcctagggggactctaaattaggggtgggaattattagtgaccaaagtgaggaaggatgatcagtggaacgaggaccttaaaacccagagtaagttgttttatgaggaatgtggtcagatcatgggcactgagtgggtgtctctctcctgccaggtggcagaggagatcagtggtcccttgacttcagccaataagatcacactggtgtccagcggcagtgggaccatgggggcagccaaagtgactggggaagtactggacattctaactcgcctgccagagagtgtggaaagactcacaggcgtgagcatctcccaggtgaatcacaagcctttgagaacagcctgagccttcagccctcacagatgcccagcctcatagctgaagttgcctgaatgatcctcctgttgcatgtaacccactggcctccctgagcatgtccattgacagtgaggtcccacccctcatctctccttgccaaatagtttgtgccttgtcttgaagggggttgctccccttgccaacctcacactgctatgattgccaactccagcggtcccatgtcagccttctgatgatcccactccaccccacctcaacttatttaacttcctaattaaatcagactgtttgagcctgttgtctagaatattttcctgaccaagactgagggatgggctggaggttttcaactttgctacccaaataaattgctgtaagtaagtactaataaaacagaagcaactggaaatt

SEQ ID NO: 13948 - protein, 75 aa, Homo sapiens
MGTEWVSLSCQVAEEISGPLTSANKITLVSSGSGTMGAAKVTGEVLDILTRLPESVERLTGVSISQVNHKPLRTA

SEQ ID NO: 13949 - DNA, 1221 bp, Homo sapiens
ttcccgggcacttgctcttcacctctgactcagagcgtgaacctgacttcaccctcctacccaggtggccaagactaagcagcagattgaggagcagcgggtgcaggtgcaggtggtggagcgggcccagcaggtggcagtgcaggagcaggagatcgcccggcgggagaaggagctggaggcccgggtgcggaagccagcggaagcggagcgctacaagctggagcgcctagccgaggcagagaagtaaatgtcccctccctgaccctgcctagctcacttgccacctaggcaccccaagatggagtgctgaagccttcaccacctggactcctatggatttcaggtttcaggagcgtctgcctctgcagcactgggcctttctcctgggagtaagggctgctgggctccaccctccacttcccttctgtccacaggtcccaactaattatgcaggcggaggcagaagccgcgtctgtgcggatgcgtggggaagctgaggcctttgccataggggcccgagcccgagccgaggctgagcagatggccaagaaggcagaagccttccagctgtaccaagaggctgctcagctggacatgctgctagagaagctgccccaggtggcagaggagatcagtggtcccttgacttcagccaataagatcacactggtgtccagcggcagtgggaccatgggggcagccaaagtgactggggaagtactggacattctaactcgcctgccagagagtgtggaaagactcacaggcgtgagcatctcccaggtgaatcacaagcctttgagaacagcctgagccttcagccctcacagatgcccagcctcatagctgaagttgcctgaatgatcctcctgttgcatgtaacccactggcctccctgagcatgtccattgacagtgaggtcccacccctcatctctccttgccaaatagtttgtgccttgtcttgaagggggttgctccccttgccaacctcacactgctatgattgccaactccagcggtcccatgtcagccttctgatgatcccactccaccccacctcaacttatttaacttcctaattaaatcagactgtttgagcctgttgtctagaatattttcctgaccaagactgagggatgggctggaggttttcaactttgctacccaaataaattgctgtaagtaagtactaataaaacagaagcaactggaaatt

SEQ ID NO: 13950 - protein, 121 aa, Homo sapiens [sequence omitted]

SEQ ID NO: 13951 - DNA, 1541 bp, Homo sapiens
ggcggggcgaagtgggggtgcttagtccgttgcggggggcggggtcgcgtctgccgcagcaacggggtgcggcagggtggggaacgcgggagcggggccagctcccaggaaagctggtctgcgagcggcccctgcccggctcccaggtccctgcgcgaccccgcccttcccgagaccccagccgggctgccgcccgcgtcccggaagctccagcctgaaccatgtttttcacttgtggcccaaatgaggccatggtggtctccgggttctgccgaagccccccagtcatggtggctggagggcgtgtctttgtcctgccctgcatccaacagatccagaggatctctctcaacacactgaccctcaatgtcaagagtgaaaaggtttacactcgccatggggtccccatctcagtcactggcattgcccaggtaaaaatccaggggcagaacaaggagatgttggcggccgcctgtcagatgttcctggggaagacggaggctgagattgcccacattgccctggagacgttagagggccaccagagggccatcatggcccacatgactgtggaggagatctataaggacaggcagaaattctcagaacaggttttcaaagtggcctcctcagacctggtcaacatgggcatcagtgtggttagctacactctgaaggacattcacgatgaccaggactatttgcactctttggggaaggctcgaacagctcaagtccaaaaagatgcacggattggagaagcagaggccaagagagatgctgggatccgggaagctaaagccaagcaggaaaaggtgtctgctcagtacctgagtgagatcgagatggccaaggcacagagagattacgaactgaagaaggccgcctatgacatcgaggtcaacacccgccgagcacaggctgacctggcctatcagcttcaggtggccaagactaagcagcagattgattcagccaataagatcacactggtgtccagcggcagtgggaccatgggggcagccaaagtgactggggaagtactggacattctaactcgcctgccagagagtgtggaaagactcacaggcgtgagcatctcccaggtgaatcacaagcctttgagaacagcctgagccttcagccctcacagatgcccagcctcatagctgaagttgcctgaatgatcctcctgttgcatgtaacccactggcctccctgagcatgtccattgacagtgaggtcccacccctcatctctccttgccaaatagtttgtgccttgtcttgaagggggttgctccccttgccaacctcacactgctatgattgccaactccagcggtcccatgtcagccttctgatgatcccactccaccccacctcaacttatttaacttcctaattaaatcagactgtttgagcctgttgtctagaatattttcctgaccaagactgagggatgggctggaggttttcaactttgctacccaaataaattgctgtaagtaagtactaataaaacagaagcaactggaaatt

SEQ ID NO: 13952 - protein, 304 aa, Homo sapiens
MFFTCGPNEAMVVSGFCRSPPVMVAGGRVFVLPCIQQIQRISLNTLTLNVKSEKVYTRHGVPISVTGIAQVKIQGQNKEMLAAACQMFLGKTEAEIAHIALETLEGHQRAIMAHMTVEEIYKDRQKFSEQVFKVASSDLVNMGISVVSYTLKDIHDDQDYLHSLGKARTAQVQKDARIGEAEAKRDAGIREAKAKQEKVSAQYLSEIEMAKAQRDYELKKAAYDIEVNTRRAQADLAYQLQVAKTKQQIDSANKITLVSSGSGTMGAAKVTGEVLDILTRLPESVERLTGVSISQVNHKPLRTA

SEQ ID NO: 13953 - DNA, 1910 bp, Homo sapiens
ggcggggcgaagtgggggtgcttagtccgttgcggggggcggggtcgcgtctgccgcagcaacggggtgcggcagggtggggaacgcgggagcggggccagctcccaggaaagctggtctgcgagcggcccctgcccggctcccaggtccctgcgcgaccccgcccttcccgagaccccagccgggctgccgcccgcgtcccggaagctccagcctgaaccatgtttttcacttgtggcccaaatgaggccatggtggtctccgggttctgccgaagccccccagtcatggtggctggagggcgtgtctttgtcctgccctgcatccaacagatccagaggatctctctcaacacactgaccctcaatgtcaagagtgaaaaggtttacactcgccatggggtccccatctcagtcactggcattgcccaggtaaaaatccaggggcagaacaaggagatgttggcggccgcctgtcagatgttcctggggaagacggaggctgagattgcccacattgccctggagacgttagagggccaccagagggccatcatggcccacatgactgtggaggagatctataaggacaggcagaaattctcagaacaggttttcaaagtggcctcctcagacctggtcaacatgggcatcagtgtggttagctacactctgaaggacattcacgatgaccaggactatttgcactctttggggaaggctcgaacagctcaagtccaaaaagatgcacggattggagaagcagaggccaagagagatgctgggatccgggaagctaaagccaagcaggaaaaggtgtctgctcagtacctgagtgagatcgagatggccaaggcacagagagattacgaactgaagaaggccgcctatgacatcgaggtcaacacccgccgagcacaggctgacctggcctatcagcttcaggtggccaagactaagcagcagattgaggagcagcgggtgcaggtgcaggtggtggagcgggcccagcaggtggcagtgcaggagcaggagatcgcccggcgggagaaggagctggaggcccgggtgcggaagccagcggaagcggagcgctacaagctggagcgcctagccgaggcagagaagtcccaactaattatgcaggcggaggcagaagccgcgtctgtgcggatgcgtggggaagctgaggcctttgccataggggcccgagcccgagccgaggctgagcagatggccaagaaggcagaagccttccagctgtaccaagaggctgctcagctggacatgctgctagagaagctgccccaggtggcagaggagatcagtggtcccttgacttcagccaataagatcacactggtgtccagcggcagtgggaccatgggggcagccaaagtgactggggaagtactggacattctaactcgcctgccagagagtgtggaaagactcacaggcgtgagcatctcccaggtgaatcacaagcctttgagaacagcctgagccttcagccctcacagatgcccagcctcatagctgaagttgcctgaatgatcctcctgttgcatgtaacccactggcctccctgagcatgtccattgacagtgaggtcccacccctcatctctccttgccaaatagtttgtgccttgtcttgaagggggttgctccccttgccaacctcacactgctatgattgccaactccagcggtcccatgtcagccttctgatgatcccactccaccccacctcaacttatttaacttcctaattaaatcagactgtttgagcctgttgtctagaatattttcctgaccaagactgagggatgggctggaggttttcaactttgctacccaaataaattgctgtaagtaagtactaataaaacagaagcaactggaaatt

SEQ ID NO: 13954 - protein, 427 aa, Homo sapiens; identical to SEQ ID NO: 1449

SEQ ID NO: 13955 - DNA, 580 bp, Homo sapiens
gccgaggctgagcagatggccaagaaggcagaagccttccagctgtaccaagaggctgctcagctggacatgctgctagagaagctgccccaggtggcagaggagatcagtggtcccttgacttcagccaataagatcacactggtgtccagcggcagtgggaccatgggggcagccaaagtgactggggaagtactggacattctaactcgcctgccagagagtgtggaaagactcacaggcgtgagcatctcccaggtgaatcacaagcctttgagaacagcctgagccttcagccctcacagatgcccagcctcatagctgaagttgcctgaatgatcctcctgttgcatgtaacccactggcctccctgagcatgtccattgacagtgaggtcccacccctcatctctccttgccaaatagtttgtgccttgtcttgaagggggttgctccccttgccaacctcacactgctatgattgccaactccagcggtcccatgtcagccttctgatgatcccactccaccccacctcaacttatttaacttcctaattaaatcagactgtttgagcctgt

SEQ ID NO: 13956 - protein, 90 aa, Homo sapiens [sequence omitted]

SEQ ID NO: 13957 - DNA, 1797 bp, Homo sapiens
ggcggggcgaagtgggggtgcttagtccgttgcggggggcggggtcgcgtctgccgcagcaacggggtgcggcagggtggggaacgcgggagcggggccagctcccaggaaagctggtctgcgagcggcccctgcccggctcccaggtccctgcgcgaccccgcccttcccgagaccccagccgggctgccgcccgcgtcccggaagctccagcctgaaccatgtttttcacttgtggcccaaatgaggccatggtggtctccgggttctgccgaagccccccagtcatggtggctggagggcgtgtctttgtcctgccctgcatccaacagatccagaggatctctctcaacacactgaccctcaatgtcaagagtgaaaaggtttacactcgccatggggtccccatctcagtcactggcattgcccaggtaaaaatccaggggcagaacaaggagatgttggcggccgcctgtcagatgttcctggggaagacggaggctgagattgcccacattgccctggagacgttagagggccaccagagggccatcatggcccacatgactgtggaggagatctataaggacaggcagaaattctcagaacaggttttcaaagtggcctcctcagacctggtcaacatgggcatcagtgtggttagctacactctgaaggacattcacgatgaccaggactatttgcactctttggggaaggctcgaacagctcaagtccaaaaagatgcacggattggagaagcagaggccaagagagatgctgggatccgggaagctaaagccaagcaggaaaaggtgtctgctcagtacctgagtgagatcgagatggccaaggcacagagagattacgaactgaagaaggccgcctatgacatcgaggtcaacacccgccgagcacaggctgacctggcctatcagcttcaggtggccaagactaagcagcagattgaggagcagcgggtgcaggtgcaggtggtggagcgggcccagcaggtggcagtgcaggagcaggagatcgcccggcgggagaaggagctggaggcccgggtgcggaagccagcggaagcggagcgctacaagctggagcgcctagccgaggcagagaagtcccaactaattatgcaggcggaggcagaagccgcgtctgtgcggatgcgtggggaagctgaggcctttgccataggggcccgagcccgagccgaggctgagcagatggccaagaaggcagaagccttccagctgtaccaagaggctgctcagctggacatgctgctagagaagctgccccaggtggcagaggagatcagtggtcccttgacttcagccaataagatcacactggtgtccagcggcagtgggaccatgggggcagccaaagtgactggggaagtactggacattctaactcgcctgccagagagtgtggaaagactcacaggcgtgagcatctcccaggtgaatcacaagcctttgagaacagcctgagccttcagccctcacagatgcccagcctcatagctgaagttgcctgaatgatcctcctgttgcatgtaacccactggcctccctgagcatgtccattgacagtgaggtcccacccctcatctctccttgccaaatagtttgtgccttgtcttgaagggggttgctccccttgccaacctcacactgctatgattgccaactccagcggtcccatgtcagccttctgatgatcccactccaccccacctcaacttatttaacttcctaattaaatcagactgtttgagcctgt

SEQ ID NO: 13958 - protein, 427 aa, Homo sapiens; identical to SEQ ID NO: 1449

SEQ ID NO: 13959 - DNA, 934 bp, Homo sapiens
tgctgcttgatcggggatttcttgttcttaatgatttccgtcaatctcacaagcatccttaaccctcagatgcgtggggaagctgaggcctttgccataggggcccgagcccgagccgaggctgagcagatggccaagaaggcagaagccttccagctgtaccaagaggctgctcagctggacatgctgctagagaagctgccccaggtctggaggtcatgtgggcaccaagaaaggaggaaatagaaccagggactaaggggtggggtgtagtgaggggcttagggagaaacagcctagggggactctaaattaggggtgggaattattagtgaccaaagtgaggaaggatgatcagtggaacgaggaccttaaaacccagagtaagttgttttatgaggaatgtggtcagatcatgggcactgagtgggtgtctctctcctgccaggtggcagaggagatcagtggtcccttgacttcagccaataagatcacactggtgtccagcggcagtgggaccatgggggcagccaaagtgactggggaagtactggacattctaactcgcctgccagagagtgtggaaagactcacaggcgtgagcatctcccaggtgaatcacaagcctttgagaacagcctgagccttcagccctcacagatgcccagcctcatagctgaagttgcctgaatgatcctcctgttgcatgtaacccactggcctccctgagcatgtccattgacagtgaggtcccacccctcatctctccttgccaaatagtttgtgccttgtcttgaagggggttgctccccttgccaacctcacactgctatgattgccaactccagcggtcccatgtcagccttctgatgatcccactccaccccacctcaacttatttaacttcctaattaaatcagactgtttgagcctg

SEQ ID NO: 13960 - protein, 75 aa, Homo sapiens; identical to SEQ ID NO: 13948

SEQ ID NO: 13961 - DNA, 1107 bp, Homo sapiens
ttcccgggcacttgctcttcacctctgactcagagcgtgaacctgacttcaccctcctacccaggtggccaagactaagcagcagattgaggagcagcgggtgcaggtgcaggtggtggagcgggcccagcaggtggcagtgcaggagcaggagatcgcccggcgggagaaggagctggaggcccgggtgcggaagccagcggaagcggagcgctacaagctggagcgcctagccgaggcagagaagtaaatgtcccctccctgaccctgcctagctcacttgccacctaggcaccccaagatggagtgctgaagccttcaccacctggactcctatggatttcaggtttcaggagcgtctgcctctgcagcactgggcctttctcctgggagtaagggctgctgggctccaccctccacttcccttctgtccacaggtcccaactaattatgcaggcggaggcagaagccgcgtctgtgcggatgcgtggggaagctgaggcctttgccataggggcccgagcccgagccgaggctgagcagatggccaagaaggcagaagccttccagctgtaccaagaggctgctcagctggacatgctgctagagaagctgccccaggtggcagaggagatcagtggtcccttgacttcagccaataagatcacactggtgtccagcggcagtgggaccatgggggcagccaaagtgactggggaagtactggacattctaactcgcctgccagagagtgtggaaagactcacaggcgtgagcatctcccaggtgaatcacaagcctttgagaacagcctgagccttcagccctcacagatgcccagcctcatagctgaagttgcctgaatgatcctcctgttgcatgtaacccactggcctccctgagcatgtccattgacagtgaggtcccacccctcatctctccttgccaaatagtttgtgccttgtcttgaagggggttgctccccttgccaacctcacactgctatgattgccaactccagcggtcccatgtcagccttctgatgatcccactccaccccacctcaacttatttaacttcctaattaaatcagactgtttgagcctg

SEQ ID NO: 13962 - protein, 121 aa, Homo sapiens [sequence omitted]

SEQ ID NO: 13963 - DNA, 226 bp, Homo sapiens
gaccccagccgggctgccgcccgcgtcccggaagctccagcctgaaccatgtttttcacttgtggcccaaatgaggccatggtggtctccgggttctgccgaagccccccagtcatggtggctggagggcgtgtctttgtcctgccctgcatccaacagatcgagatggccaaggcacagagagattacgaactgaagaaggccgcctatgacatcgaggtcaaca

SEQ ID NO: 13964 - protein, 58 aa, Homo sapiens
MFFTCGPNEAMVVSGFCRSPPVMVAGGRVFVLPCIQQIEMAKAQRDYELKKAAYDIEV

SEQ ID NO: 13965 - DNA, 724 bp, Homo sapiens
cacccccgccagttcctcagtcttccacattcaagctctgccaccgttcctcactgccccacaccttgcagggttctgccgaagccccccagtcatggtggctggagggcgtgtctttgtcctgccctgcatccaacagatccagaggtaggcaagaagggaaccagggaagggggacctccgttttctctttttcctcctcttcttactgtctgtcccttctttttcccctaggatctctctcaacacactgaccctcaatgtcaagagtgaaaaggtttacactcgccatggggtccccatctcagtcactggcattgcccaggtgaagctttcagagccttttccccacagtccacttccccatcaccctctctcccagacattaagacatcttctggccacagtcatctggaaggatgtcaaaatgaggggggcccaaggcccacactagtctgtgagagacagtggatccaagagcatacatcccggccgggcagggtggttcatgcctgtaatcccagcactttgggatgccaaggtgggcagatcacttgaggtcaggagttcgagaccagcctagccaacctggtgaaaccccttctctactacaaatacaaaaattagctgggtatggtgatgggtgtcggtaatcccagctacttgggaggctgaggcaggagaatcacttgaacccaggaggcagaggttgcagtgagcaaaa

SEQ ID NO: 13966 - protein, 39 aa, Homo sapiens
MPRWADHLRSGVRDQPSQPGETPSLLQIQKLAGYGDGCR

SEQ ID NO: 13967 - DNA, 1494 bp, Homo sapiens
aacggggtgcggcagggtggggaacgcgggagcggggccagctcccaggaaagctggtctgcgagcggcccctgcccggctcccaggtccctgcgcgaccccgcccttcccgagaccccagccgggctgccgcccgcgtcccggaagctccagcctgaaccatgtttttcacttgtggcccaaatgaggccatggtggtctccggtaagtactgttgttcccttcccagccagtgaccccagaacccctgtgagtctggcctctgccccttctccctctccctaccaacttcccagcaccagacttctgccccttgatggccacgaactgcccagtttgattcccaccattccaaggcccagactgcttcccctccagctcccagattctctcctgtgggttgctgtcccctcacccccgccagttcctcagtcttccacattcaagctctgccaccgttcctcactgccccacaccttgcagggttctgccgaagccccccagtcatggtggctggagggcgtgtctttgtcctgccctgcatccaacagatccagaggtaggcaagaagggaaccagggaagggggacctccgttttctctttttcctcctcttcttactgtctgtcccttctttttcccctaggatctctctcaacacactgaccctcaatgtcaagagtgaaaaggtttacactcgccatggggtccccatctcagtcactggcattgcccaggtgaagctttcagagccttttccccacagtccacttccccatcaccctctctcccagacattaagacatcttctggccacagtcttctcaacccttgcctgcagagaagttcctctgctagtctcatcttttccaggcaccccaaggcacttgcctcctcctcctttctttccctgaaatggaagaagcatttcttagagggctctcccttctctctctgctttttctctgacttcatgagacccccaccacacctttcctacccctactctggctacaggtaaaaatccaggggcagaacaaggagatgttggcggccgcctgtcagatgttcctggggaagacggaggctgagattgcccacattgccctggagacgttagagggccaccagagggccatcatggcccacatgactgtggaggttggcctaggggcagggaaccatctggaaggatgtcaaaatgaggggggcccaaggcccacactagtctgtgagagacagtggatccaagagcatacatcccggccgggcagggtggttcatgcctgtaatcccagcactttgggatgccaaggtgggcagatcacttgaggtcaggagttcgagaccagcctagccaacctggtgaaaccccttctctactacaaatacaaaaattagctgggtatggtgatgggtgtcggtaatcccagctacttgggaggctgaggcaggagaatcacttgaacccaggaggcagaggttgcagtgagc

SEQ ID NO: 13968 - protein, 160 aa, Homo sapiens
MRPWWSPVSTVVPFPASDPRTPVSLASAPSPSPYQLPSTRLLPLDGHELPSLIPTIPRPRLLPLQLPDSLLWVAVPSPPPVPQSSTFKLCHRSSLPHTLQGSAEAPQSWWLEGVSLSCPASNRSRGRQEGNQGRGTSVFSFSSSSYCLSLLFPLGSLSTH

SEQ ID NO: 13969 - DNA, 352 bp, Homo sapiens
gcgcgaccccgcccttcccgagaccccagccgggctgccgcccgcgtcccggaagctccagcctgaaccatgtttttcacttgtggcccaaatgaggccatggtggtctccgggttctgccgaagccccccagtcatggtggctggagggcgtgtctttgtcctgccctgcatccaacagatccagaggatctctctcaacacactgaccctcaatgtcaagagtgaaaaggtttacactcgccatggggtccccatctcagtcactggcattgcccaggtgaaacggaggctgagattgcccacattgccctggagacgttagagggccaccagagggccatcatggccca

SEQ ID NO: 13970 - protein, 84 aa, Homo sapiens
MFFTCGPNEAMVVSGFCRSPPVMVAGGRVFVLPCIQQIQRISLNTLTLNVKSEKVYTRHGVPISVTGIAQVKRRLRLPTLPWRR

SEQ ID NO: 13971 - DNA, 386 bp, Homo sapiens
gcgtctgccgcagcaacggggtgcggcagggtggggaacgcgggagcggggccagctcccaggaaagctggtctgcgagcggcccctgcccggctcccaggtccctgcgcgaccccgcccttcccgagaccccagccgggctgccgcccgcgtcccggaagctccagcctgaaccatgtttttcacttgtggcccaaatgaggccatggtggtctccgggttctgccgaagccccccagtcatggtggctggagggcgtgtctttgtcctgccctgcatccaacagatccagaggatctctctcaacacactgaccctcaatgtcaagagtgaaaaggtttacactcgccatggggtccccatctcagtcactggcattgcccagg

SEQ ID NO: 13972 - protein, 69 aa, Homo sapiens
MFFTCGPNEAMVVSGFCRSPPVMVAGGRVFVLPCIQQIQRISLNTLTLNVKSEKVYTRHGVPISVTGIA

SEQ ID NO: 13973 - DNA, 310 bp, Homo sapiens
gggagatggagcctggggctgccgagaagcagggagagaggggaaagctccagcctgaaccatgtttttcacttgtggcccaaatgaggccatggtggtctccggtaagtactgttgttcccttcccagccagtgaccccagaacccctgtgagtctggcctctgccccttctccctctccctaccaacttcccagcaccagacttctgccccttgatggccacgaactgcccagtttgattcccaccattccaaggcccagactgcttcccctccagctcccagattctctcctgtgggttgctgtccc

SEQ ID NO: 13974 - protein, 100 aa, Homo sapiens
MEPGAAEKQGERGKLQPEPCFSLVAQMRPWWSPVSTVVPFPASDPRTPVSLASAPSPSPYQLPSTRLLPLDGHELPSLIPTIPRPRLLPLQLPDSLLWVA

SEQ ID NO: 13975 - DNA, 944 bp, Homo sapiens
gcccccggaacatactaggcgatctcgacagtcgctccgtgacagcccaccaacccccaaccctctacctcgcagccaccctaaaggcgacttcaagaagatggaaggatctcacggatctcattcctaatggtccgccgaagtctcacacagtagacagacggagttgagatgctggaggatgcagtcacctcctaaacttacgacccaccaccagacttcatcccagccgggacgtcctcccccacccgagtcctccccatttcttctcctactttgccgcagttccaggtgtcctgcttccaccagtcccacaaagctcaataaataccaagagacctgcatttacagcagggggaacatctcacacccttgcataagttaaaataaatattacgtacacatctccatcacctaggaggacgtacataaatacatataaatattaattaggagcaataagaaataaattaacgacgctctccttcccaccgggcctagccccagctgggctgtgcctcggtctctatgcgcctcggtctctgtgcgcctcggtcccgcctcaagcaccgggtggcgtctccgctgtagtgttctgagttcaagttgcctcggaagtcccagttggggatacgctctcgcgcaccaggtacgcctggtgtttctttgtggtttttcggattctttttggggagtgcggggagtcacagttagaaggcggccgggtgttgctggaggaaagtgctgaggtccagagcgtagtccgagggctccgaagtcagattaaagggctcgaggacggcggacacaggggtgggcgccagggatgcggcgttaggggcgtcctctggaggcaggggcgccggcacaccctcttcagccatcaggatctggcagaagacgatggtgagcagcagaaagagaagccttttggctgggttcgg

SEQ ID NO: 13976 - protein, 67 aa, Homo sapiens
MQSPPKLTTHHQTSSQPGRPPPPESSPFLLLLCRSSRCPASTSPTKLNKYQETCIYSRGNISHPCIS

SEQ ID NO: 13977 - DNA, 1104 bp, Homo sapiens
ggacttgacctccgcctggcaccctggcgtaagggtgattgccacatctcggattcgccgcggggcaactacctgggaaaaccgcagactgggcaatgaaagactacatccggcaaccggatgctgggttctgtgactccaggaaaaggggctcctgggcccagggagaacatactaggcgatctcgacagtcgctccgtgacagcccaccaacccccaaccctctacctcgcagccaccctaaaggcgacttcaagaagatggaaggatctcacggatctcattcctaatggtccgccgaagtctcacacagtagacagacggagttgagatgctggaggatgcagtcacctcctaaacttacgacccaccaccagacttcatcccagccgggacgtcctcccccacccgagtcctccccatttcttctcctactttgccgcagttccaggtgtcctgcttccaccagtcccacaaagctcaataaataccaagagacctgcatttacagcagggggaacatctcacacccttgcataagttaaaataaatattacgtacacatctccatcacctaggaggacgtacataaatacatataaatattaattaggagcaataagaaataaattaacgacgctctccttcccaccgggcctagccccagctgggctgtgcctcggtctctatgcgcctcggtctctgtgcgcctcggtcccgcctcaagcaccgggtggcgtctccgctgtagtgttctgagttcaagttgcctcggaagtcccagttggggatacgctctcgcgcaccaggtacgcctggtgtttctttgtggtttttcggattctttttggggagtgcggggagtcacagttagaaggcggccgggtgttgctggaggaaagtgctgaggtccagagcgtagtccgagggctccgaagtcagattaaagggctcgaggacggcggacacaggggtgggcgccagggatgcggcgttaggggcgtcctctggaggcaggggcgccggcacaccctcttcagccatcaggatctggcagaagacgatggtgagcagcagaaagagaagccttttggctgggttcgg

SEQ ID NO: 13978 - protein, 69 aa, Homo sapiens
MLGSVTPGKGAPGPRENILGDLDSRSVTAHQPPTLYLAATLKATSRRWKDLTDLIPNGPPKSHTVDRRS

SEQ ID NO: 13979 - DNA, 861 bp, Homo sapiens
gcttctctttctgctgctcacccctgtgtccgccgtcctcgagccctttaatctgacttcggagccctcggactacgctctggacctcagcactttcctccagcaacacccggccgccttctaactgtgactccccgcactccccaaaaagaatccgaaaaaccacaaagaaacaccaggcgtacctggtgcgcgagagcgtatccccaactgggacttccgaggcaacttgaactcagaacactacagcggagacgccacccggtgcttgaggcgggaccgaggcgcacagagaccgaggcgcatagagaccgaggcacagcccagctggggctaggcccggtgggaaggagagcgtcgttaatttatttcttattgctcctaattaatatttatatgtatttatgtacgtcctcctaggtgatggagatgtgtacgtaatatttattttaacttatgcaagggtgtgagatgttccccctgctgtaaatgcaggtctcttggtatttattgagctttgtgggactggtggaagcaggacacctggaactgcggcaaagtaggagaagaaatggggaggactcgggtgggggaggacgtcccggctgggatgaagtctggtggtgggtcgtaagtttaggaggtgactgcatcctccagcatctcaactccgtctgtctactgtgtgagacttcggcggaccattaggaatgagatccgtgagatccttccatcttcttgaagtcgcctttagggtggctgcgaggtagagggttgggggttggtgggctgtcacggagcgactgtcgagatcgcctagtatgttctgtgaacacaaataaaattgatttactgtctgca

SEQ ID NO: 13980 - protein, 72 aa, Homo sapiens [sequence omitted]

SEQ ID NO: 13981 - DNA, 596 bp, Homo sapiens
tacactccgctcggctcaccatgtgtcactctcgcagctgccacccgaccatgaccatcctgcaggccccgaccccggccccctccaccatcccgggaccccggcggggctccggtcctgagatcttcaccttcgaccctctcccggagcccgcagcggcccctgccgggcgccccagcgcctctcgcgggcaccgaaagcgcagccgcagggttctctaccctcgagtggtgagtatcgccgaagtgggcattcgcggggtgcgctgccctggagtcactggggaacgacccgactccagaggcctcgacctgacctgtctcctgttttgtctccccttaggtccggcgccagctgccagtcgaggaaccgaacccagccaaaaggcttctctttctgctgctcaccatcgtcttctgccagatcctgatggctgaagagggtgtgccggcgcccctgcctccagaggacgcccctaacgccgcatccggtggctgcgaggtagagggttgggggttggtgggctgtcacggagcgactgtcgagatcgcctagtatgttctgtgaacacaaataaaattgatttactgtctgca

SEQ ID NO: 13982 - protein, 41 aa, Homo sapiens
MAEEGVPAPLPPEDAPNAASGGCEVEGWGLVGCHGATVEIA

SEQ ID NO: 13983 - DNA, 891 bp, Homo sapiens
acttggccttacactccgctcggctcaccatgtgtcactctcgcagctgccacccgaccatgaccatcctgcaggccccgaccccggccccctccaccatcccgggaccccggcggggctccggtcctgagatcttcaccttcgaccctctcccggagcccgcagcggcccctgccgggcgccccagcgcctctcgcgggcaccgaaagcgcagccgcagggttctctaccctcgagtggtgagtatcgccgaagtgggcattcgcggggtgcgctgccctggagtcactggggaacgacccgactccagaggcctcgacctgacctgtctcctgttttgtctccccttaggtccggcgccagctgccagtcgaggaaccgaacccagccaaaaggcttctctttctgctgctcaccatcgtcttctgccagatcctgatggctgaagagggtgtgccggcgcccctgcctccagaggacgcccctaacgccgcatccctggcgcccacccctgtgtccgccgtcctcgagccctttaatctgacttcggagccctcggactacgctctggacctcagcactttcctccagcaacacccggccgccttctaatcgggtgggggaggacgtcccggctgggatgaagtctggtggtgggtcgtaagtttaggaggtgactgcatcctccagcatctcaactccgtctgtctactgtgtgagacttcggcggaccattaggaatgagatccgtgagatccttccatcttcttgaagtcgcctttagggtggctgcgaggtagagggttgggggttggtgggctgtcacggagcgactgtcgagatcgcctagtatgttctgtgaacacaaataaaattgatttactgtctgca

SEQ ID NO: 13984 - protein, 138 aa, Homo sapiens
MCHSRSCHPTMTILQAPTPAPSTIPGPRRGSGPEIFTFDPLPEPAAAPAGRPSASRGHRKRSRRVLYPRVVSIAEVGIRGVRCPGVTGERPDSRGLDLTCLLFCLPLGPAPAASRGTEPSQKASLSAAHHRLLPDPDG

SEQ ID NO: 13985 - DNA, 1157 bp, Homo sapiens
acttggccttacactccgctcggctcaccatgtgtcactctcgcagctgccacccgaccatgaccatcctgcaggccccgaccccggccccctccaccatcccgggaccccggcggggctccggtcctgagatcttcaccttcgaccctctcccggagcccgcagcggcccctgccgggcgccccagcgcctctcgcgggcaccgaaagcgcagccgcagggttctctaccctcgagtggtccggcgccagctgccagtcgaggaaccgaacccagccaaaaggcttctctttctgctgctcaccatcgtcttctgccagatcctgatggctgaagagggtgtgccggcgcccctgcctccagaggacgcccctaacgccgcatccctggcgcccacccctgtgtccgccgtccttctaactgtgactccccgcactccccaaaaagaatccgaaaaaccacaaagaaacaccaggcgtacctggtgcgcgagagcgtatccccaactgggacttccgaggcaacttgaactcagaacactacagcggagacgccacccggtgcttgaggcgggaccgaggcgcacagagaccgaggcgcatagagaccgaggcacagcccagctggggctaggcccggtgggaaggagagcgtcgttaatttatttcttattgctcctaattaatatttatatgtatttatgtacgtcctcctaggtgatggagatgtgtacgtaatatttattttaacttatgcaagggtgtgagatgttccccctgctgtaaatgcaggtctcttggtatttattgagctttgtgggactggtggaagcaggacacctggaactgcggcaaagtaggagaagaaatggggaggactcgggtgggggaggacgtcccggctgggatgaagtctggtggtgggtcgtaagtttaggaggtgactgcatcctccagcatctcaactccgtctgtctactgtgtgagacttcggcggaccattaggaatgagatccgtgagatccttccatcttcttgaagtcgcctttagggtggctgcgaggtagagggttgggggttggtgggctgtcacggagcgactgtcgagatcgcctagtatgttctgtgaacacaaataaaattgatttactgtctgca

SEQ ID NO: 13986 - protein, 228 aa, Homo sapiens
MCHSRSCHPTMTILQAPTPAPSTIPGPRRGSGPEIFTFDPLPEPAAAPAGRPSASRGHRKRSRRVLYPRVVRRQLPVEEPNPAKRLLFLLLTIVFCQILMAEEGVPAPLPPEDAPNAASLAPTPVSAVLLTVTPRTPQKESEKPQRNTRRTWCARAYPQLGLPRQLELRTLQRRRHPVLEAGPRRTETEAHRDRGTAQLGLGPVGRRASLIYFLLLLINIYMYLCTSS

SEQ ID NO: 13987 - DNA, 1063 bp, Homo sapiens
acttggccttacactccgctcggctcaccatgtgtcactctcgcagctgccacccgaccatgaccatcctgcaggccccgaccccggccccctccaccatcccgggaccccggcggggctccggtcctgagatcttcaccttcgaccctctcccggagcccgcagcggcccctgccgggcgccccagcgcctctcgcgggcaccgaaagcgcagccgcagggttctctaccctcgagtggtccggcgccagctgccagtcgaggaaccgaacccagccaaaaggcttctctttctgctgctcaccatcgtcttctgccagatcctgatggctgaagagggtgtgccggcgcccctgcctccagaggacgcccctaacgccgcatccctggcgcccacccctcgtatccccaactgggacttccgaggcaacttgaactcagaacactacagcggagacgccacccggtgcttgaggcgggaccgaggcgcacagagaccgaggcgcatagagaccgaggcacagcccagctggggctaggcccggtgggaaggagagcgtcgttaatttatttcttattgctcctaattaatatttatatgtatttatgtacgtcctcctaggtgatggagatgtgtacgtaatatttattttaacttatgcaagggtgtgagatgttccccctgctgtaaatgcaggtctcttggtatttattgagctttgtgggactggtggaagcaggacacctggaactgcggcaaagtaggagaagaaatggggaggactcgggtgggggaggacgtcccggctgggatgaagtctggtggtgggtcgtaagtttaggaggtgactgcatcctccagcatctcaactccgtctgtctactgtgtgagacttcggcggaccattaggaatgagatccgtgagatccttccatcttcttgaagtcgcctttagggtggctgcgaggtagagggttgggggttggtgggctgtcacggagcgactgtcgagatcgcctagtatgttctgtgaacacaaataaaattgatttactgtctgca

SEQ ID NO: 13988 - protein, 169 aa, Homo sapiens
MCHSRSCHPTMTILQAPTPAPSTIPGPRRGSGPEIFTFDPLPEPAAAPAGRPSASRGHRKRSRRVLYPRVVRRQLPVEEPNPAKRLLFLLLTIVFCQILMAEEGVPAPLPPEDAPNAASLAPTPRIPNWDFRGNLNSEHYSGDATRCLRRDRGAQRPRRIETEAQPSWG

SEQ ID NO: 13989 - DNA, 1238 bp, Homo sapiens
cacttggccttacactccgctcggctcaccatgtgtcactctcgcagctgccacccgaccatgaccatcctgcaggccccgaccccggccccctccaccatcccgggaccccggcggggctccggtcctgagatcttcaccttcgaccctctcccggagcccgcagcggcccctgccgggcgccccagcgcctctcgcgggcaccgaaagcgcagccgcagggttctctaccctcgagtggtccggcgccagctgccagtcgaggaaccgaacccagccaaaaggcttctctttctgctgctcaccatcgtcttctgccagatcctgatggctgaagagggtgtgccggcgcccctgcctccagaggacgcccctaacgccgcatccctggcgcccacccctgtgtccgccgtcctcgagccctttaatctgacttcggagccctcggactacgctctggacctcagcactttcctccagcaacacccggccgccttctaactgtgactccccgcactccccaaaaagaatccgaaaaaccacaaagaaacaccaggcgtacctggtgcgcgagagcgtatccccaactgggacttccgaggcaacttgaactcagaacactacagcggagacgccacccggtgcttgaggcgggaccgaggcgcacagagaccgaggcgcatagagaccgaggcacagcccagctggggctaggcccggtgggaaggagagcgtcgttaatttatttcttattgctcctaattaatatttatatgtatttatgtacgtcctcctaggtgatggagatgtgtacgtaatatttattttaacttatgcaagggtgtgagatgttccccctgctgtaaatgcaggtctcttggtatttattgagctttgtgggactggtggaagcaggacacctggaactgcggcaaagtaggagaagaaatggggaggactcgggtgggggaggacgtcccggctgggatgaagtctggtggtgggtcgtaagtttaggaggtgactgcatcctccagcatctcaactccgtctgtctactgtgtgagacttcggcggaccattaggaatgagatccgtgagatccttccatcttcttgaagtcgcctttagggtggctgcgaggtagagggttgggggttggtgggctgtcacggagcgactgtcgagatcgcctagtatgttctgtgaacacaaataaaattgatttactgtctgca

SEQ ID NO: 13990 - protein, 156 aa, Homo sapiens
MCHSRSCHPTMTILQAPTPAPSTIPGPRRGSGPEIFTFDPLPEPAAAPAGRPSASRGHRKRSRRVLYPRVVRRQLPVEEPNPAKRLLFLLLTIVFCQILMAEEGVPAPLPPEDAPNAASLAPTPVSAVLEPFNLTSEPSDYALDLSTFLQQHPAAF

SEQ ID NO: 13991 - DNA, 1348 bp, Homo sapiens
acttggccttacactccgctcggctcaccatgtgtcactctcgcagctgccacccgaccatgaccatcctgcaggccccgaccccggccccctccaccatcccgggaccccggcggggctccggtcctgagatcttcaccttcgaccctctcccggagcccgcagcggcccctgccgggcgccccagcgcctctcgcgggcaccgaaagcgcagccgcagggttctctaccctcgagtggtgagtatcgccgaagtgggcattcgcggggtgcgctgccctggagtcactggggaacgacccgactccagaggcctcgacctgacctgtctcctgttttgtctccccttaggtccggcgccagctgccagtcgaggaaccgaacccagccaaaaggcttctctttctgctgctcaccatcgtcttctgccagatcctgatggctgaagagggtgtgccggcgcccctgcctccagaggacgcccctaacgccgcatccctggcgcccacccctgtgtccgccgtcctcgagccctttaatctgacttcggagccctcggactacgctctggacctcagcactttcctccagcaacacccggccgccttctaactgtgactccccgcactccccaaaaagaatccgaaaaaccacaaagaaacaccaggcgtacctggtgcgcgagagcgtatccccaactgggacttccgaggcaacttgaactcagaacactacagcggagacgccacccggtgcttgaggcgggaccgaggcgcacagagaccgaggcgcatagagaccgaggcacagcccagctggggctaggcccggtgggaaggagagcgtcgttaatttatttcttattgctcctaattaatatttatatgtatttatgtacgtcctcctaggtgatggagatgtgtacgtaatatttattttaacttatgcaagggtgtgagatgttccccctgctgtaaatgcaggtctcttggtatttattgagctttgtgggactggtggaagcaggacacctggaactgcggcaaagtaggagaagaaatggggaggactcgggtgggggaggacgtcccggctgggatgaagtctggtggtgggtcgtaagtttaggaggtgactgcatcctccagcatctcaactccgtctgtctactgtgtgagacttcggcggaccattaggaatgagatccgtgagatccttccatcttcttgaagtcgcctttagggtggctgcgaggtagagggttgggggttggtgggctgtcacggagcgactgtcgagatcgcctagtatgttctgtgaacacaaataaaattgatttactgtctgc

SEQ ID NO: 13992 - protein, 138 aa, Homo sapiens; identical to SEQ ID NO: 13984

SEQ ID NO: 13993 - DNA, 560 bp, Homo sapiens
agtgtccatgatagtgaatccattttggttgtgttggatttgaggtggcaaagaaataaggaactggcatgtgactgcgggaaattggagctacaagacaggagttcaggtgaaaagataggactagagttggatgctgaaacttgcagtcacacaaggacttgaacctagagcttttctaaagcccgtactctttccagtaccctgagccaggggagccagcgggcagaaatgacgtgtgaggtaccctctctctcttcacttccatgtgatctgttactcattttgtcaagacatcctgggtcccagagaccactcttattcccaggtgtgtgacctcctcctacagactacagtgggaaagacaccatctccaggtgccaggtgctacacaagatactggctatagcagcgaacaggacagcccgtctcatcctcatggaggtcacaggacaatgagaagaaagacttttttatttttatttttttgagacggagttttgctcttgttgccgaggctggagtgcagtggtgtgatctcgactcactgcaacctccgc

SEQ ID NO: 13994 - protein, 34 aa, Homo sapiens
MTCEVPSLSSLPCDLLLILSRHPGSQRPLLFPGV

SEQ ID NO: 13995 - DNA, 567 bp, Homo sapiens
ggagacagtcatagagaaatgtgttgttggcatcgatttcctatggttgggcaatggcttccgccatctggaccaggtgacgtcagctatctggatttctgccagcattccccggcccaggaaacagacttccggctgtctgggctctgagccatcttcggcctcctggagttggatgctgaaacttgcagtcacacaaggacttgaacctagagcttttctaaagcccgtactctttccagtaccctgagccaggggagccagcgggcagaaatgacgtgtgaggtaccctctctctcttcacttccatgtgatctgttactcattttgtcaagacatcctgggtcccaggtgccaggtgctacacaagatactggctatagcagcgaacaggacagcccgtctcatcctcatggaggtcacaggacaatgagaagaaagacttttttatttttatttttttgagacggagttttgctcttgttgccgaggctggagtgcagtggtgtgatctcgactcactgcaacctccgcctcccaagttcaagcaattatcctgcctcaggc

SEQ ID NO: 13996 - protein, 63 aa, Homo sapiens
MTCEVPSLSSLPCDLLLILSRHPGSQVPGATQDTGYSSEQDSPSHPHGGHRTMRRKTFLFLFF

SEQ ID NO: 13997 - DNA, 2052 bp, Homo sapiens
attccaggaagcgtttgcacatcctggccccagaagattttgcgtagcctcaccaagagaagaagttggaaagaaaaaaaaagaagttggcaaggcatccagaggagaccccgccagcacctgggttctctgccaggggagagagttatgaagaagacttgagcaggcagtccagagctgatacagctgctccaatcaccagagatgcaatctcctgctagatgtcttcacatctacctttctatgtcacatgtgcaagatggttgctctgccttcagacatcacatttacattccaggcagaaaggagaaggaaagagcaaaagatgtgttccgaacaaatccatcttaaaaacaaacaaggggaggggtagcaggagaaaatttaaaaagaagaagaagaaaaacaaaaacaggaaagccgttgtttccctaaaagccccatcaagccgacttctaccggtgactcattacccagtcatgtggccacccctggattcaaggcagtctgaggaggtgagtgtttcaaagaggcacatggatgccacagacaaaatcaagtttccatggttgaaggagaagaggacgatagagtttggggaggcagcaggctacgtctgccacagaagatataaagatatggagccacacgagaagatgggggaggctgccaaaaaagtccactgggtacaggtgaggagcaggtgacattggagttgctccatctgaggagcccgcacctgcaatggcttgtgctcctgctcctgtgggtataggcacaaggctgatgccgagagagtgagttgtttctgttggggttcagaacacaataccccaaagtatggcgatgagtacttaactaaaggacattggaaggcctcagaagcagcctcagatccaaggtccctctgacctgctcctgccctcctgtctctctcgtccctcgttctcccctgaagtgagtcatagaaaccagaatcctcttccccacggtaggtcctagaaactagaaccctttttccccgaagcaaaagccataaaaactggaattattactctaaactctccttgactttttgtccagaagatggccataaagaaattctcagctaggtgtggtggctcgtatctgtaatcccagcactttgagaggccaaggtgggaggatcacttgaggccaggagtttgagatcggcctgggcaacatagtaagacccccatctctacaaaacttttttttttaaacttacctaagcgtggtggtacacctgtagtctcagctacttaggaggctgaggtgggagggaccctgctctggctgtgactgctttatcacagggagtgcctatctgtgggctgctttctacacattaaagcattttcagaaagggccaacatcagccttggaaaaaaggaggaagagccacggagagtctccctttatcttccccttatgtgatgtgagagtgcacatgactgtgtgcacatacacacacacacacacaccacacacacacaccccacaggcacacagggtcaagaacatgctgggcagagcttaagccactgaatgtttcagtaggaatcatgatatctaaaaataggacagctgataagggggttcttactactcacagttcctggaattatatgcaattgcatcttggaaactcaacaaataaacagttagtatggaattaaggaattaagtttggtgaagttcaaagaagctgatgttactcacaagagtaaatagagaggaaaccgggcgtggtggcttcacgcctgtaattctagcactttgggaggccaagacgagcagatcacttgaggtagagagtttgagaccagcctggccaacatgatgaaaccctgttctctactaaaaatacaaaaattagctgggtgtggtggcaggcacctgcaatcccagctacatgggaggctgaggcaggagaatcgcttgaacccaggagacaggggttgcagtgagccaagatcacaccactgcactccagcctgggcgacagagcaagactccctctcaggaaag

SEQ ID NO: 13998 - protein, 161 aa, Homo sapiens; identical to SEQ ID NO: 4727

SEQ ID NO: 13999 - DNA, 2048 bp, Homo sapiens
gttgttgtaagccactaggtttgggatggcggttgctcagtgatagataactgaaacagctgtatctgcacctggaccagagctttcatgcccagggtgagtagcttcttggttctgtaaggctctgtctccttcaactcactttgccgggttgcggctacagcattacccagctcttcattccattacagttcatcaaagctcccatgccaggcttgtggcagggtaatttactgtggaattgttttgttttgttcttgttgctctgtgtatactcccctcaccaagagagttactgggctttttgttcccaattctgaggctctttcttgagtatggagaaggtgggtagtgatggcatttggattatgcgcaaacacctaggctaagagaggcagaagtggactgtgggtgtgtcttgagcagaggttgagattctctagggtctggaaatttggtgctttctccccacgagtgaggagacccccacttctgcccagagcattcccaggctgaaggattgctggagaatgcccagagaagccatgatttctcccagctaggggcacagaggccagggtccccagggagattctactatgggtgatgtggacattgctgatgtgaggggaagtgctgggcctgacccagaggacatcactccaggacttgactgtagcctctgaaagtagaggcagctagagaaacaatagtggcttctatgggctaaatgtctctgtccccccataattaatatgttgaaaacccaacccccagtgtgatgatatttggaggtggggccttttggaggtacttaggtttagctgaggtcataagggtggagcccccatgtgtgattagtgcccttataagacgagttagagaccagagctctctctcggccatcggtagtgagaaggctgcagtctgagaatcaggaagagagccctcagcagacatcaaatctgctggtacctggatcttggacttcctagtctccagaactgtgagaaatacatattcattcagctgggtgtagtggctcacacctgtaatcctagtacaggtttgggagaccaaggtgggcagattacttgagcccaggagtttgagaccagcctgggcaacatggggaaaaccccatctctacaaaaatacaaaaacttaggctggcatggtggctcatgcctgtaatcccatgctgggattacaggagcgagccaccgcgcccatccatgatgttctcatggccaacatcctgaggtctcccaaaggcaagggcttctttgcttgcccactggtttgggtacagatatatttgtggactctggagtccaggtgtcagggtatagcttcctgaggtgccccaggcagctggtctcctctgaggccttgatgatagcccttgacatgcctggggctgtggagctggggatggtctccaccccacagggatccacctacctcagccggtatccagtccagggcctctgtcttcttggctgccctcaaggcactgggctcctttagacactccccaccacacccttaatcctctcagggaactccagtctccagcaaacaaaggcctgaaaagtgtctacaaggaaattctgagttcaggtttctgaggtgaaggagcacaaagtcctttctcctggcttggaagtgcagggtggtgcgaagagtgggagggaggcagggttaggtgaggaaaaaacagaaaacacaaattaatttgacaatgatatgttaacttaaaaatcacaactttaggctgggcagacagtggctcttgcctgtgatccctgcactttggtaggtggaggtgggaggactgcttgagggtaagagttcgagaccagcctgggcaacatagtgaggccctttctttaccaataaataaataaataaataaaaattagctaggtgtgctggcacacgcctgtagtcctacctactcaggaggctgaagtggatcccagtagtttgaggctgcagggagctatttactccagccagggcaacagagtgagaccctgtctctt

SEQ ID NO: 14000 - protein, 61 aa, Homo sapiens
MVAHACNPMLGLQERATAPIHDVLMANILRSPKGKGFFACPLVWVQIYLWTLESRCQGIAS

SEQ ID NO: 14001 - DNA, 295 bp, Homo sapiens
tggacgccaaaatttggtggagcttcctggttggtgaacacatccatgtgccaggagggtgacacaacctgattcacagagagaagacacagaagctctgcatggaagacccgcccagaccccgccctacgtgtgtcttcattagtctggtcctcctgatttgtatcctttgtaacaagcctgtaatcaactttctcagttgtgtgtgtgagtacgcctggcttttcatcaaagagctttgccgtcttgatgcttccttttctgtgaacacagcaataaatagattctgcagaac

SEQ ID NO: 14002 - protein, 63 aa, Homo sapiens
MEDPPRPRPTCVFISLVLLICILCNKPVINFLSCVCEYAWLFIKELCRLDASFSVNTAINRFC

SEQ ID NO: 14003 - DNA, 3974 bp, Homo sapiens
agtaggtataaactaaacctgggccatcaagagtctccaaggaaaacttgcaatgatggagtccctgttaaaggtcaaaaatctccccgaccctcaagatccagtgcaagtgaagcagccagttgtctggggtaaatacccggggtttgccatcccatgccaggaaaatgtaggacacggacacacgcgaggagtcgcgaggagtttaagagggaaggtttaataggcaaaagaaagagaaaggaaaacagctctctctctagtgagagaggggacttccgagagaaaaggggcagctggaggcagatgagccgaatttatagtccagcttgaggaggcggcgtctgatttacttaggactcacagattggtttgatcaggtgtttgtttacatagctgggaaggctggccgccccaccctaagcttattatgcaaatgaactctctcggagggtgccattttgtcggctccttactgcacctgtggctgacagagaagggatgatggggccgccattttgaacatgattggcacaactgccgtcatctatgtctgcagcccgattttacaggctgctctttgttagaaggaaaaatgatttgggcctgctttccattaaaagagaaaccttaccaagaacttcggtaacctcactgtctacctaagtaatttcttcttaactcctgtgtcacaaggaagttagaacctggggtttctgggctactaagagaggaagatgtgaaggactgattcacaaagtgaagaagtcagagggcagtcacctggggaaaactccaaggacagtttacaggatagaatcaagaattggccaggtgaggccaggcgccctggctcacacctgtaatcccagcactctgggagggcgaggtgggcggatcacgaggtcaggagatcgagaccatcctggctaacacggtgaaacctcgtctctactaaaaatacaaaaaaacgagccgggcgtggtggcgggcccctgtagtcccagctactcaggaggctgaagcggcaggatggcgtgaaccggggaggcggagcttgcagtgagccaagaccgcaccactgcactccagcctgggcgacagagcaagactccatctcaaaaaaaaaaaaaaaaggccagtgtcggctggtctgagaaataaagagaaacagtacaaagagagaaattttacaactgggcctccagcggtgacatcacatactggtaggaccgtgatgacaaccccgagctgcaaaaccagcaggtttttattagggattttaaaaggggaggggatgtacgaacagggagtaagccacaaggatcacatgcttcgaagggcaataaagatcacaaagcgaaggcaaaattagaattactgatgagggtctatgtcccgctgtgcacgtattgttttgataaacatcttaacaggaaacagggttcgagaccaaagaaccggtctgactagaatttaccaggctggaatttcccaatcctagtaagcctgagggtactgcaggagaccagggcatatttcagtccttatctcaaccacataagacagacactcccagagcagccatctacagacctcccccgaggaatgcattccttccccagggttattccttcctgggaaaagaattcagcgatatttctcctcgcacatctgtttataggctttctgcaagaagaaaaatatggctctattctgcccaaccctgcaagcagtcagactttatggttatcttttcttgttacctgaaaattgctgttactttgttctttttcagagtgcactgatttcatattgttcaaacccacatgttttacaatcagatttcatattgttcaaacacacatgttctacaaccaatttgtacaatagtggtcctgaggtgacgtacattctcagtttatgaagataataggattaagagattaaagacaggcataagaaattataagagtattagggaagtgataaatatccatgaaatcttcacaatttatgttcagagattgcagtaaagacaggtgtaagaaattataaaagtattaatttggggaactgctaaatgtccatgaaatcttcacaatttatgttcttctgccttggctccagctggtccctccattcagggtccctgacttcccacaacaaattaatgatatttttgtgtcaaagactagctgaaccctatgttgttcccggttaccaactgacataaataagtatgtttgtaatgagccttaagaatggttctatggagttgcccatgtaagaagcagccggatggcaaattagttattgtaatttgaagtgctcacagttataacttcctatataaggttcctacttgcaatttctgtttgttttctatattcacaatatcttaaaaggcatagactatctttccaagcctcacattatacatcactttaatttgctctggtgtaaaactgctaatttctttgaggtgataccacagaaccactaaattagatacgctgtatgccacatagcatatattttaagtcattttttaattaaaaaaaaacaaaccttaaaatttggtgaaaatccattgtgtttgttatctattgctgcataataaattgccccaaaagtaagtagcttcaaacaataagaaacatttattttctatctctcttaaacacatacacacacacatacatacacacacaaacacagtattaatttgttattgttgaagttttaaaaagtgatttgtatgtcaaaaacaaaccccaaccttctctccttgccacccaaaccaaagaaggccagctccataacataaaagtgcgaggtgaagcagcaagtgatgatgaagaagctgcatcaagttatccagaagatctagccaagataattggtgaaggtgactacactaaacaacagattttccatgtagataaaatagctttatattggaagaagaggccatctaggacattcatagctacagaggaaaagtcaatgcctgcctggcttcaaagcttcaaaggacagtctgactctcttgttagaggctaatatagctgatggctttaagttgaagctaatcctcatttaccactctgaaaaccctctggctcttaagaattatgctaaatctactctgcctgtgttttataaatggaacaacaaagcttggatgacagcatatctgtttacagcatggtttgttgaatattttaagcccactgttgagagacctactgctcaggaaaaaaaagatttctttcaaaatattactgctcattgacaatgtagttggccacccaagagctctgatgcagagatacaaggagataaatgttgttttcatgcttggtaacacagtgtccattctgcagcctatggatcaaggagtgatttcaactttcaagtcttattatttaagaataaattttgtaaggttatagctgcaatggatagtgatttttctgacatatctgggcaaaatacattgaaaatcttttggaaagcattcatcattctagatgccattaagaacacttgtgagctgagcacggtagctcacacctgtaatcccagcactttgggaggccgatgtgggtggatcacctgaggttaggagttccagaccagcctggccaacatggtgaaaccccatctctactaaaaatataaaattagccaggcatggtgacacactcctataatcctagcactttgggaggccgaggcaggtggatcacctgaggtcaggagtttgaaaccagcctggccaacatggtgaaaccccatttctactaaaaatacaaaaattagctaggcctggtggcagaggcctgtaatcccagctacttgggaggctgaggcaggagaattgcttgaatctgggaggcagaggttgcagtgagctgatatcgcaccactgcactccagcctgggcaacaagagtaagactctgtctc

SEQ ID NO: 14004 - protein, 73 aa, Homo sapiens
MALFCPTLQAVRLYGYLFLLPENCCYFVLFQSALISYCSNPHVLQSDFILFKHTCSTTNLYNSGPEVTYILSL

SEQ ID NO: 14005 - DNA, 3839 bp, Homo sapiens
gaagtaggaggggcgtcttcccctcgtgggccctgagcgggactgcagccagccccctggggcgccagctttggaggcccccgacagctgctctcgggagccgcctcccgacacccgagccccgccggcgcctcccgctcccggctcccggctcctggctccctccgcctcccccgcccctcgccccgccgccgaagaggccccgctcccgggtcggacgcctgggtctgccgggaagagcgatgagaggtgtctgaaggtggctattcactgagcgatggggttggacttgaaggaatgccaagagatgctgcccccacccccttaggcccgagggatcaggagctatgggaccagaggccctgtcatctttactgctgctgctcttggtggcaagtggagatgctgacatgaagggacattttgatcctgccaagtgccgctatgccctgggcatgcaggaccggaccatcccagacagtgacatctctgcttccagctcctggtcagattccactgccgcccgccacagcaggttggagagcagtgacggggatggggcctggtgccccgcagggtcggtgtttcccaaggaggaggagtacttgcaggtggatctacaacgactgcacctggtggctctggtgggcacccagggacggcatgccgggggcctgggcaaggagttctcccggagctaccggctgcgttactcccgggatggtcgccgctggatgggctggaaggaccgctggggtcaggaggtgatctcaggcaatgaggaccctgagggagtggtgctgaaggaccttgggccccccatggttgcccgactggttcgcttctacccccgggctgaccgggtcatgagcgtctgtctgcgggtagagctctatggctgcctctggagggatggactcctgtcttacaccgcccctgtggggcagacaatgtatttatctgaggccgtgtacctcaacgactccacctatgacggacataccgtgggcggactgcagtatgggggtctgggccagctggcagatggtgtggtggggctggatgactttaggaagagtcaggagctgcgggtctggccaggctatgactatgtgggatggagcaaccacagcttctccagtggctatgtggagatggagtttgagtttgaccggctgagggccttccaggctatgcaggtccactgtaacaacatgcacacgctgggagcccgtctgcctggcggggtggaatgtcgcttccggcgtggccctgccatggcctgggagggggagcccatgcgccacaacctagggggcaacctgggggaccccagagcccgggctgtctcagtgccccttggcggccgtgtggctcgctttctgcagtgccgcttcctctttgcggggccctggttactcttcagcgaaatctccttcatctctgatgtggtgaacaattcctctccggcactgggaggcaccttcccgccagccccctggtggccgcctggcccacctcccaccaacttcagcagcttggagctggagcccagaggccagcagcccgtggccaaggccgaggggagcccgaccgccatcctcatcggctgcctggtggccatcatcctgctcctgctgctcatcattgccctcatgctctggcggctgcactggcgcaggctcctcagcaaggctgaacggagggtgttggaagaggagctgacggttcacctctctgtccctggggacactatcctcatcaacaaccgcccaggtcctagagagccacccccgtaccaggagccccggcctcgtgggaatccgccccactccgctccctgtgtccccaatggctctgcctacagtggggactatatggagcctgagaagccaggcgccccgcttctgcccccacctccccagaacagcgtcccccattatgccgaggctgacattgttaccctgcagggcgtcaccgggggcaacacctatgctgtgcctgcactgcccccaggggcagtcggggatgggccccccagagtggatttccctcgatctcgactccgcttcaaggagaagcttggcgagggccagtttggggaggtgcacctgtgtgaggtcgacagccctcaagatctggttagtcttgatttcccccttaatgtgcgtaagggacaccctttgctggtagctgtcaagatcttacggccagatgccaccaagaatgccaggaatgatttcctgaaagaggtgaagatcatgtcgaggctcaaggacccaaacatcattcggctgctgggcgtgtgtgtgcaggacgaccccctctgcatgattactgactacatggagaacggcgacctcaaccagttcctcagtgcccaccagctggaggacaaggcagccgagggggcccctggggacgggcaggctgcgcaggggcccaccatcagctacccaatgctgctgcatgtggcagcccagatcgcctccggcatgcgctatctggccacactcaactttgtacatcgggacctggccacgcggaactgcctagttggggaaaatttcaccatcaaaatcgcagactttggcatgagccggaacctctatgctggggactattaccgtgtgcagggccgggcagtgctgcccatccgctggatggcctgggagtgcatcctcatggggaagttcacgactgcgagtgacgtgtgggcctttggtgtgaccctgtgggaggtgctgatgctctgtagggcccagccctttgggcagctcaccgacgagcaggtcatcgagaacgcgggggagttcttccgggaccagggccggcaggtgtacctgtcccggccgcctgcctgcccgcagggcctatatgagctgatgcttcggtgctggagccgggagtctgagcagcgaccacccttttcccagctgcatcggttcctggcagaggatgcactcaacacggtgtgaatcacacatccagctgcccctccctcagggagcgatccaggggaagccagtgacactaaaacaagaggacacaatggcacctctgcccttcccctcccgacagcccatcacctctaatagaggcagtgagactgcaggtgggctgggcccacccagggagctgatgccccttctccccttcctggacacactctcatgtccccttcctgttcttccttcctagaagcccctgtcgcccacccagctggtcctgtggatgggatcctctccaccctcctctagccatcccttggggaagggtggggagaaatataggatagacactggacatggcccattggagcacctgggccccactggacaacactgattcctggagaggtggctgcgcccccagcttctctctccctgtcacacactggaccccactggctgagaatctgggggtgaggaggacaagaaggagaggaaaatgtttccttgtgcctgctcctgtacttgtcctcagcttgggcttcttcctcctccatcacctgaaacactggacctgggggtagccccgccccagccctcagtcacccccacttcccacttgcagtcttgtagctagaacttctctaagcctatacgtttctgtggagtaaatattgggattggggggaaagagggagcaacggcccatagccttggggttggacatctctagtgtagctgccacattgatttttctataatcacttggggtttgtacatttttggggggagagacacagatttttacactaatatatggacctagcttgaggcaattttaatcccctgcactaggcaggtaataataaaggttgagttttccacaac

SEQ ID NO: 14006 - protein, 876 aa, Homo sapiens; identical to SEQ ID NO: 1455

SEQ ID NO: 14007 - DNA, 3849 bp, Homo sapiens
gccccagccctggctcctctccccggaacaggcccccgacagctgctctcgggagccgcctcccgacacccgagccccgccggcgcctcccgctcccggctcccggctcctggctccctccgcctcccccgcccctcgccccgccgccgaagaggccccgctcccgggtcggacgcctgggtctgccgggaagagcgatgagagagatgctgcccccacccccttaggcccgagggatcaggagctatgggaccagaggccctgtcatctttactgctgctgctcttggtggcaagtggagatgctgacatgaagggacattttgatcctgccaagtgccgctatgccctgggcatgcaggaccggaccatcccagacagtgacatctctgcttccagctcctggtcagattccactgccgcccgccacagcaggttggagagcagtgacggggatggggcctggtgccccgcagggtcggtgtttcccaaggaggaggagtacttgcaggtggatctacaacgactgcacctggtggctctggtgggcacccagggacggcatgccgggggcctgggcaaggagttctcccggagctaccggctgcgttactcccgggatggtcgccgctggatgggctggaaggaccgctggggtcaggaggtgatctcaggcaatgaggaccctgagggagtggtgctgaaggaccttgggccccccatggttgcccgactggttcgcttctacccccgggctgaccgggtcatgagcgtctgtctgcgggtagagctctatggctgcctctggagggatggactcctgtcttacaccgcccctgtggggcagacaatgtatttatctgaggccgtgtacctcaacgactccacctatgacggacataccgtgggcggactgcagtatgggggtctgggccagctggcagatggtgtggtggggctggatgactttaggaagagtcaggagctgcgggtctggccaggctatgactatgtgggatggagcaaccacagcttctccagtggctatgtggagatggagtttgagtttgaccggctgagggccttccaggctatgcaggtccactgtaacaacatgcacacgctgggagcccgtctgcctggcggggtggaatgtcgcttccggcgtggccctgccatggcctgggagggggagcccatgcgccacaacctagggggcaacctgggggaccccagagcccgggctgtctcagtgccccttggcggccgtgtggctcgctttctgcagtgccgcttcctctttgcggggccctggttactcttcagcgaaatctccttcatctctgatgtggtgaacaattcctctccggcactgggaggcaccttcccgccagccccctggtggccgcctggcccacctcccaccaacttcagcagcttggagctggagcccagaggccagcagcccgtggccaaggccgaggggagcccgaccgccatcctcatcggctgcctggtggccatcatcctgctcctgctgctcatcattgccctcatgctctggcggctgcactggcgcaggctcctcagcaaggctgaacggagggtgttggaagaggagctgacggttcacctctctgtccctggggacactatcctcatcaacaaccgcccaggtcctagagagccacccccgtaccaggagccccggcctcgtgggaatccgccccactccgctccctgtgtccccaatggctctgcgttgctgctctccaatccagcctaccgcctccttctggccacttacgcccgtccccctcgaggcccgggcccccccacacccgcctgggccaaacccaccaacacccaggcctacagtggggactatatggagcctgagaagccaggcgccccgcttctgcccccacctccccagaacagcgtcccccattatgccgaggctgacattgttaccctgcagggcgtcaccgggggcaacacctatgctgtgcctgcactgcccccaggggcagtcggggatgggccccccagagtggatttccctcgatctcgactccgcttcaaggagaagcttggcgagggccagtttggggaggtgcacctgtgtgaggtcgacagccctcaagatctggttagtcttgatttcccccttaatgtgcgtaagggacaccctttgctggtagctgtcaagatcttacggccagatgccaccaagaatgccaggaatgatttcctgaaagaggtgaagatcatgtcgaggctcaaggacccaaacatcattcggctgctgggcgtgtgtgtgcaggacgaccccctctgcatgattactgactacatggagaacggcgacctcaaccagttcctcagtgcccaccagctggaggacaaggcagccgagggggcccctggggacgggcaggctgcgcaggggcccaccatcagctacccaatgctgctgcatgtggcagcccagatcgcctccggcatgcgctatctggccacactcaactttgtacatcgggacctggccacgcggaactgcctagttggggaaaatttcaccatcaaaatcgcagactttggcatgagccggaacctctatgctggggactattaccgtgtgcagggccgggcagtgctgcccatccgctggatggcctgggagtgcatcctcatggggaagttcacgactgcgagtgacgtgtgggcctttggtgtgaccctgtgggaggtgctgatgctctgtagggcccagccctttgggcagctcaccgacgagcaggtcatcgagaacgcgggggagttcttccgggaccagggccggcaggtgtacctgtcccggccgcctgcctgcccgcagggcctatatgagctgatgcttcggtgctggagccgggagtctgagcagcgaccacccttttcccagctgcatcggttcctggcagaggatgcactcaacacggtgtgaatcacacatccagctgcccctccctcagggagcgatccaggggaagccagtgacactaaaacaagaggacacaatggcacctctgcccttcccctcccgacagcccatcacctctaatagaggcagtgagactgcaggtgggctgggcccacccagggagctgatgccccttctccccttcctggacacactctcatgtccccttcctgttcttccttcctagaagcccctgtcgcccacccagctggtcctgtggatgggatcctctccaccctcctctagccatcccttggggaagggtggggagaaatataggatagacactggacatggcccattggagcacctgggccccactggacaacactgattcctggagaggtggctgcgcccccagcttctctctccctgtcacacactggaccccactggctgagaatctgggggtgaggaggacaagaaggagaggaaaatgtttccttgtgcctgctcctgtacttgtcctcagcttgggcttcttcctcctccatcacctgaaacactggacctgggggtagccccgccccagccctcagtcacccccacttcccacttgcagtcttgtagctagaacttctctaagcctatacgtttctgtggagtaaatattgggattggggggaaagagggagcaacggcccatagccttggggttggacatctctagtgtagctgccacattgatttttctataatcacttggggtttgtacatttttggggggagagacacagatttttacactaatatatggacctagcttgaggcaattttaatcccctgcactaggcaggtaataataaaggttgagttttccacaac

SEQ ID NO: 14008 - protein, 913 aa, Homo sapiens; identical to SEQ ID NO: 1457

SEQ ID NO: 14009 - DNA, 3738 bp, Homo sapiens
gccccagccctggctcctctccccggaacaggcccccgacagctgctctcgggagccgcctcccgacacccgagccccgccggcgcctcccgctcccggctcccggctcctggctccctccgcctcccccgcccctcgccccgccgccgaagaggccccgctcccgggtcggacgcctgggtctgccgggaagagcgatgagagagatgctgcccccacccccttaggcccgagggatcaggagctatgggaccagaggccctgtcatctttactgctgctgctcttggtggcaagtggagatgctgacatgaagggacattttgatcctgccaagtgccgctatgccctgggcatgcaggaccggaccatcccagacagtgacatctctgcttccagctcctggtcagattccactgccgcccgccacagcaggttggagagcagtgacggggatggggcctggtgccccgcagggtcggtgtttcccaaggaggaggagtacttgcaggtggatctacaacgactgcacctggtggctctggtgggcacccagggacggcatgccgggggcctgggcaaggagttctcccggagctaccggctgcgttactcccgggatggtcgccgctggatgggctggaaggaccgctggggtcaggaggtgatctcaggcaatgaggaccctgagggagtggtgctgaaggaccttgggccccccatggttgcccgactggttcgcttctacccccgggctgaccgggtcatgagcgtctgtctgcgggtagagctctatggctgcctctggagggatggactcctgtcttacaccgcccctgtggggcagacaatgtatttatctgaggccgtgtacctcaacgactccacctatgacggacataccgtgggcggactgcagtatgggggtctgggccagctggcagatggtgtggtggggctggatgactttaggaagagtcaggagctgcgggtctggccaggctatgactatgtgggatggagcaaccacagcttctccagtggctatgtggagatggagtttgagtttgaccggctgagggccttccaggctatgcaggtccactgtaacaacatgcacacgctgggagcccgtctgcctggcggggtggaatgtcgcttccggcgtggccctgccatggcctgggagggggagcccatgcgccacaacctagggggcaacctgggggaccccagagcccgggctgtctcagtgccccttggcggccgtgtggctcgctttctgcagtgccgcttcctctttgcggggccctggttactcttcagcgaaatctccttcatctctgatgtggtgaacaattcctctccggcactgggaggcaccttcccgccagccccctggtggccgcctggcccacctcccaccaacttcagcagcttggagctggagcccagaggccagcagcccgtggccaaggccgaggggagcccgaccgccatcctcatcggctgcctggtggccatcatcctgctcctgctgctcatcattgccctcatgctctggcggctgcactggcgcaggctcctcagcaaggctgaacggagggtgttggaagaggagctgacggttcacctctctgtccctggggacactatcctcatcaacaaccgcccaggtcctagagagccacccccgtaccaggagccccggcctcgtgggaatccgccccactccgctccctgtgtccccaatggctctgcctacagtggggactatatggagcctgagaagccaggcgccccgcttctgcccccacctccccagaacagcgtcccccattatgccgaggctgacattgttaccctgcagggcgtcaccgggggcaacacctatgctgtgcctgcactgcccccaggggcagtcggggatgggccccccagagtggatttccctcgatctcgactccgcttcaaggagaagcttggcgagggccagtttggggaggtgcacctgtgtgaggtcgacagccctcaagatctggttagtcttgatttcccccttaatgtgcgtaagggacaccctttgctggtagctgtcaagatcttacggccagatgccaccaagaatgccaggaatgatttcctgaaagaggtgaagatcatgtcgaggctcaaggacccaaacatcattcggctgctgggcgtgtgtgtgcaggacgaccccctctgcatgattactgactacatggagaacggcgacctcaaccagttcctcagtgcccaccagctggaggacaaggcagccgagggggcccctggggacgggcaggctgcgcaggggcccaccatcagctacccaatgctgctgcatgtggcagcccagatcgcctccggcatgcgctatctggccacactcaactttgtacatcgggacctggccacgcggaactgcctagttggggaaaatttcaccatcaaaatcgcagactttggcatgagccggaacctctatgctggggactattaccgtgtgcagggccgggcagtgctgcccatccgctggatggcctgggagtgcatcctcatggggaagttcacgactgcgagtgacgtgtgggcctttggtgtgaccctgtgggaggtgctgatgctctgtagggcccagccctttgggcagctcaccgacgagcaggtcatcgagaacgcgggggagttcttccgggaccagggccggcaggtgtacctgtcccggccgcctgcctgcccgcagggcctatatgagctgatgcttcggtgctggagccgggagtctgagcagcgaccacccttttcccagctgcatcggttcctggcagaggatgcactcaacacggtgtgaatcacacatccagctgcccctccctcagggagcgatccaggggaagccagtgacactaaaacaagaggacacaatggcacctctgcccttcccctcccgacagcccatcacctctaatagaggcagtgagactgcaggtgggctgggcccacccagggagctgatgccccttctccccttcctggacacactctcatgtccccttcctgttcttccttcctagaagcccctgtcgcccacccagctggtcctgtggatgggatcctctccaccctcctctagccatcccttggggaagggtggggagaaatataggatagacactggacatggcccattggagcacctgggccccactggacaacactgattcctggagaggtggctgcgcccccagcttctctctccctgtcacacactggaccccactggctgagaatctgggggtgaggaggacaagaaggagaggaaaatgtttccttgtgcctgctcctgtacttgtcctcagcttgggcttcttcctcctccatcacctgaaacactggacctgggggtagccccgccccagccctcagtcacccccacttcccacttgcagtcttgtagctagaacttctctaagcctatacgtttctgtggagtaaatattgggattggggggaaagagggagcaacggcccatagccttggggttggacatctctagtgtagctgccacattgatttttctataatcacttggggtttgtacatttttggggggagagacacagatttttacactaatatatggacctagcttgaggcaattttaatcccctgcactaggcaggtaataataaaggttgagttttccacaac

SEQ ID NO: 14010 - protein, 876 aa, Homo sapiens; identical to SEQ ID NO: 1455

SEQ ID NO: 14011 - DNA, 3829 bp, Homo sapiens
ttaggaagttatttaactgatctctgccctagtttcttcatgtgttaaatatggatagtaatagtatctaccttatgaagtgactgtgaagataaaattatggattctgtttaagggtttaggccagtgtctggcacaggggaagcattctaaaaatatagctgatgctgttaaacaatgactgttgttgttgttttactgttattatccccaaagcggcccattctgtctgttgctgtcagctatgactcagtcccctgattaacttacgcaccacccattttatcccctgcagagatgctgcccccacccccttaggcccgagggatcaggagctatgggaccagaggccctgtcatctttactgctgctgctcttggtggcaagtggagatgctgacatgaagggacattttgatcctgccaagtgccgctatgccctgggcatgcaggaccggaccatcccagacagtgacatctctgcttccagctcctggtcagattccactgccgcccgccacagcaggttggagagcagtgacggggatggggcctggtgccccgcagggtcggtgtttcccaaggaggaggagtacttgcaggtggatctacaacgactgcacctggtggctctggtgggcacccagggacggcatgccgggggcctgggcaaggagttctcccggagctaccggctgcgttactcccgggatggtcgccgctggatgggctggaaggaccgctggggtcaggaggtgatctcaggcaatgaggaccctgagggagtggtgctgaaggaccttgggccccccatggttgcccgactggttcgcttctacccccgggctgaccgggtcatgagcgtctgtctgcgggtagagctctatggctgcctctggagggatggactcctgtcttacaccgcccctgtggggcagacaatgtatttatctgaggccgtgtacctcaacgactccacctatgacggacataccgtgggcggactgcagtatgggggtctgggccagctggcagatggtgtggtggggctggatgactttaggaagagtcaggagctgcgggtctggccaggctatgactatgtgggatggagcaaccacagcttctccagtggctatgtggagatggagtttgagtttgaccggctgagggccttccaggctatgcaggtccactgtaacaacatgcacacgctgggagcccgtctgcctggcggggtggaatgtcgcttccggcgtggccctgccatggcctgggagggggagcccatgcgccacaacctagggggcaacctgggggaccccagagcccgggctgtctcagtgccccttggcggccgtgtggctcgctttctgcagtgccgcttcctctttgcggggccctggttactcttcagcgaaatctccttcatctctgatgtggtgaacaattcctctccggcactgggaggcaccttcccgccagccccctggtggccgcctggcccacctcccaccaacttcagcagcttggagctggagcccagaggccagcagcccgtggccaaggccgaggggagcccgaccgccatcctcatcggctgcctggtggccatcatcctgctcctgctgctcatcattgccctcatgctctggcggctgcactggcgcaggctcctcagcaaggctgaacggagggtgttggaagaggagctgacggttcacctctctgtccctggggacactatcctcatcaacaaccgcccaggtcctagagagccacccccgtaccaggagccccggcctcgtgggaatccgccccactccgctccctgtgtccccaatggctctgcctacagtggggactatatggagcctgagaagccaggcgccccgcttctgcccccacctccccagaacagcgtcccccattatgccgaggctgacattgttaccctgcagggcgtcaccgggggcaacacctatgctgtgcctgcactgcccccaggggcagtcggggatgggccccccagagtggatttccctcgatctcgactccgcttcaaggagaagcttggcgagggccagtttggggaggtgcacctgtgtgaggtcgacagccctcaagatctggttagtcttgatttcccccttaatgtgcgtaagggacaccctttgctggtagctgtcaagatcttacggccagatgccaccaagaatgccaggaatgatttcctgaaagaggtgaagatcatgtcgaggctcaaggacccaaacatcattcggctgctgggcgtgtgtgtgcaggacgaccccctctgcatgattactgactacatggagaacggcgacctcaaccagttcctcagtgcccaccagctggaggacaaggcagccgagggggcccctggggacgggcaggctgcgcaggggcccaccatcagctacccaatgctgctgcatgtggcagcccagatcgcctccggcatgcgctatctggccacactcaactttgtacatcgggacctggccacgcggaactgcctagttggggaaaatttcaccatcaaaatcgcagactttggcatgagccggaacctctatgctggggactattaccgtgtgcagggccgggcagtgctgcccatccgctggatggcctgggagtgcatcctcatggggaagttcacgactgcgagtgacgtgtgggcctttggtgtgaccctgtgggaggtgctgatgctctgtagggcccagccctttgggcagctcaccgacgagcaggtcatcgagaacgcgggggagttcttccgggaccagggccggcaggtgtacctgtcccggccgcctgcctgcccgcagggcctatatgagctgatgcttcggtgctggagccgggagtctgagcagcgaccacccttttcccagctgcatcggttcctggcagaggatgcactcaacacggtgtgaatcacacatccagctgcccctccctcagggagcgatccaggggaagccagtgacactaaaacaagaggacacaatggcacctctgcccttcccctcccgacagcccatcacctctaatagaggcagtgagactgcaggtgggctgggcccacccagggagctgatgccccttctccccttcctggacacactctcatgtccccttcctgttcttccttcctagaagcccctgtcgcccacccagctggtcctgtggatgggatcctctccaccctcctctagccatcccttggggaagggtggggagaaatataggatagacactggacatggcccattggagcacctgggccccactggacaacactgattcctggagaggtggctgcgcccccagcttctctctccctgtcacacactggaccccactggctgagaatctgggggtgaggaggacaagaaggagaggaaaatgtttccttgtgcctgctcctgtacttgtcctcagcttgggcttcttcctcctccatcacctgaaacactggacctgggggtagccccgccccagccctcagtcacccccacttcccacttgcagtcttgtagctagaacttctctaagcctatacgtttctgtggagtaaatattgggattggggggaaagagggagcaacggcccatagccttggggttggacatctctagtgtagctgccacattgatttttctataatcacttggggtttgtacatttttggggggagagacacagatttttacactaatatatggacctagcttgaggcaattttaatcccctgcactaggcaggtaataataaaggttgagttttccacaac

SEQ ID NO: 14012 - protein, 876 aa, Homo sapiens; identical to SEQ ID NO: 1455

SEQ ID NO: 14013 - DNA, 3940 bp, Homo sapiens
ttaggaagttatttaactgatctctgccctagtttcttcatgtgttaaatatggatagtaatagtatctaccttatgaagtgactgtgaagataaaattatggattctgtttaagggtttaggccagtgtctggcacaggggaagcattctaaaaatatagctgatgctgttaaacaatgactgttgttgttgttttactgttattatccccaaagcggcccattctgtctgttgctgtcagctatgactcagtcccctgattaacttacgcaccacccattttatcccctgcagagatgctgcccccacccccttaggcccgagggatcaggagctatgggaccagaggccctgtcatctttactgctgctgctcttggtggcaagtggagatgctgacatgaagggacattttgatcctgccaagtgccgctatgccctgggcatgcaggaccggaccatcccagacagtgacatctctgcttccagctcctggtcagattccactgccgcccgccacagcaggttggagagcagtgacggggatggggcctggtgccccgcagggtcggtgtttcccaaggaggaggagtacttgcaggtggatctacaacgactgcacctggtggctctggtgggcacccagggacggcatgccgggggcctgggcaaggagttctcccggagctaccggctgcgttactcccgggatggtcgccgctggatgggctggaaggaccgctggggtcaggaggtgatctcaggcaatgaggaccctgagggagtggtgctgaaggaccttgggccccccatggttgcccgactggttcgcttctacccccgggctgaccgggtcatgagcgtctgtctgcgggtagagctctatggctgcctctggagggatggactcctgtcttacaccgcccctgtggggcagacaatgtatttatctgaggccgtgtacctcaacgactccacctatgacggacataccgtgggcggactgcagtatgggggtctgggccagctggcagatggtgtggtggggctggatgactttaggaagagtcaggagctgcgggtctggccaggctatgactatgtgggatggagcaaccacagcttctccagtggctatgtggagatggagtttgagtttgaccggctgagggccttccaggctatgcaggtccactgtaacaacatgcacacgctgggagcccgtctgcctggcggggtggaatgtcgcttccggcgtggccctgccatggcctgggagggggagcccatgcgccacaacctagggggcaacctgggggaccccagagcccgggctgtctcagtgccccttggcggccgtgtggctcgctttctgcagtgccgcttcctctttgcggggccctggttactcttcagcgaaatctccttcatctctgatgtggtgaacaattcctctccggcactgggaggcaccttcccgccagccccctggtggccgcctggcccacctcccaccaacttcagcagcttggagctggagcccagaggccagcagcccgtggccaaggccgaggggagcccgaccgccatcctcatcggctgcctggtggccatcatcctgctcctgctgctcatcattgccctcatgctctggcggctgcactggcgcaggctcctcagcaaggctgaacggagggtgttggaagaggagctgacggttcacctctctgtccctggggacactatcctcatcaacaaccgcccaggtcctagagagccacccccgtaccaggagccccggcctcgtgggaatccgccccactccgctccctgtgtccccaatggctctgcgttgctgctctccaatccagcctaccgcctccttctggccacttacgcccgtccccctcgaggcccgggcccccccacacccgcctgggccaaacccaccaacacccaggcctacagtggggactatatggagcctgagaagccaggcgccccgcttctgcccccacctccccagaacagcgtcccccattatgccgaggctgacattgttaccctgcagggcgtcaccgggggcaacacctatgctgtgcctgcactgcccccaggggcagtcggggatgggccccccagagtggatttccctcgatctcgactccgcttcaaggagaagcttggcgagggccagtttggggaggtgcacctgtgtgaggtcgacagccctcaagatctggttagtcttgatttcccccttaatgtgcgtaagggacaccctttgctggtagctgtcaagatcttacggccagatgccaccaagaatgccaggaatgatttcctgaaagaggtgaagatcatgtcgaggctcaaggacccaaacatcattcggctgctgggcgtgtgtgtgcaggacgaccccctctgcatgattactgactacatggagaacggcgacctcaaccagttcctcagtgcccaccagctggaggacaaggcagccgagggggcccctggggacgggcaggctgcgcaggggcccaccatcagctacccaatgctgctgcatgtggcagcccagatcgcctccggcatgcgctatctggccacactcaactttgtacatcgggacctggccacgcggaactgcctagttggggaaaatttcaccatcaaaatcgcagactttggcatgagccggaacctctatgctggggactattaccgtgtgcagggccgggcagtgctgcccatccgctggatggcctgggagtgcatcctcatggggaagttcacgactgcgagtgacgtgtgggcctttggtgtgaccctgtgggaggtgctgatgctctgtagggcccagccctttgggcagctcaccgacgagcaggtcatcgagaacgcgggggagttcttccgggaccagggccggcaggtgtacctgtcccggccgcctgcctgcccgcagggcctatatgagctgatgcttcggtgctggagccgggagtctgagcagcgaccacccttttcccagctgcatcggttcctggcagaggatgcactcaacacggtgtgaatcacacatccagctgcccctccctcagggagcgatccaggggaagccagtgacactaaaacaagaggacacaatggcacctctgcccttcccctcccgacagcccatcacctctaatagaggcagtgagactgcaggtgggctgggcccacccagggagctgatgccccttctccccttcctggacacactctcatgtccccttcctgttcttccttcctagaagcccctgtcgcccacccagctggtcctgtggatgggatcctctccaccctcctctagccatcccttggggaagggtggggagaaatataggatagacactggacatggcccattggagcacctgggccccactggacaacactgattcctggagaggtggctgcgcccccagcttctctctccctgtcacacactggaccccactggctgagaatctgggggtgaggaggacaagaaggagaggaaaatgtttccttgtgcctgctcctgtacttgtcctcagcttgggcttcttcctcctccatcacctgaaacactggacctgggggtagccccgccccagccctcagtcacccccacttcccacttgcagtcttgtagctagaacttctctaagcctatacgtttctgtggagtaaatattgggattggggggaaagagggagcaacggcccatagccttggggttggacatctctagtgtagctgccacattgatttttctataatcacttggggtttgtacatttttggggggagagacacagatttttacactaatatatggacctagcttgaggcaattttaatcccctgcactaggcaggtaataataaaggttgagttttccacaac

SEQ ID NO: 14014 - protein, 913 aa, Homo sapiens; identical to SEQ ID NO: 1457

SEQ ID NO: 14015 - DNA, 836 bp, Homo sapiens
cccgtaccaggagccccggcctcgtgggaatccgccccactccgctccctgtgtccccaatggctctgcctacagtggggactatatggagcctgagaagccaggcgccccgcttctgcccccacctccccagaacagcgtcccccattatgccgaggctgacattgttaccctgcagggcgtcaccgggggcaacacctatgctgtgcctgcactgcccccaggggcagtcggggatgggccccccagagtggatttccctcgatctcgactccgcttcaaggagaagcttggcgagggccagtttggggaggtgcacctgtgtgaggtcgacagccctcaagatctggttagtcttgatttcccccttaatgtgcgtaagggacaccctttgctggtagctgtcaagatcttacggccagatgccaccaagaatgccaggaatgatttcctgaaagaggtgaagatcatgtcgaggctcaaggacccaaacatcattcggctgctgggcgtgtgtgtgcaggacgaccccctctgcatgattactgactacatggagaacggcgacctcaaccagttcctcagtgcccaccagctggaggacaaggcagccgagggggcccctggggacgggcaggctgcgcaggggcccaccatcaggtacctgcttacccaggctgggccttgctcagaattcccccaggggatctcctcctctcccctcgcttcagcctggaggaaaagaggggagcgtgggggtgggaagggagagaggttccaggagggcctgggataaggaatgtgtgacaagttaacccaggaacatggacagaaag

SEQ ID NO: 14016 - protein, 236 aa, Homo sapiens
MEPEKPGAPLLPPPPQNSVPHYAEADIVTLQGVTGGNTYAVPALPPGAVGDGPPRVDFPRSRLRFKEKLGEGQFGEVHLCEVDSPQDLVSLDFPLNVRKGHPLLVAVKILRPDATKNARNDFLKEVKIMSRLKDPNIIRLLGVCVQDDPLCMITDYMENGDLNQFLSAHQLEDKAAEGAPGDGQAAQGPTIRYLLTQAGPCSEFPQGISSSPLASAWRKRGERGGGKGERFQEGLG

SEQ ID NO: 14017 - DNA, 1079 bp, Homo sapiens
cacctatgctgtgcctgcactgcccccaggggcagtcggggatgggccccccagagtggatttccctcgatctcgactccgcttcaaggagaagcttggcgagggccagtttggggaggtgcacctgtgtgaggtcgacagccctcaagatctggttagtcttgatttcccccttaatgtgcgtaagggacaccctttgctggtagctgtcaagatcttacggccagatgccaccaagaatgccaggaatgatttcctgaaagaggtgaagatcatgtcgaggctcaaggacccaaacatcattcggctgctgggcgtgtgtgtgcaggacgaccccctctgcatgattactgactacatggagaacggcgacctcaaccagttcctcagtgcccaccagctggaggacaaggcagtaataataaaggttgagttttccacaactgtgtgagtgggttccttgggaatttggtaactctgcctcctgcacctccctctgaacccacttcccaacccacttcccatcttccttttttcctgcctcctcattccatttcccatcacctgttttgcccagcattgtgttctgtttctggataatccaggcctttgcctgtgggacctcaggagatgcatgaatgtctgagtgcatgaaccttctcaactcagaggggtgctctggtggaggcctggaaggaatgcagtcaggccaggggtgctgaaccttttttgtgccataaacgcctttggcagtctgtagaggtctactgagtcctcctcagaattaggttttaaaacctataaaatggaccaggcatagtggctcacccctgtaatcccagcactttgggaggctgaggtgggtagatcacttgaggccaggagttcgagaccaacctggccaacatagcaaaaccccatctctactaaagatacaaaaattagcagggtgtggtggcatgcgcctgtaatctcagctattcaggaggctgaggcaggagaattgcttagaacccgggaggtgggggttgcagtgagctgagatcacacaactgtgctccagcctgggcaacagagtg

SEQ ID NO: 14018 - protein, 66 aa, Homo sapiens
MLCLHCPQGQSGMGPPEWISLDLDSASRRSLARASLGRCTCVRSTALKIWLVLISPLMCVRDTLCW

SEQ ID NO: 14019 - DNA, 284 bp, Homo sapiens
agggagctgatgccccttctccccttcctggacacattctctaagcctatacgtttctgtggagtaaatattgggattggggggaaagagggagcaacggcccatagccttggggttggacatctctagtgtagctgccacattgatttttctataatcacttggggtttgtacatttttggggggagagacacagatttttacactaatatatggacctagcttgaggcaattttaatcccctgcactaggcaggtaataataaaggttgagttttccacaac

SEQ ID NO: 14020 - protein, 39 aa, Homo sapiens [sequence omitted]

SEQ ID NO: 14021 - DNA, 1734 bp, Homo sapiens
attctcatcctcttcacttttccactcctccccttacctcccttctcttctgaattctccattctgggctcttgcctgtgaaatctttctttgctttccccatcttttcctcgcattttttcaccatctttccctcaatctccaggagccaatgcgagactttggctccgattaagcgacggcccgagactcggggtgcgcgaggaggatcgacagagtggtgatggagagcaccccttcaaggggactgaaccgagtacacctacaatgcaggaatctgcaggaattcttagggggcctgagccctggggtattggaccgattgtatgggcaccctgccacatgtctggctgtcttcagggagctcccatccttggctaagaactgggtgatgcggatgctctttctggagcagcctttgccacaggctgctgtagctctgtgggtaaagaaggaattcagcaaggctcaggaggaaagtacagggctgctgagcggcctccggatctggcacacacagctgctcccaggcgggctccagggcctcatcctcaaccccattttccgccagaacctccgcattgcccttctgggtggggggaaggcctggtctgatgacacaagtcagctgggaccagacaagcatgcccgggacgttccctcccttgacaagtacgccgaggagcgatgggaggtggtcttgcacttcatggtgggctcccccagtgcagctgtcagccaggacttggctcagctcctcagccaggctgggctcatgaagagtactgaacctggagagccgccctgcattacttccgctggcttccagttcctgttgctggacaccccggctcagctctggtactttatgttgcagtatttgcagacagcccagagccggggcatggacctggtagagattctctccttcctcttccagctcagcttctctactctgggcaaggattactctgtggaaggtatgagtgattctctgttgaacttcctgcaacatctgcgtgagtttgggcttgttttccagaggaagaggaaatctcggcgttactaccccacacgcctggccatcaatctctcatcaggtgtctctggagctgggggcactgtgcatcagccaggtttcattgtcgtggaaaccaattaccgactgtatgcctacacggagtcggagctgcagattgccctcattgccctcttctctgagatgctctatcggttccccaacatggtggtggcgcaggtgacccgggagagtgtgcagcaggcaatcgccagtggcatcacagcccagcagataatccatttcctaaggacaagagcccacccagtgatgctcaaacagacacctgtgctgccccccaccatcaccgaccagatccggctctgggagctggaaagggacagactccggttcactgagggtgtcctgtataaccagttcctgtcgcaagtggactttgagctgctgctggcccacgcgcgggagctgggcgtgctcgtgttcgagaactcggccaagcggctcatggtggtgaccccggccgggcacagcgacgtcaagcgcttttggaagcggcagaaacatagctcctgagagcgcgggacttggacacggacctcggcgggcgggactgggcggggcggggcatcagaactcaggtgttttttatttacgcgtcagggcttttcttgtttaataaagttatgatagctagc

SEQ ID NO: 14022 - protein, 462 aa, Homo sapiens; identical to SEQ ID NO: 1461

SEQ ID NO: 14023 - DNA, 478 bp, Homo sapiens
cttctcttctgaattctccattctgggctcttgcctgtgaaatctttctttgctttccccatcttttcctcgcattttttcaccatctttccctcaatctccaggagccaatgcgagactttggctccgattaagcgacggcccgagactcggggtgcgcgaggaggatcgacagagtggtgatggagagcaccccttcaaggggactgaaccgagcaccctgccacatgtctggctgtcttcagggagctcccatccttggctaagaactgggtgatgcggatgctctttctggagcagcctttgccacaggctgctgtagctctgtgggtaaagaaggaattcagcaagtaagtctcagccagatacaaatttctcaacagctacatttcccaaactgctgttccttggagcacttccaggaagtgttaatagatatatcacaaaacttaaaaataaatacatttgggaaactctg

SEQ ID NO: 14024 - protein, 78 aa, Homo sapiens
NLSLLSPSFPRIFSPSFPQSPGANARLWLRLSDGPRLGVREEDRQSGDGEHPFKGTEPSTLPHVWLSSGSSHPWLRTG

SEQ ID NO: 14025 - DNA, 552 bp, Homo sapiens
cttctcttctgaattctccattctgggctcttgcctgtgaaatctttctttgctttccccatcttttcctcgcattttttcaccatctttccctcaatctccaggagccaatgcgagactttggctccgattaagcgacggcccgagactcggggtgcgcgaggaggatcgacagagtggtgatggagagcaccccttcaaggggactgaaccgagtacacctacaatgcaggaatctgcaggaattcttagggggcctgagccctggggtattggaccgattgtatgggcaccctgccacatgtctggctgtcttcagggagctcccatccttggctaagaactgggtgatgcggatgctctttctggagcagcctttgccacaggctgctgtagctctgtgggtaaagaaggaattcagcaagtaagtctcagccagatacaaatttctcaacagctacatttcccaaactgctgttccttggagcacttccaggaagtgttaatagatatatcacaaaacttaaaaataaatacatttgggaaactctg

SEQ ID NO: 14026 - protein, 81 aa, Homo sapiens
MESTPSRGLNRVHLQCRNLQEFLGGLSPGVLDRLYGHPATCLAVFRELPSLAKNWVMRMLFLEQPLPQAAVALWVKKEFSK

SEQ ID NO: 14027 - DNA, 657 bp, Homo sapiens
agtctacagagctctctgacatttctcatgacacttgaaagaagggcttgagggagtctgggtgtgggggtggcctcctcatcctctttctatccctggctcagagtcggagctgcagattgccctcattgccctcttctctgagatgctctatcggttccccaacatggtggtggcgcaggtgacccgggagagtgtgcagcaggcaatcgccagtggcatcacagcccagcagataatccatttcctaaggacaagagcccacccagtgatgctcaaacagacacctgtgctgccccccaccatcaccgaccagatccggctctgggagctggaaagggacagactccggttcactgagggtgtcctgtataaccagttcctgtcgcaagtggactttgagctgctgctggcccacgcgcgggagctgggcgtgctcgtgttcgagaactcggccaagcggctcatggtggtgaccccggccgggcacagcgacgtcaagcgcttttggaagcggcagaaacatagctcctgagagcgcgggacttggacacggacctcggcgggcgggactgggcggggcggggcatcagaactcaggtgttttttatttacgcgtcagggcttttcttgtttaataaagttatgatagctagc

SEQ ID NO: 14028 - protein, 129 aa, Homo sapiens [sequence omitted]

SEQ ID NO: 14029 - DNA, 4070 bp, Homo sapiens
gccagctgctgcgcatgcgccggccggggccccgcccccatgcgccgcgcggctccagggccacgttccagggtcgggtttggtggattcctcagtccctgccgccgcggggcgccctgggatagcggcggggcctcctggtgagcgcgcgccggggcggcctccgggaagtgggagacgctgcgggtcctgggcccaggccttgggatgggcgggaaggcttggccgcgccgggctgtgggcactgcaggaggcccctgtgcaggtggagatcgccgcggccctggcgggactccttgctggctcttgggcgcgctgatgcccatcatctccctgagtttctgagccctatctctcatgtgtcagtggtcaccgccgaatccagacactccggccctgttccggaagagccctgatatccgtggctccatggcgctgtctgtcgataccatgcactctagctctcaaggaggaaaggttttgtggaagggaatagagacttggaataacagacctgtgctaattagagacaggaaagatggaacaaggggagtgacccttctccacccccatatcctaatgtgctctctctctatccagaacagatctcggcccctttccaaacactcctgatgcctcatttgcctctcgcctcttttcgaccaccattttgggggctgaggcactcacggggcctccccaggtttcactccgtttctacacagtcggagccccatggatctcccatctcccggaggaaccgtgaagccaaacagaagcgcctgcgagagaagcaggcgactctggaggctgagatagcaggggagagcaagtcacctgcagaatccattaaggcctggaggcctaaggagttagtattgtatgaaatccctacgaaacccggtgaaaagaaagatgtctctgggcccctgcctcctgcatacagcccccgatatgttgaggctgcctggtacccgtggtgggtacgagagggcttcttcaaaccagaatatcaggcccggctgccccaagctacaggggagaccttttccatgtgtatcccacctcccaatgtcactggctccctgcacattggccacgcactcacggtggccatacaggatgccctcgtgcgctggcaccggatgcgtggggatcaagtgctgtgggtccctggttcagatcatgcaggaattgctacacaagctgtggtggagaaacaactgtggaaggaacggggagtgaggagacatgagctgagccgggaggccttccttagggaggtgtggcagtggaaggaggcgaaaggtggagagatctgtgagcagctgcgagctctgggtgcctccctggactgggatcgagagtgttttaccatggatgttggctcctcagtggctgtgactgaagcttttgtgcggctctacaaggcggggttgctgtaccggaaccatcagcttgtcaactggtcatgtgctttaagatcagccatctcggacattgaggtggagaaccggcccctgcctggccacacacagcttcgactgcctggctgccccacccccgtgtcttttggcctcctattttctgttgccttccccgtggatggagagcctgatgcagaggttgtggtaggaaccacaaggccagagacgctgcctggagatgtggctgtggccgttcatccagacgactcgcgatacacacatctacacgggcgacagcttcgtcaccccttgatggggcagcctcttcccctcatcacagactatgctgttcagccacatgtgggcacgggggcagtgaaggtgactccagctcacagtcctgccgatgctgagatgggggcccgacatggcttgagccccttgaatgtcattgcggaggatgggaccatgacctccctctgcggggactggctgcagggtcttcaccggtttgtggcccgggaaaagataatgtctgtgctgagtgaatggggcctgttccggggcctccagaaccaccccatggtactgcccatctgcagccgttctggggatgtgatagaatacctgctgaagaaccagtggtttgtccgctgccaggaaatgggggcccgagctgccaaggctgtggagtcgggggccctggagctcagtccctccttccaccagaagaactggcagcactggttttcccatattggggactggtgtgtctcccggcagctgtggtggggccatcagattccagcctacctggttgtagaggaccatgcgcagggagaagaggactgttgggtggttgggcggtcagaggctgaggccagagaggtagcagcggaactgacagggaggccaggggcagagctgaccctggagagggatcctgatgtcctagacacatggttttcttctgccctgttccccttttctgccctgggctggccccaagagaccccagaccttgctcgtttctaccccctgtcacttttggaaacgggcagcgaccttctgctgttctgggtgggccgcatggtcatgttggggacccagctcacagggcagctgcccttcagcaaggtgcttcttcatcccatggttcgggacaggcagggccggaagatgagcaagtccctggggaatgtgctggacccaagagacatcatcagtggggtggagatgcaggtgctgcaggaaaagctgagaagcggaaatttggaccctgcagagctggccattgtggctgcagcacagaaaaaggactttcctcacgggatccctgagtgtgggacagatgccctgagattcacactctgctcccatggagttcaggcgggcgacttgcacctgtcagtctctgaggtccagagctgccgacatttctgcaacaagatctggaatgctcttcgctttatcctcaatgctttaggggagaaatttgtgccacagcctgctgaggagctgtctccctcctccccgatggatgcctggatcctgagccgccttgccctggctgcccaggagtgtgagcggggcttcctcacccgagagctctcgctcgtcactcatgccctgcaccacttctggcttcacaacctctgtgacgtctacctggaggctgtgaagcccgtgctgtggcactcgccccgccccctggggccccctcaggtcctgttctcctgcgctgacctcggcctccgcctcctggccccactgatgcccttcctggctgaagagctctggcagaggctgccccccaggcctggttgcccccctgcccccagcatctcggttgccccctaccccagcgcctgcagcttggagcactggcgccagccagagctggagcggcgcttctcccgggtccaagaggtcgtgcaggtgctaagggctctccgagccacgtaccagctcaccaaagcccggccccgagtgctgctgcagagctcagagcctggggaccagggcctcttcgaggccttcttggagcccctgggcaccctgggctactgtggggctgtgggcctgttacccccaggcgcagcagctccctccggctgggcccaggctccactcagtgacacggctcaagtctacatggagctgcagggcctggtggacccgcagatccagctacctctgttagccgcccgaaggtacaagttgcagaagcagcttgacagcctcacagccaggaccccatcagaaggggaggcagggactcagaggcaacaaaagctttcttccctccagctggaattgtcaaaactggacaaggcagcctctcacctccggcagctgatggatgagcctccagccccagggagcccggagctctaactcatcatccccatcagttttcctccctctcagacctgtctttgaggacaaacagatttgtcagctgtcagggtgcagtgggacgtcagagactatgtggtccatcgccttcattgtgtaaatgaggacacagactggcttggtcgcagtgactgtggtgtccttgagatgctcacattactgcccggcctgcctcccacctggaagtctgggaatgaggagattgagataaacttttgaaatccc

SEQ ID NO: 14030 - protein, 1063 aa, Homo sapiens
MPHLPLASFRPPFWGLRHSRGLPRFHSVSTQSEPHGSPISRRNREAKQKRLREKQATLEAEIAGESKSPAESIKAWRPKELVLYEIPTKPGEKKDVSGPLPPAYSPRYVEAAWYPWWVREGFFKPEYQARLPQATGETFSMCIPPPNVTGSLHIGHALTVAIQDALVRWHRMRGDQVLWVPGSDHAGIATQAVVEKQLWKERGVRRHELSREAFLREVWQWKEAKGGEICEQLRALGASLDWDRECFTMDVGSSVAVTEAFVRLYKAGLLYRNHQLVNWSCALRSAISDIEVENRPLPGHTQLRLPGCPTPVSFGLLFSVAFPVDGEPDAEVVVGTTRPETLPGDVAVAVHPDDSRYTHLHGRQLRHPLMGQPLPLITDYAVQPHVGTGAVKVTPAHSPADAEMGARHGLSPLNVIAEDGTMTSLCGDWLQGLHRFVAREKIMSVLSEWGLFRGLQNHPMVLPICSRSGDVIEYLLKNQWFVRCQEMGARAAKAVESGALELSPSFHQKNWQHWFSHIGDWCVSRQLWWGHQIPAYLVVEDHAQGEEDCWVVGRSEAEAREVAAELTGRPGAELTLERDPDVLDTWFSSALFPFSALGWPQETPDLARFYPLSLLETGSDLLLFWVGRMVMLGTQLTGQLPFSKVLLHPMVRDRQGRKMSKSLGNVLDPRDIISGVEMQVLQEKLRSGNLDPAELAIVAAAQKKDFPHGIPECGTDALRFTLCSHGVQAGDLHLSVSEVQSCRHFCNKIWNALRFILNALGEKFVPQPAEELSPSSPMDAWILSRLALAAQECERGFLTRELSLVTHALHHFWLHNLCDVYLEAVKPVLWHSPRPLGPPQVLFSCADLGLRLLAPLMPFLAEELWQRLPPRPGCPPAPSISVAPYPSACSLEHWRQPELERRFSRVQEVVQVLRALRATYQLTKARPRVLLQSSEPGDQGLFEAFLEPLGTLGYCGAVGLLPPGAAAPSGWAQAPLSDTAQVYMELQGLVDPQIQLPLLAARRYKLQKQLDSLTARTPSEGEAGTQRQQKLSSLQLELSKLDKAASHLRQLMDEPPAPGSPEL

SEQ ID NO: 14031 - DNA, 4327 bp, Homo sapiens
gccagctgctgcgcatgcgccggccggggccccgcccccatgcgccgcgcggctccagggccacgttccagggtcgggtttggtggattcctcagtccctgccgccgcggggcgccctgggatagcggcggggcctcctggtgagcgcgcgccggggcggcctccgggaagtgggagacgctgcgggtcctgggcccaggccttgggatgggcgggaaggcttggccgcgccgggctgtgggcactgcaggaggcccctgtgcaggtggagatcgccgcggccctggcgggactccttgctggctcttgggcgcgctgatgcccatcatctccctgagtttctgagccctatctctcatgtgtcagtggtcaccgccgaatccagacactccggccctgttccggaagagccctgatatccgtggctccatggcgctgtctgtcgataccatgcactctagctctcaaggaggaaaggttttgtggaagggaatagagacttggaataacagacctgtgctaattagagacaggaaagatggaacaaggggagtgacccttctccacccccatatcctaatgtgctctctctctatccagaacagatctcggcccctttccaaacactcctgatgcctcatttgcctctcgcctcttttcgaccaccattttgggggctgaggcactcacggggcctccccaggtttcactccgtttctacacagtcggagccccatggatctcccatctcccggaggaaccgtgaagccaaacagaagcgcctgcgagagaagcaggcgactctggaggctgagatagcaggggagagcaagtcacctgcagaatccattaaggcctggaggcctaaggagttagtattgtatgaaatccctacgaaacccggtgaaaagaaagatgtctctgggcccctgcctcctgcatacagcccccgatatgttgaggctgcctggtacccgtggtgggtacgagagggcttcttcaaaccagaatatcaggcccggctgccccaagctacaggggagaccttttccatgtgtatcccacctcccaatgtcactggctccctgcacattggccacgcactcacggtggccatacaggatgccctcgtgcgctggcaccggatgcgtggggatcaagtgctgtgggtccctggttcagatcatgcaggaattgctacacaagctgtggtggagaaacaactgtggaaggaacggggagtgaggagacatgagctgagccgggaggccttccttagggaggtgtggcagtggaaggaggcgaaaggtggagagatctgtgagcagctgcgagctctgggtgcctccctggactgggatcgagagtgttttaccatggatgttggctcctcagtggctgtgactgaagcttttgtgcggctctacaaggcggggttgctgtaccggaaccatcagcttgtcaactggtcatgtgctttaagatcagccatctcggacattgaggtggagaaccggcccctgcctggccacacacagcttcgactgcctggctgccccacccccgtgtcttttggcctcctattttctgttgccttccccgtggatggagagcctgatgcagaggttgtggtaggaaccacaaggccagagacgctgcctggagatgtggctgtggccgttcatccagacgactcgcgatacacacatctacacgggcgacagcttcgtcaccccttgatggggcagcctcttcccctcatcacagactatgctgttcagccacatgtgggcacgggggcagtgaaggtgactccagctcacagtcctgccgatgctgagatgggggcccgacatggcttgagccccttgaatgtcattgcggaggatgggaccatgacctccctctgcggggactggctgcagggtcttcaccggtttgtggcccgggaaaagataatgtctgtgctgagtgaatggggcctgttccggggcctccagaaccaccccatggtactgcccatctgcagccgttctggggatgtgatagaatacctgctgaagaaccagtggtttgtccgctgccaggaaatgggggcccgagctgccaaggctgtggagtcgggggccctggagctcagtccctccttccaccagaagaactggcagcactggttttcccatattggggactggtgtgtctcccggcagctgtggtggggccatcagattccagcctacctggttgtagaggaccatgcgcagggagaagaggactgttgggtggttgggcggtcagaggctgaggccagagaggtagcagcggaactgacagggaggccaggggcagagctgaccctggagagggatcctgatgtcctagacacatggttttcttctgccctgttccccttttctgccctgggctggccccaagagaccccagaccttgctcgtttctaccccctgtcacttttggaaacgggcagcgaccttctgctgttctgggtgggccgcatggtcatgttggggacccagctcacagggcagctgcccttcagcaaggtgcttcttcatcccatggttcgggacaggcagggccggaagatgagcaagtccctggggaatgtgctggacccaagagacatcatcagtggggtggagatgcaggtgctgcaggaaaagctgagaagcggaaatttggaccctgcagagctggccattgtggctgcagcacagaaaaaggactttcctcacgggatccctgagtgtgggacagatgccctgagattcacactctgctcccatggagttcaggcgggcgacttgcacctgtcagtctctgaggtccagagctgccgacatttctgcaacaagatctggaatgctcttcgctttatcctcaatgctttaggggagaaatttgtgccacagcctgctgaggagctgtctccctcctccccgatggatgcctggatcctgagccgccttgccctggctgcccaggagtgtgagcggggcttcctcacccgagagctctcgctcgtcactcatgccctgcaccacttctggcttcacaacctctgtgacgtctacctggaggctgtgaagcccgtgctgtggcactcgccccgccccctggggccccctcaggtcctgttctcctgcgctgacctcggcctccgcctcctggccccactgatgcccttcctggctgaagagctctggcagaggctgccccccaggcctggttgcccccctgcccccagcatctcggttgccccctaccccagcgcctgcagcttggagcactggcgccagccagagctggagcggcgcttctcccgggtccaagaggtcgtgcaggtgctaagggctctccgagccacgtaccagctcaccaaagcccggccccgagtgctgctgcagagctcagagcctggggaccagggcctcttcgaggccttcttggagcccctgggcaccctgggctactgtggggctgtgggcctgttacccccaggcgcagcagctccctccggctgggcccaggctccactcagtgacacggctcaagtctacatggagctgcagggcctggtggacccgcagatccagctacctctgttagccgcccgaaggtacaagttgcagaagcagcttgacagcctcacagccaggaccccatcagaaggggaggcagggactcagaggcaacaaaagctttcttccctccagctggaattgtcaaaactggacaaggcagcctctcacctccggcagctgatggatgagcctccagccccagggagcccggagctctaactcatcatccccatcagttttcctccctctcagacctgtctttgaggacaaacagatttgtcagctgtcagggtgcagtgggacgtcagagactatgtggtccatcgccttcattgtgtaaatgaggacacagactggcttggtcgcagtgactgtggtgtccttgagatgctcacattactgcccggcctgcctcccacctggaagtctgggaatgaggagattgagataaacttttgaaatcccaaacatgtctgtttatggctctttggtcccctttgctcccagtggtgacttttgtgcttctgagttgtcccctgagagcttggtctgggaaaagaggaggaggggtcctcgctggaggaagaggaactttctagtcatgggtagggtatgggcacagtggttccggttctacctactttctggactaactgacagtgccctggcttttgcaggctctttctcctccacttctcactaaatggaagcttccccgctcc

SEQ ID NO: 14032 - protein, 1063 aa, Homo sapiens; identical to SEQ ID NO: 14030

SEQ ID NO: 14033 - DNA, 3353 bp, Homo sapiens
cgcggctccagggccacgttccagggtcgggtttggtggattcctcagtccctgccgccgcggggcgccctgggatagcggcggggcctcctgaacagatctcggcccctttccaaacactcctgatgcctcatttgcctctcgcctcttttcgaccaccattttgggggctgaggcactcacggggcctccccaggtttcactccgtttctacacagtcggagccccatggatctcccatctcccggaggaaccgtgaagccaaacagaagcgcctgcgagagaagcaggcgactctggaggctgagatagcaggggagagcaagtcacctgcagaatccattaaggcctggaggcctaaggagttagtattgtatgaaatccctacgaaacccggtgaaaagaaagatgtctctgggcccctgcctcctgcatacagcccccgatatgttgaggctgcctggtacccgtggtgggtacgagagggcttcttcaaaccagaatatcaggcccggctgccccaagctacaggggagaccttttccatgtgtatcccacctcccaatgtcactggctccctgcacattggccacgcactcacggtggccatacaggatgccctcgtgcgctggcaccggatgcgtggggatcaagtgctgtgggtccctggttcagatcatgcaggaattgctacacaagctgtggtggagaaacaactgtggaaggaacggggagtgaggagacatgagctgagccgggaggccttccttagggaggtgtggcagtggaaggaggcgaaaggtggagagatctgtgagcagctgcgagctctgggtgcctccctggactgggatcgagagtgttttaccatggatgttggctcctcagtggctgtgactgaagcttttgtgcggctctacaaggcggggttgctgtaccggaaccatcagcttgtcaactggtcatgtgctttaagatcagccatctcggacattgaggtggagaaccggcccctgcctggccacacacagcctcttcccctcatcacagactatgctgttcagccacatgtgggcacgggggcagtgaaggtgactccagctcacagtcctgccgatgctgagatgggggcccgacatggcttgagccccttgaatgtcattgcggaggatgggaccatgacctccctctgcggggactggctgcagggtcttcaccggtttgtggcccgggaaaagataatgtctgtgctgagtgaatggggcctgttccggggcctccagaaccaccccatggtactgcccatctgcagccgttctggggatgtgatagaatacctgctgaagaaccagtggtttgtccgctgccaggaaatgggggcccgagctgccaaggctgtggagtcgggggccctggagctcagtccctccttccaccagaagaactggcagcactggttttcccatattggggactggtgtgtctcccggcagctgtggtggggccatcagattccagcctacctggttgtagaggaccatgcgcagggagaagaggactgttgggtggttgggcggtcagaggctgaggccagagaggtagcagcggaactgacagggaggccaggggcagagctgaccctggagagggatcctgatgtcctagacacatggttttcttctgccctgttccccttttctgccctgggctggccccaagagaccccagaccttgctcgtttctaccccctgtcacttttggaaacgggcagcgaccttctgctgttctgggtgggccgcatggtcatgttggggacccagctcacagggcagctgcccttcagcaaggtgcttcttcatcccatggttcgggacaggcagggccggaagatgagcaagtccctggggaatgtgctggacccaagagacatcatcagtggggtggagatgcaggtgctgcaggaaaagctgagaagcggaaatttggaccctgcagagctggccattgtggctgcagcacagaaaaaggactttcctcacgggatccctgagtgtgggacagatgccctgagattcacactctgctcccatggagttcaggcgggcgacttgcacctgtcagtctctgaggtccagagctgccgacatttctgcaacaagatctggaatgctcttcgctttatcctcaatgctttaggggagaaatttgtgccacagcctgctgaggagctgtctccctcctccccgatggatgcctggatcctgagccgccttgccctggctgcccaggagtgtgagcggggcttcctcacccgagagctctcgctcgtcactcatgccctgcaccacttctggcttcacaacctctgtgacgtctacctggaggctgtgaagcccgtgctgtggcactcgccccgccccctggggccccctcaggtcctgttctcctgcgctgacctcggcctccgcctcctggccccactgatgcccttcctggctgaagagctctggcagaggctgccccccaggcctggttgcccccctgcccccagcatctcggttgccccctaccccagcgcctgcagcttggagcactggcgccagccagagctggagcggcgcttctcccgggtccaagaggtcgtgcaggtgctaagggctctccgagccacgtaccagctcaccaaagcccggccccgagtgctgctgcagagctcagagcctggggaccagggcctcttcgaggccttcttggagcccctgggcaccctgggctactgtggggctgtgggcctgttacccccaggcgcagcagctccctccggctgggcccaggctccactcagtgacacggctcaagtctacatggagctgcagggcctggtggacccgcagatccagctacctctgttagccgcccgaaggtacaagttgcagaagcagcttgacagcctcacagccaggaccccatcagaaggggaggcagggactcagaggcaacaaaagctttcttccctccagctggaattgtcaaaactggacaaggcagcctctcacctccggcagctgatggatgagcctccagccccagggagcccggagctctaactcatcatccccatcagttttcctccctctcagacctgtctttgaggacaaacagatttgtcagctgtcagggtgcagtgggacgtcagagactatgtggtccatcgccttcattgtgtaaatgaggacacagactggcttggtcgcagtgactgtggtgtccttgagatgctcacattactgcccggcctgcctcccacctggaagtctgggaatgaggagattgagataaacttttgaaatccc

SEQ ID NO: 14034 - protein, 993 aa, Homo sapiens
MPHLPLASFRPPFWGLRHSRGLPRFHSVSTQSEPHGSPISRRNREAKQKRLREKQATLEAEIAGESKSPAESIKAWRPKELVLYEIPTKPGEKKDVSGPLPPAYSPRYVEAAWYPWWVREGFFKPEYQARLPQATGETFSMCIPPPNVTGSLHIGHALTVAIQDALVRWHRMRGDQVLWVPGSDHAGIATQAVVEKQLWKERGVRRHELSREAFLREVWQWKEAKGGEICEQLRALGASLDWDRECFTMDVGSSVAVTEAFVRLYKAGLLYRNHQLVNWSCALRSAISDIEVENRPLPGHTQPLPLITDYAVQPHVGTGAVKVTPAHSPADAEMGARHGLSPLNVIAEDGTMTSLCGDWLQGLHRFVAREKIMSVLSEWGLFRGLQNHPMVLPICSRSGDVIEYLLKNQWFVRCQEMGARAAKAVESGALELSPSFHQKNWQHWFSHIGDWCVSRQLWWGHQIPAYLVVEDHAQGEEDCWVVGRSEAEAREVAAELTGRPGAELTLERDPDVLDTWFSSALFPFSALGWPQETPDLARFYPLSLLETGSDLLLFWVGRMVMLGTQLTGQLPFSKVLLHPMVRDRQGRKMSKSLGNVLDPRDIISGVEMQVLQEKLRSGNLDPAELAIVAAAQKKDFPHGIPECGTDALRFTLCSHGVQAGDLHLSVSEVQSCRHFCNKIWNALRFILNALGEKFVPQPAEELSPSSPMDAWILSRLALAAQECERGFLTRELSLVTHALHHFWLHNLCDVYLEAVKPVLWHSPRPLGPPQVLFSCADLGLRLLAPLMPFLAEELWQRLPPRPGCPPAPSISVAPYPSACSLEHWRQPELERRFSRVQEVVQVLRALRATYQLTKARPRVLLQSSEPGDQGLFEAFLEPLGTLGYCGAVGLLPPGAAAPSGWAQAPLSDTAQVYMELQGLVDPQIQLPLLAARRYKLQKQLDSLTARTPSEGEAGTQRQQKLSSLQLELSKLDKAASHLRQLMDEPPAPGSPEL

SEQ ID NO: 14035 - DNA, 3426 bp, Homo sapiens
ctatgttggcagtgagaggtgaggatgatgaccagctgtaagtgtttaaatgtttatcttcagatgcagaggttgtggtaggaaccacaaggccagagacgctgcctggagatgtggctgtggccgttcatccagacgactcgcgatacacagtaatacccagtgcgctcctgcactctggcccgccccgccaatggccttctcttctcttgggttttaaatggtggctctttctctcttgcttctacttccttttcctgagacttctctcagtggttctgattggactccctcctcctcttatagtttttctgtagctcaggggttgacaaactggcccatggtcctaatccagcttgcggcctttttttttgagacagagtctcgctctgtcaccaaggctggagggcagtggtgtgatcttggctcactgcaacctccacctcctgggttcaagcaattctcctgcctcagcctcctgagtagctgggagcgtggcaccatgcccggcacgtgccaccacacccagctaattttttgtatttttacaaaaattagtaattaattttttttaagtaatgtaatttttaagtaatgttatttagtagagacggagtgtcactgtgttagccaggatagtctcgatctcctgacctcgtgatctgcccacctcggcctcccaaagtgctgggattacaggcgtgagccgccgcgcctggctgcttgcagcctttatattatctatggctgctattatataccctctccagctctgctgcagtggcataatagagtaattgtgctgagaatgaatttgtctctaggcccaaaagcctaaaatatctacattctggccccttaagagtttgctgaccttgctctagcttgctaccttccactttctaccttcttattcctggggttctcacgccccagcccagacccttccaaccctcacaggtgcctgtccttgatccctctcccttcccttcagcatctacacgggcgacagcttcgtcaccccttgatggggcagcctcttcccctcatcacagactatgctgttcagccacatgtgggcacgggggcagtgaaggtgactccagctcacagtcctgccgatgctgagatgggggcccgacatggcttgagccccttgaatgtcattgcggaggatgggaccatgacctccctctgcggggactggctgcagggtcttcaccggtttgtggcccgggaaaagataatgtctgtgctgagtgaatggggcctgttccggggcctccagaaccaccccatggtactgcccatctgcagccgttctggggatgtgatagaatacctgctgaagaaccagtggtttgtccgctgccaggaaatgggggcccgagctgccaaggctgtggagtcgggggccctggagctcagtccctccttccaccagaagaactggcagcactggttttcccatattggggactggtgtgtctcccggcagctgtggtggggccatcagattccagcctacctggttgtagaggaccatgcgcagggagaagaggactgttgggtggttgggcggtcagaggctgaggccagagaggtagcagcggaactgacagggaggccaggggcagagctgaccctggagagggatcctgatgtcctagacacatggttttcttctgccctgttccccttttctgccctgggctggccccaagagaccccagaccttgctcgtttctaccccctgtcacttttggaaacgggcagcgaccttctgctgttctgggtgggccgcatggtcatgttggggacccagctcacagggcagctgcccttcagcaagtatggaggccagagatcccaaggcacctccaaggaaacccccctctgttgacccctccctgcccccaggtgcttcttcatcccatggttcgggacaggcagggccggaagatgagcaagtccctggggaatgtgctggacccaagagacatcatcagtggggtggagatgcaggtgctgcaggaaaagctgagaagcggaaatttggaccctgcagagctggccattgtggctgcagcacagaaaaaggactttcctcacgggatccctgagtgtgggacagatgccctgagattcacactctgctcccatggagttcaggcgggcgacttgcacctgtcagtctctgaggtccagagctgccgacatttctgcaacaagatctggaatgctcttcgctttatcctcaatgctttaggggagaaatttgtgccacagcctgctgaggagctgtctccctcctccccgatggatgcctggatcctgagccgccttgccctggctgcccaggagtgtgagcggggcttcctcacccgagagctctcgctcgtcactcatgccctgcaccacttctggcttcacaacctctgtgacgtctacctggaggctgtgaagcccgtgctgtggcactcgccccgccccctggggccccctcaggtcctgttctcctgcgctgacctcggcctccgcctcctggccccactgatgcccttcctggctgaagagctctggcagaggctgccccccaggcctggttgcccccctgcccccagcatctcggttgccccctaccccagcgcctgcagcttggagcactggcgccagccagagctggagcggcgcttctcccgggtccaagaggtcgtgcaggtgctaagggctctccgagccacgtaccagctcaccaaagcccggccccgagtgctgctgcagagctcagagcctggggaccagggcctcttcgaggccttcttggagcccctgggcaccctgggctactgtggggctgtgggcctgttacccccaggcgcagcagctccctccggctgggcccaggctccactcagtgacacggctcaagtctacatggagctgcagggcctggtggacccgcagatccagctacctctgttagccgcccgaaggtacaagttgcagaagcagcttgacagcctcacagccaggaccccatcagaaggggaggcagggactcagaggcaacaaaagctttcttccctccagctggaattgtcaaaactggacaaggcagcctctcacctccggcagctgatggatgagcctccagccccagggagcccggagctctaactcatcatccccatcagttttcctccctctcagacctgtctttgaggacaaacagatttgtcagctgtcagggtgcagtgggacgtcagagactatgtggtccatcgccttcattgtgtaaatgaggacacagactggcttggtcgcagtgactgtggtgtccttgagatgctcacattactgcccggcctgcctcccacctggaagtctgggaatgaggagattgagataaacttttgaaatccc

SEQ ID NO: 14036 - protein, 501 aa, Homo sapiens
MVFFCPVPLFCPGLAPRDPRPCSFLPPVTFGNGQRPSAVLGGPHGHVGDPAHRAAALQQVWRPEIPRHLQGNPPLLTPPCPQVLLHPMVRDRQGRKMSKSLGNVLDPRDIISGVEMQVLQEKLRSGNLDPAELAIVAAAQKKDFPHGIPECGTDALRFTLCSHGVQAGDLHLSVSEVQSCRHFCNKIWNALRFILNALGEKFVPQPAEELSPSSPMDAWILSRLALAAQECERGFLTRELSLVTHALHHFWLHNLCDVYLEAVKPVLWHSPRPLGPPQVLFSCADLGLRLLAPLMPFLAEELWQRLPPRPGCPPAPSISVAPYPSACSLEHWRQPELERRFSRVQEVVQVLRALRATYQLTKARPRVLLQSSEPGDQGLFEAFLEPLGTLGYCGAVGLLPPGAAAPSGWAQAPLSDTAQVYMELQGLVDPQIQLPLLAARRYKLQKQLDSLTARTPSEGEAGTQRQQKLSSLQLELSKLDKAASHLRQLMDEPPAPGSPEL

SEQ ID NO: 14037 - DNA, 3683 bp, Homo sapiens
ctatgttggcagtgagaggtgaggatgatgaccagctgtaagtgtttaaatgtttatcttcagatgcagaggttgtggtaggaaccacaaggccagagacgctgcctggagatgtggctgtggccgttcatccagacgactcgcgatacacagtaatacccagtgcgctcctgcactctggcccgccccgccaatggccttctcttctcttgggttttaaatggtggctctttctctcttgcttctacttccttttcctgagacttctctcagtggttctgattggactccctcctcctcttatagtttttctgtagctcaggggttgacaaactggcccatggtcctaatccagcttgcggcctttttttttgagacagagtctcgctctgtcaccaaggctggagggcagtggtgtgatcttggctcactgcaacctccacctcctgggttcaagcaattctcctgcctcagcctcctgagtagctgggagcgtggcaccatgcccggcacgtgccaccacacccagctaattttttgtatttttacaaaaattagtaattaattttttttaagtaatgtaatttttaagtaatgttatttagtagagacggagtgtcactgtgttagccaggatagtctcgatctcctgacctcgtgatctgcccacctcggcctcccaaagtgctgggattacaggcgtgagccgccgcgcctggctgcttgcagcctttatattatctatggctgctattatataccctctccagctctgctgcagtggcataatagagtaattgtgctgagaatgaatttgtctctaggcccaaaagcctaaaatatctacattctggccccttaagagtttgctgaccttgctctagcttgctaccttccactttctaccttcttattcctggggttctcacgccccagcccagacccttccaaccctcacaggtgcctgtccttgatccctctcccttcccttcagcatctacacgggcgacagcttcgtcaccccttgatggggcagcctcttcccctcatcacagactatgctgttcagccacatgtgggcacgggggcagtgaaggtgactccagctcacagtcctgccgatgctgagatgggggcccgacatggcttgagccccttgaatgtcattgcggaggatgggaccatgacctccctctgcggggactggctgcagggtcttcaccggtttgtggcccgggaaaagataatgtctgtgctgagtgaatggggcctgttccggggcctccagaaccaccccatggtactgcccatctgcagccgttctggggatgtgatagaatacctgctgaagaaccagtggtttgtccgctgccaggaaatgggggcccgagctgccaaggctgtggagtcgggggccctggagctcagtccctccttccaccagaagaactggcagcactggttttcccatattggggactggtgtgtctcccggcagctgtggtggggccatcagattccagcctacctggttgtagaggaccatgcgcagggagaagaggactgttgggtggttgggcggtcagaggctgaggccagagaggtagcagcggaactgacagggaggccaggggcagagctgaccctggagagggatcctgatgtcctagacacatggttttcttctgccctgttccccttttctgccctgggctggccccaagagaccccagaccttgctcgtttctaccccctgtcacttttggaaacgggcagcgaccttctgctgttctgggtgggccgcatggtcatgttggggacccagctcacagggcagctgcccttcagcaagtatggaggccagagatcccaaggcacctccaaggaaacccccctctgttgacccctccctgcccccaggtgcttcttcatcccatggttcgggacaggcagggccggaagatgagcaagtccctggggaatgtgctggacccaagagacatcatcagtggggtggagatgcaggtgctgcaggaaaagctgagaagcggaaatttggaccctgcagagctggccattgtggctgcagcacagaaaaaggactttcctcacgggatccctgagtgtgggacagatgccctgagattcacactctgctcccatggagttcaggcgggcgacttgcacctgtcagtctctgaggtccagagctgccgacatttctgcaacaagatctggaatgctcttcgctttatcctcaatgctttaggggagaaatttgtgccacagcctgctgaggagctgtctccctcctccccgatggatgcctggatcctgagccgccttgccctggctgcccaggagtgtgagcggggcttcctcacccgagagctctcgctcgtcactcatgccctgcaccacttctggcttcacaacctctgtgacgtctacctggaggctgtgaagcccgtgctgtggcactcgccccgccccctggggccccctcaggtcctgttctcctgcgctgacctcggcctccgcctcctggccccactgatgcccttcctggctgaagagctctggcagaggctgccccccaggcctggttgcccccctgcccccagcatctcggttgccccctaccccagcgcctgcagcttggagcactggcgccagccagagctggagcggcgcttctcccgggtccaagaggtcgtgcaggtgctaagggctctccgagccacgtaccagctcaccaaagcccggccccgagtgctgctgcagagctcagagcctggggaccagggcctcttcgaggccttcttggagcccctgggcaccctgggctactgtggggctgtgggcctgttacccccaggcgcagcagctccctccggctgggcccaggctccactcagtgacacggctcaagtctacatggagctgcagggcctggtggacccgcagatccagctacctctgttagccgcccgaaggtacaagttgcagaagcagcttgacagcctcacagccaggaccccatcagaaggggaggcagggactcagaggcaacaaaagctttcttccctccagctggaattgtcaaaactggacaaggcagcctctcacctccggcagctgatggatgagcctccagccccagggagcccggagctctaactcatcatccccatcagttttcctccctctcagacctgtctttgaggacaaacagatttgtcagctgtcagggtgcagtgggacgtcagagactatgtggtccatcgccttcattgtgtaaatgaggacacagactggcttggtcgcagtgactgtggtgtccttgagatgctcacattactgcccggcctgcctcccacctggaagtctgggaatgaggagattgagataaacttttgaaatcccaaacatgtctgtttatggctctttggtcccctttgctcccagtggtgacttttgtgcttctgagttgtcccctgagagcttggtctgggaaaagaggaggaggggtcctcgctggaggaagaggaactttctagtcatgggtagggtatgggcacagtggttccggttctacctactttctggactaactgacagtgccctggcttttgcaggctctttctcctccacttctcactaaatggaagcttccccgctcc

SEQ ID NO: 14038 - protein, 501 aa, Homo sapiens; identical to SEQ ID NO: 14036

SEQ ID NO: 14039 - DNA, 2225 bp, Homo sapiens
tgttcagccacatgtgggcacgggggcagtgaaggtgactccagctcacagtcctgccgatgctgagatgggggcccgacatggcttgagccccttgaatgtcattgcggaggatgggaccatgacctccctctgcggggactggctgcagggtcttcaccggtttgtggcccgggaaaagataatgtctgtgctgagtgaatggggcctgttccggggcctccagaaccaccccatggtactgcccatctgcagccgttctggggatgtgatagaatacctgctgaagaaccagtggtttgtccgctgccaggaaatgggggcccgagctgccaaggctgtggagtcgggggccctggagctcagtccctccttccaccagaagaactggcagcactggttttcccatattggggactggtgtgtctcccggcagctgtggtggggccatcagattccagcctacctggttgtagaggaccatgcgcagggagaagaggactgttgggtggttgggcggtcagaggctgaggccagagaggtagcagcggaactgacagggaggccaggggcagagctgaccctggagagggaccccagaccttgctcgtttctaccccctgtcacttttggaaacgggcagcgaccttctgctgttctgggtgggccgcatggtcatgttggggacccagctcacagggcagctgcccttcagcaaggtgcttcttcatcccatggttcgggacaggcagggccggaagatgagcaagtccctggggaatgtgctggacccaagagacatcatcagtggggtggagatgcaggtgctgcaggaaaagctgagaagcggaaatttggaccctgcagagctggccattgtggctgcagcacagaaaaaggactttcctcacgggatccctgagtgtgggacagatgccctgagattcacactctgctcccatggagttcaggcgggcgacttgcacctgtcagtctctgaggtccagagctgccgacatttctgcaacaagatctggaatgctcttcgctttatcctcaatgctttaggggagaaatttgtgccacagcctgctgaggagctgtctccctcctccccgatggatgcctggatcctgagccgccttgccctggctgcccaggagtgtgagcggggcttcctcacccgagagctctcgctcgtcactcatgccctgcaccacttctggcttcacaacctctgtgacgtctacctggaggctgtgaagcccgtgctgtggcactcgccccgccccctggggccccctcaggtcctgttctcctgcgctgacctcggcctccgcctcctggccccactgatgcccttcctggctgaagagctctggcagaggctgccccccaggcctggttgcccccctgcccccagcatctcggttgccccctaccccagcgcctgcagcttggagcactggcgccagccagagctggagcggcgcttctcccgggtccaagaggtcgtgcaggtgctaagggctctccgagccacgtaccagctcaccaaagcccggccccgagtgctgctgcagagctcagagcctggggaccagggcctcttcgaggccttcttggagcccctgggcaccctgggctactgtggggctgtgggcctgttacccccaggcgcagcagctccctccggctgggcccaggctccactcagtgacacggctcaagtctacatggagctgcagggcctggtggacccgcagatccagctacctctgttagccgcccgaaggtacaagttgcagaagcagcttgacagcctcacagccaggaccccatcagaaggggaggcagggactcagaggcaacaaaagctttcttccctccagctggaattgtcaaaactggacaaggcagcctctcacctccggcagctgatggatgagcctccagccccagggagcccggagctctaactcatcatccccatcagttttcctccctctcagacctgtctttgaggacaaacagatttgtcagctgtcagggtgcagtgggacgtcagagactatgtggtccatcgccttcattgtgtaaatgaggacacagactggcttggtcgcagtgactgtggtgtccttgagatgctcacattactgcccggcctgcctcccacctggaagtctgggaatgaggagattgagataaacttttgaaatccc

SEQ ID NO: 14040 - protein, 435 aa, Homo sapiens
MVMLGTQLTGQLPFSKVLLHPMVRDRQGRKMSKSLGNVLDPRDIISGVEMQVLQEKLRSGNLDPAELAIVAAAQKKDFPHGIPECGTDALRFTLCSHGVQAGDLHLSVSEVQSCRHFCNKIWNALRFILNALGEKFVPQPAEELSPSSPMDAWILSRLALAAQECERGFLTRELSLVTHALHHFWLHNLCDVYLEAVKPVLWHSPRPLGPPQVLFSCADLGLRLLAPLMPFLAEELWQRLPPRPGCPPAPSISVAPYPSACSLEHWRQPELERRFSRVQEVVQVLRALRATYQLTKARPRVLLQSSEPGDQGLFEAFLEPLGTLGYCGAVGLLPPGAAAPSGWAQAPLSDTAQVYMELQGLVDPQIQLPLLAARRYKLQKQLDSLTARTPSEGEAGTQRQQKLSSLQLELSKLDKAASHLRQLMDEPPAPGSPEL

SEQ ID NO: 14041 - DNA, 639 bp, Homo sapiens
cagggcctggtggacccgcagatccagctacctctgttagccgcccgaaggtacaagttgcagaagcagcttgacagcctctcacctccggcagctgatggatgagcctccagccccagggagcccggagctctaactcatcatccccatcagttttcctccctctcagacctgtctttgaggacaaacagatttgtcagctgtcagggtgcagtgggacgtcagagactatgtggtccatcgccttcattgtgtaaatgaggacacagactggcttggtcgcagtgactgtggtgtccttgagatgctcacattactgcccggcctgcctcccacctggaagtctgggaatgaggagattgagataaacttttgaaatcccaaacatgtctgtttatggctctttggtcccctttgctcccagtggtgacttttgtgcttctgagttgtcccctgagagcttggtctgggaaaagaggaggaggggtcctcgctggaggaagaggaactttctagtcatgggtagggtatgggcacagtggttccggttctacctactttctggactaactgacagtgccctggcttttgcaggctctttctcctccacttctcactaaatggaagcttccccgctcc

SEQ ID NO: 14042 - protein, 77 aa, Homo sapiens
MSVYGSLVPFAPSGDFCASELSPESLVWEKRRRGPRWRKRNFLVMGRVWAQWFRFYLLSGLTDSALAFAGSFSSTSH

SEQ ID NO: 14043 - DNA, 626 bp, Homo sapiens
cgcagtggccactatggggtctgggctgccccttgtcctcctcttgaccctccttggcagctcacatggaacaggtgagggctagagggcaggactcctgggtccctgtggcaagaagaggccagagaaaaggggtgggacttcatggtccctgagagtgacagagacaccccagtcctgagcttccaagaggctctggaggggcattgctggggaagaggaactgtgccggggagcgtgagcaggaaggttctgtgtctccggaggaatcagccctgactgctgggtcctaagctgtacttctggatccgcagggccgggtatgactttgcaactgaagctgaaggagtcttttctgacaaattcctcctatgagtccagcttcctggaattgcttgaaaagctctgcctcctcctccatctcccttcagggaccagcgtcaccctccaccatgcaagatctcaacaccatgttgtctgcaacacatgacagccattgaagcctgtgtccttcttggcccgggcttttgggccggggatgcaggaggcaggccccgaccctgtctttcagcaggcccccaccctcctgagcggcaataaataaaattcggtatgctgaattcaat

SEQ ID NO: 14044 - protein, 55 aa, Homo sapiens
MTLQLKLKESFLTNSSYESSFLELLEKLCLLLHLPSGTSVTLHHARSQHHVVCNT

SEQ ID NO: 14045 - DNA, 452 bp, Homo sapiens
ggggtgtagaaacaggcctgttaaggagaggccaccgggacttcagtgtctcctccatcccaggagcgcagtggccactatggggtctgggctgccccttgtcctcctcttgaccctccttggcagctcacatggaacagggccgggtatgactttgcaactgaagctgaaggagtcttttctgacaaattcctcctatgagtccagcttcctggaattgcttgaaaagctctgcctcctcctccatctcccttcagggaccagcgtcaccctccaccatgcaagatctcaacaccatgttgtctgcaacacatgacagccattgaagcctgtgtccttcttggcccgggcttttgggccggggatgcaggaggcaggccccgaccctgtctttcagcaggcccccaccctcctgagcggcaataaataaaattcggtatgctgaattcaat

SEQ ID NO: 14046 - protein, 78 aa, Homo sapiens; identical to SEQ ID NO: 1465

SEQ ID NO: 14047 - DNA, 605 bp, Homo sapiens
tgctgtttgattctggatggagttacgtttaggagcctggcagcaaactggggcacctgttcaattagtgatgatgccatactctgtcccggaaatagaaattgtgagtccggttcctcatccaggaaaggggcagagcatggaagagccagggctgggcgcctactccaagatcaccgtggggaagggatctggcccatgccaagattctgctgctccatcaggtctcttaagtgctctgaagctccatgttctcgactgtaaataaccatgatgctgactgcaccagcttaatgtgaggattaaaggaagtatggaccatggaagactctggagcacagaagctatttaaatgtttgttgaatccacattgtagtctctgaaataatctcgtgctttgccctgtccttctcctggtagtaaggggagcctgagcagtagccctacccccctgcctgctccatccacctctcacctgctgtggccaccttcttgaaaacagcagcctctgcattcctgggccactttctctgctgtgttttaataacacagcactcatcactttctgatatgtgataaatacaattaaatttccacaatggcaa

SEQ ID NO: 14048 - protein, 83 aa, Homo sapiens
MELRLGAWQQTGAPVQLVMMPYSVPEIEIVSPVPHPGKGQSMEEPGLGAYSKITVGKGSGPCQDSAAPSGLLSALKLHVLDCK

SEQ ID NO: 14049 - DNA, 214 bp, Homo sapiens
ggacaaaggaccccatttgccaatgagaaaaccacatcatcctcagcagagcctaagaaaatggagacaggactcctttggccaatgagaagaccacgccatctctagcagagcctacagaaaatggacaaaggaccccatttgccaatgagaagaccacatcatcctcagcagagcctacagaacacgaagaaaggactccactggccaatga

SEQ ID NO: 14050 - protein, 51 aa, Homo sapiens
ENGDRTPLANEKTTPSLAEPTENGQRTPFANEKTTSSSAEPTEHEERTPLA

SEQ ID NO: 14051 - DNA, 2947 bp, Homo sapiens
tacagaaaatggaaaaaggaccccatttgccaatgagaagaccacatcatcctcagcagagcctacagaacacgcagaaaggactccactggccaatgagaacaccacatcatccccagcagagcctacagaaaatagagaaaggacagccaatgagaagaccacacaattcccagcagagcctacagaaaatagagaaagcacagccaatgagaagaccacaccattcccagcagagcctacagaaaatagagaatggacagccaatgagaacaccacactatccccagcagagcctacagaacatgaagaaatgaccccattggccaatgagaagaccacactatccccagcagagcctacagaaaatggagaaaggaccccatttaccaatgagaagaccacaccatcctcagcagagcctacagaacatggagaaaggaccccactggccaatgagatcaccacaccatcccgagcagagcctacagaacatggagaaaggatagccaatgagaaggccacaccatccccagcaaagcctacagaacatggagaaacgacagtcaatgaggacaccacaccatcctcagcagagcctacagaaaatggagaaaggaccccactggccaatgagaacaccacaacatccccaacagagtctacagaacatggagaaaggacagccaatgagaagaccacaccatccccagcagagcctacagaacatggagaaaggacaccatcagccaatgagaagaccataccatctccagcaaagcctacagaacacgaagaaatgaccccatcggccaatgagaacaccacaccatccccagtaaagcctacagaacatggagaaaagactacattggccaatgagaagatcacactatccccagaagggcctacagaacatggagcaaaaactacgtcggccaatgagaagatcacaccatccctagcaaagcctacagaacatggagaaaggaccacatcacccaatgacaagatcacctcatctgcagcagagtctacagaacatagagatagggctacatcagccaatgtgatcacaccagccccagcagagcctataaaacatgcaaaaaggaccacattggcccatgagaagatgacacaagtcacagaaaagtccacagaacacccagaaaagaccacgtcaaccacagagaaaaccacaagaaccccagaaaagcctacgctatactcagagaagaccatatgcaccaaagggaaaaacacaccagtcccagaaaagcctacagaaaacctggggaacaccacactgaccactgagaccataaaagccccagtaaagtccacagaaaacccagaaaaaacagcagcagtcacaaagactataaaaccttcagtcaaggtcacaggagacaaatctctcactactacctcttctcatctaaataaaactgaagttactcatcaggtgcccactggttctttcaccctcattacatctagaacgaagctgagttctatcacatcagaagccacaggaaacgagagccatccatacctcaataaagatggctcacagaaaggtatccacgctggacagatgggagagaatgattcattccctgcatgggccatagttattgtggtcctggtggctgtgattctcctcctggtgttccttggcctgatcttcttggtctcctatatgatgcggacacgccgcacactaacccagaacacccagtacaatgatgcagaggatgagggtggccccaattcctacccggtctacctgatggagcagcagaatcttggcatgggccagatcccttccccacggtgatcttggagtaggcgcccagccctggctcttccatgctctgcccctttcctggatgaggaaccggactcacaatttctatttccgggactacaggaagggcagagaatactgacggttaccagtattaacccttcatctgttcttgaaactggttggggaatgaggtgataagcaaggagggtgtaagtttaggggacaaagaagaaagaatgaataatacgagcagacattctctgtagaaggtaatggtctgagaatgaaaaggtgtttgatggacatgttgtgggggcaccaatgcagaacactgcactgagtcctaaaggaaggacaggagccttataggcaatgccccagactgacttgtgagtggggtttatggggaaagggagggactgagggcagagtctctgggtttcaggacagcattatgttatttccattcactattacttaagagtttgtgtgtaaacaggctcatctctgagttctcaggacccttgcccccacccccatttttttaatgaaaaaaaaaaacaaaaaaaacggatccaagaagaaaagagaatttatttccttctccactctctccatgccctggagaaaaaaaagtccagaagaaatcataaatatctctcatctacatggttgcttcctcttcctcccaaatcccttagttttcctaaatgtctacagtggacgccctgttggtttggcttgctgggttgtgggtggacacgcaaggaggggatttttatttggccagcagtctcacccactgatctccaccccagaccttccctgattggtgtctcagcatttattttcctgtctcttccaccaaaagccagctgtagctttatctcgtaaaagttacccatcttctctactgtccccattctctctcctcccaccttcaccccagattcaagttttcctccttgtaggcatttcatctgtgtgtgttttctggattttctctctctcttcttatggccatttcaccttattactgattgggtagagggggaaaaggagaatgatgatgatagtttccttctgtctattgaccttttttataataaagtataacatgtttataaaggg

SEQ ID NO: 14052 - protein, 509 aa, Homo sapiens
MTPLANEKTTLSPAEPTENGERTPFTNEKTTPSSAEPTEHGERTPLANEITTPSRAEPTEHGERIANEKATPSPAKPTEHGETTVNEDTTPSSAEPTENGERTPLANENTTTSPTESTEHGERTANEKTTPSPAEPTEHGERTPSANEKTIPSPAKPTEHEEMTPSANENTTPSPVKPTEHGEKTTLANEKITLSPEGPTEHGAKTTSANEKITPSLAKPTEHGERTTSPNDKITSSAAESTEHRDRATSANVITPAPAEPIKHAKRTTLAHEKMTQVTEKSTEHPEKTTSTTEKTTRTPEKPTLYSEKTICTKGKNTPVPEKPTENLGNTTLTTETIKAPVKSTENPEKTAAVTKTIKPSVKVTGDKSLTTTSSHLNKTEVTHQVPTGSFTLITSRTKLSSITSEATGNESHPYLNKDGSQKGIHAGQMGENDSFPAWAIVIVVLVAVILLLVFLGLIFLVSYMMRTRRTLTQNTQYNDAEDEGGPNSYPVYLMEQQNLGMGQIPSPR

SEQ ID NO: 14053 - DNA, 766 bp, Homo sapiens
agagaaagaggcaactacattgcctggaggaagcctaaggaacccaggcatccagctgcccacgcctgagtccaagattcttcccaggaacacaaacgtaggagacccacgctcctggaagcaccagcctttatctcttcaccttcaagtcccctttctcaagaatcctctgttctttgccctctaaagtcttggtacatctaggacccaggcatcttgctttccagccacaaagagacagatgaagatgcagaaaggaaatgttctccttatgtttggtctactattgcatttagaagctggtgagtgattttatttaaaatcgggtggtctgagaacctttgaggagttgggagagaaatgtgaccactactggggccagctctgcttctcttccatagagtgaggatcatcattttactcgaatcacttcagcctaacaagcaacaaattccaatgagactagcacctctgccaacactggatccagtgtgatctccagtggagccagcacagccaccaactctgggtccagtgtgacctccagtggggtcagcacagccaccatctcagggtccagcgtgacctccaatggggtcagcatagtcaccaactctgagttccatacaacctccagtgggatcagcacagccaccaactctgagttcagcacagtgtccagtgggatcagcatagccaccaactctgagtccagcacaacctccagtggggccagcacagccaccaactctgagtccagcacacc

SEQ ID NO: 14054 - protein, 107 aa, Homo sapiens
QATNSNETSTSANTGSSVISSGASTATNSGSSVTSSGVSTATISGSSVTSNGVSIVTNSEFHTTSSGISTATNSEFSTVSSGISIATNSESSTTSSGASTATNSESS

SEQ ID NO: 14055 - DNA, 3555 bp, Homo sapiens
agagaaagaggcaactacattgcctggaggaagcctaaggaacccaggcatccagctgcccacgcctgagtccaagattcttcccaggaacacaaacgtaggagacccacgctcctggaagcaccagcctttatctcttcaccttcaagtcccctttctcaagaatcctctgttctttgccctctaaagtcttggtacatctaggacccaggcatcttgctttccagccacaaagagacagatgaagatgcagaaaggaaatgttctccttatgtttggtctactattgcatttagaagctgcaacaaattccaatgagactagcacctctgccaacactggatccagtgtgatctccagtggagccagcacagccaccaactctgggtccagtgtgacctccagtggggtcagcacagccaccatctcagggtccagcgtgacctccaatggggtcagcatagtcaccaactctgagttccatacaacctccagtgggatcagcacagccaccaactctgagttcagcacagtgtccagtgggatcagcatagccaccaactctgagtccagcacaacctccagtggggccagcacagccaccaactctgagtccagcacaccctccagtggggccagcacagccaccaactctgactccagcacaacctccagtggggctagcacagccaccaactctgactccagcacaacctccagtgaggccagcacagccaccaactctgagtccagcacaacctccagtggggccagcacagccaccaactctgagtccagcacagtgtccagtagggccagcactgccaccaactctgagtccagcacaacctccagtggggccagcacagccaccaactctgagtccagaacgacctccaatggggctggcacagccaccaactctgagtccagcacgacctccagtggggccagcacagccaccaactctgagtccagcacaccctccagtggggccggcacagccaccaactctgagtccagcacgacctccatggggccaacacagccaccaactctgagtccagtacgacctccagtggggccaacacagccaccaactctgactccagcacaacctccagtggggccagcacagccaccaactctgagtccagcacgacctccagtggggccagcacagccaccaactctgagtccagcacaacctccagtggggccagcacagccaccaactctgggtccagcacgacctccagtgggaccagcacagccaccaactctgagtccagcacagtgtccagtggggccagcacagccaccacctctgagtccagcacgacctccagtggggccagcacagccaccaactctgagtccagcacagtgtccagtggggccagcactgccaccaattctgagtccagcacaacctccagtggggccaacacagccaccaactctgggtccagtgtgacctctgcaggctctggaacagcagctctgactggaatgcacacaacttcccatagtgcatctactgcagtgagtgaggcgaagcctggtgggtccctggtgccgtgggaaatcttcctcatcaccctggtctcggttgtggcggccgtggggctctttgctgggctcttcttctgtgtgagaaacagcctgtccctgagaaacacctttaacacagctgtctaccaccctcatggcctcaaccatggccttggtccaggccctggagggaatcatggagccccccacaggcccaggtggagtcctaactggttctggaggagaccagtatcctcgatagccatggagatgagcgggaggaacagcgggccctgagcagccccggaagcaagtgccgcattcttcaggaaggaagagacctgggcacccaagacctggtttcctttcattcatcccaggagacccctcccagctttgtttgagatcctgaaaatcttgaagaaggtattcctcacctttcttgcctttaccagacactggaaagagaatactatattgctcatttagctaagaaataaatacatctcatctaacacacacgacaaagagaagctgtgcgtgccccggggtgggtatctagctctgagatgaactcagttataggagaaaacctccatgctggactccatctggcattcaaaatctccacagtaaaatccaaagacctcattcttatctgtgtgtctgcattttctaatcctttttgccccaggcaaggtccctgtatctctgagacaccccgattggctggagaattgacttgggagagataaggagggagggcgggtgccagcatgctatgggctcctgcgtgaggcctgtggtacacagagattaggttgtgatacatgaagagccaagagcaggatgaggtggaggcgttacaactacctgctctgtgtgtggggggggaggggggaggggggtacgcatattcacttgaagtcgaggttcccagggcatttccatgtgctccaggcctgactacccatcagggtggaggagctggtgacactcatctccctgagtgctccctggtttcccaagggaaagactttctggcctgctgaggtcgaatcttccaagaggctcttgcaaagacccgagattctcataaatccccgcccagaagagctgcacgtatccctttcatgagtccagggaagagggtcctccaggtcttggaagacagaggggagctgctttagaggctaagttgctttgagcccacaaggtaatggagggctcctacttgggacagagccctcagcagagaattagcagtctgttggtgggttcaccccaactcacagcagtagaaactgctccatcttccaccacttattgggtttctccagtgtcagcaaaccaaagaattggatcttaccaatgcggctataggaaaacagcctgttgcatggtaagagtgataccatcttgaagtgaaaccaccacaatggccattttttttttagatggagttttgcagtggtgcaatcatagctcattgcagccttcaattcctgggctcaggcaatcctcctgcctcagcctcctgagtagctgggactacagtttcgtgtgccaccatgcctggctaatttttagaattttttgtagggacagggcctcactctgttgcacaagctggtcttgaactcctggcctccttgaactcctcctgccttggcctcccaaaatgctgagattacaggtgtgagccactgcacctcgccagatgtccaatgtctgactcctgcataccaaggtgttctgtatcaagggctttaaaacaatgcctgtagcgtaattaacctctcacaaagatgcttatctaacctccccagcagtcatgggtttcagcaagaaagtctgtgatgtgaccagttgcacatgttttcccctaaaagcttactctagaaaggatattttttggagagggagtgtgggaatccaccatcttgtggccacctcagacatcacttctctttggaagactccattaaatatttctctgtg

SEQ ID NO: 14056 - protein, 411 aa, Homo sapiens
MKMQKGNVLLMFGLLLHLEAATNSNETSTSANTGSSVISSGASTATNSGSSVTSSGVSTATISGSSVTSNGVSIVTNSEFHTTSSGISTATNSEFSTVSSGISIATNSESSTTSSGASTATNSESSTPSSGASTATNSDSSTTSSGASTATNSDSSTTSSEASTATNSESSTTSSGASTATNSESSTVSSRASTATNSESSTTSSGASTATNSESRTTSNGAGTATNSESSTTSSGASTATNSESSTPSSGAGTATNSESSTTSMGPTQPPTLSPVRPPVGPTQPPTLTPAQPPVGPAQPPTLSPARPPVGPAQPPTLSPAQPPVGPAQPPTLGPARPPVGPAQPPTLSPAQCPVGPAQPPPLSPARPPVGPAQPPTLSPAQCPVGPALPPILSPAQPPVGPTQPPTLGPV

SEQ ID NO: 14057 - DNA, 2281 bp, Homo sapiens
ctacattgcctggaggaagcctaaggaacccaggcatccagctgcccacgcctgagtccaagattcttcccaggaacacaaacgtaggagacccacgctcctggaagcaccagcctttatctcttcaccttcaagtcccctttctcaagaatcctctgttctttgccctctaaagtcttggtacatctaggacccaggcatcttgctttccagccacaaagagacagatgaagatgcagaaaggaaatgttctccttatgtttggtctactattgcatttagaagctgcaacaaattccaatgagactagcacctctgccaacactggatccagtgtgatctccagtggagccagcacagccaccaactctgggtccagtgtgacctccagtggggtcagcacagccaccatctcagggtccagcgtgacctccaatggggtcagcatagtcaccaactctgagttccatacaacctccagtgggatcagcacagccaccaactctgagttcagcacagtgtccagtgggatcagcatagccaccaactctgagtccagcacaacctccagtggggccagcacagccaccaactctgagtccagcacaccctccagtggggccagcacagccaccaactctgactccagcacaacctccagtggggctagcacagccaccaactctgactccagcacaacctccagtgaggccagcacagccaccaactctgagtccagcacaacctccagtggggccagcacagccaccaactctgagtccagcacagtgtccagtagggccagcactgccaccaactctgagtccagcacaacctccagtggggccagcacagccaccaactctgagtccagaacgacctccaatggggctggcacagccaccaactctgagtccagcacgacctccagtggggccagcacagccaccaactctgagtccagcacaccctccagtggggccggcacagccaccaactctgagtccagcacgacctccagtggggccggcacagccaccaactctgagtccagcacagtgtccagtgggatcagcacagtcaccaattctgagtccagcacaccctccagtggggccaacacagccaccaactctgagtccagtacgacctccagtggggccaacacagccaccaactctgactccagcacaacctccagtggggccagcacagccaccaactctgagtccagcacgacctccagtggggccagcacagccaccaactctgagtccagcacaacctccagtggggccagcacagccaccaactctgggtccagcacgacctccagtgggaccagcacagccaccaactctgagtccagcacagtgtccagtggggccagcacagccaccacctctgagtccagcacgacctccagtggggccagcacagccaccaactctgagtccagcacagtgtccagtggggccagcactgccaccaattctgagtccagcacaacctccagtggggccaacacagccaccaactctgggtccagtgtgacctctgcaggctctggaacagcagctctgactggaatgcacacaacttcccatagtgcatctactgcagtgagtgaggcgaagcctggtgggtccctggtgccgtgggaaatcttcctcatcaccctggtctcggttgtggcggccgtggggctctttgctgggctcttcttctgtgtgagaaacagcctgtccctgagaaacacctttaacacagctgtctaccaccctcatggcctcaaccatggccttggtccaggccctggagggaatcatggagccccccacaggcccaggtggagtcctaactggttctggaggagaccagtatcctcgatagccatggagatgagcgggaggaacagcgggccctgagcagccccggaagcaagtgccgcattcttcaggaaggaagagacctgggcacccaagacctggtttcctttcattcatcccaggagacccctcccagctttgtttgagatcctgaaaatcttgaagaaggtattcctcacctttcttgcctttaccagacactggaaagagaatactatattgctcatttagctaagaaataaatacatctcatctaacacacacgacaaagagaagctgtgcgtgccccggggtgggtatctagctctgagatgaactcagttataggagaaaacctccatgctggactccatctggcattcaaaatctccacagtaaaatccaaagacctc

SEQ ID NO: 14058 - protein, 566 aa, Homo sapiens
MKMQKGNVLLMFGLLLHLEAATNSNETSTSANTGSSVISSGASTATNSGSSVTSSGVSTATISGSSVTSNGVSIVTNSEFHTTSSGISTATNSEFSTVSSGISIATNSESSTTSSGASTATNSESSTPSSGASTATNSDSSTTSSGASTATNSDSSTTSSEASTATNSESSTTSSGASTATNSESSTVSSRASTATNSESSTTSSGASTATNSESRTTSNGAGTATNSESSTTSSGASTATNSESSTPSSGAGTATNSESSTTSSGAGTATNSESSTVSSGISTVTNSESSTPSSGANTATNSESSTTSSGANTATNSDSSTTSSGASTATNSESSTTSSGASTATNSESSTTSSGASTATNSGSSTTSSGTSTATNSESSTVSSGASTATTSESSTTSSGASTATNSESSTVSSGASTATNSESSTTSSGANTATNSGSSVTSAGSGTAALTGMHTTSHSASTAVSEAKPGGSLVPWEIFLITLVSVVAAVGLFAGLFFCVRNSLSLRNTFNTAVYHPHGLNHGLGPGPGGNHGAPHRPRWSPNWFWRRPVSSIAMEMSGRNSGP

SEQ ID NO: 14059 - DNA, 502 bp, Homo sapiens
ccagtagggccagcactgccaccaactctgagtccagcacaacctccagtggggccagcacagccaccaactctgagtccagaacgacctccaatggggctggcacagccaccaactctgagtccagcacgacctccagtggggccagcacagccaccaactctgagtccagcacaccctccagtggggccaacacagccaccaactctgactccagcacaacctccagtggggccagcacagccaccaactctgagtccagcacgacctccagtggggccagcacagccaccaactctgagtccagcacaacctccagtggggccagcacagccaccaactctgggtccagcacgacctccagtgggaccagcacagccaccaactctgagtccagcacagtgtccagtggggccagcacagccaccacctctgagtccagcacgacctccagtggggccagcacagccaccaactctgagtccagcacagtgtccagtgg

SEQ ID NO: 14060 - protein, 135 aa, Homo sapiens
MGLAQPPTLSPARPPVGPAQPPTLSPAHPPVGPTQPPTLTPAQPPVGPAQPPTLSPARPPVGPAQPPTLSPAQPPVGPAQPPTLGPARPPVGPAQPPTLSPAQCPVGPAQPPPLSPARPPVGPAQPPTLSPAQCP

SEQ ID NO: 14061 - DNA, 1980 bp, Homo sapiens
acatataaacccacagccactgcgggtggaaggagaagggcagggtggaaaaagtttgagagaaggagggaggaaaaggtgtcctggctagcaccatgtggattctcttgagatgagaagaaaatgccccgctacgtcccccttctgctgctcctgcttctcctgaggtgttcagaacggggtggaggagttaattttggtgagaaggatgcaaaagtccccgggacctggagagatggagtcagggtccctggagaaggagcctcttgggactcagacagggccagtcccgagcgaaggtacggaatagatggagcacctggccagctgtctcattttaaatcatataccaagcatgacctgagtgtaatctctaacatgaatcacagcttctgcctcattggtttgccagaaccgcaggcacaaatggatgagaggagacacctatgaacatggagccagaataccccaattgctgaaacaccagttcagagaggagtgagcttgagaaagagtcaggtttagtgtcccacggaaagagaccagacctggaaaagacagagtcaaagctgggtgagcaggccttcgaagggcgtggctcagcaaagataatccatattgtagtgcaagaggattcttgtggaatatgttttaccagaattaaaccaaaaatgccaaatgatccctaactggaataaatctcaccacattacctggggagaggtgtcatttggatgtgaggatagttatgaaaatactgagcagagcagatgaggataggccatcaacaattcacattaaatgagattactttttagtaggactaagccaaagcatttccactaagcacccagagaccagccctaaagactcaagaataagagaaaatgatgtaactgcagatggaaggaccactgaggaccacatcactgcagacccagggaccaccgaggactctgtcactgcagacccagggaccactgaggacaatgtgactgtggacccagggaccaccgagggctctgtcactgcagacccagcgaccaccaaggactatgtgtctgcagacccagggaccaccaaggattctgtcactgcagacccagggaccactcactgagaactttgtcactgcagacccagggaccaccaaggactccatcactgcagacccaaggaccacagaggactccgtcactgcagacccagggaccaccaaacactccatcactgtagacccagggaccactgaggactctgtcactgcagacccagggaccaccaaacactccatcactgcagacccagggaccaccgaggactccgtcactgcagacccagggaccacagaagatgaaaccactaaacatggtgacactcaccttctgtgaactacttcagtcacagcagtgaaacccaccaggctcctgacacccatgggaattatcctcatatccctggctgcaaccacagtcactgttgtgctctttgttggattgggcttcattgtgaaagagtgtttcctgcctccattaaatccatccaccagggttatttatcatccccatgtcatggactacagtacaccataaagaggaccccagcagtgactacagttggttctagaaaaaggagacccctcatccgcctctgcaagactatacagcatgatgtgtatcctcaggcctccactcctccgccctagtctggagccctgggaccaccacatgaggaaggcagctggcccctggaataagcatgtggaggacactcagaaggatgcccatctgctctgagtgtctcctaattctgcctgaccttggttacttcctctggacaatcgcctttacctatctaccaggttttgaggaattacacacagctcaggtataagagatattcggtaagtctgatcaaatcaataaagcaaattttatctgtttttgtctgggacatatctctacattcattcatttaacc

SEQ ID NO: 14062 - protein, 108 aa, Homo sapiens
MPRYVPLLLLLLLLRCSERGGGVNFGEKDAKVPGTWRDGVRVPGEGASWDSDRASPERRYGIDGAPGQLSHFKSYTKHDLSVISNMNHSFCLIGLPEPQAQMDERRHL

SEQ ID NO: 14063 - DNA, 1138 bp, Homo sapiens
caggatgcagggccgcgtggcagggagctgcgctcctctgggcctgctcctggtctgtcttcatctcccaggcctctttgcccggagcatcggtgttgtggaggagaaagtttcccaaaacttggggaccaacttgcctcagctcggacaaccttcctccactggcccctctaactctgaacatccgcagcccgctctggaccctaggtctaatgacttggcaagggttcctctgaagctcagcgtgcctgcatcagatggcttcccacctgcaggaggttctgcagtgcagaggtggcctccatcgtgggggctgcctgccatggattcctggccccctgaggatccttggcagatgatggctgctgcggctgaggaccgcctgggggaagcgctgcctgaagaactctcttacctctccagtgctgcggccctcgctccgggcagtggccctttgcctggggagtcttctcccgatgccacaggcctctcacccaaggcttcactcctccaccaggactcggagtccagacgactgccccgttctaattcactgggagccgggggaaaaatcctttcccaacgccctccctggtctctcatccacagggttctgcctgatcacccctggggtaccctgaatcccagtgtgtcctggggaggtggaggccctgggactggttggggaacgaggcccatgccacaccctgagggaatctggggtatcaataatcaacccccaggtaccagctggggaaatattaatcggtatccaggaggcagctggggaaatattaatcggtatccaggaggcagctgggggaatattaatcggtatccaggaggcagctgggggaatattcatctatacccaggtatcaataacccatttcctcctggagtcctccgccctcctggctcttcttggaacatcccagctggcttccctaatcctccaagccctaggttgcagtggggctagagcacgatagagggaaacccaacattgggagttagagtcctgctcccgccccttgctgtgtgggctcaatccaggccctgtcagcatgtttccagcactatccccacttttcagtgcctcccctgctcatctccaataaaataaaagcacttatgg

SEQ ID NO: 14064 - protein, 325 aa, Homo sapiens
MQGRVAGSCAPLGLLLVCLHLPGLFARSIGVVEEKVSQNLGTNLPQLGQPSSTGPSNSEHPQPALDPRSNDLARVPLKLSVPASDGFPPAGGSAVQRWPPSWGLPAMDSWPPEDPWQMMAAAAEDRLGEALPEELSYLSSAAALAPGSGPLPGESSPDATGLSPKASLLHQDSESRRLPRSNSLGAGGKILSQRPPWSLIHRVLPDHPWGTLNPSVSWGGGGPGTGWGTRPMPHPEGIWGINNQPPGTSWGNINRYPGGSWGNINRYPGGSWGNINRYPGGSWGNIHLYPGINNPFPPGVLRPPGSSWNIPAGFPNPPSPRLQWG

SEQ ID NO: 14065 - DNA, 3865 bp, Homo sapiens
ggaacaacgcccaactggcctcctactcagctgacaggaatctggttggagttgttgtgtcccagccttcccaagcttccaggtgtcccagaaacccaggaaatcgagactcatgactcccagagaggatggcatctagaagctggaaggtagaagagaaacacagcccgcttttgaaggaaaatgaggaacacagagacctctagaggcgtaggaagagcaccacccagactctcagaggagacccaggactccaagaaggcaaaaagtctgcacctagtccccacagtttactgagccatctgtccaggatccagggacagcagggagcctgcttcaacctctgagggtgccccagtgtctccctcacccagggaatcatctgagcactgagggaagtggccacaggaaggggctgagataagggccttgagaggcaatgggtgtgttggggacggtgatctaggagggcgtggtgagctctgtaatggagggtggggtggaattgggagcgagagcccagtggcatattgggtgggttgactagatgtcgaagaaaggtcagtgaaaagtggccactgtttccagatgatggtttgactttgctttatttggtaaaggggaagaggaaggtataacttcttcaggcgtcagaggtgctctgagagcatttcaggggtttcccagttgagaagctgatgggggtgttactcaatggaccatttccacacagtagagggaattgtaaggggtggtgatctggctgaggggcactgtggtggaatgggaatttaaacagtaggagagaatcaagagaggagctttgaatctaccattttgagaagaggaaggaggaaggggtgataagagagagtctgcaaccttggggtagtggagaaagcagaaccactcttttgggaaggagggaaactgagctaaccctatgcctgggcactggacttctcccatatgggatatagtgtatgtgcttgtttgtgcccaaggcatgcacacacacaacagttgacttcttatggactgttgagtaactctccttggggtaggaaaacttcagggtcagctagctggggccccagaggcttcacttgggctaggatatcccggatggagcggcaggggatctttccagcactgctggagccacagggcttggcaccagcggagggatcaggatggggagagccatcggggcccccagtcagtgtcaaggaggagacagacatgcaagggtgaccagaagagctggacttgctgccacaaggctgaaggatgattttgccactggattgggaactggagctgctgctgaaggagccggtgcctggtggggagcaggggctctgggaagcactgccgcagggatggtagggtaaaccggagctgctggaaatgctagaactgctggggactcgagaactggagggagagcagggtcccttggagcccgtggagccgcctccacagagctggaccccaccagtccccactggctggaatgcaatggccgaggaagctgccgactggctggggatgatggggttgctggagaagtatttgccctcagagatggggggcccagctgcaaaggaagggacccctggagagcctttcacagggttctctttggtgaagtagcccacagggtagattttacccttactgtaggtcatgcctggaaccagataactgtcagaggagccacccaccacctcgtagccaccataggatttgtctacagaggtgattgggggacagggcttgcctggaaggccaccattgctacaggggggaccttgaaccactccaggggcaccagaaccgtgctggtccaccaccaccaccacaggcctctgaccccctgacacagagtgggagctggggatgtaggggccggagtgcgagacgatgggccctccactgcagggagagtcggggatgtccgaactacagggacgctggttggagctgacgctttggccactgctggataccccaaaggtctgggaagaggaagagctttgtccaggctgggaagggtttagtattccgcggtaagagttgtcattggttggcagagcagagccattccctacttggaagctgctgctgctgaactgaaagctgctgctgctgctcgaatgagagctgctgcttcccgagtgagagccgctgtttcccgagtgagagctgctgctccccagctgggaggaaccggatgcaccttgtagactagagccagatccggaggagtagctgacctgggaataccccgttcctggcttaaaagatcctgcagaaccaccctgggcaatgctggatccgctggagctaccactggagccaccaccagagcttctggcactggaaatggagctgccagaactgctggagccactgtagctactgaaaccgctggagtcacccttcccagtgaggcaggggtcgttaggggaggtgatacgcgtggggtccttacaagggtctgagaaggtgccaatgctcttagccaaggtccctgtggaggaaagcagtggttagtaagggccaaggaggcttggcttcctccctcacctttctgccttatctcagtcatcggcctctcgggtttctcccaagcagagcgcagggagagtttagggatggagaaaggaggaagaactggctattgtctctaaaggatattgaggtggccgaataaaggcatttctttgtttgggaagggtgggcaaacaccaaccagaaaaatagaaaattaggtgccaaagtgagtggcctcaaaggaatacattgaatataagagggggctgggcacagtggctcacgccggtaatcccagcactttgggaggccgaggtgggaggattgcatgcgccccagagttcaagaccagcctgggcaacatagaccccgtctgtattttgttttttaattaaaattttttttaaaaagaagagggaatggagaaggggcaggaacaagtaggtctaaaagaaaggaccctgaagagacagagaattggggaaactgaggctctgaggagtccaggcgtaaattcttaggggaaaaatcctgggccagacagtgggaccaaagggaagaagacaaaaggcaaaacaatggagggctgagaagtggagacacatatagaaggagacactggaaaaagacaaagctgggggcagaggggctgaaataaaggaaagggcactcgaggactaagatttggtcaccagcttcttcgtgagagcccaggctggggtcaggaatggaaaccctatttcctatctcagcactggccatgccagtaaagctgggtgggggccaggatgtggggtcactacctgttgcttcagaacctgctggtaccagtgtgtcaggacaccgcaccctgagccagccctgctctcgctggcccagcccagggaaccaggacgaaaccccacgaacctccgaggctcctggccacaatcagcttccctctctgagcacacctgcctctgtccagcccctcatctgacttctgctgccttgacttccctcagggatgtggagccacatctttccttatctttcctttcctttgctcaaaaccccaggcccaacttaccccgtggttcctccatgactctttcacctgcgttccttctgccttccctagcccctccaggtcccacgtgttacaaacagagccacatactagcaagttactgaacctctctgagctttagtttatacattcagaggggccaaattttccctgccttcccacagcattactatgaagaaaactaaatgagtccatctcacaaaaaaaaataaaaataaaagttctaatatataatcc

SEQ ID NO: 14066 - protein, 94 aa, Homo sapiens
MGYSVCACLCPRHAHTQQLTSYGLLSNSPWGRKTSGSASWGPRGFTWARISRMERQGIFPALLEPQGLAPAEGSGWGEPSGPPVSVKEETDMQG

SEQ ID NO: 14067 - DNA, 458 bp, Homo sapiens
ggtgtcccagaaacccaggaaatcgagactcatgactcccagagaggatggcatctagaaggcatgcaggggacctccaagcaatgatatccaaggaattccatctggcagccacccaggatgactgcagaaaaggaaggacacaggaggatatcctggttccctcttcccacccagagctgtttgcatcagtcctgccaatggctccggaagaagctgccaggctccagcaacctcagccccttcctcctccctcaggaatccacctatccgcctctaggaccttggctccaactctattgtactcgtctcctccctcccattctccttttggtctcagctccttgatctaagcctcccagagagacccctagaacgtttccctcaaggacctttctgcctggaagtctgttagcctttcagaagtaacatgtccaaaataaaatttgattcctccc

SEQ ID NO: 14068 - protein, 101 aa, Homo sapiens
MASRRHAGDLQAMISKEFHLAATQDDCRKGRTQEDILVPSSHPELFASVLPMAPEEAARLQQPQPLPPPSGIHLSASRTLAPTLLYSSPPSHSPFGLSSLI

SEQ ID NO: 14069 - DNA, 853 bp, Homo sapiens
ggtgtcccagaaacccaggaaatcgagactcatgactcccagagaggatggcatctagaagtagacgatcaagggtggaatctacagtccgtgagccctgacttcttgccttcgtctcaaatagactctgcagccagccatctatgcagcgccccagtggctttgaaatgcaacagaaaccatcacccccggaccgtgggctccatgccagtgggcaaagcacagcctgggaagaattggtttgcagccaggcagtcctccatccagtcttgactttggcacttgtgatatgacttgcacagaccaaaaaagtcactctcaaagagctctcggcacacagaccccagctttacaaggaccccagctccttaacacagatcccagctccgaggaaactcgtcccccccacgttaatcctgaccgactttgccacatggagccagcaaaccatttctggcatgcaggggacctccaagcaatgatatccaaggaattccatctggcagccacccaggatgactgcagaaaaggaaggacacaggaggatatcctggttccctcttcccacccagagctgtttgcatcagtcctgccaatggctccggaagaagctgccaggctccagcaacctcagccccttcctcctccctcaggaatccacctatccgcctctaggaccttggctccaactctattgtactcgtctcctccctcccattctccttttggtctcagctccttgatctaagcctcccagagagacccctagaacgtttccctcaaggacctttctgcctggaagtctgttagcctttcagaagtaacatgtccaaaataaaatttgattcctccc

SEQ ID NO: 14070 - protein, 152 aa, Homo sapiens
MTCTDQKSHSQRALGTQTPALQGPQLLNTDPSSEETRPPHVNPDRLCHMEPANHFWHAGDLQAMISKEFHLAATQDDCRKGRTQEDILVPSSHPELFASVLPMAPEEAARLQQPQPLPPPSGIHLSASRTLAPTLLYSSPPSHSPFGLSSLI

SEQ ID NO: 14071 - DNA, 511 bp, Homo sapiens
ggtgtcccagaaacccaggaaatcgagactcatgactcccagagaggatggcatctagaaggcatgcaggggacctccaagcaatgatatccaaggaattccatctggcagccacccaggatgactgcagaaaaggaaggacacaggaggatatcctggttccctcttcccacccagagctgtttgcatcagtcctgccaatggctccggaagaagctgccaggctccagcaacctcagccccttcctcctccctcaggaatccacctatccgcctctaggaccttggctccaactctattgtactcgtctcctccctcccattctccttttggtctcagctccttgatctaagcctcccagagagacccctagaacgtttccctcaaggacctttctgcctggaagtctgttagcctttcagaagtaacatgtccaaaataaaatttgattcctcccaggttgttccctgcctggtccgctaccccacagtaaggaacaccttattatgc

SEQ ID NO: 14072 - protein, 101 aa, Homo sapiens; identical to SEQ ID NO: 14068

SEQ ID NO: 14073 - DNA, 891 bp, Homo sapiens
caggaaatcgagactcatgactcccagagaggatggcatctagaagtagacgatcaagggtggaatctacagtccgtgagccctgacttcttgccttcgtctcaaatagactctgcagccagccatctatgcagcgccccagtggctttgaaatgcaacagaaaccatcacccccggaccgtgggctccatgccagtgggcaaagcacagcctgggaagaattggtttgcagccaggcagtcctccatccagtcttgactttggcacttgtgatatgacttgcacagaccaaaaaagtcactctcaaagagctctcggcacacagaccccagctttacaaggaccccagctccttaacacagatcccagctccgaggaaactcgtcccccccacgttaatcctgaccgactttgccacatggagccagcaaaccatttctggcatgcaggggacctccaagcaatgatatccaaggaattccatctggcagccacccaggatgactgcagaaaaggaaggacacaggaggatatcctggttccctcttcccacccagagctgtttgcatcagtcctgccaatggctccggaagaagctgccaggctccagcaacctcagccccttcctcctccctcaggaatccacctatccgcctctaggaccttggctccaactctattgtactcgtctcctccctcccattctccttttggtctcagctccttgatctaagcctcccagagagacccctagaacgtttccctcaaggacctttctgcctggaagtctgttagcctttcagaagtaacatgtccaaaataaaatttgattcctcccaggttgttccctgcctggtccgctaccccacagtaaggaacaccttattatgc

SEQ ID NO: 14074 - protein, 152 aa, Homo sapiens; identical to SEQ ID NO: 14070

SEQ ID NO: 14075 - DNA, 2554 bp, Homo sapiens
atcagtcaggaggccgtgcagtccgagatgggctcgtctcgggcaccctggatggggcgtgtgggtgggcacgggatgatggcactgctgctggctggtctcctcctgccagggaccttggctaagagcattggcaccttctcagacccttgtaaggaccccacgcgtatcacctcccctaacgacccctgcctcactgggaagggtgactccagcggtttcagtagctacagtggctccagcagttctggcagctccatttccagtgccagaagctctggtggtggctccagtggtagctccagcggatccagcattgcccagggtggttctgcaggatcttttaagccaggaacggggtattcccaggtcagctactcctccggatctggctctagtctacaaggtgcatccggttcctcccagctggggagcagcagctctcactcgggaaacagcggctctcactcgggaagcagcagctctcattcgagcagcagcagcagctttcagttcagcagcagcagcttccaagtagggaatggctctgctctgccaaccaatgacaactcttaccgcggaatactaaacccttcccagcctggacaaagctcttcctcttcccagacctttggggtatccagcagtggccaaagcgtcagctccaaccagcgtccctgtagttcggacatccccgactctccctgcagtggagggcccatcgtctcgcactccggcccctacatccccagctcccactctgtgtcagggggtcagaggcctgtggtggtggtggtggaccagcacggttctggtgcccctggagtggttcaaggtcccccctgtagcaatggtggccttccaggcaagccctgtcccccaatcacctctgtagacaaatcctatggtggctacgaggtggtgggtggctcctctgacagttatctggttccaggcatgacctacagtaagggtaaaatctaccctgtgggctacttcaccaaagagaaccctgtgaaaggctctccaggggtcccttcctttgcagctgggccccccatctctgagggcaaatacttctccagcaaccccatcatccccagccagtcggcagcttcctcggccattgcattccagccagtggggactggtggggtccagctctgtggaggcggctccacgggctccaagggaccctgctctccctccagttctcgagtccccagcagttctagcatttccagcagctccggtttaccctaccatccctgcggcagtgcttcccagagcccctgctccccaccaggcaccggctccttcagcagcagctccagttcccaatccagtggcaaaatcatccttcagccttgtggcagcaagtccagctcttctggtcacccttgcatgtctgtctcctccttgacactgactgggggccccgatggctctccccatcctgatccctccgctggtgccaagccctgtggctccagcagtgctggaaagatcccctgccgctccatccgggatatcctagcccaagtgaagcctctggggccccagctagctgaccctgaagttttcctaccccaaggagagttactcaacagtccataagaagtcaactgttgtgtgtgtgcatgccttgggcacaaacaagcacatacactatatcccatatgggagaagtccagtgcccaggcatagggttagctcagtttccctccttcccaaaagagtggttctgctttctccactaccccaaggttgcagactctctcttatcaccccttcctccttcctcttctcaaaatggtagattcaaagctcctctcttgattctctcctactgtttaaattcccattccaccacagtgcccctcagccagatcaccaccccttacaattccctctactgtgtggaaatggtccattgagtaacacccccatcagcttctcaactgggaaacccctgaaatgctctcagagcacctctgacgcctgaagaagttataccttcctcttcccctttaccaaataaagcaaagtcaaaccatcatctggaaacagtggccacttttcactgacctttcttcgacatctagtcaacccacccaatatgccactgggctctcgctcccaattccaccccaccctccattacagagctcaccacgccctcctagatcaccgtccccaacacacccattgcctctcaaggcccttatctcagccccttcctgtggccacttccctcagtgctcagatgattccctgggtgagggagacactggggcaccctcagaggttgaagcaggctccctgctgtccctggatcctggacagatggctcagtaaactgtggggactaggtgcagactttttgccttcttggagtcctgggtctcctctgagagtctgggtggtgctcttcctacgcctctagaggtctctgtgttcctcattttccttcaaaagcgggctgtgtttctcttctaccttccagctgctcccacagaggaggaagacaataaatatttgttgaactgaaagc

SEQ ID NO: 14076 - protein, 529 aa, Homo sapiens
MGSSRAPWMGRVGGHGMMALLLAGLLLPGTLAKSIGTFSDPCKDPTRITSPNDPCLTGKGDSSGFSSYSGSSSSGSSISSARSSGGGSSGSSSGSSIAQGGSAGSFKPGTGYSQVSYSSGSGSSLQGASGSSQLGSSSSHSGNSGSHSGSSSSHSSSSSSFQFSSSSFQVGNGSALPTNDNSYRGILNPSQPGQSSSSSQTFGVSSSGQSVSSNQRPCSSDIPDSPCSGGPIVSHSGPYIPSSHSVSGGQRPVVVVVDQHGSGAPGVVQGPPCSNGGLPGKPCPPITSVDKSYGGYEVVGGSSDSYLVPGMTYSKGKIYPVGYFTKENPVKGSPGVPSFAAGPPISEGKYFSSNPIIPSQSAASSAIAFQPVGTGGVQLCGGGSTGSKGPCSPSSSRVPSSSSISSSSGLPYHPCGSASQSPCSPPGTGSFSSSSSSQSSGKIILQPCGSKSSSSGHPCMSVSSLTLTGGPDGSPHPDPSAGAKPCGSSSAGKIPCRSIRDILAQVKPLGPQLADPEVFLPQGELLNSP

SEQ ID NO: 14077 - DNA, 2064 bp, Homo sapiens
atcagtcaggaggccgtgcagtccgagatgggctcgtctcgggcaccctggatggggcgtgtgggtgggcacgggatgatggcactgctgctggctggtctcctcctgccagggaccttggctaagagcattggcaccttctcagacccttgtaaggaccccacgcgtatcacctcccctaacgacccctgcctcactgggaagggtgactccagcggtttcagtagctacagtggctccagcagttctggcagctccatttccagtgccagaagctctggtggtggctccagtggtagctccagcggatccagcattgcccagggtggttctgcaggatcttttaagccaggaacggggtattcccaggtcagctactcctccggatctggctctagtctacaaggtgcatccggttcctcccagctggggagcagcagctctcactcgggaaacagcggctctcactcgggaagcagcagctctcattcgagcagcagcagcagctttcagttcagcagcagcagcttccaagtagggaatggctctgctctgccaaccaatgacaactcttaccgcggaatactaaacccttcccagcctggacaaagctcttcctcttcccagacctttggggtatccagcagtggccaaagcgtcagctccaaccagcgtccctgtagttcggacatccccgactctccctgcagtggagggcccatcgtctcgcactccggcccctacatccccagctcccactctgtgtcagggggtcagaggcctgtggtggtggtggtggaccagcacggttctggtgcccctggagtggttcaaggtcccccctgtagcaatggtggccttccaggcaagccctgtcccccaatcacctctgtagacaaatcctatggtggctacgaggtggtgggtggctcctctgacagttatctggttccaggcatgacctacagtaagggtaaaatctaccctgtgggctacttcaccaaagagaaccctgtgaaaggctctccaggggtcccttcctttgcagctgggccccccatctctgagggcaaatacttctccagcaaccccatcatccccagccagtcggcagcttcctcggccattgcattccagccagtggggactggtggggtccagctctgtggaggcggctccacgggctccaagggaccctgctctccctccagttctcgagtccccagcagttctagcatttccagcagctccggtttaccctaccatccctgcggcagtgcttcccagagcccctgctccccaccaggcaccggctccttcagcagcagctccagttcccaatccagtggcaaaatcatccttcagccttgtggcagcaagtccagctcttctggtcacccttgcatgtctgtctcctccttgacactgactgggggccccgatggctctccccatcctgatccctccgctggtgccaagccctgtggctccagcagtgctggaaagatcccctgccgctccatccgggatatcctagcccaagtgaagcctctggggccccagctagctgaccctgaagttttcctaccccaaggagagttactcaacagtccataagaagtcaactgttgtgtgtgtgcatgccttgggcacaaacaagcacatacactatatcccatatgggagaagtccagtgcccaggcatagggttagctcagtttccctccttcccaaaagagtggttctgctttctccactaccccaaggttgcagactctctcttatcaccccttcctccttcctcttctcaaaatggtagattcaaagctcctctcttgattctctcctactgtttaaattcccattccaccacagtgcccctcagccagatcaccaccccttacaattccctctactgtgtggaaatggtccattgagtaacacccccatcagcttctcaactgggaaacccctgaaatgctctcagagcacctctgacgcctgaagaagttataccttcctcttcccctttaccaaataaagcaaagtcaaaccatcatctgg

SEQ ID NO: 14078 - protein, 529 aa, Homo sapiens; identical to SEQ ID NO: 14076

SEQ ID NO: 14079 - DNA, 632 bp, Homo sapiens
gcgcctggcctctcatatgtagtttttaatgagagttaccacataagcaaactgggttctaagtggtgaaatttaaggttatgcaacctcagtttcttttaacccctcttcatccctaaccctggtcggatacttgattgacagtagaccattgggatctctgagctcctgtccttctaacctgattgcctctttaaaggattttgaaaaactatgtcccttgcacatttgtattgttttgagacacggtctcacttgcactccagcctggatgacagatggagaccctgtctcaaacaaacacacaaaaagacatgaaaagtaacttattgaaaatgcatctcttggccaggcgtggtggtttacacctgtaatcctagcactttgggaggccagggcaagcagatcccatgagatcaggaattcgagaccagcctggccaacatggcaaaatcccatctctactaaaaatagaaaacttatctgggtgtggtggcacacacctgtaatcccagctactcgggaggttgaggcaggagaatcacttgaatccaggaggcgaaggttgcagtgagctgatatctgtcgtgccactgcactccagcctgggcgacagagagataatacgtctc

SEQ ID NO: 14080 - protein, 34 aa, Homo sapiens
MSLAHLYCFETRSHLHSSLDDRWRPCLKQTHKKT

SEQ ID NO: 14081 - DNA, 1735 bp, Homo sapiens
cttagatcaaggagctgagaccaaaaggagaatgggagggaggagacgagtacaatagagttggagccaaggtcctagaggcggataggtggattcctgagggaggaggaaggggctgaggttgctggagcctggcagcttcttccggagccattggcaggactgatgcaaacagctctgggtgggaagagggaaccaggatatcctcctgtgtccttccttttctgcagtcatcctgggtggctgccagatggaattccttggatatcattgcttggaggtcccctgcatgcctgaagaaggacatggtggagagcaggatgcctggatcccatgggggaagggaagtgcccaggaaagcacgaagccccagggggagctttcagtgcgggggtgagtggggaggctggggtagtagctgacactgtcccagctgcatcccaggtttgaaaagcacctcctccctcagcgcaggcatcctgcctcccaaccctgtaattacggtgcttcccaacgcccatcgcgtggtttgctcccattctttggcttccaatagttgcaagggatgaaggtggacatctctgtgattacggagatgccaagtgggtattgactgctccaggatgtggatggagggtgtgaaaaccagggtggggtgacgcaggctctgggtcatgatagggagagcaggcagctgggtcctgggctggaggactaaaataagggacgccaccttcaggggtgacacatcagcccaggccttcccaacgggtttgaccagttctgttctgatggtattcctgtgccactgggctggtccctcctccactcctcccctataaagcctcttggggttcccaggcacccagactcagcccaccccagctttgggggccagtacatagccatgatcctcaactggaagctcctggggatcctggtcctttgcctgcacaccagaggcatctcaggcagcgagggccacccctctcacccacccgcagaggaccgagaggaggcaggctccccaacattgcctcagggccccccagtccccggtgacccttggccaggggcaccccctctctttgaagatcctccgcctacccgccccagtcgtccctggagagacctgcctgaaactggagtctggctccctgaaccgcctagaacggatcctcctcaacctccccggcctgacgacccttggccggcaggaccccagcccccagaaaacccctggcctcctgcccctgaggtggacaaccgacctcaggaggagccagacctagacccaccccgggaagagtacagataatggagtcccctcagccgttctgttcccaggcatctccaggcacccacgccctctccaccctctgattccccgtgaattcttcccaatttagcctgtctccttaaacctcttcctcattccctcggttttattctgaacccgtaaggtggtgttctcaatatttcctgtcccctcctgagatccatacttagtcctcacatcgcccgttttttcctctgacagcctaagcctactctcctacctcgcctccaggcctcggccgcacctacctcccacccggtcttcctgcccgcgcgatcgctggggcagggctatggtactgtgttcccttctgccacctggtggccggcggcaggaactatcagtagacagctgctgcttccatgaaacggaaaaataaaaatcatgttttcttaa

SEQ ID NO: 14082 - protein, 136 aa, Homo sapiens
MILNWKLLGILVLCLHTRGISGSEGHPSHPPAEDREEAGSPTLPQGPPVPGDPWPGAPPLFEDPPPTRPSRPWRDLPETGVWLPEPPRTDPPQPPRPDDPWPAGPQPPENPWPPAPEVDNRPQEEPDLDPPREEYR

SEQ ID NO: 14083 - DNA, 500 bp, Homo sapiens
agccccacccagccccagccccaggaggaggagcctgtctggatggacgcagcctgaactgacccacaaacagaccaaaaaagtcactctcaaagagctctcggcatgcaggggacctccaagcaatgatatccaaggaattccatctggcagccacccaggatgactgcagaaaaggaaggacacaggaggatatcctggttccctcttcccacccagagctgtttgcatcagtcctgccaatggctccggaagaagctgccaggctccagcaacctcagccccttcctcctccctcaggaatccacctatccgcctctaggaccttggctccaactctattgtactcgtctcctccctcccattctccttttggtctcagctccttgatctaagcctcccagagagacccctagaacgtttccctcaaggacctttctgcctggaagtctgttagcctttcagaagtaacatgtccaaaataaaatttgattcctccc

SEQ ID NO: 14084 - protein, 89 aa, Homo sapiens
MISKEFHLAATQDDCRKGRTQEDILVPSSHPELFASVLPMAPEEAARLQQPQPLPPPSGIHLSASRTLAPTLLYSSPPSHSPFGLSSLI

SEQ ID NO: 14085 - DNA, 706 bp, Homo sapiens
agccctgcaagaaaaggtggctgaagtggaaactcggctgcgggagcaactctcagacacagagaggaggctgaacgaggctcggagggagcatgccaaggccgtggtctccttacgccagattcagcgcagagccgcccaggaaaaggagcggagccaggaactcaggcgtctgcaggaggaggcccggaaggaggaggggcagcgactggcccggcgcttgcaggagctagagagggataagaacctcatgctggccaccttgcagcaggaaggtctcctctcccgttacaagcagcagcgactgttgacagttcttccttccctactggataagaagaaatctgtggtgtccagccccaggcctccagagtgttcagcatctgcacctgtagcagcagcagtgcccaccagggagtccataaaagggtccctctctgtcctgctcgatgacctgcaggacctgagtgaagccatttccaaagaggaagctgtttgtcaaggagacaaccttgacagatgctccagctccaatccccagatgagcagctaagcagctgacagttggagggaaagccagcctgggggctgggaggatcctggagaagtgggtggggacagaccagcccttccccatcctggggttgccctgggggataccagctgagtctgaattctgctctaaataaagacgactacagaagga

SEQ ID NO: 14086 - protein, 100 aa, Homo sapiens
MLATLQQEGLLSRYKQQRLLTVLPSLLDKKKSVVSSPRPPECSASAPVAAAVPTRESIKGSLSVLLDDLQDLSEAISKEEAVCQGDNLDRCSSSNPQMSS

SEQ ID NO: 14087 - DNA, 2958 bp, Homo sapiens
gtgcccactatgtgttaggactcgagaaagaggaggcgggcagcaggcatggaagctaaggggatagtagagagaagctgagagaacagccgcaggaaagatttgaataagatgtcaggacgctggcttttctgcctggggatctaggcggcctggattcccaaggtcttggggagggtctagccctgcatgtggccacattcagctggggccaggccttgggccagcactttaacagggaaggacccaagagtcatggcctgctggtgtctggatgggcttccctcaggccttgctgagccatggagagaactctggagatggcgctcaagacccctgcactgtgtacctcctttctcacctctggccaggagcagcagggaccatagaaacttaaggaggagggggaacatagatggctggagacagaatctagagccttcaaataatgtggagatgtttccaccttcaggttccactgggctgattcccccctcccactttcaagctcggcccctttcaactctgccaagaatggctcccacctggctctcagacattcccctggtccaacccccaggccatcaagatgtctcagagaggcggctagacacccagagacctcaagtgaccatgtgggaacgggatgtttccagtgacaggcaggagccagggcggagaggcaggtcctgggggctggaggggtcacaggccctgagccagcaggctgaggtgatcgttcggcagctgcaagagctgcggcggctggaggaggaggtccggctcctgcgggagacctcgctgcagcagaagatgaggctagaggcccaggccatggagctagaggctctggcacgggcggagaaggccggccgagctgaggctgagggcctgcgtgctgctttggctggggctgaggttgtccggaagaacttggaagaggggagccagcgggagctggaagaggttcagaggctgcaccaagagcagctgtcctctttgacacaggctcacgaggaggctctttccagtttgaccagcaaggctgagggcttggagaagtctctgagtagtctggaaaccagaagagcaggggaagccaaggagctggccgaggctcagagggaggccgagctgcttcggaagcagctgagcaagacccaggaagacttggaggctcaggtgaccctggttgagaatctaagaaaatatgttggggaacaagtgccttctgaggtccacagccagacatgggaactggagcgacagaagcttctggaaaccatgcagcacttgcaggaggaccgggacagcctgcatgccaccgcggagctgctgcaggtgcgggtgcagagcctcacacacatcctcgccctgcaggaggaggagctgaccaggaaggttcaaccttcagattccctggagcctgagtttaccaggaagtgccagtccctgctgaaccgctggcgggagaaggtgtttgccctcatggtgcagctaaaggcccaggagctggaacacagtgactctgttaagcagctgaagggacaggtggcctcactccaggaaaaagtgacatcccagagccaggagcaggccatcctgcagcgatccctgcaggacaaagccgcagaggtggaggtggagcgtatgggtgccaagggcctgcagttggagctgagccgtgctcaggaggccaggcgtcggtggcagcagcagacagcctcagccgaggagcagctgaggcttgtggtcaatgctgtcagcagctctcagatctggctcgagaccaccatggctaaggtggaaggggctgccgcccagcttcccagcctcaacaaccgactcagctatgctgtccgcaaggtccacaccattcggggcctgattgctcgaaagcttgcccttgctcagctgcgccaggagagctgtcccctaccaccaccggtcacagacgtgagccttgagttgcagcagttgcgggaagaacggaaccgcctggatgcagaactgcagctgagtgcccgcctcatccagcaggaggtgggccgggctcgggagcaaggggaggcagagcggcagcagctgagcaaggtggcccagcagctggagcaggagctgcagcagacccaggagtccctggctagcttggggctgcagctggaggtagcacgccagggccagcaggagagcacagaggaggctgccagtctgcggcaggagctgacccagcagcaggaactctacgggcaagccctgcaagaaaaggtggctgaagtggaaactcggctgcgggagcaactctcagacacagagaggaggctgaacgaggctcggagggagcatgccaaggccgtggtctccttacgccagattcagcgcagagccgcccaggaaaaggagcggagccaggaactcaggcgtctgcaggaggaggcccggaaggaggaggggcagcgactggcccggcgcttgcaggagctagagagggataagaacctcatgctggccaccttgcagcaggaaggtctcctctcccgttacaagcagcagcgactgttgacagttcttccttccctactggataagaagaaatctgtggtgtccagccccaggcctccagagtgttcagcatctgcacctgtagcagcagcagtgcccaccagggagtccataaaagggtccctctctgtcctgctcgatgacctgcaggacctgagtgaagccatttccaaagaggaagctgtttgtcaaggagacaaccttgacagatgctccagctccaatccccagatgagcagctaagcagctgacagttggagggaaagccagcctgggggctgggaggatcctggagaagtgggtggggacagaccagcccttccccatcctggggttgccctgggggataccagctgagtctgaattctgctctaaataaagacgactacagaagga

SEQ ID NO: 14088 - protein, 871 aa, Homo sapiens
MWPHSAGARPWASTLTGKDPRVMACWCLDGLPSGLAEPWRELWRWRSRPLHCVPPFSPLARSSRDHRNLRRRGNIDGWRQNLEPSNNVEMFPPSGSTGLIPPSHFQARPLSTLPRMAPTWLSDIPLVQPPGHQDVSERRLDTQRPQVTMWERDVSSDRQEPGRRGRSWGLEGSQALSQQAEVIVRQLQELRRLEEEVRLLRETSLQQKMRLEAQAMELEALARAEKAGRAEAEGLRAALAGAEVVRKNLEEGSQRELEEVQRLHQEQLSSLTQAHEEALSSLTSKAEGLEKSLSSLETRRAGEAKELAEAQREAELLRKQLSKTQEDLEAQVTLVENLRKYVGEQVPSEVHSQTWELERQKLLETMQHLQEDRDSLHATAELLQVRVQSLTHILALQEEELTRKVQPSDSLEPEFTRKCQSLLNRWREKVFALMVQLKAQELEHSDSVKQLKGQVASLQEKVTSQSQEQAILQRSLQDKAAEVEVERMGAKGLQLELSRAQEARRRWQQQTASAEEQLRLVVNAVSSSQIWLETTMAKVEGAAAQLPSLNNRLSYAVRKVHTIRGLIARKLALAQLRQESCPLPPPVTDVSLELQQLREERNRLDAELQLSARLIQQEVGRAREQGEAERQQLSKVAQQLEQELQQTQESLASLGLQLEVARQGQQESTEEAASLRQELTQQQELYGQALQEKVAEVETRLREQLSDTERRLNEARREHAKAVVSLRQIQRRAAQEKERSQELRRLQEEARKEEGQRLARRLQELERDKNLMLATLQQEGLLSRYKQQRLLTVLPSLLDKKKSVVSSPRPPECSASAPVAAAVPTRESIKGSLSVLLDDLQDLSEAISKEEAVCQGDNLDRCSSSNPQMSS

SEQ ID NO: 14089 - DNA, 512 bp, Homo sapiens
aaagcttcattacaggaagtaatgaaggtatccaggagtagcacagatgaattatcacatcgtgaacacacccatgtagccagcaccatgcccagctagtttttgtatttgcagtagagacgggattacaccatgttggccaggatggtctcgagctcctaacctcgtgatccgcccgccttggcatcccaaagtgctgggattataggcgtgagccaccacgcctaagtaagttgtaaacataagttgttcagccgcatctcccaaagccagtaaattctcctatatagctgcaatcatcacactttaagacagtgaacactaattgcacaaaatctaacccagttcatgttcagatttcccctgaggaactccaggatggttcagggatgaggaagatacttaggttcagattcccaggctcctagagcatcagcccacccctccaactgtacagaagagacagatccacagagcagaacagcctccccaagccacagagttggtgaccc

SEQ ID NO: 14090 - protein, 42 aa, Homo sapiens
PAPCPASFCICSRDGITPCWPGWSRAPNLVIRPPWHPKVLGL

SEQ ID NO: 14091 - DNA, 858 bp, Homo sapiens
ccagaatcctgaaagtatgagtaaagcctcagagcccctctcagtctgtctctttcagtaaattctctccacttgatagttgcttgggttccatgaggaaccaggttgagacaagcaagtgaatttggggtatctcctactttggggaagtaggaaaagagctaagcatcgggtggacctggctataattcaaggattatgactttgttattgtaggggctttctctttggaaggtggcctgaaaattgaattggagtgtctttgtttctcctcttgtccaggggaacatagatggctggagacagaatctagagccttcaaataatgtggagatgtttccaccttcaggagttcgagaccagcctgggcaacatgtgaaatcccgtctctactaaaaatacaaaaaattagccggtcatagtggctcattcctgtagtcccagctactctggaggatgaggtgggaggatcacctgaggctgggaggtcgaggcgaggccacagtgaactgtgatcccatcactgcactctagcctgggtgacaaagcgagatcttttctcaaaaaaaaagaaagtagtaagaaaaattcaaaagataatgtgacggagagactgtggggtgagtcagcctcaggtaggatgctcagagacagcctctctgaggaggtgacagcatctgaggagagtggcatggtcagttggtgggtcttgtggggtgggtcaagggctattcccatctttgagtgggcacatggaatgtggaacatggaacactgggctcagattccatcctcagaacctaagcttctgtctccctgcgtggcattcattctttttcttttctttttttttttttt

SEQ ID NO: 14092 - protein, 71 aa, Homo sapiens
MLRDSLSEEVTASEESGMVSWWVLWGGSRAIPIFEWAHGMWNMEHWAQIPSSEPKLLSPCVAFILFLFFFF

SEQ ID NO: 14093 - DNA, 855 bp, Homo sapiens
ggggtgtggccaaagcgcagtagggggctctcgcggttggggaacatagatggctggagacagaatctagagccttcaaataatgtggagatgtttccaccttcaggtcagtgggaccagacaaggggagtggtggttgtctctgcctgggaaactgaccatctttgtttttgtaattcttcaggttccactgggctgattcccccctcccactttcaagctcggcccctttcaactctgccaagaatggctcccacctggctctcagacattcccctggtccaacccccaggccatcaagatgtctcagagaggcggctagacacccagagacctcaagtgaccatgtgggaacgggatgtttccagtgacaggcaggagccagggcggagaggcaggtcctgggggctggaggggtcacaggccctgagccagcaggctgaggtgatcgttcggcagctgcaagagctgcggcggctggaggaggaggtccggctcctgcgggagacctcgctgcagcagaagatgaggctagaggcccaggccatggagctagaggctctggcacgggcggagaaggccggccgagctgaggctgagggcctgcgtgctgctttggctggggctgaggttgtccggaagaacttggaagaggggagccagcgggagctggaagaggttcagaggctgcaccaagagcaggtgaatgcaggggtagaaaggattcaaattcataacggagagctgggcagtagcttccaagcaaagaacaggtattgcagaaaagaccctccatgagtagtgagtagtagagtgatgagacctttggtgaaaataaacacacatggcctagaa

SEQ ID NO: 14094 - protein, 235 aa, Homo sapiens
MFPPSGQWDQTRGVVVVSAWETDHLCFCNSSGSTGLIPPSHFQARPLSTLPRMAPTWLSDIPLVQPPGHQDVSERRLDTQRPQVTMWERDVSSDRQEPGRRGRSWGLEGSQALSQQAEVIVRQLQELRRLEEEVRLLRETSLQQKMRLEAQAMELEALARAEKAGRAEAEGLRAALAGAEVVRKNLEEGSQRELEEVQRLHQEQVNAGVERIQIHNGELGSSFQAKNRYCRKDPP

SEQ ID NO: 14095 - DNA, 1050 bp, Homo sapiens
ccagaatcctgaaagtatgagtaaagcctcagagcccctctcagtctgtctctttcagtaaattctctccacttgatagttgcttgggttccatgaggaaccaggttgagacaagcaagtgaatttggggtatctcctactttggggaagtaggaaaagagctaagcatcgggtggacctggctataattcaaggattatgactttgttattgtaggggctttctctttggaaggtggcctgaaaattgaattggagtgtctttgtttctcctcttgtccaggggaacatagatggctggagacagaatctagagccttcaaataatgtggagatgtttccaccttcaggttccactgggctgattcccccctcccactttcaagctcggcccctttcaactctgccaagaatggctcccacctggctctcagacattcccctggtccaacccccaggccatcaagatgtctcagagaggcggctagacacccagagacctcaagtgaccatgtgggaacgggatgtttccagtgacaggcaggagccagggcggagaggcaggtagggatccatccacgccgttttctcaggcttgcttgctagtgacccttcctcactggaataaactccttaccctatttcggccctagtttccagaacgtactcatttttatgtaagcaattagttcctacagtgcataaataataaagcagtgtgctaagtgctagggatgaggataacaatagtgaataagacaaatcctgacttaaatttgtaattaataaggaatctaaaatcctaagaggggagatagattgaccaccagctgatggtaaagcatggtatgaggcaagatgaagaagtgcaaactagaggtagagacccagcactgtggcagtgtgggttcattctgatggaagaaagcctttacagaggacatgctgtgggagctggccatgctgtcgtattatctgtaaacattcttattcttgtttcatgtgtcttttcccagatgtactgggatatcattctgccattttgctccag

SEQ ID NO: 14096 - protein, 77 aa, Homo sapiens
MFPPSGSTGLIPPSHFQARPLSTLPRMAPTWLSDIPLVQPPGHQDVSERRLDTQRPQVTMWERDVSSDRQEPGRRGR

SEQ ID NO: 14097 - DNA, 2519 bp, Homo sapiens
gaattccgaaggaggggtaggcgctgcccgcgcgcagaggccgcgcccctcctggccccggcttcttggctgtcaaacagatgcagcaacgtcggctcctgccgaggagcccaaggggtcccgggatccgccgcacaggctggcactgcttgaagaggaggctactcggagactgcgccgcgcggattggaggctccccaaatattttgcgatctgaggatccagctcaagtgaggtgccataggacgtgttcctgagtttgcattgcacggagaccttcctggaattgaaaccgcatacagcacaactcaagtttgcatcagactgggaagcgaacttaagccagcggtgcgtggcccaggagtgggaaaggaaatggatgcctgaagtggaagaggtggtgcagagggggcaccgcccatgctgccctgcttccaactgctgcgcatagggggcggcaggggcggtgatctctacaccttccacccccccgccggggctggctgcacctatcgcttgggccacagggccgacctgtgtgatgtggccctgcggccccagcaggagcctggcctcatctctgggatccacgccgaactgcatgccgagccccggggtgatgactggagggtcagcctggaagaccacagcagccaaggtactttggtcaataatgtccgactcccaagaggtcacaggctggaattgagtgatggagacctcctgacctttggccctgaagggcccccaggaaccagcccctcggagttctacttcatgttccaacaagtacgagtcaagcctcaggactttgctgccattaccatcccacggtctaggggagaagcccgggttggggctggtttccggcctatgctgccctcccagggggctccacagcggcctctcagcaccttctcccctgcccccaaggccacactgatcctaaactccataggcagcctcagcaagctccggccccagcccctcaccttctcccctagttggggtggaccaaagagcctgcctgttcccgccccacctggggaaatggggaccacgccttctgctccaccacaacgcaatcggaggaaatctgttcaccgagtgttggcggaactggatgatgagagtgagcctcctgagaacccgccaccggtccttatggagcccaggaagaaactccgtgtagacaaagccccactgactcccactggaaatcgacgtggccgtcctcggaagtacccagtgagcgctcccatggctccccctgcagttgggggcggggagccctgtgcagctccttgttgctgcctgccccaggaagagacagtggcctgggttcagtgtgatggctgtgacgtctggttccatgtggcctgtgttggctgcagcatccaggctgccagggaggccgacttccgatgcccagggtgccgggctggcattcagacctaaggtccactgccaaggcaccatcggacacacctgcccatgagtagacacagcagcgagcaaataggtctgataaataccccccttcccttccctccccaggagggaatgactacagggaagaaggatggattgatgtggactcattcagggcctggagcagaccctggtggccaagacagaagagatggtttcctgccaaagatattgccacctccaggaaattgccagtgagctggaagttcccactattacaagccataaggccatgttgccatggacaccagaatatctgtagtcagagcacctatcagttgcaaaagccatgcctgcaaccgatggaaaatgtaagagggagttcttaaggttcttggtggcatcacccaaggcattctgggaaaacctagggcctggccccaaaacttccctactctgtggctagtcctgctgccaacaaaatcgtagcgacctggcttttcacagctttgcttttatttccaagtcaaggacaagccgcttcattcactcctgggcatttactcttcttgtgggtctgtgatattccttgctttccagggagaatgtgcttggcaaggtctggagaactaattcagaatcttaggggaaggggagagatggaaatacaaacctgcttactggaaaggtgcaaatatatgggttgagctggaggtaggaatacaggtaattaaggtttctagtttaagggaaaacagatctattgccatttaaataaggtaactgggatttggttaagttcacaaagatagcagaagatttatttacaggcttcacctgtactgtcagggcaagagaaagcctggtaaaccagctacagcagtttaccagtgtgatggctgtgacacagctccactccacgggtggacacagcagagggcaactgggctggcctggttcagtgtgaatcaaaccgcttaacccacacatggtacatgtgattttcttttgtgagccttacaccaagccaaactattgtcaaagcatcatttctatagaaataaagccttatcttgacctgttctatt

SEQ ID NO: 14098 - protein, 345 aa, Homo sapiens
MLPCFQLLRIGGGRGGDLYTFHPPAGAGCTYRLGHRADLCDVALRPQQEPGLISGIHAELHAEPRGDDWRVSLEDHSSQGTLVNNVRLPRGHRLELSDGDLLTFGPEGPPGTSPSEFYFMFQQVRVKPQDFAAITIPRSRGEARVGAGFRPMLPSQGAPQRPLSTFSPAPKATLILNSIGSLSKLRPQPLTFSPSWGGPKSLPVPAPPGEMGTTPSAPPQRNRRKSVHRVLAELDDESEPPENPPPVLMEPRKKLRVDKAPLTPTGNRRGRPRKYPVSAPMAPPAVGGGEPCAAPCCCLPQEETVAWVQCDGCDVWFHVACVGCSIQAAREADFRCPGCRAGIQT

SEQ ID NO: 14099 - DNA, 2853 bp, Homo sapiens
tccgaaggaggggtaggcgctgcccgcgcgcagaggccgcgcccctcctggccccggcttcttggctgtcaaacagatgcagcaacgtcggctcctgccgaggagcccaaggggtcccgggatccgccgcacaggctggcactgcttgaagaggaggctactcggagactgcgccgcgcggtggattcattgccctcggaggttcaaccagttatgagtgagggattggccagaagatcggggcgcaggcaagcaggagtgctctattaggataagcaagtttgacaggaagaagctactcttctccgaattacacagaggtgatgtgttcgtattgcacgtagacgtgtgtataacaggacctccttccccgcgccccgccaccccgacacacacaggagctgcctaaagtatccttgccttgcagattggaggctccccaaatattttgcgatctgaggatccagctcaagtgaggtgccataggacgtgttcctgagtttgcattgcacggagaccttcctggaatttttcatttgcaagtcggcttaaccaattttgcattgagtcctaggctgcttgcactctgaatttgggctattcaggtagtgtgctcaaagttgaaaccgcatacagcacaactcaagtttgcatcagactgggaagcgaacttaagccagcggtgcgtggcccaggagtgggaaaggaaatggatgcctgaagtggaagaggtggtgcagagggggcaccgcccatgctgccctgcttccaactgctgcgcatagggggcggcaggggcggtgatctctacaccttccacccccccgccggggctggctgcacctatcgcttgggccacagggccgacctgtgtgatgtggccctgcggccccagcaggagcctggcctcatctctgggatccacgccgaactgcatgccgagccccggggtgatgactggagggtcagcctggaagaccacagcagccaaggtactttggtcaataatgtccgactcccaagaggtcacaggctggaattgagtgatggagacctcctgacctttggccctgaagggcccccaggaaccagcccctcggagttctacttcatgttccaacaagtacgagtcaagcctcaggactttgctgccattaccatcccacggtctaggggagaagcccgggttggggctggtttccggcctatgctgccctcccagggggctccacagcggcctctcagcaccttctcccctgcccccaaggccacactgatcctaaactccataggcagcctcagcaagctccggccccagcccctcaccttctcccctagttggggtggaccaaagagcctgcctgttcccgccccacctggggaaatggggaccacgccttctgctccaccacaacgcaatcggaggaaatctgttcaccgagtgttggcggaactggatgatgagagtgagcctcctgagaacccgccaccggtccttatggagcccaggaagaaactccgtgtagacaaagccccactgactcccactggaaatcgacgtggccgtcctcggaagtacccagtgagcgctcccatggctccccctgcagttgggggcggggagccctgtgcagctccttgttgctgcctgccccaggaagagacagtggcctgggttcagtgtgatggctgtgacgtctggttccatgtggcctgtgttggctgcagcatccaggctgccagggaggccgacttccgatgcccagggtgccgggctggcattcagacctaaggtccactgccaaggcaccatcggacacacctgcccatgagtagacacagcagcgagcaaataggtctgataaataccccccttcccttccctccccaggagggaatgactacagggaagaaggatggattgatgtggactcattcagggcctggagcagaccctggtggccaagacagaagagatggtttcctgccaaagatattgccacctccaggaaattgccagtgagctggaagttcccactattacaagccataaggccatgttgccatggacaccagaatatctgtagtcagagcacctatcagttgcaaaagccatgcctgcaaccgatggaaaatgtaagagggagttcttaaggttcttggtggcatcacccaaggcattctgggaaaacctagggcctggccccaaaacttccctactctgtggctagtcctgctgccaacaaaatcgtagcgacctggcttttcacagctttgcttttatttccaagtcaaggacaagccgcttcattcactcctgggcatttactcttcttgtgggtctgtgatattccttgctttccagggagaatgtgcttggcaaggtctggagaactaattcagaatcttaggggaaggggagagatggaaatacaaacctgcttactggaaaggtgcaaatatatgggttgagctggaggtaggaatacaggtaattaaggtttctagtttaagggaaaacagatctattgccatttaaataaggtaactgggatttggttaagttcacaaagatagcagaagatttatttacaggcttcacctgtactgtcagggcaagagaaagcctggtaaaccagctacagcagtttaccagtgtgatggctgtgacacagctccactccacgggtggacacagcagagggcaactgggctggcctggttcagtgtgaatcaaaccgcttaacccacacatggtacatgtgattttcttttgtgagccttacaccaagccaaactattgtcaaagcatcatttctatagaaataaagccttatcttgacctgttctatt

SEQ ID NO: 14100 - protein, 345 aa, Homo sapiens; identical to SEQ ID NO: 14098

SEQ ID NO: 14101 - DNA, 3038 bp, Homo sapiens
aggaggggtaggcgctgcccgcgcgcagaggccgcgcccctcctggccccggcttcttggctgtcaaacagatgcagcaacgtcggctcctgccgaggagcccaaggggtcccgggatccgccgcacaggctggcactgcttgaagaggaggctactcggagactgcgccgcgcggattggaggctccccaaatattttgcgatctgaggatccagctcaagtgaggtgccataggacgtgttcctgagtttgcattgcacggagaccttcctggaatttttcatttgcaagtcggcttaaccaattttgcattgagtcctaggctgcttgcactctgaatttgggctattcaggtagtgtgctcaaagttgaaaccgcatacagcacaactcaagtttgcatcagactgggaagcgaacttaagccagcggtgcgtggcccaggagtgggaaaggaaatggatgcctgaagtggaagaggtggtgcagagggggcaccgcccatgctgccctgcttccaactgctgcgcatagggggcggcaggggcggtgatctctacaccttccacccccccgccggggctggctgcacctatcgcttgggccacagggccgacctgtgtgatgtggccctgcggccccagcaggagcctggcctcatctctgggatccacgccgaactgcatgccgagccccggggtgatgactggagggtcagcctggaagaccacagcagccaaggtactttggtcaataatgtccgactcccaagaggtcacaggctggaattgagtgatggagacctcctgacctttggccctgaagggcccccaggaaccagcccctcggagttctacttcatgttccaacaagtacgagtcaagcctcaggactttgctgccattaccatcccacggtctaggggagaagcccgggttggggctggtttccggcctatgctgccctcccagggggctccacagcggcctctcagcaccttctcccctgcccccaaggccacactgatcctaaactccataggcagcctcagcaagctccggccccagcccctcaccttctcccctagttggggtggaccaaagagcctgcctgttcccgccccacctggggaaatggggaccacgccttctgctccaccacaacgcaatcggaggaaatctgttcaccgagtgttggcggaactggatgatgagagtgagcctcctgagaacccgccaccggtccttatggagcccaggaagaaactccgtgtagacaaagccccactgactcccactggaaatcgacgtggccgtcctcggaagtacccagtgagcgctcccatggctccccctgcagttgggggcggggagccctgtgcagctccttgttgctgcctgccccaggaagagacagtggcctgggttcagtgtgatggctgtgacgtctggttccatgtggcctgtgttggctgcagcatccaggctgccagggaggccgacttccgatgcccagggtgccgggctggcattcagacctaaggtccactgccaaggcaccatcggacacacctgcccatgagtagacacagcagcgagcaaataggtctgataaataccccccttcccttccctccccaggagggaatgactacagggaagaaggatggattgatgtggactcattcagggcctggagcagaccctggtggccaagacagaagagatggtttcctgccaaagatattgccacctccaggaaattgccagtgagctggaagttcccactattacaagccataaggccatgttgccatggacaccagaatatctgtagtcagagcacctatcagttgcaaaagccatgcctgcaaccgatggaaaatgtaagagggagttcttaaggttcttggtggcatcacccaaggcattctgggaaaacctagggcctggccccaaaacttccctactctgtggctagtcctgctgccaacaaaatcgtagcgacctggcttttcacagctttgcttttatttccaagtcaaggacaagccgcttcattcactcctgggcatttactcttcttgtgggtctgtgatattccttgctttccagggagaatgtgcttggcaaggtctggagaactaattcagaatcttaggggaaggggagagatggaaatacaaacctgcttactggaaaggtgcaaatatatgggttgagctggaggtaggaatacaggtaattaaggtttctagtttaagggaaaacagatctattgccatttaaataaggtaactgggatttggttaagttcacaaagatagcagaagatttatttacaggcttcacctgtactgtcagggcaagagaaagcctggtaaaccagctacagcagtttaccagtgtgatggctgtgacacagctccactccacgggtggacacagcagagggcaactgggctggcctggttcagtgtgaatcaaaccgcttaacccacacatggtacatgtgattttcttttgtgagccttacaccaagccaaactattgtcaaagcatcatttctatagaaataaagccttatcttgacctgttctattaaaacctgccacacccgccctttcctacctagatttaatgagcccaagtttttaaaatggaagaaatgactctggggcaaagacccctaatgaactagtggcagagccaggaataaaacttgagtaactaatgagtcacttatgggcagagtatgcaaaaaccttaagtggaaaccaaatagaccctggtatcaagaaagcacaaagtattaatagaagtttctggttggggtgatctaggttcaacagaaataagatgatttctaagtataaagccatttaagaattccagagtagggtgggaaagcaaaaagccagctctgaacaggtaacagctacatggtgactgagtctatgggcaaaagttcttgcatcacaggcttttgggaactagcctatcacagggccctgtacaaataaacttggctgcaatccc

SEQ ID NO: 14102 - protein, 345 aa, Homo sapiens; identical to SEQ ID NO: 14098

SEQ ID NO: 14103 - DNA, 2643 bp, Homo sapiens
gtttgcatcagactgggaagcgaacttaagccagcggtgcgtggcccaggagtgggaaaggaaatggatgcctgaagtggaagaggtggtgcagagggggcaccgcccatgctgccctgcttccaactgctgcgcatagggggcggcaggggcggtgatctctacaccttccacccccccgccggggctggctgcacctatcgcttgggccacagggccgacctgtgtgatgtggccctgcggccccagcaggagcctggcctcatctctgggatccacgccgaactgcatgccgagccccggggtgatgactggagggtcagcctggaagaccacagcagccaaggtactttggtcaataatgtccgactcccaagaggtcacaggctggaattgagtgatggagacctcctgacctttggccctgaagggcccccaggaaccagcccctcggagttctacttcatgttccaacaagtacgagtcaagcctcaggactttgctgccattaccatcccacggtctaggggagaagcccgggttggggctggtttccggcctatgctgccctcccagggggctccacagcggcctctcagcaccttctcccctgcccccaaggccacactgatcctaaactccataggcagcctcagcaagctccggccccagcccctcaccttctcccctagttggggtggaccaaagagcctgcctgttcccgccccacctggggaaatggggaccacgccttctgctccaccacaacgcaatcggaggaaatctgttcaccgagtgttggcggaactggatgatgagagtgagcctcctgagaacccgccaccggtccttatggagcccaggaagaaactccgtgtagacaaagccccactgactcccactggaaatcgacgtggccgtcctcggaagtacccagtgagcgctcccatggctccccctgcagttgggggcggggagccctgtgcagctccttgttgctgcctgccccaggaagagacagtggcctgggttcagtgtgatggctgtgacgtctggttccatgtggcctgtgttggctgcagcatccaggctgccagggaggccgacttccgatgcccagggtgccgggctggcattcagacctaaggtccactgccaaggcaccatcggacacacctgcccatgagtagacacagcagcgagcaaataggtctgataaataccccccttcccttccctccccaggagggaatgactacagggaagaaggatggattgatgtggactcattcagggcctggagcagaccctggtggccaagacagaagagatggtttcctgccaaagatattgccacctccaggaaattgccagtgagctggaagttcccactattacaagccataaggccatgttgccatggacaccagaatatctgtagtcagagcacctatcagttgcaaaagccatgcctgcaaccgatggaaaatgtaagagggagttcttaaggttcttggtggcatcacccaaggcattctgggaaaacctagggcctggccccaaaacttccctactctgtggctagtcctgctgccaacaaaatcgtagcgacctggcttttcacagctttgcttttatttccaagtcaaggacaagccgcttcattcactcctgggcatttactcttcttgtgggtctgtgatattccttgctttccagggagaatgtgcttggcaaggtctggagaactaattcagaatcttaggggaaggggagagatggaaatacaaacctgcttactggaaaggtgcaaatatatgggttgagctggaggtaggaatacaggtaattaaggtttctagtttaagggaaaacagatctattgccatttaaataaggtaactgggatttggttaagttcacaaagatagcagaagatttatttacaggcttcacctgtactgtcagggcaagagaaagcctggtaaaccagctacagcagtttaccagtgtgatggctgtgacacagctccactccacgggtggacacagcagagggcaactgggctggcctggttcagtgtgaatcaaaccgcttaacccacacatggtacatgtgattttcttttgtgagccttacaccaagccaaactattgtcaaagcatcatttctatagaaataaagccttatcttgacctgttctattaaaacctgccacacccgccctttcctacctagatttaatgagcccaagtttttaaaatggaagaaatgactctggggcaaagacccctaatgaactagtggcagagccaggaataaaacttgagtaactaatgagtcacttatgggcagagtatgcaaaaaccttaagtggaaaccaaatagaccctggtatcaagaaagcacaaagtattaatagaagtttctggttggggtgatctaggttcaacagaaataagatgatttctaagtataaagccatttaagaattccagagtagggtgggaaagcaaaaagccagctctgaacaggtaacagctacatggtgactgagtctatgggcaaaagttcttgcatcacaggcttttgggaactagcctatcacagggccctgtacaaataaacttggctgcaatccc

SEQ ID NO: 14104 - protein, 345 aa, Homo sapiens; identical to SEQ ID NO: 14098

SEQ ID NO: 14105 - DNA, 2780 bp, Homo sapiens
gtttgcatcagactgggaagcgaacttaagccagcggtgcgtggcccaggagtgggaaaggaaatggatgcctgaagtggaagaggtggtgcagagggggcaccgcccatgctgccctgcttccaactgctgcgcatagggggcggcaggggcggtgatctctacaccttccacccccccgccggggctggctgcacctatcgcttgggccacagggccgacctgtgtgatgtggccctgcggccccagcaggagcctggcctcatctctgggatccacgccgaactgcatgccgagccccggggtgatgactggagggtcagcctggaagaccacagcagccaaggtactttggtcaataatgtccgactcccaagaggtcacaggctggaattgagtgatggagacctcctgacctttggccctgaagggcccccaggaaccagcccctcggagttctacttcatgttccaacaagtacgagtcaagcctcaggactttgctgccattaccatcccacggtctaggggagaagcccgggttggggctggtttccggcctatgctgccctcccagggggctccacagcggcctctcagcaccttctcccctgcccccaaggccacactgatcctaaactccataggcagcctcagcaagctccggccccagcccctcaccttctcccctagttggggtggaccaaagagcctgcctgttcccgccccacctggggaaatggggaccacgccttctgctccaccacaacgcaatcggaggaaatctgttcaccgagtgttggcggaactggatgatgagagtgagcctcctgagaacccgccaccggtccttatggagcccaggaagaaactccgtgtagacaaagccccactgactcccactggaaatcgacgtggccgtcctcggaagtacccagtgagcgctcccatggctccccctgcagttgggggcggggagccctgtgcagctccttgttgctgcctgccccaggaagagacagtggcctgggttcagtgtgatggctgtgacgtctggttccatgtggcctgtgttggctgcagcatccaggctgccagggaggccgacttccgatgcccagggtgccgggctggcattcagacctaaggtccactgccaaggcaccatcggacacacctgcccatgagtagacacagcagcgagcaaataggtctgataaataccccccttcccttccctccccaggagggaatgactacagggaagaaggatggattgatgtggactcattcagggcctggagcagaccctggtggccaagacagaagagatggtttcctgccaaagatattgccacctccaggaaattgccagtgagctggaagttcccactattacaagccataaggccatgttgccatggacaccagaatatctgtagtcagagcacctatcagttgcaaaagccatgcctgcaaccgatggaaaatgtaagagggagttcttaaggttcttggtggcatcacccaaggcattctgggaaaacctagggcctggccccaaaacttccctactctgtggctagtcctgctgccaacaaaatcgtagcgacctggcttttcacagctttgcttttatttccaagtcaaggacaagccgcttcattcactcctgggcatttactcttcttgtgggtctgtgatattccttgctttccagggagaatgtgcttggcaaggtctggagaactaattcagaatcttaggggaaggggagagatggaaatacaaacctgcttactggaaaggtgcaaatatatgggttgagctggaggtaggaatacaggtaattaaggtttctagtttaagggaaaacagatctattgccatttaaataaggtaactgggatttggttaagttcacaaagatagcagaagatttatttacaggcttcacctgtactgtcagggcaagagaaagcctggtaaaccagctacagcagtttaccagtgtgatggctgtgacacagctccactccacgggtggacacagcagagggcaactgggctggcctggttcagtgtgaatcaaaccgcttaacccacacatggtacatgtgattttcttttgtgagccttacaccaagccaaactattgtcaaagcatcatttctatagaaataaagccttatcttgacctgttctattaaaacctgccacacccgccctttcctacctagatttaatgagcccaagtttttaaaatggaagaaatgactctggggcaaagacccctaatgaactagtggcagagccaggaataaaacttgagtaactaatgagtcacttatgggcagagtatgcaaaaaccttaagtggaaaccaaatagaccctggtatcaagaaagcacaaagtattaatagaagtttctggttggggtgatctaggttcaacagaaataagatgatttctaagtataaagccatttaagaattccagagtagggtgggaaagcaaaaagccagctctgaacaggtaacagctacatggtgactgagtctatgggcaaaagttcttgcatcacaggcttttgggaactagcctatcacagggccctgtacaaataaacttggctgcaatcccagctctccctctgatgttgtgtgaccttaaggagtgtaaatggcaccttagtttcagggtcacttgggtatgagcattggatattcccatccctacctcagtaactgaaggacaaaccaagataagtgtgtctatct

SEQ ID NO: 14106 - protein, 345 aa, Homo sapiens; identical to SEQ ID NO: 14098

SEQ ID NO: 14107 - DNA, 1524 bp, Homo sapiens
ctaaactccataggcagcctcagcaagctccggccccagcccctcacctggggaaatggggaccacgccttctgctccaccacaacgcaatcggaggaaatctgttcaccgagtgttggcggaactggatgatgagagtgagcctcctgagaacccgccaccggtccttatggagcccaggaagaaactccgtgtagacaaagccccactgactcccactggaaatcgacgtggccgtcctcggaagtacccagtgagcgctcccatggctccccctgcagttgggggcggggagccctgtgcagctccttgttgctgcctgccccaggaagagacagtggcctgggttcagtgtgatggctgtgacgtctggttccatgtggcctgtgttggctgcagcatccaggctgccagggaggccgacttccgatgcccagggtgccgggctggcattcagacctaaggtccactgccaaggcaccatcggacacacctgcccatgagtagacacagcagcgagcaaataggtctgataaataccccccttcccttccctccccaggagggaatgactacagggaagaaggatggattgatgtggactcattcagggcctggagcagaccctggtggccaagacagaagagatggtttcctgccaaagatattgccacctccaggaaattgccagtgagctggaagttcccactattacaagccataaggccatgttgccatggacaccagaatatctgtagtcagagcacctatcagttgcaaaagccatgcctgcaaccgatggaaaatgtaagagggagttcttaaggttcttggtggcatcacccaaggcattctgggaaaacctagggcctggccccaaaacttccctactctgtggctagtcctgctgccaacaaaatcgtagcgacctggcttttcacagctttgcttttatttccaagtcaaggacaagccgcttcattcactcctgggcatttactcttcttgtgggtctgtgatattccttgctttccagggagaatgtgcttggcaaggtctggagaactaattcagaatcttaggggaaggggagagatggaaatacaaacctgcttactggaaaggtgcaaatatatgggttgagctggaggtaggaatacaggtaattaaggtttctagtttaagggaaaacagatctattgccatttaaataaggtaactgggatttggttaagttcacaaagatagcagaagatttatttacaggcttcacctgtactgtcagggcaagagaaagcctggtaaaccagctacagcagtttaccagtgtgatggctgtgacacagctccactccacgggtggacacagcagagggcaactgggctggcctggttcagtgtgaatcaaaccgcttaacccacacatggtacatgtgattttcttttgtgagccttacaccaagccaaactattgtcaaagcatcatttctatagaaataaagccttatcttgacctgttctatt

SEQ ID NO: 14108 - protein, 135 aa, Homo sapiens
MGTTPSAPPQRNRRKSVHRVLAELDDESEPPENPPPVLMEPRKKLRVDKAPLTPTGNRRGRPRKYPVSAPMAPPAVGGGEPCAAPCCCLPQEETVAWVQCDGCDVWFHVACVGCSIQAAREADFRCPGCRAGIQT

SEQ ID NO: 14109 - DNA, 1960 bp, Homo sapiens
ctaaactccataggcagcctcagcaagctccggccccagcccctcacctggggaaatggggaccacgccttctgctccaccacaacgcaatcggaggaaatctgttcaccgagtgttggcggaactggatgatgagagtgagcctcctgagaacccgccaccggtccttatggagcccaggaagaaactccgtgtagacaaagccccactgactcccactggaaatcgacgtggccgtcctcggaagtacccagtgagcgctcccatggctccccctgcagttgggggcggggagccctgtgcagctccttgttgctgcctgccccaggaagagacagtggcctgggttcagtgtgatggctgtgacgtctggttccatgtggcctgtgttggctgcagcatccaggctgccagggaggccgacttccgatgcccagggtgccgggctggcattcagacctaaggtccactgccaaggcaccatcggacacacctgcccatgagtagacacagcagcgagcaaataggtctgataaataccccccttcccttccctccccaggagggaatgactacagggaagaaggatggattgatgtggactcattcagggcctggagcagaccctggtggccaagacagaagagatggtttcctgccaaagatattgccacctccaggaaattgccagtgagctggaagttcccactattacaagccataaggccatgttgccatggacaccagaatatctgtagtcagagcacctatcagttgcaaaagccatgcctgcaaccgatggaaaatgtaagagggagttcttaaggttcttggtggcatcacccaaggcattctgggaaaacctagggcctggccccaaaacttccctactctgtggctagtcctgctgccaacaaaatcgtagcgacctggcttttcacagctttgcttttatttccaagtcaaggacaagccgcttcattcactcctgggcatttactcttcttgtgggtctgtgatattccttgctttccagggagaatgtgcttggcaaggtctggagaactaattcagaatcttaggggaaggggagagatggaaatacaaacctgcttactggaaaggtgcaaatatatgggttgagctggaggtaggaatacaggtaattaaggtttctagtttaagggaaaacagatctattgccatttaaataaggtaactgggatttggttaagttcacaaagatagcagaagatttatttacaggcttcacctgtactgtcagggcaagagaaagcctggtaaaccagctacagcagtttaccagtgtgatggctgtgacacagctccactccacgggtggacacagcagagggcaactgggctggcctggttcagtgtgaatcaaaccgcttaacccacacatggtacatgtgattttcttttgtgagccttacaccaagccaaactattgtcaaagcatcatttctatagaaataaagccttatcttgacctgttctattaaaacctgccacacccgccctttcctacctagatttaatgagcccaagtttttaaaatggaagaaatgactctggggcaaagacccctaatgaactagtggcagagccaggaataaaacttgagtaactaatgagtcacttatgggcagagtatgcaaaaaccttaagtggaaaccaaatagaccctggtatcaagaaagcacaaagtattaatagaagtttctggttggggtgatctaggttcaacagaaataagatgatttctaagtataaagccatttaagaattccagagtagggtgggaaagcaaaaagccagctctgaacaggtaacagctacatggtgactgagtctatgggcaaaagttcttgcatcacaggcttttgggaactagcctatcacagggccctgtacaaataaacttggctgcaatccc

SEQ ID NO: 14110 - protein, 135 aa, Homo sapiens; identical to SEQ ID NO: 14108

SEQ ID NO: 14111 - DNA, 2097 bp, Homo sapiens
ctaaactccataggcagcctcagcaagctccggccccagcccctcacctggggaaatggggaccacgccttctgctccaccacaacgcaatcggaggaaatctgttcaccgagtgttggcggaactggatgatgagagtgagcctcctgagaacccgccaccggtccttatggagcccaggaagaaactccgtgtagacaaagccccactgactcccactggaaatcgacgtggccgtcctcggaagtacccagtgagcgctcccatggctccccctgcagttgggggcggggagccctgtgcagctccttgttgctgcctgccccaggaagagacagtggcctgggttcagtgtgatggctgtgacgtctggttccatgtggcctgtgttggctgcagcatccaggctgccagggaggccgacttccgatgcccagggtgccgggctggcattcagacctaaggtccactgccaaggcaccatcggacacacctgcccatgagtagacacagcagcgagcaaataggtctgataaataccccccttcccttccctccccaggagggaatgactacagggaagaaggatggattgatgtggactcattcagggcctggagcagaccctggtggccaagacagaagagatggtttcctgccaaagatattgccacctccaggaaattgccagtgagctggaagttcccactattacaagccataaggccatgttgccatggacaccagaatatctgtagtcagagcacctatcagttgcaaaagccatgcctgcaaccgatggaaaatgtaagagggagttcttaaggttcttggtggcatcacccaaggcattctgggaaaacctagggcctggccccaaaacttccctactctgtggctagtcctgctgccaacaaaatcgtagcgacctggcttttcacagctttgcttttatttccaagtcaaggacaagccgcttcattcactcctgggcatttactcttcttgtgggtctgtgatattccttgctttccagggagaatgtgcttggcaaggtctggagaactaattcagaatcttaggggaaggggagagatggaaatacaaacctgcttactggaaaggtgcaaatatatgggttgagctggaggtaggaatacaggtaattaaggtttctagtttaagggaaaacagatctattgccatttaaataaggtaactgggatttggttaagttcacaaagatagcagaagatttatttacaggcttcacctgtactgtcagggcaagagaaagcctggtaaaccagctacagcagtttaccagtgtgatggctgtgacacagctccactccacgggtggacacagcagagggcaactgggctggcctggttcagtgtgaatcaaaccgcttaacccacacatggtacatgtgattttcttttgtgagccttacaccaagccaaactattgtcaaagcatcatttctatagaaataaagccttatcttgacctgttctattaaaacctgccacacccgccctttcctacctagatttaatgagcccaagtttttaaaatggaagaaatgactctggggcaaagacccctaatgaactagtggcagagccaggaataaaacttgagtaactaatgagtcacttatgggcagagtatgcaaaaaccttaagtggaaaccaaatagaccctggtatcaagaaagcacaaagtattaatagaagtttctggttggggtgatctaggttcaacagaaataagatgatttctaagtataaagccatttaagaattccagagtagggtgggaaagcaaaaagccagctctgaacaggtaacagctacatggtgactgagtctatgggcaaaagttcttgcatcacaggcttttgggaactagcctatcacagggccctgtacaaataaacttggctgcaatcccagctctccctctgatgttgtgtgaccttaaggagtgtaaatggcaccttagtttcagggtcacttgggtatgagcattggatattcccatccctacctcagtaactgaaggacaaaccaagataagtgtgtctatct

SEQ ID NO: 14112 - protein, 135 aa, Homo sapiens; identical to SEQ ID NO: 14108

SEQ ID NO: 14113 - DNA, 1162 bp, Homo sapiens
gtagtcctttgttacatgcatgagtcagtgaacagggaatgggtgaatgacatttgtgggtaggttatttctagaagttaggtgggcagcttggaaggcagaggcacttctacagactattccttggggccacacgtaggttcttgaatcccgaatggaaaggggagattgataactggtgtgtttatgttcttacaagtcttctgccttttaaaatccagtcccaggacatcaaagctctgcagaaagaactcgagcaatttgccaagctcctgaagcagaagaggatcaccctgggatatacacaggccgatgtggggctcaccctgggggttctatttgggaaggtattcagccaaacgaccatctgccgctttgaggctctgcagcttagcttcaagaacatgtgtaagctgcggcccttgctgcagaagtgggtggaggaagctgacaacaatgaaaatcttcaggagatatgcaaagcagaaaccctcgtgcaggcccgaaagagaaagcgaaccagtatcgagaaccgagtgagaggcaacctggagaatttgttcctgcagtgcccgaaacccacactgcagcagatcagccacatcgcccagcagcttgggctcgagaaggatgtggtccgagtgtggttctgtaaccggcgccagaagggcaagcgatcaagcagcgactatgcacaacgagaggattttgaggctgctgggtctcctttctcagggggaccagtgtcctttcctctggccccagggccccattttggtaccccaggctatgggagccctcacttcactgcactgtactcctcggtccctttccctgagggggaagcctttccccctgtctccgtcaccactctgggctctcccatgcattcaaactgaggtgcctgcccttctaggaatgggggacagggggaggggaggagctagggaaagaaaacctggagtttgtgccagggtttttgggattaagttcttcattcactaaggaaggaattgggaacacaaagggtgggggcaggggagtttggggcaactggttggagggaaggtgaagttcaatgatgctcttgattttaatcccacatcatgtatcacttttttcttaaataaagaagcctgggacacagtagatagacacactt

SEQ ID NO: 14114 - protein, 164 aa, Homo sapiens; identical to SEQ ID NO: 1485

SEQ ID NO: 14115 - DNA, 1419 bp, Homo sapiens
agagaggggttgagtagtcccttcgcaagccctcatttcaccaggcccccggcttggggcgccttccttccccatggcgggacacctggcttcggatttcgccttctcgccccctccaggtggtggaggtgatgggccaggggggccggagccgggctgggttgatcctcggacctggctaagcttccaaggccctcctggagggccaggaatcgggccgggggttgggccaggctctgaggtgtgggggattcccccatgccccccgccgtatgagttctgtggggggatggcgtactgtgggccccaggttggagtggggctagtgccccaaggcggcttggagacctctcagcctgagggcgaagcaggagtcggggtggagagcaactccgatggggcctccccggagccctgcaccgtcacccctggtgccgtgaagctggagaaggagaagctggagcaaaacccggaggagtcccaggacatcaaagctctgcagaaagaactcgagcaatttgccaagctcctgaagcagaagaggatcaccctgggatatacacaggccgatgtggggctcaccctgggggttctatttgggaaggtattcagccaaacgaccatctgccgctttgaggctctgcagcttagcttcaagaacatgtgtaagctgcggcccttgctgcagaagtgggtggaggaagctgacaacaatgaaaatcttcaggagatatgcaaagcagaaaccctcgtgcaggcccgaaagagaaagcgaaccagtatcgagaaccgagtgagaggcaacctggagaatttgttcctgcagtgcccgaaacccacactgcagcagatcagccacatcgcccagcagcttgggctcgagaaggatgtggtccgagtgtggttctgtaaccggcgccagaagggcaagcgatcaagcagcgactatgcacaacgagaggattttgaggctgctgggtctcctttctcagggggaccagtgtcctttcctctggccccagggccccattttggtaccccaggctatgggagccctcacttcactgcactgtactcctcggtccctttccctgagggggaagcctttccccctgtctccgtcaccactctgggctctcccatgcattcaaactgaggtgcctgcccttctaggaatgggggacagggggaggggaggagctagggaaagaaaacctggagtttgtgccagggtttttgggattaagttcttcattcactaaggaaggaattgggaacacaaagggtgggggcaggggagtttggggcaactggttggagggaaggtgaagttcaatgatgctcttgattttaatcccacatcatgtatcacttttttcttaaataaagaagcctgggacacagtagatagacacactt

SEQ ID NO: 14116 - protein, 360 aa, Homo sapiens; identical to SEQ ID NO: 1483

SEQ ID NO: 14117 - DNA, 392 bp, Homo sapiens
tgattgggcttgggggctcaggaggaggcagaaaagaagaagtctacattcccatgtcaagctacagctagagagttgactcctctatttgagattgacaggcctcggaagtcaaaataagtggtttcctagaccgggtcgagagcaagtctctattggtcccaactgagttttttcagctggtttttcaaccaaacagcacctcatctcccagtgaggggaagggaaggctgggctgagagcagcaaggctgctcatctcacctctccccacccagccatgccagccgcctcacctggtggggagaggtgggcctcacctgggtcccctggcagtgctctgtgaagggtcttgacattgcactgtaataataaaggtgtgtgtgaagtatc

SEQ ID NO: 14118 - protein, 38 aa, Homo sapiens [sequence omitted]

SEQ ID NO: 14119 - DNA, 1590 bp, Homo sapiens
gcaacccactctctgtgctatgacttcattactctttcccagcccagccctgggcaagccccttacgaagtctcaggctacctggatgaccaccctttcttatgatgctgcaaggagggcaggtgggcagagccccgtgcatcctgggctcaggccagggacccaagagcttgggagaagctggttctcagactgaaggccagagcccagcaccttgtcaccatcccggggagcatcatggcacacaacaaccagagccaaggtgattgggcttgggggctcaggaggaggcagaaaagagagaagagctcaatatgggcctgaagatgtgcagctgcattcgttattgttcagctaagatgcattgagctctgcgtggggcactgtgctaggcactcagataccatcccacttcactgagatcctgatgctatctcctcctgcctgggggagttcatccctgactcaaaccttgttttatgtacccagtggtgccaaaaggactgggtcttaggtattagcaagagtaggacagaagtataagaccctctggaggcgtgagccaccgcacccggccaggtgaaaaaaatttatccaactttctcaaatccaggaaatgggaaaaactggcctttttctgacattcacctctctcgccaccaccagtagttaataagaaacctggtgacctgagcaaaatatatttctaaccaatatcattttttttcatctagcaaacatttaagcctagtaagtgctgttcattttgctgttaccaataatacaccttacaatagcagctactagttcttgaattcttcttggtaggtcctacattaacactggcaaggattatctcatgttatctttacttgtgtggtagagactataattgtgtccagttgccaaatgaggaaagcaaggcttggagaggttccattacatttgccgtgggcatatagccagtagctgatgtgtagatcagggatttaaacacaatgctgtctgtgctgggccttcaggagggtgggtgagtatatgtggctgaacagtgcatgctgggtacatgggagggagccacatgctgcaggggagggagagcgggtgcagtgtgactttggtggggatgtggttgacagagaagatatgtcttggagaatgagtgagggtttatcagtcagaggaagggaatttcatgcattttgggaggaggtaggagcggaggtggagagagccactgttttgacctcttgtaactttggagttctggggttttggcttttcagagtcacacaccctccagaccacggttgtctgtgagttgctggggaaccggagcagctggggacactggcactacaactgtgatggccaggactcccttcttagcacacttgagtctttcaactccagcaaaagccagccagaaccaagcatagctgcagaaggagagaagggaaggaaacaatccttcctgacctagagctgcgtctaccctctccggaaacacctgaaagctggggtgggaccacggcccaccgtaggtgtgataggtgcggactggttcatgtggggaaggtggaggagctg

SEQ ID NO: 14120 - protein, 93 aa, Homo sapiens [sequence omitted]

SEQ ID NO: 14121 - DNA, 1719 bp, Homo sapiens
atttctctactcacctgtctccgaatccgtcgtggtgtttcaagcgagtcaagattccagatcgcgccccaggctggactcggaattactgccccgcgggtctgcattttcacagcggcaggtggcttgtggtccctgacaaggaggaccctgagggcaaccacaccttgccatgcagagcacctggcttctcatctgccaagctcactctgacccggctgcaggaagggaaggagccaaccccggactcaagactcaaggggaccagaaccagggagatgagacataccagggctgggcagctgtgggggtccttccagagaggagctgagatacgcctacctggaggggcccctgggcctggaggggctcctcagtgtgactgggtgaagtgttttcagaggaccagggttgaggttgggggcatctcatccagaccctgccggcatctgccccagaacccaagggcccctccttcctccctcctcaatggaaatgctggagatgtcctcagtcaccctctgagcactcacacatcaccccttatttggaaatttttctcactctaaccttccttcctgccgcaccttctgccccatccccaggctctggcctctctctctcctcttctaccctttagcaggtaatgactcagttcccactgaggagccagctgtaggtgagagtttgggctctcggtgaggttgggagaaggaaaaggcttatgggccagggggtgggagggagaatgggcacagccagagcagagtggaagggttgggggaggcgataaagacagatgtttccgtattaccatttttctttcatggtccgagggagctgcccttcccccaagcccaggaaagtgaaaagagaagcaggaacagtaaaatactccacaggaaagaaaaatcttagtgatccctcctgctgtctctttccttttgcctattctggcaaattttgtaagtgaaatttgttaccaagatgtgaaaatcttataagaaagtctctaaatatttgagaataaaattatcaatgtctcagctctgcaggctgaaaaaacggaggctttacaaaataaaatcatgcttggaaaacttctcctctgagggatgtcaaaggctgcactgaataagctctaaggtggtgctgaaatgagtcatttatttgcctgtgtaagctcaggcaggtgttggaattgaggaagtataggtaatgaaaaaagtaaacatgtcctcgggacatagcgactggtgatgaccacacaatcaacacaataaactctagcattcacattgtagtccagctcattcaagcaaagctatctccaatagggagtttaccctgtacagaacacgtgcatttccacctgttctcagactgaccctttgctcatcacaatagtgaaaaaaaacacagccctgggtggagatttaagatgctaatgagtcatgagatgtatgaacaagcatgtacagctactgcacacgtgcacccagaagaccgcccagaacatgcttgctagtaacacctcttcccacccacctcctgtgaataatcatgtaagactcccataaagggagtttctccagcagtgatcaatgctgtctcatccttaggagcagcccaccctgaatcctctcagggtgtacagtttattttgcacttaactttcaaaataatatttttcctttgtaataaattgctttgtacttc

SEQ ID NO: 14122 - protein, 96 aa, Homo sapiens
MRHTRAGQLWGSFQRGAEIRLPGGAPGPGGAPQCDWVKCFQRTRVEVGGISSRPCRHLPQNPRAPPSSLLNGNAGDVLSHPLSTHTSPLIWKFFSL

SEQ ID NO: 14123 - DNA, 1519 bp, Homo sapiens
agcgctgggccgtttctcttttttttccggaccccgcagtggcgcctaaagtctgcaaggaggaggtcgcctctgtgctgtgggtccaggaatctaaggcgagtgctgagggagaaaatgtagttgatgtgggcggatcacttgaggtcaggagttcgaaaccagcctggtcaacatggtgaaacctcgtttctactaaaaatacaaaaattaccctggcatggtggcacacgcctgtaatctcagttacttgggaggctgaggcaggagaatcacttgaacttgggagatggaggttgcagtgagctgagattgcatcactgcactccagcctgggggacaagagcaaaactccgtctcaaaaaaaaaaaagatatttcccaccttggattgctgggtcggggggtggtgggtattttcattcataattgtcagattactttcataaacaatggaaacagtttcaggctcctcagcttctcacctccaaaatgggccttttcctgtatcattaacagtcctcaatgttctggctaatcaactgagcgactgtttatagatttgcaggccatttggatttacaattaatcttattaatgaggctgaaatgtgaagtttatctcagcctcaaagaagtaattcagcaaggatcagtggtttcacttaacagtctggctctgaggctggctgtggccctgttatccatggtgagcaccatgggaatgcaggcaagggctgtgagaggcttggaacaaggctccacccaggagagatctgggtgggcgttggtgaccagtagaacctaggtgtcctgggccagtgcccttggagactagtcttctttaccccaggcatcttctttattctggaatgagcctgcccatccctcaggaagactgaaaggaattcggtcagaagaatattattgacttttatccagacttgatttcagtagagttctgggacctgccatatcctatgggtgagctctatccaggtccccttccctgaattacctgtcctctccccactgactgggatgacacctaattttacaacctgctgtagcatctttgctcccactgtgacagtaaactccttgagactggtggccatcttgggaagtgattagattcagaagaggttgagaggttggggcccccatgatgggattagtgtccttttaagaaaaagaagagactggagctcccactctcttcaccacgtgaggatatggcaagaaggcagctgtctgccaggcaggaagagggccctcaccaggaactgaatctgctggttccctaacctcagatttccagggtccagaattgtgagaaagaaatgtctgttgttaaccaatccatctgtggtgttttgttatggcagcacaagctgactaaacaagtgccaaaaccaaaccagtaactcccactttctagtctcggacccagtattaaggaattctggtcacatagtttattcatccatttaacaaatatttagtaagtgcttctgtgcc

SEQ ID NO: 14124 - protein, 37 aa, Homo sapiens
MWADHLRSGVRNQPGQHGETSFLLKIQKLPWHGGTRL

SEQ ID NO: 14125 - DNA, 1430 bp, Homo sapiens
gcagtggcgcctaaagtctgcaaggaggaggtcgcctctgtgctggcttgtggtccctgacaaggaggaccctgagggcaaccacaccttgccatgcagagcacctggcttctcatctgccaagctcactctgacccggctgcaggaagggaaggagccaaccccggactcaagactcaaggggaccagaaccagggagatgagacataccagggctgggcagctgtgggggtccttccagagaggagctgagatacgcctacctggaggggcccctgggcctggaggggctcctcagtgtgactgggtgaagtgttttcagaggaccagggttgaggttgggggcatctcatccagaccctgccggcatctgccccagaacccaagggcccctccttcctccctcctcaatggaaatgctggagatgtcctcagtcaccctctgagcactcacacatcaccccttatttggaaatttttctcactctaaccttccttcctgccgcaccttctgccccatccccaggctctggcctctctctctcctcttctaccctttagcaggtaatgactcagttcccactgaggagccagctgtaggtgagagtttgggctctcggtgaggttgggagaaggaaaaggcttatgggccagggggtgggagggagaatgggcacagccagagcagagtggaagggttgggggaggcgataaagacagatgtttccgtattaccatttttctttcatggtccgagggagctgcccttcccccaagcccaggaaagtgaaaagagaagcaggaacagtaaaatactccacaggaaagaaaaatcttagtgatccctcctgctgtctctttccttttgcctattctggcaaattttgtaagtgaaatttgttaccaagatgtgaaaatcttataagaaagtctctaaatatttgagaataaaattatcaatgtctcagctctgcaggctgaaaaaacggaggctttacaaaataaaatcatgcttggaaaacttctcctctgagggatgtcaaaggctgcactgaataagctctaaggtggtgctgaaatgagtcatttatttgcctgtgtaagctcaggcaggtgttggaattgaggaagtataggtaatgaaaaaagtaaacatgtcctcgggacatagcgactggtgatgaccacacaatcaacacaataaactctagcattcacattgtagtccagctcattcaagcaaagctatctccaatagggagtttaccctgtacagaacacgtgcatttccacctgttctcagactgaccctttgctcatcacaatagtgaaaaaaaacacagccctgggtggagatttaagatgctaatgagtcatgagatgtatgaacaagcatgtacagctactgcacacgtgcacccagaagaccg

SEQ ID NO: 14126 - protein, 96 aa, Homo sapiens; identical to SEQ ID NO: 14122

SEQ ID NO: 14127 - DNA, 671 bp, Homo sapiens
atttgagcagacttgaagaggagagaaactgagacacgcagggcttgtggtccctgacaaggaggaccctgagggcaaccacaccttgccatgcagagcacctggcttctcatctgccaagctcactctgacccggctgcaggaagggaaggagccaaccccggactcaagactcaaggggaccagaaccagggagatgagacataccagggctgggcagctgtgggggtccttccagagaggagctgagatacgcctacctggaggggcccctgggcctggaggggctcctcagtgtgactgggtgaagtgttttcagaggaccagggttgaggttgggggcatctcatccagaccctgccggcatctgccccagaacccaagggcccctccttcctccctcctcaatggaaatgctggagatgtcctcagtcaccctctgagcactcacacatcaccccttatttggaaatttttctcactctaaccttccttcctgccgcaccttctgccccatccccaggctctggcctctctctctcctcttctaccctttagcaggtaatgactcagttcccactgaggagccagctgtaggtgagagtttgggctctcggtgaggttgggagaaggaaaaggcttatgggccagggggtgggagggagaatggg

SEQ ID NO: 14128 - protein, 96 aa, Homo sapiens; identical to SEQ ID NO: 14122

SEQ ID NO: 14129 - DNA, 1460 bp, Homo sapiens
acattctccccagaggccgagatgcgggtcatggcgccccgagccctcctcctgctgctctcgggaggcctggccctgaccgagacctgggcctgctcccactccatgaggtatttcgacaccgcgcgagtccgagaggggagccgcgggcgccgtgggtggagcaggaggggccggagtattgggaccgggagacacagaagtacaagcgccaggcacaggctgaccgagtgagcctgcggaacctgcgcggctactacaaccagagcgaggacgggtctcacaccctccagaggatgtctggctgcgacctggggcccgacgggcgcctcctccgcgggtatgaccagtccgcctacgacggcaaggattacatcgccctgaacgaggacctgcgctcctggaccgccgcggacaccgcggctcagatcacccagcgcaagttggaggcggcccgtgcggcggagcagctgagagcctacctggagggcacgtgcgtggagtggctccgcagatacctggagaacgggaaggagacgctgcagcgcgcagaacccccaaagacacacgtgacccaccaccccctctctgaccatgaggccaccctgaggtgctgggccctgggcttctaccctgcggagatcacactgacctggcagcgggatggggaggaccagacccaggacaccgagcttgtggagaccaggccagcaggagatggaaccttccagaagtgggcagctgtggtggtgccttctggacaagagcagagatacacgtgccatatgcagcacgaggggctgcaagagcccctcaccctgagctgggagccatcttcccagcccaccatccccatcatgggcatcgttgctggcctggctgtcctggttgtcctagctgtccttggagctgtggtcaccgctatgatgtgtaggaggaagagctcaggtggaaaaggagggagctgctctcaggctgcgtgcagcaacagtgcccagggctctgatgagtctctcatcacttgtaaagcctgagacagctgcctgtgtgggactgagatgcaggatttcttcacacctctcctttgtgacttcaagagcctctggcatctctttctgcaaaggcacctgaatgtgtctgcgttcctgttagcataatgtgaggaggtggagagacagcccacccccgtgtccaccgtgacccctgtccccacactgacctgtgttccctccccgatcatctttcctgttccagagaggtggggctggatgtctccatctctgtctcaaattcatggtgcactgagctgcaacttcttacttccctaatgaagttaagaacctgaatataaatttgtgttctcaaatatttgctatgaagcgttgatggattaattaaataagtcaattcctagaagttgagagagcaaataaagacctgagaaccttccagaatttgca

SEQ ID NO: 14130 - protein, 245 aa, Homo sapiens
MSGCDLGPDGRLLRGYDQSAYDGKDYIALNEDLRSWTAADTAAQITQRKLEAARAAEQLRAYLEGTCVEWLRRYLENGKETLQRAEPPKTHVTHHPLSDHEATLRCWALGFYPAEITLTWQRDGEDQTQDTELVETRPAGDGTFQKWAAVVVPSGQEQRYTCHMQHEGLQEPLTLSWEPSSQPTIPIMGIVAGLAVLVVLAVLGAVVTAMMCRRKSSGGKGGSCSQAACSNSAQGSDESLITCKA

SEQ ID NO: 14131 - DNA, 1607 bp, Homo sapiens
aagccaatcagcgtctccgcagtcccggttctaaagtccccagtcacccacccggactcacattctccccagaggccgagatgcgggtcatggcgccccgagccctcctcctgctgctctcgggaggcctggccctgaccgagacctgggcctgctcccactccatgaggtatttcgacaccgccgtgtcccggcccggccgcggagagccccgcttcatctcagtgggctacgtggacgacacgcagttcgtgcggttcgacagcgacgccgcgagtccgagaggggagccgcgggcgccgtgggtggagcaggaggggccggagtattgggaccgggagacacagaagtacaagcgccaggcacaggctgaccgagtgagcctgcggaacctgcgcggctactacaaccagagcgaggacgggtctcacaccctccagaggatgtctggctgcgacctggggcccgacgggcgcctcctccgcgggtatgaccagtccgcctacgacggcaaggattacatcgccctgaacgaggacctgcgctcctggaccgccgcggacaccgcggctcagatcacccagcgcaagttggaggcggcccgtgcggcggagcagctgagagcctacctggagggcacgtgcgtggagtggctccgcagatacctggagaacgggaaggagacgctgcagcgcgcagaacccccaaagacacacgtgacccaccaccccctctctgaccatgaggccaccctgaggtgctgggccctgggcttctaccctgcggagatcacactgacctggcagcgggatggggaggaccagacccaggacaccgagcttgtggagaccaggccagcaggagatggaaccttccagaagtgggcagctgtggtggtgccttctggacaagagcagagatacacgtgccatatgcagcacgaggggctgcaagagcccctcaccctgagctgggagccatcttcccagcccaccatccccatcatgggcatcgttgctggcctggctgtcctggttgtcctagctgtccttggagctgtggtcaccgctatgatgtgtaggaggaagagctcaggtggaaaaggagggagctgctctcaggctgcgtgcagcaacagtgcccagggctctgatgagtctctcatcacttgtaaagcctgagacagctgcctgtgtgggactgagatgcaggatttcttcacacctctcctttgtgacttcaagagcctctggcatctctttctgcaaaggcacctgaatgtgtctgcgttcctgttagcataatgtgaggaggtggagagacagcccacccccgtgtccaccgtgacccctgtccccacactgacctgtgttccctccccgatcatctttcctgttccagagaggtggggctggatgtctccatctctgtctcaaattcatggtgcactgagctgcaacttcttacttccctaatgaagttaagaacctgaatataaatttgtgttctcaaatatttgctatgaagcgttgatggattaattaaataagtcaattcctagaagttgagagagcaaataaagacctgagaaccttccagaatttgca

SEQ ID NO: 14132 - protein, 366 aa, Homo sapiens; identical to SEQ ID NO: 1489

SEQ ID NO: 14133 - DNA, 1435 bp, Homo sapiens
tctgaccatgaggccaccctgaggtgctgggccctgggcttctaccctgcggagatcacactgacctggcagcgggatggggaggaccagacccaggacaccgagcttgtggagaccaggccagcaggagatggaaccttccagaagtgggcagctgtggtggtgccttctggacaagagcagagatacacgtgccatatgcagcacgaggggctgcaagagcccctcaccctgagctggggtaaggaggggaatggggggtcacatctcttatcagagaaagcagaagtccttctggagcccttcagccgggtcagggctgaggcttgggggtcagggcccctcaccttctcctcctttcccagagccatcttcccagcccaccatccccatcatgggcatcgttgctggcctggctgtcctggttgtcctagctgtccttggagctgtggtcaccgctatgatgtgtaggaggaagagctcaggtagggaaggggtgaagagcggggtctgggttttcttgtcccactgggagtttcaagccccaggtagaagtgtgccccgccttgttactggaagcaccatccacacatgggccatcccagcctgggaccctgtgtgccagcacttactcttttgtgaagcacatgtgacaatgaaggacggatgtatcaccttgatgattatggtgttggggtcctgattccagcattcatgagtcaggggaaggtccctgctaaggacagaccttaggagggcagttggtccagaacccacaactgctttccccatgtttcctgatcctgccctgggtctgcagtcgtagttctggaaacttctcttgggtccaagactaggaggttcccctaagatcacatggccctgcctcctcccagtcccctcatagggcattttcttcccacaggtggaaaaggagggagctgctctcaggctgcgtgcagcaacagtgcccagggctctgatgagtctctcatcacttgtaaagcctgagacagctgcctgtgtgggactgagatgcaggatttcttcacacctctcctttgtgacttcaagagcctctggcatctctttctgcaaaggcacctgaatgtgtctgcgttcctgttagcataatgtgaggaggtggagagacagcccacccccgtgtccaccgtgacccctgtccccacactgacctgtgttccctccccgatcatctttcctgttccagagaggtggggctggatgtctccatctctgtctcaaattcatggtgcactgagctgcaacttcttacttccctaatgaagttaagaacctgaatataaatttgtgttctcaaatatttgctatgaagcgttgatggattaattaaataagtcaattcctagaagttgagagagcaaataaagacctgagaaccttccagaatttg

SEQ ID NO: 14134 - protein, 44 aa, Homo sapiens
MALPPPSPLIGHFLPTGGKGGSCSQAACSNSAQGSDESLITCKA

SEQ ID NO: 14135 - DNA, 789 bp, Homo sapiens
cagaacccccaaagacacacgtgacccaccaccccctctctgaccatgaggccaccctgaggtgctgggccctgggcttctaccctgcggagatcacactgacctggcagcgggatggggaggaccagacccaggacaccgagcttgtggagaccaggccagcaggagatggaaccttccagaagtgggcagctgtggtggtgccttctggacaagagcagagatacacgtgccatatgcagcacgaggggctgcaagagcccctcaccctgagctggggtggaaaaggagggagctgctctcaggctgcgtgcagcaacagtgcccagggctctgatgagtctctcatcacttgtaaagcctgagacagctgcctgtgtgggactgagatgcaggatttcttcacacctctcctttgtgacttcaagagcctctggcatctctttctgcaaaggcacctgaatgtgtctgcgttcctgttagcataatgtgaggaggtggagagacagcccacccccgtgtccaccgtgacccctgtccccacactgacctgtgttccctccccgatcatctttcctgttccagagaggtggggctggatgtctccatctctgtctcaaattcatggtgcactgagctgcaacttcttacttccctaatgaagttaagaacctgaatataaatttgtgttctcaaatatttgctatgaagcgttgatggattaattaaataagtcaattcctagaagttgagagagcaaataaagacctgagaaccttccagaatttg

SEQ ID NO: 14136 - protein, 42 aa, Homo sapiens
MQHEGLQEPLTLSWGGKGGSCSQAACSNSAQGSDESLITCKA

SEQ ID NO: 14137 - DNA, 342 bp, Homo sapiens
agcctgagacagctgcctgtgtgggactgagatgcaggatttcttcacacctctcctttgtgacttcaagagcctctggcatctctttctgcaaaggcacctgaatgtgtctgcgttccccgatcatctttcctgttccagagaggtggggctggatgtctccatctctgtctcaaattcatggtgcactgagctgcaacttcttacttccctaatgaagttaagaacctgaatataaatttgtgttctcaaatatttgctatgaagcgttgatggattaattaaataagtcaattcctagaagttgagagagcaaataaagacctgagaaccttccagaat

SEQ ID NO: 14138 - protein, 66 aa, Homo sapiens
MQDFFTPLLCDFKSLWHLFLQRHLNVSAFPDHLSCSREVGLDVSISVSNSWCTELQLLTSLMKLRT

SEQ ID NO: 14139 - DNA, 905 bp, Homo sapiens
ttttgtgaagcacatgtgacaatgaaggacggatgtatcaccttgatgattatggtgttggggtcctgattccagcattcatgagtcaggggaaggtccctgctaaggacagaccttaggagggcagttggtccagaacccacaactgctttccccatgtttcctgatcctgccctgggtctgcagtcgtagttctggaaacttctcttgggtccaagactaggaggttcccctaagatcacatggccctgcctcctcccagtcccctcatagggcattttcttcccacaggtggaaaaggagggagctgctctcaggctgcgtgtaagtgatggcggcgggcgtgtggaggagctcacctactccataattcctcttgtcccacatctcctgcgggctctgaccaggtctttttttttgttctaccccaggcagcaacagtgcccagggctctgatgagtctctcatcacttgtaaagcctgagacagctgcctgtgtgggactgagatgcaggatttcttcacacctctcctttgtgacttcaagagcctctggcatctctttctgcaaaggcacctgaatgtgtctgcgttcctgttagcataatgtgaggaggtggagagacagcccacccccgtgtccaccgtgacccctgtccccacactgacctgtgttccctccccgatcatctttcctgttccagagaggtggggctggatgtctccatctctgtctcaaattcatggtgcactgagctgcaacttcttacttccctaatgaagttaagaacctgaatataaatttgtgttctcaaatatttgctatgaagcgttgatggattaattaaataagtcaattcctagaagttgagagagcaaataaagacctgagaaccttccagaat

SEQ ID NO: 14140 - protein, 41 aa, Homo sapiens
MSLSSLVKPETAACVGLRCRISSHLSFVTSRASGISFCKGT

SEQ ID NO: 14141 - DNA, 661 bp, Homo sapiens
gctcccactccatgaggtatttcgacaccgccgtgtcccggcccggccgcggagagccccgcttcatctcagtgggctacgtggacgacacgcagttcgtgcggttcgacagcgacgccgcgagtccgagaggggagccgcgggcgccgtgggtggagcaggaggggccggagtattgggaccgggagacacagaagtacaagcgccaggcacaggctgaccgagtgagcctgcggaacctgcgcggctactacaaccagagcgaggacggatttcttcacacctctcctttgtgacttcaagagcctctggcatctctttctgcaaaggcacctgaatgtgtctgcgttcctgttagcataatgtgaggaggtggagagacagcccacccccgtgtccaccgtgacccctgtccccacactgacctgtgttccctccccgatcatctttcctgttccagagaggtggggctggatgtctccatctctgtctcaaattcatggtgcactgagctgcaacttcttacttccctaatgaagttaagaacctgaatataaatttgtgttctcaaatatttgctatgaagcgttgatggattaattaaataagtcaattcctagaagttgagagagcaaataaagacctgagaaccttccagaat

SEQ ID NO: 14142 - protein, 94 aa, Homo sapiens
MRYFDTAVSRPGRGEPRFISVGYVDDTQFVRFDSDAASPRGEPRAPWVEQEGPEYWDRETQKYKRQAQADRVSLRNLRGYYNQSEDGFLHTSPL

SEQ ID NO: 14143 - DNA, 1282 bp, Homo sapiens
gccctcctcctgctgctctcgggaggcctggccctgaccgagacctgggcctgtgagtgcggggttgggagggaagcggcctctgcggagaggagcgaggggccctcccggcgagggcgcaggacccggggagccgcgcagggaggtgggtcgggcgggtctcagcccctcctcgcccccaggctcccactccatgaggtatttcgacaccgccgtgtcccggcccggccgcggagagccccgcttcatctcagtgggctacgtggacgacacgcagttcgtgcggttcgacagcgacgccgcgagtccgagaggggagccgcgggcgccgtgggtggagcaggaggggccggagtattgggaccgggagacacagaagtacaagcgccaggcacaggctgaccgagtgagcctgcggaacctgcgcggctactacaaccagagcgaggacggtgagtgaccccggcccggggcgcaggtcacgacccctccccatcccccacggacggcccgggtcgcccagagtctccccgtctgagatccaccccaaggtggatctgcggaacccgcccagaccctcgaccggagagagccccagtcgcctttacccggtttcattttcggtttaggccaaaatccccgcgggttggtcggggcggggcggggctcgggggactgggctgaccgcgggggcggggccagggtctcacaccctccagaggatgtctggctgcgacctggggcccgacgggcgcctcctccgcgggtatgaccagtccgcctacgacggcaaggattacatcgccctgaacgaggacctgcgctcctggaccgccgcggacaccgcggctcagatcacccagcgcaagttggaggcggcccgtgcggcggagcagctgagagcctacctggagggcacgtgcgtggagtggctccgcagatacctggagaacgggaaggagacgtgcgttcctgttagcataatgtgaggaggtggagagacagcccacccccgtgtccaccgtgacccctgtccccacactgacctgtgttccctccccgatcatctttcctgttccagagaggtggggctggatgtctccatctctgtctcaaattcatggtgcactgagctgcaacttcttacttccctaatgaagttaagaacctgaatataaatttgtgttctcaaatatttgctatgaagcgttgatggattaattaaataagtcaattcctagaagttgagagagcaaataaagacctgagaaccttccagaat

SEQ ID NO: 14144 - protein, 88 aa, Homo sapiens
MSGCDLGPDGRLLRGYDQSAYDGKDYIALNEDLRSWTAADTAAQITQRKLEAARAAEQLRAYLEGTCVEWLRRYLENGKETCVPVSIM

SEQ ID NO: 14145 - DNA, 1407 bp, Homo sapiens
gccctcctcctgctgctctcgggaggcctggccctgaccgagacctgggcctgtgagtgcggggttgggagggaagcggcctctgcggagaggagcgaggggccctcccggcgagggcgcaggacccggggagccgcgcagggaggtgggtcgggcgggtctcagcccctcctcgcccccaggctcccactccatgaggtatttcgacaccgccgtgtcccggcccggccgcggagagccccgcttcatctcagtgggctacgtggacgacacgcagttcgtgcggttcgacagcgacgccgcgagtccgagaggggagccgcgggcgccgtgggtggagcaggaggggccggagtattgggaccgggagacacagaagtacaagcgccaggcacaggctgaccgagtgagcctgcggaacctgcgcggctactacaaccagagcgaggacggtgagtgaccccggcccggggcgcaggtcacgacccctccccatcccccacggacggcccgggtcgcccagagtctccccgtctgagatccaccccaaggtggatctgcggaacccgcccagaccctcgaccggagagagccccagtcgcctttacccggtttcattttcggtttaggccaaaatccccgcgggttggtcggggcggggcggggctcgggggactgggctgaccgcgggggcggggccagggtctcacaccctccagaggatgtctggctgcgacctggggcccgacgggcgcctcctccgcgggtatgaccagtccgcctacgacggcaaggattacatcgccctgaacgaggacctgcgctcctggaccgccgcggacaccgcggctcagatcacccagcgcaagttggaggcggcccgtgcggcggagcagctgagagcctacctggagggcacgtgcgtggagtggctccgcagatacctggagaacgggaaggagacgctgcagcgcgcaggtaccagggacagctgcctgtgtgggactgagatgcaggatttcttcacacctctcctttgtgacttcaagagcctctggcatctctttctgcaaaggcacctgaatgtgtctgcgttcctgttagcataatgtgaggaggtggagagacagcccacccccgtgtccaccgtgacccctgtccccacactgacctgtgttccctccccgatcatctttcctgttccagagaggtggggctggatgtctccatctctgtctcaaattcatggtgcactgagctgcaacttcttacttccctaatgaagttaagaacctgaatataaatttgtgttctcaaatatttgctatgaagcgttgatggattaattaaataagtcaattcctagaagttgagagagcaaataaagacctgagaaccttccagaat

SEQ ID NO: 14146 - protein, 128 aa, Homo sapiens
MSGCDLGPDGRLLRGYDQSAYDGKDYIALNEDLRSWTAADTAAQITQRKLEAARAAEQLRAYLEGTCVEWLRRYLENGKETLQRAGTRDSCLCGTEMQDFFTPLLCDFKSLWHLFLQRHLNVSAFLLA

SEQ ID NO: 14147 - DNA, 749 bp, Homo sapiens
aaagtccccagtcacccacccggactcacattctccccagaggccgagatgcgggtcatggcgccccgagccctcctcctgctgctctcgggaggcctggccctgaccgagacctgggcctgctcccactccatgaggtatttcgacaccgccgtgtcccggcccggccgcggagagccccgcttcatctcagtgggctacgtggacgacacgcagttcgtgcggttcgacagcgacgccgcgagtccgagaggggagccgcgggcgccgtgggtggagcaggaggggccggagtattgggaccgggagacacagaagtacaagcgccaggcacaggctgaccgagtgagcctgcggaacctgcgcggctactacaaccagagcgaggacgggtctcacaccctccagaggatgtctggctgcgacctggggcccgacgggcgcctcctccgcgggtatgaccagtccgcctacgacggcaaggattacatcgccctgaacgaggacctgcgctcctggaccgccgcggacaccgcggctcagatcacccagcgcaagctggatgtctccatctctgtctcaaattcatggtgcactgagctgcaacttcttacttccctaatgaagttaagaacctgaatataaatttgtgttctcaaatatttgctatgaagcgttgatggattaattaaataagtcaattcctagaagttgagagagcaaataaagacctgagaaccttccagaat

SEQ ID NO: 14148 - protein, 196 aa, Homo sapiens
MRVMAPRALLLLLSGGLALTETWACSHSMRYFDTAVSRPGRGEPRFISVGYVDDTQFVRFDSDAASPRGEPRAPWVEQEGPEYWDRETQKYKRQAQADRVSLRNLRGYYNQSEDGSHTLQRMSGCDLGPDGRLLRGYDQSAYDGKDYIALNEDLRSWTAADTAAQITQRKLDVSISVSNSWCTELQLLTSLMKLRT

SEQ ID NO: 14149 - DNA, 1511 bp, Homo sapiens
aagccaatcagcgtctccgcagtcccggttctaaagtccccagtcacccacccggactcacattctccccagaggccgagatgcgggtcatggcgccccgagccctcctcctgctgctctcgggaggcctggccctgaccgagacctgggcctgctcccactccatgaggtatttcgacaccgccgtgtcccggcccggccgcggagagccccgcttcatctcagtgggctacgtggacgacacgcagttcgtgcggttcgacagcgacgccgcgagtccgagaggggagccgcgggcgccgtgggtggagcaggaggggccggagtattgggaccgggagacacagaagtacaagcgccaggcacaggctgaccgagtgagcctgcggaacctgcgcggctactacaaccagagcgaggacgggtctcacaccctccagaggatgtctggctgcgacctggggcccgacgggcgcctcctccgcgggtatgaccagtccgcctacgacggcaaggattacatcgccctgaacgaggacctgcgctcctggaccgccgcggacaccgcggctcagatcacccagcgcaagttggaggcggcccgtgcggcggagcagctgagagcctacctggagggcacgtgcgtggagtggctccgcagatacctggagaacgggaaggagacgctgcagcgcgcagaacccccaaagacacacgtgacccaccaccccctctctgaccatgaggccaccctgaggtgctgggccctgggcttctaccctgcggagatcacactgacctggcagcgggatggggaggaccagacccaggacaccgagcttgtggagaccaggccagcaggagatggaaccttccagaagtgggcagctgtggtggtgccttctggacaagagcagagatacacgtgccatatgcagcacgaggggctgcaagagcccctcaccctgagctgggagccatcttcccagcccaccatccccatcatgggcatcgttgctggcctggctgtcctggttgtcctagctgtccttggagctgtggtcaccgctatgatgtgtaggaggaagagctcagctgcctgtgtgggactgagatgcaggatttcttcacacctctcctttgtgacttcaagagcctctggcatctctttctgcaaaggcacctgaatgtgtctgcgttcctgttagcataatgtgaggaggtggagagacagcccacccccgtgtccaccgtgacccctgtccccacactgacctgtgttccctccccgatcatctttcctgttccagagaggtggggctggatgtctccatctctgtctcaaattcatggtgcactgagctgcaacttcttacttccctaatgaagttaagaacctgaatataaatttgtgttctcaaatatttgctatgaagcgttgatggattaattaaataagtcaattcctagaagttgagagagcaaataaagacctgagaaccttccagaat

SEQ ID NO: 14150 - protein, 368 aa, Homo sapiens
MRVMAPRALLLLLSGGLALTETWACSHSMRYFDTAVSRPGRGEPRFISVGYVDDTQFVRFDSDAASPRGEPRAPWVEQEGPEYWDRETQKYKRQAQADRVSLRNLRGYYNQSEDGSHTLQRMSGCDLGPDGRLLRGYDQSAYDGKDYIALNEDLRSWTAADTAAQITQRKLEAARAAEQLRAYLEGTCVEWLRRYLENGKETLQRAEPPKTHVTHHPLSDHEATLRCWALGFYPAEITLTWQRDGEDQTQDTELVETRPAGDGTFQKWAAVVVPSGQEQRYTCHMQHEGLQEPLTLSWEPSSQPTIPIMGIVAGLAVLVVLAVLGAVVTAMMCRRKSSAACVGLRCRISSHLSFVTSRASGISFCKGT

SEQ ID NO: 14151 - DNA, 609 bp, Homo sapiens
agtcccggttctaaagtccccagtcacccacccggactcacattctccccagaggccgagatgcgggtcatggcgccccgagccctcctcctgctgctctcgggaggcctggccctgaccgagacctgggcctgctcccactccatgaggtatttcgacaccgccgtgtcccggcccggccgcggagagccccgcttcatctcagtgggctacgtggacgacacgcagttcgtgcggttcgacagcgacgccgcgagtccgagaggggagccgcgggcgccgtgggtggagcaggaggggccggagtattgggaccgggagacacagaagtacaagcgccaggcacaggctgaccgagtgagcctgcggaacctgcgcggctactacaaccagagcgaggacgggtctcacaccctccagaggatgtctggctgcgacctcgggatggggaggaccagacccaggacaccgagcttgtggagaccaggccagcaggagatggaaccttccagaagtgggcagctgtggtggtgccttctggacaagagcagagatacacgtgccatatgcagcacgaggggctgcaagagcccctcaccctgagctggg

SEQ ID NO: 14152 - protein, 180 aa, Homo sapiens
MRVMAPRALLLLLSGGLALTETWACSHSMRYFDTAVSRPGRGEPRFISVGYVDDTQFVRFDSDAASPRGEPRAPWVEQEGPEYWDRETQKYKRQAQADRVSLRNLRGYYNQSEDGSHTLQRMSGCDLGMGRTRPRTPSLWRPGQQEMEPSRSGQLWWCLLDKSRDTRAICSTRGCKSPSP

SEQ ID NO: 14153 - DNA, 864 bp, Homo sapiens
aagccaatcagcgtctccgcagtcccggttctaaagtccccagtcacccacccggactcacattctccccagaggccgagatgcgggtcatggcgccccgagccctcctcctgctgctctcgggaggcctggccctgaccgagacctgggcctgctcccactccatgaggtatttcgacaccgccgtgtcccggcccggccgcggagagccccgcttcatctcagtgggctacgtggacgacacgcagttcgtgcggttcgacagcgacgccgcgagtccgagaggggagccgcgggcgccgtgggtggagcaggaggggccggagtattgggaccgggagacacagaagtacaagcgccaggcacaggctgaccgagtgagcctgcggaacctgcgcggctactacaaccagagcgaggacgggtctcacaccctccagaggatgtctggctgcgacctggggcccgacgggcgcctcctccgcgggtatgaccagtccgcctacgacggcaaggattacatcgccctgaacgaggacctgcgctcctggaccgccgcggacaccgcggctcagatcacccagcgcaagttggaggcggcccgtgcggcggagcagctgagagcctacctggagggcacgtgcgtggagtggctccgcagatacctggagaacgggaaggagacgctgcagcgcgcagaacccccaaagacacacgtgacccaccaccccctctctgaccatgaggccagcaggagatggaaccttccagaagtgggcagctgtggtggtgccttctggacaagagcagagatacacgtgccatatgcagcacgaggggctgcaagagcccctcaccctgagc

SEQ ID NO: 14154 - protein, 260 aa, Homo sapiens
MRVMAPRALLLLLSGGLALTETWACSHSMRYFDTAVSRPGRGEPRFISVGYVDDTQFVRFDSDAASPRGEPRAPWVEQEGPEYWDRETQKYKRQAQADRVSLRNLRGYYNQSEDGSHTLQRMSGCDLGPDGRLLRGYDQSAYDGKDYIALNEDLRSWTAADTAAQITQRKLEAARAAEQLRAYLEGTCVEWLRRYLENGKETLQRAEPPKTHVTHHPLSDHEASRRWNLPEVGSCGGAFWTRAEIHVPYAARGAARAPHP

SEQ ID NO: 14155 - DNA, 891 bp, Homo sapiens
acattctccccagaggccgagatgcgggtcatggcgccccgagccctcctcctgctgctctcgggaggcctggccctgaccgagacctgggcctgctcccactccatgaggtatttcgacaccgccgtgtcccggcccggccgcggagagccccgcttcatctcagtgggctacgtggacgacacgcagttcgtgcggttcgacagcgacgccgcgagtccgagaggggagccgcgggcgccgtgggtggagcaggaggggccggagtattgggaccgggagacacagaagtacaagcgccaggcacaggctgaccgagtgagcctgcggaacctgcgcggctactacaaccagagcgaggacggtgagtgaccccggcccggggcgcaggtcacgacccctccccatcccccacggacggcccgggtcgcccagagtctccccgtctgagatccaccccaaggtggatctgcggaacccgcccagaccctcgaccggagagagccccagtcgcctttacccggtttcattttcggtttaggccaaaatccccgcgggttggtcggggcggggcggggctcgggggactgggctgaccgcgggggcggggccagggtctcacaccctccagaggatgtctggctgcgacctggggcccgacgggcgcctcctccgcgggtatgaccagtccgcctacgacggcaaggattacatcgccctgaacgaggacctgcgctcctggaccgccgcggacaccgcggctcagatcacccagcgcaagttggaggcggcccgtgcggcggagcagctgagagcctacctggagggcacgtgcgtggagtggctccgcagatacctggagaacgggaaggagacgctgcagcgcgcagg

SEQ ID NO: 14156 - protein, 116 aa, Homo sapiens
MRVMAPRALLLLLSGGLALTETWACSHSMRYFDTAVSRPGRGEPRFISVGYVDDTQFVRFDSDAASPRGEPRAPWVEQEGPEYWDRETQKYKRQAQADRVSLRNLRGYYNQSEDGE

SEQ ID NO: 14157 - DNA, 1175 bp, Homo sapiens
ccccatcgtgggcattgttgctggcctggctgtcctagcagttgtggtcatcggagctgtggtcgctgctgtgatgtgtaggaggaagagttcaggtagggaaggggtgaggggtggggtctgggttttcttgtcccactgggggtttcaagccccaggtagaagtgttccctgcctcattactgggaagcagcatgcacacaggggctaacgcagcctgggaccctgtgtgccagcacttactcttttgtgcagcacatgtgacaatgaaggatggatgtatcaccttgatggttgtggtgttggggtcctgattccagcattcatgagtcaggggaaggtccctgctaaggacagaccttaggagggcagttggtccaggacccacacttgctttcctcgtgtttcctgatcctgccctgggtctgtagtcatacttctggaaattccttttgggtccaagactaggaggttcctctaagatctcatggccctgcttcctcccagtgccctcacaggacattttcttcccacaggtggaaaaggagggagctactctcaggctgcgtgtaagtggtgggggtgggagtgtggaggagctcacccaccccataattcctcctgtcccacgtctcctgcgggctctgaccaggtcctgtttttgttctactccaggcagcgacagtgcccagggctctgatgtgtctctcacagcttgaaaagcctgagacagctgtcttgtgagggactgagatgcaggatttcttcacgcctcccctttgtgacttcaagagcctctggcatctctttctgcaaaggcacctgaatgtgtctgcgtccctgttagcataatgtgaggaggtggagagacagcccacccttgtgtccactgtgacccctgttcccatgctgacctgtgtttcctccccagtcatctttcttgttccagagaggtggggctggatgtctccatctctgtctcaactttacgtgcactgagctgcaacttcttacttccctactgaaaataagaatctgaatataaatttgttttctcaaatatttgctatgagaggttgatggattaattaaataagtcaattcctggaatttgagagagcaaataaagacctgagaaccttccagaatctgcatgttcgctgtgctgagtctgt

SEQ ID NO: 14158 - protein, 70 aa, Homo sapiens
MALLPPSALTGHFLPTGGKGGSYSQAACKWWGWECGGAHPPHNSSCPTSPAGSDQVLFLFYSRQRQCPGL

SEQ ID NO: 14159 - DNA, 1275 bp, Homo sapiens
gcagctgtggtggtgccttctggagaagagcagagatacacatgccatgtacagcatgaggggctgccgaagcccctcaccctgagatggggtaaggagggggatgaggggtcatatctcttctcagggaaagcaggagcccttcagcagggtcagggcccctcatcttcccctcctttcccagagccgtcttcccagtccaccgtccccatcgtgggcattgttgctggcctggctgtcctagcagttgtggtcatcggagctgtggtcgctgctgtgatgtgtaggaggaagagttcaggtagggaaggggtgaggggtggggtctgggttttcttgtcccactgggggtttcaagccccaggtagaagtgttccctgcctcattactgggaagcagcatgcacacaggggctaacgcagcctgggaccctgtgtgccagcacttactcttttgtgcagcacatgtgacaatgaaggatggatgtatcaccttgatggttgtggtgttggggtcctgattccagcattcatgagtcaggggaaggtccctgctaaggacagaccttaggagggcagttggtccaggacccacacttgctttcctcgtgtttcctgatcctgccctgggtctgtagtcatacttctggaaattccttttgggtccaagactaggaggttcctctaagatctcatggccctgcttcctcccagtgccctcacaggacattttcttcccacaggtggaaaaggagggagctactctcaggctgcgtgcagcgacagtgcccagggctctgatgtgtctctcacagcttgaaaagcctgagacagctgtcttgtgagggactgagatgcaggatttcttcacgcctcccctttgtgacttcaagagcctctggcatctctttctgcaaaggcacctgaatgtgtctgcgtccctgttagcataatgtgaggaggtggagagacagcccacccttgtgtccactgtgacccctgttcccatgctgacctgtgtttcctccccagtcatctttcttgttccagagaggtggggctggatgtctccatctctgtctcaactttacgtgcactgagctgcaacttcttacttccctactgaaaataagaatctgaatataaatttgttttctcaaatatttgctatgagaggttgatggattaattaaataagtcaattcctggaatttgagagagcaaataaagacctgagaaccttccagaatctgcatgttcgctgtgctgagtctgt

SEQ ID NO: 14160 - protein, 41 aa, Homo sapiens
MALLPPSALTGHFLPTGGKGGSYSQAACSDSAQGSDVSLTA

SEQ ID NO: 14161 - DNA, 1008 bp, Homo sapiens
gaccccccaaagacacacgtgacccaccaccccatctctgaccatgaggccaccctgaggtgctgggccctgggtttctaccctgcggagatcacactgacctggcagcgggatggcgaggaccaaactcaggacactgagcttgtggagaccagaccagcaggagatagaaccttccagaagtgggcagctgtggtggtgccttctggagaagagcagagatacacatgccatgtacagcatgaggggctgccgaagcccctcaccctgagatggggtaaggagggggatgaggggtcatatctcttctcagggaaagcaggagcccttcagcagggtcagggcccctcatcttcccctcctttcccagagccgtcttcccagtccaccgtccccatcgtgggcattgttgctggcctggctgtcctagcagttgtggtcatcggagctgtggtcgctgctgtgatgtgtaggaggaagatcaggggaagtttttgttctactccaggcagcgacagtgcccagggctctgatgtgtctctcacagcttgaaaagcctgagacagctgtcttgtgagggactgagatgcaggatttcttcacgcctcccctttgtgacttcaagagcctctggcatctctttctgcaaaggcacctgaatgtgtctgcgtccctgttagcataatgtgaggaggtggagagacagcccacccttgtgtccactgtgacccctgttcccatgctgacctgtgtttcctccccagtcatctttcttgttccagagaggtggggctggatgtctccatctctgtctcaactttacgtgcactgagctgcaacttcttacttccctactgaaaataagaatctgaatataaatttgttttctcaaatatttgctatgagaggttgatggattaattaaataagtcaattcctggaatttgagagagcaaataaagacctgagaaccttccagaatctgcatgttcgctgtgctgagtctgt

SEQ ID NO: 14162 - protein, 52 aa, Homo sapiens
MARTKLRTLSLWRPDQQEIEPSRSGQLWWCLLEKSRDTHAMYSMRGCRSPSP

SEQ ID NO: 14163 - DNA, 941 bp, Homo sapiens
aggagattatcccagaccccccaaagacacacgtgacccaccaccccatctctgaccatgaggccaccctgaggtgctgggccctgggtttctaccctgcggagatcacactgacctggcagcgggatggcgaggaccaaactcaggacactgagcttgtggagaccagaccagcaggagatagaaccttccagaagtgggcagctgtggtggtgccttctggagaagagcagagatacacatgccatgtacagcatgaggggctgccgaagcccctcaccctgagatgggagccgtcttcccagtccaccgtccccatcgtgggcattgttgctggcctggctgtcctagcagttgtggtcatcggagctgtggtcgctgctgtgatgtgtaggaggaagagttcaggtggaaaaggagggagctactctcaggctgcgtgcagcgacagtgcccagggctctgatgtgtctctcacagcttgaaaagcctgagacagctgtcttgtgagggactgagatgcaggatttcttcacgcctcccctttgtgacttcaagagcctctggcatctctttctgcaaaggcacctgaatgtgtctgcgtccctgttagcataatgtgaggaggtggagagacagcccacccttgtgtccactgtgacccctgttcccatgctgacctgtgtttcctccccagtcatctttcttgttccagagaggtggggctggatgtctccatctctgtctcaactttacgtgcactgagctgcaacttcttacttccctactgaaaataagaatctgaatataaatttgttttctcaaatatttgctatgagaggttgatggattaattaaataagtcaattcctggaatttgagagagcaaataaagacctgagaaccttccagaatctgcatgttcgctgtgctgagtctgt

SEQ ID NO: 14164 - protein, 35 aa, Homo sapiens
MGAVFPVHRPHRGHCCWPGCPSSCGHRSCGRCCDV

SEQ ID NO: 14165 - DNA, 1386 bp, Homo sapiens
agaatggcatgagttttcctgagtttcctctgagggccccctcttctctctagacaattaaggaatgacgtctctgaggaaatggaggggaagacagtccctagaatactgatcaggggtcccctttgacccctgcagcagccttgggaaccgtgacttttcctctcaggccttgttctctgcctcacactcagtgtgtttggggctctgattccagcacttctgagtcactttacctccactcagatcaggagcagaagtccctgttccccgctcagagactcgaactttccaatgaataggagattatcccaggtgcctgcgtccaggctggtgtctgggttctgtgccccttccccaccccaggtgtcctgtccattctcaggctggtcacatgggtggtcctagggtgtcccatgaaagatgcaaagcgcctgaattttctgactcttcccatcagaccccccaaagacacacgtgacccaccaccccatctctgaccatgaggccaccctgaggtgctgggccctgggtttctaccctgcggagatcacactgacctggcagcgggatggcgaggaccaaactcaggacactgagcttgtggagaccagaccagcaggagatagaaccttccagaagtgggcagctgtggtggtgccttctggagaagagcagagatacacatgccatgtacagcatgaggggctgccgaagcccctcaccctgagatgggagccgtcttcccagtccaccgtccccatcgtgggcattgttgctggcctggctgtcctagcagttgtggtcatcggagctgtggtcgctgctgtgatgtgtaggaggaagagttcaggtggaaaaggagggagctactctcaggctgcgtgcagcgacagtgcccagggctctgatgtgtctctcacagcttgaaaagcctgagacagctgtcttgtgagggactgagatgcaggatttcttcacgcctcccctttgtgacttcaagagcctctggcatctctttctgcaaaggcacctgaatgtgtctgcgtccctgttagcataatgtgaggaggtggagagacagcccacccttgtgtccactgtgacccctgttcccatgctgacctgtgtttcctccccagtcatctttcttgttccagagaggtggggctggatgtctccatctctgtctcaactttacgtgcactgagctgcaacttcttacttccctactgaaaataagaatctgaatataaatttgttttctcaaatatttgctatgagaggttgatggattaattaaataagtcaattcctggaatttgagagagcaaataaagacctgagaaccttccagaatctgcatgttcgctgtgctgagtctgt

SEQ ID NO: 14166 - protein, 35 aa, Homo sapiens; identical to SEQ ID NO: 14164

SEQ ID NO: 14167 - DNA, 1844 bp, Homo sapiens
agttctaaagtccccacgcacccacccggactcagagtctcctcagacgccgagatgctggtcatggcgccccgaaccgtcctcctgctgctctcggcggccctggccctgaccgagacctgggccggctcccactccatgaggtatttctacacctccgtgtcccggcccggccgcggggagccccgcttcatctcagtgggctacgtggacgacacccagttcgtgaggttcgacagcgacgccgcgagtccgagagaggagccgcgggcgccgtggatagagcaggaggggccggagtattgggaccggaacacacagatctacaaggcccaggcacagactgaccgagagagcctgcggaacctgcgcggctactacaaccagagcgaggccggtgagtgaccccggcccggggcgcaggtcacgactccccatcccccacgtacggcccgggtcgccccgagtctccgggtccgagatccgcctccctgaggccgcgggacccgcccagaccctcgaccggcgagagccccaggcgcgtttacccggtttcattttcagttgaggccaaaatccccgcgggttggtcggggcggggcggggctcgggggactgggctgaccgcggggccggggccagggtctcacaccctccagagcatgtacggctgcgacgtggggccggacgggcgcctcctccgcgggcatgaccagtacgcctacgacggcaaggattacatcgccctgaacgaggacctgcgctcctggaccgccgcggacacggcggctcagatcacccagcgcaagtgggaggcggcccgtgaggcggagcagcggagagcctacctggagggcgagtgcgtggagtggctccgcagatacctggagaacgggaaggacaagctggagcgcgctgaccccccaaagacacacgtgacccaccaccccatctctgaccatgaggccaccctgaggtgctgggccctgggtttctaccctgcggagatcacactgacctggcagcgggatggcgaggaccaaactcaggacactgagcttgtggagaccagaccagcaggagatagaaccttccagaagtgggcagctgtggtggtgccttctggagaagagcagagatacacatgccatgtacagcatgaggggctgccgaagcccctcaccctgagatgggagccgtcttcccagtccaccgtccccatcgtgggcattgttgctggcctggctgtcctagcagttgtggtcatcggagctgtggtcgctgctgtgatgtgtaggaggaagagttcaggtggaaaaggagggagctactctcaggctgcgtgcagcgacagtgcccagggctctgatgtgtctctcacagcttgaaaagcctgagacagctgtcttgtgagggactgagatgcaggatttcttcacgcctcccctttgtgacttcaagagcctctggcatctctttctgcaaaggcacctgaatgtgtctgcgtccctgttagcataatgtgaggaggtggagagacagcccacccttgtgtccactgtgacccctgttcccatgctgacctgtgtttcctccccagtcatctttcttgttccagagaggtggggctggatgtctccatctctgtctcaactttacgtgcactgagctgcaacttcttacttccctactgaaaataagaatctgaatataaatttgttttctcaaatatttgctatgagaggttgatggattaattaaataagtcaattcctggaatttgagagagcaaataaagacctgagaaccttccagaatctgcatgttcgctgtgctgagtctgt

SEQ ID NO: 14168 - protein, 241 aa, Homo sapiens
MYGCDVGPDGRLLRGHDQYAYDGKDYIALNEDLRSWTAADTAAQITQRKWEAAREAEQRRAYLEGECVEWLRRYLENGKDKLERADPPKTHVTHHPISDHEATLRCWALGFYPAEITLTWQRDGEDQTQDTELVETRPAGDRTFQKWAAVVVPSGEEQRYTCHVQHEGLPKPLTLRWEPSSQSTVPIVGIVAGLAVLAVVVIGAVVAAVMCRRKSSGGKGGSYSQAACSDSAQGSDVSLTA

SEQ ID NO: 14169 - DNA, 1632 bp, Homo sapiens
tctagagaagccaatcagcgtcgccgcggtcccagttctaaagtccccacgcacccacccggactcagagtctcctcagacgccgagatgctggtcatggcgccccgaaccgtcctcctgctgctctcggcggccctggccctgaccgagacctgggccggctcccactccatgaggtatttctacacctccgtgtcccggcccggccgcggggagccccgcttcatctcagtgggctacgtggacgacacccagttcgtgaggttcgacagcgacgccgcgagtccgagagaggagccgcgggcgccgtggatagagcaggaggggccggagtattgggaccggaacacacagatctacaaggcccaggcacagactgaccgagagagcctgcggaacctgcgcggctactacaaccagagcgaggccgggtctcacaccctccagagcatgtacggctgcgacgtggggccggacgggcgcctcctccgcgggcatgaccagtacgcctacgacggcaaggattacatcgccctgaacgaggacctgcgctcctggaccgccgcggacacggcggctcagatcacccagcgcaagtgggaggcggcccgtgaggcggagcagcggagagcctacctggagggcgagtgcgtggagtggctccgcagatacctggagaacgggaaggacaagctggagcgcgctgaccccccaaagacacacgtgacccaccaccccatctctgaccatgaggccaccctgaggtgctgggccctgggtttctaccctgcggagatcacactgacctggcagcgggatggcgaggaccaaactcaggacactgagcttgtggagaccagaccagcaggagatagaaccttccagaagtgggcagctgtggtggtgccttctggagaagagcagagatacacatgccatgtacagcatgaggggctgccgaagcccctcaccctgagatgggagccgtcttcccagtccaccgtccccatcgtgggcattgttgctggcctggctgtcctagcagttgtggtcatcggagctgtggtcgctgctgtgatgtgtaggaggaagagttcaggtggaaaaggagggagctactctcaggctgcgtgcagcgacagtgcccagggctctgatgtgtctctcacagcttgaaaagcctgagacagctgtcttgtgagggactgagatgcaggatttcttcacgcctcccctttgtgacttcaagagcctctggcatctctttctgcaaaggcacctgaatgtgtctgcgtccctgttagcataatgtgaggaggtggagagacagcccacccttgtgtccactgtgacccctgttcccatgctgacctgtgtttcctccccagtcatctttcttgttccagagaggtggggctggatgtctccatctctgtctcaactttacgtgcactgagctgcaacttcttacttccctactgaaaataagaatctgaatataaatttgttttctcaaatatttgctatgagaggttgatggattaattaaataagtcaattcctggaatttgagagagcaaataaagacctgagaaccttccagaatctgcatgttcgctgtgctgagtctgt

SEQ ID NO: 14170 - protein, 362 aa, Homo sapiens; identical to SEQ ID NO: 1491

SEQ ID NO: 14171 - DNA, 483 bp, Homo sapiens
ggctgtgatgtgtctctcacagcttgtaaagcctgagacagctgtcttgtgagggactgagatgcaggatttcttcacgcctcccctttgtgacttcaagagcctctggcatctctttctgcaaaggcacctgaatgtgtctgcgtccctgttagcataatgtgaggaggtggagagacagcccacccttgtgtccactgtgacccctgttcccatgctgacctgtgtttcctccccagtcatctttcttgttccagagaggtggggctggatgtctccatctctgtctcaactttacgtgcactgagctgcaacttcttacttccctactgaaaataagaatctgaatataaatttgttttctcaaatatttgctatgagaggttgatggattaattaaataagtcaattcctggaatttgagagagcaaataaagacctgagaaccttccagaatctgcatgttcgctgtgctgagtctgt

SEQ ID NO: 14172 - protein, 32 aa, Homo sapiens
MQDFFTPPLCDFKSLWHLFLQRHLNVSASLLA

SEQ ID NO: 14173 - DNA, 921 bp, Homo sapiens
aggagattatcccagaccccccaaagacacacgtgacccaccaccccatctctgaccatgaggccaccctgaggtgctgggccctgggtttctaccctgcggagatcacactgacctggcagcgggatggcgaggaccaaactcaggacactgagcttgtggagaccagaccagcaggagatagaaccttccagaagtgggcagctgtggtggtgccttctggagaagagcagagatacacatgccatgtacagcatgaggggctgccgaagcccctcaccctgagatgggagccgtcttcccagtccaccgtccccatcgtgggcattgttgctggcctggctgtcctagcagttgtggtcatcggagctgtggtcgctgctgtgatgtgtaggaggaagagttcaggtggaaaaggagggagctactctcaggctgcgtgcagcgacagtgcccagggctctgatgtgtctctcacagcttgaaaagcctgagacagctgtcttgtgagggactgagatgcaggatttcttcacgcctcccctttgtgacttcaagagcctctggcatctctttctgcaaaggcacctgaatgtgtctgcgtccctgttagcataatgtgaggaggtggagagacagcccacccttgtgtccactgtgacccctgttcccatgctgacctgtgtttcctccccagtcatctttcttgttccagagaggtggggctggatgtctccatctctgtctcaactttacgtgcactgagctgcaacttcttacttccctactgaaaataagaatctgaatataaatttgttttctcaaatatttgctatgagaggttgatggattaattaaataagtcaattcctggaatttgagagagcaaataaagacctgagaaccttccagaatctgcat

SEQ ID NO: 14174 - protein, 35 aa, Homo sapiens; identical to SEQ ID NO: 14164

SEQ ID NO: 14175 - DNA, 1366 bp, Homo sapiens
agaatggcatgagttttcctgagtttcctctgagggccccctcttctctctagacaattaaggaatgacgtctctgaggaaatggaggggaagacagtccctagaatactgatcaggggtcccctttgacccctgcagcagccttgggaaccgtgacttttcctctcaggccttgttctctgcctcacactcagtgtgtttggggctctgattccagcacttctgagtcactttacctccactcagatcaggagcagaagtccctgttccccgctcagagactcgaactttccaatgaataggagattatcccaggtgcctgcgtccaggctggtgtctgggttctgtgccccttccccaccccaggtgtcctgtccattctcaggctggtcacatgggtggtcctagggtgtcccatgaaagatgcaaagcgcctgaattttctgactcttcccatcagaccccccaaagacacacgtgacccaccaccccatctctgaccatgaggccaccctgaggtgctgggccctgggtttctaccctgcggagatcacactgacctggcagcgggatggcgaggaccaaactcaggacactgagcttgtggagaccagaccagcaggagatagaaccttccagaagtgggcagctgtggtggtgccttctggagaagagcagagatacacatgccatgtacagcatgaggggctgccgaagcccctcaccctgagatgggagccgtcttcccagtccaccgtccccatcgtgggcattgttgctggcctggctgtcctagcagttgtggtcatcggagctgtggtcgctgctgtgatgtgtaggaggaagagttcaggtggaaaaggagggagctactctcaggctgcgtgcagcgacagtgcccagggctctgatgtgtctctcacagcttgaaaagcctgagacagctgtcttgtgagggactgagatgcaggatttcttcacgcctcccctttgtgacttcaagagcctctggcatctctttctgcaaaggcacctgaatgtgtctgcgtccctgttagcataatgtgaggaggtggagagacagcccacccttgtgtccactgtgacccctgttcccatgctgacctgtgtttcctccccagtcatctttcttgttccagagaggtggggctggatgtctccatctctgtctcaactttacgtgcactgagctgcaacttcttacttccctactgaaaataagaatctgaatataaatttgttttctcaaatatttgctatgagaggttgatggattaattaaataagtcaattcctggaatttgagagagcaaataaagacctgagaaccttccagaatctgcat

SEQ ID NO: 14176 - protein, 35 aa, Homo sapiens; identical to SEQ ID NO: 14164

SEQ ID NO: 14177 - DNA, 1824 bp, Homo sapiens
agttctaaagtccccacgcacccacccggactcagagtctcctcagacgccgagatgctggtcatggcgccccgaaccgtcctcctgctgctctcggcggccctggccctgaccgagacctgggccggctcccactccatgaggtatttctacacctccgtgtcccggcccggccgcggggagccccgcttcatctcagtgggctacgtggacgacacccagttcgtgaggttcgacagcgacgccgcgagtccgagagaggagccgcgggcgccgtggatagagcaggaggggccggagtattgggaccggaacacacagatctacaaggcccaggcacagactgaccgagagagcctgcggaacctgcgcggctactacaaccagagcgaggccggtgagtgaccccggcccggggcgcaggtcacgactccccatcccccacgtacggcccgggtcgccccgagtctccgggtccgagatccgcctccctgaggccgcgggacccgcccagaccctcgaccggcgagagccccaggcgcgtttacccggtttcattttcagttgaggccaaaatccccgcgggttggtcggggcggggcggggctcgggggactgggctgaccgcggggccggggccagggtctcacaccctccagagcatgtacggctgcgacgtggggccggacgggcgcctcctccgcgggcatgaccagtacgcctacgacggcaaggattacatcgccctgaacgaggacctgcgctcctggaccgccgcggacacggcggctcagatcacccagcgcaagtgggaggcggcccgtgaggcggagcagcggagagcctacctggagggcgagtgcgtggagtggctccgcagatacctggagaacgggaaggacaagctggagcgcgctgaccccccaaagacacacgtgacccaccaccccatctctgaccatgaggccaccctgaggtgctgggccctgggtttctaccctgcggagatcacactgacctggcagcgggatggcgaggaccaaactcaggacactgagcttgtggagaccagaccagcaggagatagaaccttccagaagtgggcagctgtggtggtgccttctggagaagagcagagatacacatgccatgtacagcatgaggggctgccgaagcccctcaccctgagatgggagccgtcttcccagtccaccgtccccatcgtgggcattgttgctggcctggctgtcctagcagttgtggtcatcggagctgtggtcgctgctgtgatgtgtaggaggaagagttcaggtggaaaaggagggagctactctcaggctgcgtgcagcgacagtgcccagggctctgatgtgtctctcacagcttgaaaagcctgagacagctgtcttgtgagggactgagatgcaggatttcttcacgcctcccctttgtgacttcaagagcctctggcatctctttctgcaaaggcacctgaatgtgtctgcgtccctgttagcataatgtgaggaggtggagagacagcccacccttgtgtccactgtgacccctgttcccatgctgacctgtgtttcctccccagtcatctttcttgttccagagaggtggggctggatgtctccatctctgtctcaactttacgtgcactgagctgcaacttcttacttccctactgaaaataagaatctgaatataaatttgttttctcaaatatttgctatgagaggttgatggattaattaaataagtcaattcctggaatttgagagagcaaataaagacctgagaaccttccagaatctgcat

SEQ ID NO: 14178 - protein, 241 aa, Homo sapiens; identical to SEQ ID NO: 14168

SEQ ID NO: 14179 - DNA, 1612 bp, Homo sapiens
tctagagaagccaatcagcgtcgccgcggtcccagttctaaagtccccacgcacccacccggactcagagtctcctcagacgccgagatgctggtcatggcgccccgaaccgtcctcctgctgctctcggcggccctggccctgaccgagacctgggccggctcccactccatgaggtatttctacacctccgtgtcccggcccggccgcggggagccccgcttcatctcagtgggctacgtggacgacacccagttcgtgaggttcgacagcgacgccgcgagtccgagagaggagccgcgggcgccgtggatagagcaggaggggccggagtattgggaccggaacacacagatctacaaggcccaggcacagactgaccgagagagcctgcggaacctgcgcggctactacaaccagagcgaggccgggtctcacaccctccagagcatgtacggctgcgacgtggggccggacgggcgcctcctccgcgggcatgaccagtacgcctacgacggcaaggattacatcgccctgaacgaggacctgcgctcctggaccgccgcggacacggcggctcagatcacccagcgcaagtgggaggcggcccgtgaggcggagcagcggagagcctacctggagggcgagtgcgtggagtggctccgcagatacctggagaacgggaaggacaagctggagcgcgctgaccccccaaagacacacgtgacccaccaccccatctctgaccatgaggccaccctgaggtgctgggccctgggtttctaccctgcggagatcacactgacctggcagcgggatggcgaggaccaaactcaggacactgagcttgtggagaccagaccagcaggagatagaaccttccagaagtgggcagctgtggtggtgccttctggagaagagcagagatacacatgccatgtacagcatgaggggctgccgaagcccctcaccctgagatgggagccgtcttcccagtccaccgtccccatcgtgggcattgttgctggcctggctgtcctagcagttgtggtcatcggagctgtggtcgctgctgtgatgtgtaggaggaagagttcaggtggaaaaggagggagctactctcaggctgcgtgcagcgacagtgcccagggctctgatgtgtctctcacagcttgaaaagcctgagacagctgtcttgtgagggactgagatgcaggatttcttcacgcctcccctttgtgacttcaagagcctctggcatctctttctgcaaaggcacctgaatgtgtctgcgtccctgttagcataatgtgaggaggtggagagacagcccacccttgtgtccactgtgacccctgttcccatgctgacctgtgtttcctccccagtcatctttcttgttccagagaggtggggctggatgtctccatctctgtctcaactttacgtgcactgagctgcaacttcttacttccctactgaaaataagaatctgaatataaatttgttttctcaaatatttgctatgagaggttgatggattaattaaataagtcaattcctggaatttgagagagcaaataaagacctgagaaccttccagaatctgcat

SEQ ID NO: 14180 - protein, 362 aa, Homo sapiens; identical to SEQ ID NO: 1491

SEQ ID NO: 14181 - DNA, 1154 bp, Homo sapiens
ccccatcgtgggcattgttgctggcctggctgtcctagcagttgtggtcatcggagctgtggtcgctgctgtgatgtgtaggaggaagagttcaggtagggaaggggtgaggggtggggtctgggttttcttgtcccactgggggtttcaagccccaggtagaagtgttccctgcctcattactgggaagcagcatgcacacaggggctaacgcagcctgggaccctgtgtgccagcacttactcttttgtgcagcacatgtgacaatgaaggatggatgtatcaccttgatggttgtggtgttggggtcctgattccagcattcatgagtcaggggaaggtccctgctaaggacagaccttaggagggcagttggtccaggacccacacttgctttcctcgtgtttcctgatcctgccctgggtctgtagtcatacttctggaaattccttttgggtccaagactaggaggttcctctaagatctcatggccctgcttcctcccagtgccctcacaggacattttcttcccacaggtggaaaaggagggagctactctcaggctgcgtgtaagtggtgggggtgggagtgtggaggagctcacccaccccataattcctcctgtcccacgtctcctgcgggctctgaccaggtcctgtttttgttctactccaggcagcgacagtgcccagggctctgatgtgtctctcacagcttgaaaagcctgagacagctgtcttgtgagggactgagatgcaggatttcttcacgcctcccctttgtgacttcaagagcctctggcatctctttctgcaaaggcacctgaatgtgtctgcgtccctgttagcataatgtgaggaggtggagagacagcccacccttgtgtccactgtgacccctgttcccatgctgacctgtgtttcctccccagtcatctttcttgttccagagaggtggggctggatgtctccatctctgtctcaactttacgtgcactgagctgcaacttcttacttccctactgaaaataagaatctgaatataaatttgttttctcaaatatttgctatgagaggttgatggattaattaaataagtcaattcctggaatttgagagagcaaataaagacctgagaaccttccagaatctgca

SEQ ID NO: 14182 - protein, 70 aa, Homo sapiens; identical to SEQ ID NO: 14158

SEQ ID NO: 14183 - DNA, 1254 bp, Homo sapiens
gcagctgtggtggtgccttctggagaagagcagagatacacatgccatgtacagcatgaggggctgccgaagcccctcaccctgagatggggtaaggagggggatgaggggtcatatctcttctcagggaaagcaggagcccttcagcagggtcagggcccctcatcttcccctcctttcccagagccgtcttcccagtccaccgtccccatcgtgggcattgttgctggcctggctgtcctagcagttgtggtcatcggagctgtggtcgctgctgtgatgtgtaggaggaagagttcaggtagggaaggggtgaggggtggggtctgggttttcttgtcccactgggggtttcaagccccaggtagaagtgttccctgcctcattactgggaagcagcatgcacacaggggctaacgcagcctgggaccctgtgtgccagcacttactcttttgtgcagcacatgtgacaatgaaggatggatgtatcaccttgatggttgtggtgttggggtcctgattccagcattcatgagtcaggggaaggtccctgctaaggacagaccttaggagggcagttggtccaggacccacacttgctttcctcgtgtttcctgatcctgccctgggtctgtagtcatacttctggaaattccttttgggtccaagactaggaggttcctctaagatctcatggccctgcttcctcccagtgccctcacaggacattttcttcccacaggtggaaaaggagggagctactctcaggctgcgtgcagcgacagtgcccagggctctgatgtgtctctcacagcttgaaaagcctgagacagctgtcttgtgagggactgagatgcaggatttcttcacgcctcccctttgtgacttcaagagcctctggcatctctttctgcaaaggcacctgaatgtgtctgcgtccctgttagcataatgtgaggaggtggagagacagcccacccttgtgtccactgtgacccctgttcccatgctgacctgtgtttcctccccagtcatctttcttgttccagagaggtggggctggatgtctccatctctgtctcaactttacgtgcactgagctgcaacttcttacttccctactgaaaataagaatctgaatataaatttgttttctcaaatatttgctatgagaggttgatggattaattaaataagtcaattcctggaatttgagagagcaaataaagacctgagaaccttccagaatctgca

SEQ ID NO: 14184 - protein, 41 aa, Homo sapiens; identical to SEQ ID NO: 14160

SEQ ID NO: 14185 - DNA, 987 bp, Homo sapiens
gaccccccaaagacacacgtgacccaccaccccatctctgaccatgaggccaccctgaggtgctgggccctgggtttctaccctgcggagatcacactgacctggcagcgggatggcgaggaccaaactcaggacactgagcttgtggagaccagaccagcaggagatagaaccttccagaagtgggcagctgtggtggtgccttctggagaagagcagagatacacatgccatgtacagcatgaggggctgccgaagcccctcaccctgagatggggtaaggagggggatgaggggtcatatctcttctcagggaaagcaggagcccttcagcagggtcagggcccctcatcttcccctcctttcccagagccgtcttcccagtccaccgtccccatcgtgggcattgttgctggcctggctgtcctagcagttgtggtcatcggagctgtggtcgctgctgtgatgtgtaggaggaagatcaggggaagtttttgttctactccaggcagcgacagtgcccagggctctgatgtgtctctcacagcttgaaaagcctgagacagctgtcttgtgagggactgagatgcaggatttcttcacgcctcccctttgtgacttcaagagcctctggcatctctttctgcaaaggcacctgaatgtgtctgcgtccctgttagcataatgtgaggaggtggagagacagcccacccttgtgtccactgtgacccctgttcccatgctgacctgtgtttcctccccagtcatctttcttgttccagagaggtggggctggatgtctccatctctgtctcaactttacgtgcactgagctgcaacttcttacttccctactgaaaataagaatctgaatataaatttgttttctcaaatatttgctatgagaggttgatggattaattaaataagtcaattcctggaatttgagagagcaaataaagacctgagaaccttccagaatctgca

SEQ ID NO: 14186 - protein, 52 aa, Homo sapiens; identical to SEQ ID NO: 14162

SEQ ID NO: 14187 - DNA, 462 bp, Homo sapiens
ggctgtgatgtgtctctcacagcttgtaaagcctgagacagctgtcttgtgagggactgagatgcaggatttcttcacgcctcccctttgtgacttcaagagcctctggcatctctttctgcaaaggcacctgaatgtgtctgcgtccctgttagcataatgtgaggaggtggagagacagcccacccttgtgtccactgtgacccctgttcccatgctgacctgtgtttcctccccagtcatctttcttgttccagagaggtggggctggatgtctccatctctgtctcaactttacgtgcactgagctgcaacttcttacttccctactgaaaataagaatctgaatataaatttgttttctcaaatatttgctatgagaggttgatggattaattaaataagtcaattcctggaatttgagagagcaaataaagacctgagaaccttccagaatctgca

SEQ ID NO: 14188 - protein, 32 aa, Homo sapiens; identical to SEQ ID NO: 14172

SEQ ID NO: 14189 - DNA, 791 bp, Homo sapiens
tcactttacctccactcagatcaggagcagaagtccctgttccccgctcagagactcgaactttccaatgaataggagattatcccaggtgcctgcgtccaggctggtgtctgggttctgtgccccttccccaccccaggtgtcctgtccattctcaggctggtcacatgggtggtcctagggtgtcccatgaaagatgcaaagcgcctgaattttctgactcttcccatcagaccccccaaagacacacgtgacccaccaccccatctctgaccatgaggccaccctgaggtgctgggccctgggtttctaccctgcggagatcacactgacctggcagcgggatggcgaggaccaaactcaggacactgagcttgtggagaccagaccagcaggagatagaaccttccagaagtgggcagctgtggtgagcctctggcatctctttctgcaaaggcacctgaatgtgtctgcgtccctgttagcataatgtgaggaggtggagagacagcccacccttgtgtccactgtgacccctgttcccatgctgacctgtgtttcctccccagtcatctttcttgttccagagaggtggggctggatgtctccatctctgtctcaactttacgtgcactgagctgcaacttcttacttccctactgaaaataagaatctgaatataaatttgttttctcaaatatttgctatgagaggttgatggattaattaaataagtcaattcctggaatttgagagagcaaataaagacctgagaaccttccagaatctgc

SEQ ID NO: 14190 - protein, 37 aa, Homo sapiens
MNRRLSQVPASRLVSGFCAPSPPQVSCPFSGWSHGWS

SEQ ID NO: 14191 - DNA, 438 bp, Homo sapiens
tccaggcagcgacagtgcccagggctctgatgtgtctctcacagcttgaaaagcctgagacagctgtcttgtgagggactgagatgcaggatttcttcacgcctcccctttgtgacttcaagagcctctggcatctctttctgcaaaggcacctgaatgtgtctgcgtccctgttagcataatgtgaggaggtggagagacagcccacccttgtgtccactgtgacccctgttcccatgctgacctgtgtttcctccccagtcatctttcttgttccagagaggtggggctggatgtctccatctctgtctcaactttacgtgcactgagctgcaacttcttacttccctactgaaaataagaatctgaatataaatttgttttctcaaatatttgctatgagaggttgatggattaattaaataagtcaattcctgg

SEQ ID NO: 14192 - protein, 32 aa, Homo sapiens; identical to SEQ ID NO: 14172

SEQ ID NO: 14193 - DNA, 1108 bp, Homo sapiens
ccccatcgtgggcattgttgctggcctggctgtcctagcagttgtggtcatcggagctgtggtcgctgctgtgatgtgtaggaggaagagttcaggtagggaaggggtgaggggtggggtctgggttttcttgtcccactgggggtttcaagccccaggtagaagtgttccctgcctcattactgggaagcagcatgcacacaggggctaacgcagcctgggaccctgtgtgccagcacttactcttttgtgcagcacatgtgacaatgaaggatggatgtatcaccttgatggttgtggtgttggggtcctgattccagcattcatgagtcaggggaaggtccctgctaaggacagaccttaggagggcagttggtccaggacccacacttgctttcctcgtgtttcctgatcctgccctgggtctgtagtcatacttctggaaattccttttgggtccaagactaggaggttcctctaagatctcatggccctgcttcctcccagtgccctcacaggacattttcttcccacaggtggaaaaggagggagctactctcaggctgcgtgtaagtggtgggggtgggagtgtggaggagctcacccaccccataattcctcctgtcccacgtctcctgcgggctctgaccaggtcctgtttttgttctactccaggcagcgacagtgcccagggctctgatgtgtctctcacagcttgaaaagcctgagacagctgtcttgtgagggactgagatgcaggatttcttcacgcctcccctttgtgacttcaagagcctctggcatctctttctgcaaaggcacctgaatgtgtctgcgtccctgttagcataatgtgaggaggtggagagacagcccacccttgtgtccactgtgacccctgttcccatgctgacctgtgtttcctccccagtcatctttcttgttccagagaggtggggctggatgtctccatctctgtctcaactttacgtgcactgagctgcaacttcttacttccctactgaaaataagaatctgaatataaatttgttttctcaaatatttgctatgagaggttgatggattaattaaataagtcaattcctgg

SEQ ID NO: 14194 - protein, 70 aa, Homo sapiens; identical to SEQ ID NO: 14158

SEQ ID NO: 14195 - DNA, 1208 bp, Homo sapiens
gcagctgtggtggtgccttctggagaagagcagagatacacatgccatgtacagcatgaggggctgccgaagcccctcaccctgagatggggtaaggagggggatgaggggtcatatctcttctcagggaaagcaggagcccttcagcagggtcagggcccctcatcttcccctcctttcccagagccgtcttcccagtccaccgtccccatcgtgggcattgttgctggcctggctgtcctagcagttgtggtcatcggagctgtggtcgctgctgtgatgtgtaggaggaagagttcaggtagggaaggggtgaggggtggggtctgggttttcttgtcccactgggggtttcaagccccaggtagaagtgttccctgcctcattactgggaagcagcatgcacacaggggctaacgcagcctgggaccctgtgtgccagcacttactcttttgtgcagcacatgtgacaatgaaggatggatgtatcaccttgatggttgtggtgttggggtcctgattccagcattcatgagtcaggggaaggtccctgctaaggacagaccttaggagggcagttggtccaggacccacacttgctttcctcgtgtttcctgatcctgccctgggtctgtagtcatacttctggaaattccttttgggtccaagactaggaggttcctctaagatctcatggccctgcttcctcccagtgccctcacaggacattttcttcccacaggtggaaaaggagggagctactctcaggctgcgtgcagcgacagtgcccagggctctgatgtgtctctcacagcttgaaaagcctgagacagctgtcttgtgagggactgagatgcaggatttcttcacgcctcccctttgtgacttcaagagcctctggcatctctttctgcaaaggcacctgaatgtgtctgcgtccctgttagcataatgtgaggaggtggagagacagcccacccttgtgtccactgtgacccctgttcccatgctgacctgtgtttcctccccagtcatctttcttgttccagagaggtggggctggatgtctccatctctgtctcaactttacgtgcactgagctgcaacttcttacttccctactgaaaataagaatctgaatataaatttgttttctcaaatatttgctatgagaggttgatggattaattaaataagtcaattcctgg

SEQ ID NO: 14196 - protein, 41 aa, Homo sapiens; identical to SEQ ID NO: 14160

SEQ ID NO: 14197 - DNA, 874 bp, Homo sapiens
aggagattatcccagaccccccaaagacacacgtgacccaccaccccatctctgaccatgaggccaccctgaggtgctgggccctgggtttctaccctgcggagatcacactgacctggcagcgggatggcgaggaccaaactcaggacactgagcttgtggagaccagaccagcaggagatagaaccttccagaagtgggcagctgtggtggtgccttctggagaagagcagagatacacatgccatgtacagcatgaggggctgccgaagcccctcaccctgagatgggagccgtcttcccagtccaccgtccccatcgtgggcattgttgctggcctggctgtcctagcagttgtggtcatcggagctgtggtcgctgctgtgatgtgtaggaggaagagttcaggtggaaaaggagggagctactctcaggctgcgtgcagcgacagtgcccagggctctgatgtgtctctcacagcttgaaaagcctgagacagctgtcttgtgagggactgagatgcaggatttcttcacgcctcccctttgtgacttcaagagcctctggcatctctttctgcaaaggcacctgaatgtgtctgcgtccctgttagcataatgtgaggaggtggagagacagcccacccttgtgtccactgtgacccctgttcccatgctgacctgtgtttcctccccagtcatctttcttgttccagagaggtggggctggatgtctccatctctgtctcaactttacgtgcactgagctgcaacttcttacttccctactgaaaataagaatctgaatataaatttgttttctcaaatatttgctatgagaggttgatggattaattaaataagtcaattcctgg

SEQ ID NO: 14198 - protein, 35 aa, Homo sapiens; identical to SEQ ID NO: 14164

SEQ ID NO: 14199 - DNA, 1565 bp, Homo sapiens
tctagagaagccaatcagcgtcgccgcggtcccagttctaaagtccccacgcacccacccggactcagagtctcctcagacgccgagatgctggtcatggcgccccgaaccgtcctcctgctgctctcggcggccctggccctgaccgagacctgggccggctcccactccatgaggtatttctacacctccgtgtcccggcccggccgcggggagccccgcttcatctcagtgggctacgtggacgacacccagttcgtgaggttcgacagcgacgccgcgagtccgagagaggagccgcgggcgccgtggatagagcaggaggggccggagtattgggaccggaacacacagatctacaaggcccaggcacagactgaccgagagagcctgcggaacctgcgcggctactacaaccagagcgaggccgggtctcacaccctccagagcatgtacggctgcgacgtggggccggacgggcgcctcctccgcgggcatgaccagtacgcctacgacggcaaggattacatcgccctgaacgaggacctgcgctcctggaccgccgcggacacggcggctcagatcacccagcgcaagtgggaggcggcccgtgaggcggagcagcggagagcctacctggagggcgagtgcgtggagtggctccgcagatacctggagaacgggaaggacaagctggagcgcgctgaccccccaaagacacacgtgacccaccaccccatctctgaccatgaggccaccctgaggtgctgggccctgggtttctaccctgcggagatcacactgacctggcagcgggatggcgaggaccaaactcaggacactgagcttgtggagaccagaccagcaggagatagaaccttccagaagtgggcagctgtggtggtgccttctggagaagagcagagatacacatgccatgtacagcatgaggggctgccgaagcccctcaccctgagatgggagccgtcttcccagtccaccgtccccatcgtgggcattgttgctggcctggctgtcctagcagttgtggtcatcggagctgtggtcgctgctgtgatgtgtaggaggaagagttcaggtggaaaaggagggagctactctcaggctgcgtgcagcgacagtgcccagggctctgatgtgtctctcacagcttgaaaagcctgagacagctgtcttgtgagggactgagatgcaggatttcttcacgcctcccctttgtgacttcaagagcctctggcatctctttctgcaaaggcacctgaatgtgtctgcgtccctgttagcataatgtgaggaggtggagagacagcccacccttgtgtccactgtgacccctgttcccatgctgacctgtgtttcctccccagtcatctttcttgttccagagaggtggggctggatgtctccatctctgtctcaactttacgtgcactgagctgcaacttcttacttccctactgaaaataagaatctgaatataaatttgttttctcaaatatttgctatgagaggttgatggattaattaaataagtcaattcctgg

SEQ ID NO: 14200 - protein, 362 aa, Homo sapiens; identical to SEQ ID NO: 1491

SEQ ID NO: 14201 - DNA, 392 bp, Homo sapiens
ctccaggcagcgacagtgcccagggctctgatgtgtctctcacagcttgaaaagcctgagacagctgtcttgtgagggactgagatgcaggatttcttcacgcctcccctttgtgacttcaagagcctctggcatctctttctgcaaaggcacctgaatgtgtctgcgtccctgttagcataatgtgaggaggtggagagacagcccacccttgtgtccactgtgacccctgttcccatgctgacctgtgtttcctccccagtcatctttcttgttccagagaggtggggctggatgtctccatctctgtctcaactttacgtgcactgagctgcaacttcttacttccctactgaaaataagaatctgaatataaatttgttttctcaaat

SEQ ID NO: 14202 - protein, 32 aa, Homo sapiens; identical to SEQ ID NO: 14172

SEQ ID NO: 14203 - DNA, 1061 bp, Homo sapiens
ccccatcgtgggcattgttgctggcctggctgtcctagcagttgtggtcatcggagctgtggtcgctgctgtgatgtgtaggaggaagagttcaggtagggaaggggtgaggggtggggtctgggttttcttgtcccactgggggtttcaagccccaggtagaagtgttccctgcctcattactgggaagcagcatgcacacaggggctaacgcagcctgggaccctgtgtgccagcacttactcttttgtgcagcacatgtgacaatgaaggatggatgtatcaccttgatggttgtggtgttggggtcctgattccagcattcatgagtcaggggaaggtccctgctaaggacagaccttaggagggcagttggtccaggacccacacttgctttcctcgtgtttcctgatcctgccctgggtctgtagtcatacttctggaaattccttttgggtccaagactaggaggttcctctaagatctcatggccctgcttcctcccagtgccctcacaggacattttcttcccacaggtggaaaaggagggagctactctcaggctgcgtgtaagtggtgggggtgggagtgtggaggagctcacccaccccataattcctcctgtcccacgtctcctgcgggctctgaccaggtcctgtttttgttctactccaggcagcgacagtgcccagggctctgatgtgtctctcacagcttgaaaagcctgagacagctgtcttgtgagggactgagatgcaggatttcttcacgcctcccctttgtgacttcaagagcctctggcatctctttctgcaaaggcacctgaatgtgtctgcgtccctgttagcataatgtgaggaggtggagagacagcccacccttgtgtccactgtgacccctgttcccatgctgacctgtgtttcctccccagtcatctttcttgttccagagaggtggggctggatgtctccatctctgtctcaactttacgtgcactgagctgcaacttcttacttccctactgaaaataagaatctgaatataaatttgttttctcaaat

SEQ ID NO: 14204 - protein, 70 aa, Homo sapiens; identical to SEQ ID NO: 14158

SEQ ID NO: 14205 - DNA, 1161 bp, Homo sapiens
gcagctgtggtggtgccttctggagaagagcagagatacacatgccatgtacagcatgaggggctgccgaagcccctcaccctgagatggggtaaggagggggatgaggggtcatatctcttctcagggaaagcaggagcccttcagcagggtcagggcccctcatcttcccctcctttcccagagccgtcttcccagtccaccgtccccatcgtgggcattgttgctggcctggctgtcctagcagttgtggtcatcggagctgtggtcgctgctgtgatgtgtaggaggaagagttcaggtagggaaggggtgaggggtggggtctgggttttcttgtcccactgggggtttcaagccccaggtagaagtgttccctgcctcattactgggaagcagcatgcacacaggggctaacgcagcctgggaccctgtgtgccagcacttactcttttgtgcagcacatgtgacaatgaaggatggatgtatcaccttgatggttgtggtgttggggtcctgattccagcattcatgagtcaggggaaggtccctgctaaggacagaccttaggagggcagttggtccaggacccacacttgctttcctcgtgtttcctgatcctgccctgggtctgtagtcatacttctggaaattccttttgggtccaagactaggaggttcctctaagatctcatggccctgcttcctcccagtgccctcacaggacattttcttcccacaggtggaaaaggagggagctactctcaggctgcgtgcagcgacagtgcccagggctctgatgtgtctctcacagcttgaaaagcctgagacagctgtcttgtgagggactgagatgcaggatttcttcacgcctcccctttgtgacttcaagagcctctggcatctctttctgcaaaggcacctgaatgtgtctgcgtccctgttagcataatgtgaggaggtggagagacagcccacccttgtgtccactgtgacccctgttcccatgctgacctgtgtttcctccccagtcatctttcttgttccagagaggtggggctggatgtctccatctctgtctcaactttacgtgcactgagctgcaacttcttacttccctactgaaaataagaatctgaatataaatttgttttctcaaat

SEQ ID NO: 14206 - protein, 41 aa, Homo sapiens; identical to SEQ ID NO: 14160

SEQ ID NO: 14207 - DNA, 827 bp, Homo sapiens
aggagattatcccagaccccccaaagacacacgtgacccaccaccccatctctgaccatgaggccaccctgaggtgctgggccctgggtttctaccctgcggagatcacactgacctggcagcgggatggcgaggaccaaactcaggacactgagcttgtggagaccagaccagcaggagatagaaccttccagaagtgggcagctgtggtggtgccttctggagaagagcagagatacacatgccatgtacagcatgaggggctgccgaagcccctcaccctgagatgggagccgtcttcccagtccaccgtccccatcgtgggcattgttgctggcctggctgtcctagcagttgtggtcatcggagctgtggtcgctgctgtgatgtgtaggaggaagagttcaggtggaaaaggagggagctactctcaggctgcgtgcagcgacagtgcccagggctctgatgtgtctctcacagcttgaaaagcctgagacagctgtcttgtgagggactgagatgcaggatttcttcacgcctcccctttgtgacttcaagagcctctggcatctctttctgcaaaggcacctgaatgtgtctgcgtccctgttagcataatgtgaggaggtggagagacagcccacccttgtgtccactgtgacccctgttcccatgctgacctgtgtttcctccccagtcatctttcttgttccagagaggtggggctggatgtctccatctctgtctcaactttacgtgcactgagctgcaacttcttacttccctactgaaaataagaatctgaatataaatttgttttctcaaat

SEQ ID NO: 14208 - protein, 35 aa, Homo sapiens; identical to SEQ ID NO: 14164

SEQ ID NO: 14209 - DNA, 1518 bp, Homo sapiens
tctagagaagccaatcagcgtcgccgcggtcccagttctaaagtccccacgcacccacccggactcagagtctcctcagacgccgagatgctggtcatggcgccccgaaccgtcctcctgctgctctcggcggccctggccctgaccgagacctgggccggctcccactccatgaggtatttctacacctccgtgtcccggcccggccgcggggagccccgcttcatctcagtgggctacgtggacgacacccagttcgtgaggttcgacagcgacgccgcgagtccgagagaggagccgcgggcgccgtggatagagcaggaggggccggagtattgggaccggaacacacagatctacaaggcccaggcacagactgaccgagagagcctgcggaacctgcgcggctactacaaccagagcgaggccgggtctcacaccctccagagcatgtacggctgcgacgtggggccggacgggcgcctcctccgcgggcatgaccagtacgcctacgacggcaaggattacatcgccctgaacgaggacctgcgctcctggaccgccgcggacacggcggctcagatcacccagcgcaagtgggaggcggcccgtgaggcggagcagcggagagcctacctggagggcgagtgcgtggagtggctccgcagatacctggagaacgggaaggacaagctggagcgcgctgaccccccaaagacacacgtgacccaccaccccatctctgaccatgaggccaccctgaggtgctgggccctgggtttctaccctgcggagatcacactgacctggcagcgggatggcgaggaccaaactcaggacactgagcttgtggagaccagaccagcaggagatagaaccttccagaagtgggcagctgtggtggtgccttctggagaagagcagagatacacatgccatgtacagcatgaggggctgccgaagcccctcaccctgagatgggagccgtcttcccagtccaccgtccccatcgtgggcattgttgctggcctggctgtcctagcagttgtggtcatcggagctgtggtcgctgctgtgatgtgtaggaggaagagttcaggtggaaaaggagggagctactctcaggctgcgtgcagcgacagtgcccagggctctgatgtgtctctcacagcttgaaaagcctgagacagctgtcttgtgagggactgagatgcaggatttcttcacgcctcccctttgtgacttcaagagcctctggcatctctttctgcaaaggcacctgaatgtgtctgcgtccctgttagcataatgtgaggaggtggagagacagcccacccttgtgtccactgtgacccctgttcccatgctgacctgtgtttcctccccagtcatctttcttgttccagagaggtggggctggatgtctccatctctgtctcaactttacgtgcactgagctgcaacttcttacttccctactgaaaataagaatctgaatataaatttgttttctcaaat

SEQ ID NO: 14210 - protein, 362 aa, Homo sapiens; identical to SEQ ID NO: 1491

SEQ ID NO: 14211 - DNA, 1824 bp, Homo sapiens
agttctaaagtccccacgcacccacccggactcagagtctcctcagacgccgagatgctggtcatggcgccccgaaccgtcctcctgctgctctcggcggccctggccctgaccgagacctgggccggctcccactccatgaggtatttctacacctccgtgtcccggcccggccgcggggagccccgcttcatctcagtgggctacgtggacgacacccagttcgtgaggttcgacagcgacgccgcgagtccgagagaggagccgcgggcgccgtggatagagcaggaggggccggagtattgggaccggaacacacagatctacaaggcccaggcacagactgaccgagagagcctgcggaacctgcgcggctactacaaccagagcgaggccgggtctcacaccctccagagcatgtacggctgcgacgtggggccggacgggcgcctcctccgcgggcatgaccagtacgcctacgacggcaaggattacatcgccctgaacgaggacctgcgctcctggaccgccgcggacacggcggctcagatcacccagcgcaagtgggaggcggcccgtgaggcggagcagcggagagcctacctggagggcgagtgcgtggagtggctccgcagatacctggagaacgggaaggacaagctggagcgcgctgaccccccaaagacacacgtgacccaccaccccatctctgaccatgaggccaccctgaggtgctgggccctgggtttctaccctgcggagatcacactgacctggcagcgggatggcgaggaccaaactcaggacactgagcttgtggagaccagaccagcaggagatagaaccttccagaagtgggcagctgtggtggtgccttctggagaagagcagagatacacatgccatgtacagcatgaggggctgccgaagcccctcaccctgagatgggcagggtcagggcccctcatcttcccctcctttcccagagccgtcttcccagtccaccgtccccatcgtgggcattgttgctggcctggctgtcctagcagttgtggtcatcggagctgtggtcgctgctgtgatgtgtaggaggaagagttcaggtagggaaggggtgaggggtggggtctgggttttcttgtcccactgggggtttcaagccccaggtagaagtgttccctgcctcattactgggaagcagcatgcacacaggggctaacgcagcctgggaccctgtgtgccagcacttactcttttgtgcagcacatgtgacaatgaaggatggatgtatcaccttgatggttgtggtgttggggtcctgattccagcattcatgagtcaggggaaggtccctgctaaggacagaccttaggagggcagttggtccaggacccacacttgctttcctcgtgtttcctgatcctgccctgggtctgtagtcatacttctggaaattccttttgggtccaagactaggaggttcctctaagatctcatggccctgcttcctcccagtgccctcacaggacattttcttcccacaggtggaaaaggagggagctactctcaggctgcgtgtaagtggtgggggtgggagtgtggaggagctcacccaccccataattcctcctgtcccacgtctcctgcgggctctgaccaggtcctgtttttgttctactccaggcagcgacagtgcccagggctctgatgtgtctctcacagcttgaaaaggtgagattcttggggtctagagtgggtggggtggcgggtctgggggtgggtggggcagaggggaaaggcctgggtaatggggattctttgatt

SEQ ID NO: 14212 - protein, 344 aa, Homo sapiens
MLVMAPRTVLLLLSAALALTETWAGSHSMRYFYTSVSRPGRGEPRFISVGYVDDTQFVRFDSDAASPREEPRAPWIEQEGPEYWDRNTQIYKAQAQTDRESLRNLRGYYNQSEAGSHTLQSMYGCDVGPDGRLLRGHDQYAYDGKDYIALNEDLRSWTAADTAAQITQRKWEAAREAEQRRAYLEGECVEWLRRYLENGKDKLERADPPKTHVTHHPISDHEATLRCWALGFYPAEITLTWQRDGEDQTQDTELVETRPAGDRTFQKWAAVVVPSGEEQRYTCHVQHEGLPKPLTLRWAGSGPLIFPSFPRAVFPVHRPHRGHCCWPGCPSSCGHRSCGRCCDV

SEQ ID NO: 14213 - DNA, 783 bp, Homo sapiens
tgagtcactttacctccactcagatcaggagcagaagtccctgttccccgctcagagactcgaactttccaatgaataggagattatcccaggtgcctgcgtccaggctggtgtctgggttctgtgccccttccccaccccaggtgtcctgtccattctcaggctggtcacatgggtggtcctagggtgtcccatgaaagatgcaaagcgcctgaattttctgactcttcccatcagaccccccaaagacacacgtgacccaccaccccatctctgaccatgaggccaccctgaggtgctgggccctgggtttctaccctgcggagatcacactgacctggcagcgggatggcgaggaccaaactcaggacactgagcttgtggagaccagaccagcaggagatagaaccttccagaagtgggcagctgtggtggtgccttctggagaagagcagagatacacatgccatgtacagcatgaggggctgccgaagcccctcaccctgagatggggtaaggagggggatgaggggtcatatctcttctcagggaaagcaggagcccttcagcagggtcagggcccctcatcttcccctcctttcccagagccgtcttcccagtccaccgtccccatcgtgggcattgttgctggcctggctgtcctagcagttgtggtcatcggagctgtggtcgctgctgtgatgtgtaggaggaagagttcaggtggaaaaggagggagctactctcaggctgcgtgcagcgacagtgcccagggctctgatg

SEQ ID NO: 14214 - protein, 52 aa, Homo sapiens; identical to SEQ ID NO: 14162

SEQ ID NO: 14215 - DNA, 1416 bp, Homo sapiens
ggtgcctgtagttccagctgtttgggaggctgaggcaggagaatcgcttgaatctgggaggtagaggttagagtgagccgagatcatgccactgcattccagcctgggcgaaaatgccactaatatcacttacataatattaatatatatttgaagtaggggaaaacctggaagattcctcaccaaagttttgacagtgactccagagactgggataactttgtgactttcatttcctcttaaatgttgtgccagggtctgaccggcagacccaggctgcacgatggatgaataatgtactcagacaccgatattcagtgaaagagtgcaccagagggccaggccactcacagaaagggttgtggcagctgcgtgccctgactatctggccctgtgggcctttattcagcacagatttaatgacaaaggctttgagtcaacacacctgtgggtaattaatctggtcgcagtcccccggagagagcagtcctacaaatgatcaaaggagctgggacagttatattcatcagaacagcacggtgtcaaggccctcacccccagaaagcttaggagacactgttttatggaggagagtgagattggaggaagccctgactccaggtctcctgatccttcctacacaaagcgaagctgaaaaaaagtgcaggacactccatttcctcctgggaccagacagggaagccagagccaccatggatgtcaaattccggcaaggaaacaccagtatagcaaaatctccacatcacattttaaagctcacacaatggctcaaagagaacccacatcaaaaaaccgaattcctagctcaggtgagatcaccaaagttgcctgtgaggcttcgtggaacctgcaggtagaaaggacatctttatttcgagctgcagcccagttgcttctgcgtcttggagccccttgaaaggaccctctcccttcaacagtacatagggaggccatttctggggagaaatgtagactgtccttagactcctgaggtttttacacttgcttgctgactctgtggactttgacttcatcattaaacatcttataatgatgtaatttgctttgactgtaagtgtagaacaggacgctgttcctgaatcaggaaacaagggactggtgacctgaactgccaccaccctccctggtgctcagatgcaatgaaatcgtgaggcaacaaatctatggctaggtaaagggtcaactccatttcagcaaatgtttcagatgttccttcctgcctagtaatgttccagctttaccccagccttaatcttttaaaatgtatattttccttagcgttgattttaaagtaattcgtatgtatttattacactgggtttgttgcagtaagccacctcgaatgttgctgtagaattaaagtaagcaaataaa

SEQ ID NO: 14216 - protein, 55 aa, Homo sapiens
MNNVLRHRYSVKECTRGPGHSQKGLWQLRALTIWPCGPLFSTDLMTKALSQHTCG

SEQ ID NO: 14217 - DNA, 1464 bp, Homo sapiens
aggctgaagtgcaatggcgcgatctcggctcaccgcaacctccgcctccaaggtttaagcgattctcctgcctcagcctcccgactagctgggattacaggcattcaccaccaagcccgtctaattttatatttttagtagagacgggatttccccatgttggtcaggttggtctcgagctcccgacctcaggtgatcgcccgcctcgacctcccaaagtgctgggattacaggcgtgaaccaccgtgcccggccttggccgcatgtgttttgaattttgctgcccggaattcactgcgaggactgggatcacccgtcaccccgccctggtctacggaaaatgaaatgtgtttactgatatagaaacggaataacggcgctgtgggctggggagggccgagctgccttcaggcttctggtctccagctgcagggcactcacacctgcccgttatgaaaatgcagacccgcagggcaggaattccgagtccgggctggagcgtgatctggaatccggctctcttgaaacagcaccgcggaggattcggatccgggagctgggacagttatattcatcagaacagcacggtgtcaaggccctcacccccagaaagcttaggagacactgttttatggaggagagtgagattggaggaagccctgactccaggtctcctgatccttcctacacaaagcgaagctgaaaaaaagtgcaggacactccatttcctcctgggaccagacagggaagccagagccaccatggatgtcaaattccggcaaggaaacaccagtatagcaaaatctccacatcacattttaaagctcacacaatggctcaaagagaacccacatcaaaaaaccgaattcctagctcaggtgagatcaccaaagttgcctgtgaggcttcgtggaacctgcaggtagaaaggacatctttatttcgagctgcagcccagttgcttctgcgtcttggagccccttgaaaggaccctctcccttcaacagtacatagggaggccatttctggggagaaatgtagactgtccttagactcctgaggtttttacacttgcttgctgactctgtggactttgacttcatcattaaacatcttataatgatgtaatttgctttgactgtaagtgtagaacaggacgctgttcctgaatcaggaaacaagggactggtgacctgaactgccaccaccctccctggtgctcagatgcaatgaaatcgtgaggcaacaaatctatggctaggtaaagggtcaactccatttcagcaaatgtttcagatgttccttcctgcctagtaatgttccagctttaccccagccttaatcttttaaaatgtatattttccttagcgttgattttaaagtaattcgtatgtatttattacactgggtttgttgcagtaagccacctcgaatgttgctgtagaattaaagtaagcaaataaa

SEQ ID NO: 14218 - protein, 157 aa, Homo sapiens
MKMQTRRAGIPSPGWSVIWNPALLKQHRGGFGSGSWDSYIHQNSTVSRPSPPESLGDTVLWRRVRLEEALTPGLLILPTQSEAEKKCRTLHFLLGPDREARATMDVKFRQGNTSIAKSPHHILKLTQWLKENPHQKTEFLAQVRSPKLPVRLRGTCR

SEQ ID NO: 14219 - DNA, 2038 bp, Homo sapiens
gtatcatttcagtgaaggtcactccagtctttcatggaggccaaactaagggtgtaaattaggatcctcactgaagtggcgggaccctaagaggctttttcctggccccttagttgtgggttttcctgcgggcggcgcagccggtttccatcagaaccgcccagaggcggacgctgccttcctggggtgacggagcagcaggaagcgttttcggatcctggaatacgtgggcggcccgtgggaggggctgaggcgcagtttcctactcacccggatccgaatcctccgcggtgctgtttcaagagagccggattccagatcacgctccagcccggactcggaattcctgccctgcgggtctgcattttcataacgggcaggtgtgagtgccctgcagctggagaccagaagcctgaaggcagctcggccctccccagcccacagcgccgttattccgtttctatatcagtaaacacatttcattttccgtagaccagggcggggtgacgggtgatcccagtcctcgcagtgaattccgggcagcaaaattcaaaacacatgcggccaaggccgggcacggtggttcacgcctgtaatcccagcactttgggaggtcgaggcgggcgatcacctgaggtcgggagctcgagaccaacctgaccaacatggggaaatcccgtctctactaaaaatataaaattagacgggcttggtggtgaatgcctgtaatcccagctagtcgggaggctgaggcaggagaatcgcttaaaccttggaggcggaggttgcggtgagccgagatcgcgccattgcacttcagcctgggcaacaagagggaaaactccgtcgcaaaaactttcgggggcggagcggagccccgccctgggttatgtaagcgaccgcgctgggccgtttctctttcttttccggaccctgcagtggcgcctaaagtctgagagagggaagtcgcctctgtgctcgtgagtgcatggggtataagagccccacagtcttcgttataacctcacggtgctgtcctgggatggatctgtgcagtcagggtttcttgctgaggtacatctggatggtcagcccttcctgcgctatgacaggcagaaatgcagggcaaagccccagggacagtgggcagaagatgtcctgggaaataagacatgggacagagagaccagggacttgacagggaacggaaaggacctcaggatgaccctggctcatatcaaggaccagaaagaaggaatttcttgaaggaagatgccatgaagaccaagacacactatcacgctatgcatgcagactgcctgcaggaactacggcgatatctagaatccggcgtagtcctgaggagaacagtgccccccatggtgaatgtcacccgcagcgaggcctcagagggcaacatcaccgtgacatgcagggcttccagcttctatccccggaatatcatactgacctggcgtcaggatggggtatctttgagccacgacacccagcagtggggggatgtcctgcctgatgggaatggaacctaccagacctgggtggccaccaggatttgccgaggagaggagcagaggttcacctgctacatggaacacagcgggaatcacagcactcaccctgtgccctctgggaaagtgctggtgcttcagagtcattggcagacattccatgtttctgctgttgctgctggctgctgctatttttgttattattattttctatgtccgttgttgtaagaagaaaacatcagctgcagagggtccagagctcgtgagcctgcaggtcctggatcaacacccagttgggacgagtgaccacagggatgccacacagctcggatttcagcctctgatgtcagctcttgggtccactggctccactgagggcacctagactctacagccaggcggctggaattgaattccctgcctggatctcacaagcactttccctcttggtgcctcagtttcctgacctatgaaacagagaaaataaaagcacttatttattgttgttg

SEQ ID NO: 14220 - protein, 194 aa, Homo sapiens
MGQRDQGLDRERKGPQDDPGSYQGPERRNFLKEDAMKTKTHYHAMHADCLQELRRYLESGVVLRRTVPPMVNVTRSEASEGNITVTCRASSFYPRNIILTWRQDGVSLSHDTQQWGDVLPDGNGTYQTWVATRICRGEEQRFTCYMEHSGNHSTHPVPSGKVLVLQSHWQTFHVSAVAAGCCYFCYYYFLCPLL

SEQ ID NO: 14221 - DNA, 2088 bp, Homo sapiens
gtatcatttcagtgaaggtcactccagtctttcatggaggccaaactaagggtgtaaattaggatcctcactgaagtggcgggaccctaagaggctttttcctggccccttagttgtgggttttcctgcgggcggcgcagccggtttccatcagaaccgcccagaggcggacgctgccttcctggggtgacggagcagcaggaagcgttttcggatcctggaatacgtgggcggcccgtgggaggggctgaggcgcagtttcctactcacccggatccgaatcctccgcggtgctgtttcaagagagccggattccagatcacgctccagcccggactcggaattcctgccctgcgggtctgcattttcataacgggcaggtgtgagtgccctgcagctggagaccagaagcctgaaggcagctcggccctccccagcccacagcgccgttattccgtttctatatcagtaaacacatttcattttccgtagaccagggcggggtgacgggtgatcccagtcctcgcagtgaattccgggcagcaaaattcaaaacacatgcggccaaggccgggcacggtggttcacgcctgtaatcccagcactttgggaggtcgaggcgggcgatcacctgaggtcgggagctcgagaccaacctgaccaacatggggaaatcccgtctctactaaaaatataaaattagacgggcttggtggtgaatgcctgtaatcccagctagtcgggaggctgaggcaggagaatcgcttaaaccttggaggcggaggttgcggtgagccgagatcgcgccattgcacttcagcctgggcaacaagagggaaaactccgtcgcaaaaactttcgggggcggagcggagccccgccctgggttatgtaagcgaccgcgctgggccgtttctctttcttttccggaccctgcagtggcgcctaaagtctgagagagggaagtcgcctctgtgctcgtgagtgcatggggtataagagccccacagtcttcgttataacctcacggtgctgtcctgggatggatctgtgcagtcagggtttcttgctgaggtacatctggatggtcagcccttcctgcgctatgacaggcagaaatgcagggcaaagccccagggacagtgggcagaagatgtcctgggaaataagacatgggacagagagaccagggacttgacagggaacggaaaggacctcaggatgaccctggctcatatcaaggaccagaaagaaggaatttcttgaaggaagatgccatgaagaccaagacacactatcacgctatgcatgcagactgcctgcaggaactacggcgatatctagaatccggcgtagtcctgaggagaacagtgccccccatggtgaatgtcacccgcagcgaggcctcagagggcaacatcaccgtgacatgcagggcttccagcttctatccccggaatatcatactgacctggcgtcaggatggggtatctttgagccacgacacccagcagtggggggatgtcctgcctgatgggaatggaacctaccagacctgggtggccaccaggatttgccgaggagaggagcagaggttcacctgctacatggaacacagcgggaatcacagcactcaccctgtgccctctgggaaagtgctggtgcttcagagtcattggcagacattccatgtttctgctgttgctgctggctgctgctatttttgttattattattttctatgtccgttgttgtaagaagaaaacatcagctgcagagggtccagagctcgtgagcctgcaggtcctggatcaacacccagttgggacgagtgaccacagggatgccacacagctcggatttcagcctctgatgtcagctcttgggtccactggctccactgagggcacctagactctacagccaggcggctggaattgaattccctgcctggatctcacaagcactttccctcttggtgcctcagtttcctgacctatgaaacagagaaaataaaagcacttatttattgttgttggaggctgcaaaatgttagtagatatgaggcatttgcagctgtgccatatt

SEQ ID NO: 14222 - protein, 194 aa, Homo sapiens; identical to SEQ ID NO: 14220

SEQ ID NO: 14223 - DNA, 2170 bp, Homo sapiens
gtatcatttcagtgaaggtcactccagtctttcatggaggccaaactaagggtgtaaattaggatcctcactgaagtggcgggaccctaagaggctttttcctggccccttagttgtgggttttcctgcgggcggcgcagccggtttccatcagaaccgcccagaggcggacgctgccttcctggggtgacggagcagcaggaagcgttttcggatcctggaatacgtgggcggcccgtgggaggggctgaggcgcagtttcctactcacccggatccgaatcctccgcggtgctgtttcaagagagccggattccagatcacgctccagcccggactcggaattcctgccctgcgggtctgcattttcataacgggcaggtgtgagtgccctgcagctggagaccagaagcctgaaggcagctcggccctccccagcccacagcgccgttattccgtttctatatcagtaaacacatttcattttccgtagaccagggcggggtgacgggtgatcccagtcctcgcagtgaattccgggcagcaaaattcaaaacacatgcggccaaggccgggcacggtggttcacgcctgtaatcccagcactttgggaggtcgaggcgggcgatcacctgaggtcgggagctcgagaccaacctgaccaacatggggaaatcccgtctctactaaaaatataaaattagacgggcttggtggtgaatgcctgtaatcccagctagtcgggaggctgaggcaggagaatcgcttaaaccttggaggcggaggttgcggtgagccgagatcgcgccattgcacttcagcctgggcaacaagagggaaaactccgtcgcaaaaactttcgggggcggagcggagccccgccctgggttatgtaagcgaccgcgctgggccgtttctctttcttttccggaccctgcagtggcgcctaaagtctgagagagggaagtcgcctctgtgctcgtgagtgcatggggtataagagccccacagtcttcgttataacctcacggtgctgtcctgggatggatctgtgcagtcagggtttcttgctgaggtacatctggatggtcagcccttcctgcgctatgacaggcagaaatgcagggcaaagccccagggacagtgggcagaagatgtcctgggaaataagacatgggacagagagaccagggacttgacagggaacggaaaggacctcaggatgaccctggctcatatcaaggaccagaaagaaggaatttcttgaaggaagatgccatgaagaccaagacacactatcacgctatgcatgcagactgcctgcaggaactacggcgatatctagaatccggcgtagtcctgaggagaacagtgccccccatggtgaatgtcacccgcagcgaggcctcagagggcaacatcaccgtgacatgcagggcttccagcttctatccccggaatatcatactgacctggcgtcaggatggggtatctttgagccacgacacccagcagtggggggatgtcctgcctgatgggaatggaacctaccagacctgggtggccaccaggatttgccgaggagaggagcagaggttcacctgctacatggaacacagcgggaatcacagcactcaccctgtgccctctgggaaagtgctggtgcttcagagtcattggcagacattccatgtttctgctgttgctgctggctgctgctatttttgttattattattttctatgtccgttgttgtaagaagaaaacatcagctgcagagggtccagagctcgtgagcctgcaggtcctggatcaacacccagttgggacgagtgaccacagggatgccacacagctcggatttcagcctctgatgtcagctcttgggtccactggctccactgagggcacctagactctacagccaggcggctggaattgaattccctgcctggatctcacaagcactttccctcttggtgcctcagtttcctgacctatgaaacagagaaaataaaagcacttatttattgttgttggaggctgcaaaatgttagtagatatgaggcatttgcagctgtgccatattaattggtgtcattgtttttgttgttttcgtattattattttttttttttaagacagagtctcaggccaggcacggtggctca

SEQ ID NO: 14224 - protein, 194 aa, Homo sapiens; identical to SEQ ID NO: 14220

SEQ ID NO: 14225 - DNA, 875 bp, Homo sapiens
cgcctaaagtctgagagagggaagtcgcctctgtgctcgtgagtgcatggggtataagagccccacagtcttcgttataacctcacggtgctgtcctgggatggatctgtgcagtcagggtttcttgctgaggtacatctggatggtcagcccttcctgcgctatgacaggcagaaatgcagggcaaagccccagggacagtgggcagaagatgtcctgggaaataagacatgggacagagagaccagggacttgacagggaacggaaaggacctcaggatgaccctggctcatatcaaggaccagaaagaaggtgagagtcggcaggggcaagagtgactggagaggccttttccagaaaagttaggggcagagagcagggacctgtctcttcccactggatctggctcaggctgggggtgaggaatgggggtcagtggaactcagcagggaggtgagccggcactcagcccacacagggaggcatggaggagggccagggaggcataccccctgggctgagttcctcacttgggtggaaaggtgatgggttcgggaatggagaagtcactgctgggtgggggcaggcttgcattccctccaggagattagggtctgtgagatccatgaagacaacagcaccaggagctcccagcatttctactacgatggggagctcttcctctcccaaaacctggagactgaggaatggacagtgccccagtcctccagagctcagaccttggccatgaacgtcaggaatttcttgaaggaagatgccatgaagaccaagacacactatcacgctatgcatgcagactgcctgcaggaactacggcgatatctagaatccggcgtagtcctgaggagaacag

SEQ ID NO: 14226 - protein, 69 aa, Homo sapiens
MGYKSPTVFVITSRCCPGMDLCSQGFLLRYIWMVSPSCAMTGRNAGQSPRDSGQKMSWEIRHGTERPGT

SEQ ID NO: 14227 - DNA, 484 bp, Homo sapiens
cagtggtgacggtggcacaaccttgtgattacgctagaagccactgagctgcacactttaaaaggataaattgtgtggcatatgaattctcaattctcaataataagaatgctgtcccgaaagcctctttctactaagagaattgccttgtccccaacgcacatctcttagtcgttgggacatctaggcagaggtcatcaaacctagccactgcgtagaaccacctggagagtttttaatatccatgttcccaggccacagccacaacctaggttgttaaatcagtaaacccaggttggacctaaatcttagtatcttttaaagttccctaggtgattccgatgtgtagtcaagttttagaactactgatttagcccgtggtttgaaccttcctgatagtatcactgataatttattttgatcctcataatttattgagcacagcagggaccggggtcctttccccaccttagagagattattt

SEQ ID NO: 14228 - DNA, 1719 bp, Homo sapiens
ggctagtcaagtgaaacagtgggagtgaagaagaaacaaagacatctataactggttgtgatcaattagttgtaaacactgcactcagaccagcctgggaagattttaaggatatggtgtggtctgatgggttccaaggcagaggttacaatagcctggaagagggagactgcttaggcagtggcatcctggtgggatagggtctccagcccactggaattttctcttccaagcgtggccccgccctctccgctcgtgattggccctaagttccgggccccagtttcattggatgagcggtcgggggaccgggccaggtgactaagtttccgcggcgccttctccccggccactgcttgagccgctgagagggtggcgacgtcggggccatggggctgggcccggtctttctgcttctggctggcatcttcccttttgcacctccgggagctgctgctgagccccacagtcttcgttataacctcacggtgctgtcctgggatggatctgtgcagtcagggtttcttgctgaggtacatctggatggtcagcccttcctgcgctatgacaggcagaaatgcagggcaaagccccagggacagtgggcagaagatgtcctgggaaataagacatgggacagagagaccagggacttgacagggaacggaaaggacctcaggatgaccctggctcatatcaaggaccagaaagaaggcttgcattccctccaggagattagggtctgtgagatccatgaagacaacagcaccaggagctcccagcatttctactacgatggggagctcttcctctcccaaaacctggagactgaggaatggacagtgccccagtcctccagagctcagaccttggccatgaacgtcaggaatttcttgaaggaagatgccatgaagaccaagacacactatcacgctatgcatgcagactgcctgcaggaactacggcgatatctagaatccggcgtagtcctgaggagaacagtgccccccatggtgaatgtcacccgcagcgaggcctcagagggcaacatcaccgtgacatgcagggcttccagcttctatccccggaatatcatactgacctggcgtcaggatggggtatctttgagccacgacacccagcagtggggggatgtcctgcctgatgggaatggaacctaccagacctgggtggccaccaggatttgccgaggagaggagcagaggttcacctgctacatggaacacagcgggaatcacagcactcaccctgtgccctctgggaaagtgctggtgcttcagagtcattggcagacattccatgtttctgctgttgctgctggctgctgctatttttgttattattattttctatgtccgttgttgtaagaagaaaacatcagctgcagagggtccagagctcgtgagcctgcaggtcctggatcaacacccagttgggacgagtgaccacagggatgccacacagctcggatttcagcctctgatgtcagctcttgggtccactggctccactgagggcacctagactctacagccaggcggctggaattgaattccctgcctggatctcacaagcactttccctcttggtgcctcagtttcctgacctatgaaacagagaaaataaaagcacttatttattgttgttggaggctgcaaaatgttagtagatatgaggcatttgcagctgtgccatatt

SEQ ID NO: 14229 - protein, 332 aa, Homo sapiens
MGLGPVFLLLAGIFPFAPPGAAAEPHSLRYNLTVLSWDGSVQSGFLAEVHLDGQPFLRYDRQKCRAKPQGQWAEDVLGNKTWDRETRDLTGNGKDLRMTLAHIKDQKEGLHSLQEIRVCEIHEDNSTRSSQHFYYDGELFLSQNLETEEWTVPQSSRAQTLAMNVRNFLKEDAMKTKTHYHAMHADCLQELRRYLESGVVLRRTVPPMVNVTRSEASEGNITVTCRASSFYPRNIILTWRQDGVSLSHDTQQWGDVLPDGNGTYQTWVATRICRGEEQRFTCYMEHSGNHSTHPVPSGKVLVLQSHWQTFHVSAVAAGCCYFCYYYFLCPLL

SEQ ID NO: 14230 - DNA, 1801 bp, Homo sapiens
ggctagtcaagtgaaacagtgggagtgaagaagaaacaaagacatctataactggttgtgatcaattagttgtaaacactgcactcagaccagcctgggaagattttaaggatatggtgtggtctgatgggttccaaggcagaggttacaatagcctggaagagggagactgcttaggcagtggcatcctggtgggatagggtctccagcccactggaattttctcttccaagcgtggccccgccctctccgctcgtgattggccctaagttccgggccccagtttcattggatgagcggtcgggggaccgggccaggtgactaagtttccgcggcgccttctccccggccactgcttgagccgctgagagggtggcgacgtcggggccatggggctgggcccggtctttctgcttctggctggcatcttcccttttgcacctccgggagctgctgctgagccccacagtcttcgttataacctcacggtgctgtcctgggatggatctgtgcagtcagggtttcttgctgaggtacatctggatggtcagcccttcctgcgctatgacaggcagaaatgcagggcaaagccccagggacagtgggcagaagatgtcctgggaaataagacatgggacagagagaccagggacttgacagggaacggaaaggacctcaggatgaccctggctcatatcaaggaccagaaagaaggcttgcattccctccaggagattagggtctgtgagatccatgaagacaacagcaccaggagctcccagcatttctactacgatggggagctcttcctctcccaaaacctggagactgaggaatggacagtgccccagtcctccagagctcagaccttggccatgaacgtcaggaatttcttgaaggaagatgccatgaagaccaagacacactatcacgctatgcatgcagactgcctgcaggaactacggcgatatctagaatccggcgtagtcctgaggagaacagtgccccccatggtgaatgtcacccgcagcgaggcctcagagggcaacatcaccgtgacatgcagggcttccagcttctatccccggaatatcatactgacctggcgtcaggatggggtatctttgagccacgacacccagcagtggggggatgtcctgcctgatgggaatggaacctaccagacctgggtggccaccaggatttgccgaggagaggagcagaggttcacctgctacatggaacacagcgggaatcacagcactcaccctgtgccctctgggaaagtgctggtgcttcagagtcattggcagacattccatgtttctgctgttgctgctggctgctgctatttttgttattattattttctatgtccgttgttgtaagaagaaaacatcagctgcagagggtccagagctcgtgagcctgcaggtcctggatcaacacccagttgggacgagtgaccacagggatgccacacagctcggatttcagcctctgatgtcagctcttgggtccactggctccactgagggcacctagactctacagccaggcggctggaattgaattccctgcctggatctcacaagcactttccctcttggtgcctcagtttcctgacctatgaaacagagaaaataaaagcacttatttattgttgttggaggctgcaaaatgttagtagatatgaggcatttgcagctgtgccatattaattggtgtcattgtttttgttgttttcgtattattattttttttttttaagacagagtctcaggccaggcacggtggctca

SEQ ID NO: 14231 - protein, 332 aa, Homo sapiens; identical to SEQ ID NO: 14229

SEQ ID NO: 14232 - DNA, 2141 bp, Homo sapiens
ggattccagggctgctcaggagacgcctccatcctggcgtggatgacctcaggatcagccccgtctgccccactcagcccgcagcctggtccccgaaagcgctcagtcagaatccgagagcactgtggcggcgcccccgtgtggccacaggactgaagacagaggaccccgctcccctttctccccagccaggacgtcccaggctctccccctgttccccgcacctggacgggactctgcacagaagagagtctcccggtctcgtgtcaggctctgagttcatccagcttcccaaaatccatgttgatatgaacgttttctcccacaactgattgactggacttttgtctcagggcagagggaggcctccagaccaaaacagcaggatcaggtctggagctgactcaaccccaaacccttgctaatgcacgacccagtcccccagcctccaggatgggaccttggcctcctgtcccctcccttgttcctgccactgctcctgcaggtggaggctgctcatcccaggaatcagtctgtgagctccaaccttggggcctcggtccaggaaggagggaggctccagagagcagaagggagatgaaatggatcataagagaagaaggaatcataccaaacactggaactgacctttgtgatgctcaggaatgtcctgatgtcagcggagatgaaggaaaaccagagattcaaaagtcaaaggaaagggccatttaccataattcatatcatacatatttcctggaaaaaaaaagaaaaattccttggggaaaaagcatcaaaatcatcaggaagtcttccacacagaaatgacttcattaatttgatctctgtcattctttcttttcattcatgtattattatccatagagatttctatcctgtgggttttttatttaatttttgtttgtttggttttttcagacacagtgagaccctgtctcaaacaaacaaacgtcacaggctgcagtgcagtggcacaatcattgctcactgcagcctcgacctccctgtctgaagcaatcctccagcctcagcctcatgagtagctgaaactacaggaacatgccaccatgcccaactaattttttaaaaaatttttttgtagagatgaggtatcactatgttgccgaggctggtctcaaactcctgggttcaaacaattcacccaccttggctccccagaatgctgggattacaggcctgagccacgtacccagcctctatcccatgttttgattcatcatcatctcctaagccctttcccagcatcgatagtctactaaacatgccatgattaaattatatctctataccttgatataaacaaaaaattatatgagcagtaaagacaaatatgaaaaagtaaaattactgccaaagttattaggaggataacctaaattatttgggtaggaaaatctttcttttttattttatttttttttccagccagggtctcattctgtcactcaggctaaattacagtggcccgatcatggctcactgcagccttgacctcccaagattcaggtgatcctcttgcctcagccccctgagtagctgagacaacaggcatgtgagacaatgcctggctcctttttatatttttagtagagatggggttttgccatgttacccaggctggtctcaaacttctaggctcaaacgatccacccacctcagcctcccaaagtgctggtattacaggcatgaggcactgtgccagccttttttttttttcacatctgctggaatggaaaatatttcttaaatgagacacaaatgtatcaaattgaaaatgtttaaacttcaaaggacttacatacatatacagtcattcttcgctcaatggtgagatagcttctgagaaatgagtccttaggtgattttgtcatgtgtggacatcatagagtgtccttacatgaacctagatggtataacctacttcacacttaggctacgtgataagcccattgcttctaggctacaaattatatagcatgttaccgtatggaacattgcagccaattctaacacaatggtaagtatttgtggatctaagcatgtgtaaacagagaaaaggtacagtaaaaatgtgattaacaaaaagatctttaaaatgg

SEQ ID NO: 14233 - protein, 124 aa, Homo sapiens
MGPWPPVPSLVPATAPAGGGCSSQESVCELQPWGLGPGRREAPESRREMKWIIREEGIIPNTGTDLCDAQECPDVSGDEGKPEIQKSKERAIYHNSYHTYFLEKKRKIPWGKSIKIIRKSSTQK

SEQ ID NO: 14234 - DNA, 1325 bp, Homo sapiens
gtgacataggaggatgccagctttgagtggagcctccacaggaaaggacactgcagcagatccaggccatggcgcagtcaccatccttcagaccccctggtgctgaaagtgccagtggtgggatttactcctccgggcgggcccctcgctccttcccgcagaggctttttccctcccgaccccgcactcacctgcccaggtctggatcagggccacggctcccgagaacagcaggaggagggttcgggactccatgacccgcaaccttggcgtctggggagaatctgagtcccggtgggccggcgaggactttagaaccaggaaccgcggcgacactgattggctgatctaggaacccaacacccaatggaagtgagaactgaggccgcatcatgagtatccaggtatttgtttagaaacaaaagaaaggcagtttttccatgactcagattaatctggagcaaatccctggaacactgatcagcagtcccctttgacccctgcagcagtcttgggcactgtgactttttctctcaggccttgttctctgactcatactcagtgtgtgtgggggtctgattccagctcttctgagtccctcggtctccactcaggtcaggaccagaagtcactgttcctccctcagatactggaactttccaaggaataggagattatcccaggtgcctgtgtccaggctggtgtctgggttctgtgctcccttccccacctcaggtgtcctgtccattctcaggatggtcacgtgagtgctgctggagtgtcccatgaggagtgcaaagtgcctgaattttctgattctacatttttatttgccccagagaaagaatccacagtccaccctaggtccctcctagaaacaagggtgtctgccttacagaaagatataagcgcagaagcctctgtctctatggagatgaggtgtgccgtcctcccagcacgtggacatgcggatgtgctcaccaactgggaagttctccaaaactcactgtctagaggtgtctatggaagtttcattgtgtaggcaagattggtgaaatcattggccattgatgactgagctcaacttccagcccccttttcttccccagaggatggggatggcagtgaaagttccaatcctctaatcacagctggtgtttctggcaagcagcctccatcctgaaactatctaggagcccctcaccccatagtcatctcattgccatattaaaatcatgcttatcactgagggactgcaagcgttttaggacctgcctgtcagggactaggggcaaagaccaaatatatttattggatcacagatc

SEQ ID NO: 14235 - protein, 62 aa, Homo sapiens
MAQSPSFRPPGAESASGGIYSSGRAPRSFPQRLFPSRPRTHLPRSGSGPRLPRTAGGGFGTP

SEQ ID NO: 14236 - DNA, 2432 bp, Homo sapiens
ctcagattctccccagacgccaaggttgcgggtcatggagtcccgaaccctcctcctgctgttctcgggagccgtggccctgatccagacctgggcagattacaattacaatcaaggcagaaatgatctcatttttacattacaactctggaaaaggcaatagactgagatgcaagtgtgcccccaagtgatgggcagaaggagagaaggtgttttggatgcattctagaacacaggtaatctaaggagagttgatcaaggccgtggaagagtcctccagccactattggccatcaaaggagtcctctgtgtcccaggaatggtcctgctttggtgtccctggtgtgacccatcacccgctgggaacagcctgagagaagtagggcctctgcaccaatgctgctgaggatgtcagagcacaggaacgaggccttgggaaattacctggaaatgcgactgaaatcttccttcctgaggggtctgggctcttggaaatcaaaccctctcaggttgggtggctggacgattctcctcacacttacaatgggacaaggggaaccaggaggcccccaaggggatccctgggttccacacgaactcctcctaccctcattgtgtgacagcagccatgcctcctcctggggatcaggatctattacctgtgcctggagaggaggggactcctcttctcacccgctggtctctggacacatactgtccaattcccctgtggcagctgtaatgtgtagttcaatgggcactcatttgtccccttttaagggtaccctcctttagaatccaggaccttctaccctgcagagtgtggttttgggagagaagtgcaaaatcccacgacaggtgagttgaaggaatgggatatggagccacatccacttccaccccttggtatctggacccacgtgttcttcctactgagattacagaactgtagagatgtctttgatttttaaaatgcaccatgtcctgaaagatggcaccctcccacccgcagagtgcttcctgcaagctggcgttgagctgtgcctatagaagctcttttcaacattctttatggccagcagcccttggttggtgcagatggtgataggaccagtgggtcccacagcatggccacactgcacctccttcgctgtcaagtgggtcccccacgaagatactgcacggagagcagtgccaagcctgtggatcaggaatatcaacagcccccagagagtggtgctggctgagggtctgagagcaggacaggaaaacccacctatggaataggtgcctatccctgtgaagatgaacctctggcccttccaggatggaaggagtgcaatgtagtcaactcctcacttagggtctggttggtcacctaaagaaatagagccctaccagggaagatcattgggttcaaatgctgatgagtaggacatttagaggtggcagtgtctggatctaccttggtaggagggagtcagtactgttggacccataggtagcctcatccctgccactgtgtttgctccatttatgtacccatcctacccggcctgggctgacccatggggaaggctggctaatttcagtgcttctgcttggttgttcagggccatttcaggtttgggtgttttctggggatgttaacatgggattcaggctcaactcacaagaaacttttccatctcatgatggatgctgttgggcatgtccaatgtatgacttcatgagttacacagatgctaattcgtaggggcacttggaatcacatggttgttttgtgtcccatggtcaagcattctatcttatcagggcctacagtaacatgccaaaagttgcttccaacatatttctctgctttggatggggcatatttctgtgctgtggatgacatggccttactccagaatcccaggccctccactgtgactctcctactggtgcttggttcagctccaccccaaatcttaccccaccactggcactttcagcaccagggggtctgaaggatggtgactgcgccatggcctggatctgctgcagtgtcctttcctgtggaggctccactcaaagctggcatcctcctatgtcacctagagtgtgggtcaaagcaatacacctacatgtagaatgtgatgtcagaactcaaacaggctcaccaggcagtgtgcttccttccttgcatgaggatgcaagatgcaacagtttgtctttcacattggaagggacacccctggatgcccctaaccactagacctgtaaaacttcactgcagtggccacttctgaatctctgtaaggtttatttatcttcaccctctggagagaagatgttttaccaaagcctctagtgtaccttcctcctcttactcatccatcccagtcaacatgatgttgtcaatgaaataaaggaatttaatattctatagt

SEQ ID NO: 14237 - protein, 42 aa, Homo sapiens
MESRTLLLLFSGAVALIQTWADYNYNQGRNDLIFTLQLWKRQ

SEQ ID NO: 14238 - DNA, 2534 bp, Homo sapiens
tcagattctccccagacgccaaggttgcgggtcatggagtcccgaaccctcctcctgctgttctcgggagccgtggccctgatccagacctgggcagattacaattacaatcaaggcagaaatgatctcatttttacattacaactctggaaaaggcaatagactgagatgcaagtgtgcccccaagtgatgggcagaaggagagaaggtgttttggatgcattctagaacacaggtaatctaaggagagttgatcaaggccgtggaagagtcctccagccactattggccatcaaaggagtcctctgtgtcccaggaatggtcctgctttggtgtccctggtgtgacccatcacccgctgggaacagcctgagagaagtagggcctctgcaccaatgctgctgaggatgtcagagcacaggaacgaggccttgggaaattacctggaaatgcgactgaaatcttccttcctgaggggtctgggctcttggaaatcaaaccctctcaggttgggtggctggacgattctcctcacacttacaatgggacaaggggaaccaggaggcccccaaggggatccctgggttccacacgaactcctcctaccctcattgtgtgacagcagccatgcctcctcctggggatcaggatctattacctgtgcctggagaggaggggactcctcttctcacccgctggtctctggacacatactgtccaattcccctgtggcagctgtaatgtgtagttcaatgggcactcatttgtccccttttaagggtaccctcctttagaatccaggaccttctaccctgcagagtgtggttttgggagagaagtgcaaaatcccacgacaggtgagttgaaggaatgggatatggagccacatccacttccaccccttggtatctggacccacgtgttcttcctactgagattacagaactgtagagatgtctttgatttttaaaatgcaccatgtcctgaaagatggcaccctcccacccgcagagtgcttcctgcaagctggcgttgagctgtgcctatagaagctcttttcaacattctttatggccagcagcccttggttggtgcagatggtgataggaccagtgggtcccacagcatggccacactgcacctccttcgctgtcaagtgggtcccccacgaagatactgcacggagagcagtgccaagcctgtggatcaggaatatcaacagcccccagagagtggtgctggctgagggtctgagagcaggacaggaaaacccacctatggaataggtgcctatccctgtgaagatgaacctctggcccttccaggatggaaggagtgcaatgtagtcaactcctcacttagggtctggttggtcacctaaagaaatagagccctaccagggaagatcattgggttcaaatgctgatgagtaggacatttagaggtggcagtgtctggatctaccttggtaggagggagtcagtactgttggacccataggtagcctcatccctgccactgtgtttgctccatttatgtacccatcctacccggcctgggctgacccatggggaaggctggctaatttcagtgcttctgcttggttgttcagggccatttcaggtttgggtgttttctggggatgttaacatgggattcaggctcaactcacaagaaacttttccatctcatgatggatgctgttgggcatgtccaatgtatgacttcatgagttacacagatgctaattcgtaggggcacttggaatcacatggttgttttgtgtcccatggtcaagcattctatcttatcagggcctacagtaacatgccaaaagttgcttccaacatatttctctgctttggatggggcatatttctgtgctgtggatgacatggccttactccagaatcccaggccctccactgtgactctcctactggtgcttggttcagctccaccccaaatcttaccccaccactggcactttcagcaccagggggtctgaaggatggtgactgcgccatggcctggatctgctgcagtgtcctttcctgtggaggctccactcaaagctggcatcctcctatgtcacctagagtgtgggtcaaagcaatacacctacatgtagaatgtgatgtcagaactcaaacaggctcaccaggcagtgtgcttccttccttgcatgaggatgcaagatgcaacagtttgtctttcacattggaagggacacccctggatgcccctaaccactagacctgtaaaacttcactgcagtggccacttctgaatctctgtaaggtttatttatcttcaccctctggagagaagatgttttaccaaagcctctagtgtaccttcctcctcttactcatccatcccagtcaacatgatgttgtcaatgaaataaaggaatttaatattctatagtatatccaggttctccagatctcttaagactgtactatagaggcctggggaattataatagccctgaggcaaactatgaattaaagtgttgtggatcccacatg

SEQ ID NO: 14239 - protein, 42 aa, Homo sapiens; identical to SEQ ID NO: 14237

SEQ ID NO: 14240 - DNA, 2348 bp, Homo sapiens
agattctccccagacgccaaggttgcgggtcatggagtcccgaaccctcctcctgctgttctcgggagccgtggccctgatccagacctgggcagattacaattacaatcaaggcagaaatgatctcatttttacattacaactctggaaaaggcaatagactgagatgcaagtgtgcccccaagtgatgggcagaaggagagaaggtgttttggatgcattctagaacacaggaatggtcctgctttggtgtccctggtgtgacccatcacccgctgggaacagcctgagagaagtagggcctctgcaccaatgctgctgaggatgtcagagcacaggaacgaggccttgggaaattacctggaaatgcgactgaaatcttccttcctgaggggtctgggctcttggaaatcaaaccctctcaggttgggtggctggacgattctcctcacacttacaatgggacaaggggaaccaggaggcccccaaggggatccctgggttccacacgaactcctcctaccctcattgtgtgacagcagccatgcctcctcctggggatcaggatctattacctgtgcctggagaggaggggactcctcttctcacccgctggtctctggacacatactgtccaattcccctgtggcagctgtaatgtgtagttcaatgggcactcatttgtccccttttaagggtaccctcctttagaatccaggaccttctaccctgcagagtgtggttttgggagagaagtgcaaaatcccacgacaggtgagttgaaggaatgggatatggagccacatccacttccaccccttggtatctggacccacgtgttcttcctactgagattacagaactgtagagatgtctttgatttttaaaatgcaccatgtcctgaaagatggcaccctcccacccgcagagtgcttcctgcaagctggcgttgagctgtgcctatagaagctcttttcaacattctttatggccagcagcccttggttggtgcagatggtgataggaccagtgggtcccacagcatggccacactgcacctccttcgctgtcaagtgggtcccccacgaagatactgcacggagagcagtgccaagcctgtggatcaggaatatcaacagcccccagagagtggtgctggctgagggtctgagagcaggacaggaaaacccacctatggaataggtgcctatccctgtgaagatgaacctctggcccttccaggatggaaggagtgcaatgtagtcaactcctcacttagggtctggttggtcacctaaagaaatagagccctaccagggaagatcattgggttcaaatgctgatgagtaggacatttagaggtggcagtgtctggatctaccttggtaggagggagtcagtactgttggacccataggtagcctcatccctgccactgtgtttgctccatttatgtacccatcctacccggcctgggctgacccatggggaaggctggctaatttcagtgcttctgcttggttgttcagggccatttcaggtttgggtgttttctggggatgttaacatgggattcaggctcaactcacaagaaacttttccatctcatgatggatgctgttgggcatgtccaatgtatgacttcatgagttacacagatgctaattcgtaggggcacttggaatcacatggttgttttgtgtcccatggtcaagcattctatcttatcagggcctacagtaacatgccaaaagttgcttccaacatatttctctgctttggatggggcatatttctgtgctgtggatgacatggccttactccagaatcccaggccctccactgtgactctcctactggtgcttggttcagctccaccccaaatcttaccccaccactggcactttcagcaccagggggtctgaaggatggtgactgcgccatggcctggatctgctgcagtgtcctttcctgtggaggctccactcaaagctggcatcctcctatgtcacctagagtgtgggtcaaagcaatacacctacatgtagaatgtgatgtcagaactcaaacaggctcaccaggcagtgtgcttccttccttgcatgaggatgcaagatgcaacagtttgtctttcacattggaagggacacccctggatgcccctaaccactagacctgtaaaacttcactgcagtggccacttctgaatctctgtaaggtttatttatcttcaccctctggagagaagatgttttaccaaagcctctagtgtaccttcctcctcttactcatccatcccagtcaacatgatgttgtcaatgaaataaaggaatttaatattctatagt

SEQ ID NO: 14241 - protein, 42 aa, Homo sapiens; identical to SEQ ID NO: 14237

SEQ ID NO: 14242 - DNA, 2346 bp, Homo sapiens
agcggtcgctgagcggggcgcaggtgactaaatttcgacggggtcttctcacgggtttcattcagttggccactgctgagcagctgagaaggtggcgacgtaggggccatggggctgggccgggtcctgctgtttctggccgtcgccttcccttttgcacccccggcagccgccgctgagccccacagtcttcgttacaacctcatggtgctgtcccaggatggatctgtgcagtcagggtttctcgctgagggacatctggatggtcagcccttcctgcgctatgacaggcagaaacgcagggcaaagccccagggacagtgggcagaaaatgtcctgggagctaagacctgggacacagagaccgaggacttgacagagaatgggcaagacctcaggaggaccctgactcatatcaaggaccagaaaggagtgccccagtcctccagagctcagaccttggctatgaacgtcacaaatttctggaaggaagatgccatgaagaccaagacacactatcgcgctatgcaggcagactgcctgcagaaactacagcgatatctgaaatccggggtggccatcaggagaacagtgccccccatggtgaatgtcacctgcagcgaggtctcagagggcaacatcaccgtgacatgcagggcttccagcttctatccccggaatatcacactgacctggcgtcaggatggggtatctttgagccacaacacccagcagtggggggatgtcctgcctgatgggaatggaacctaccagacctgggtggccaccaggattcgccaaggagaggagcagaggttcacctgctacatggaacacagcgggaatcacggcactcaccctgtgccctctgggaaggcgctggtgcttcagagtcaacggacagactttccatatgtttctgctgctatgccatgttttgttattattattattctctgtgtcccttgttgcaagaagaaaacatcagcggcagagggtccagagcttgtgagcctgcaggtcctggatcaacacccagttgggacaggagaccacagggatgcagcacagctgggatttcagcctctgatgtcagctactgggtccactggttccactgagggcacctagactctacagccaggcggccaggattcaactccctgcctggatctcaccagcactttccctctgtttcctgacctatgaaacagagaaaataacatcacttatttattgttgttggatgctgcaaagtgttagtaggtatgaggtgtttgctgctctgccacgtagagagccagcaaagggatcatgaccaactcaacattccattggaggctatatgatcaaacagcaaattgtttatcatgaatgcaggatgtgggcaaactcacgactgctcctgccaacagaaggtttgctgagggcattcactccatggtgctcattggagttatctactgggtcatctagagcctattgtttgaggaatgcagtcttacaagcctactctggacccagcagctgactccttcttccacccctcttcttgctatctcctataccaataaatacgaagggctgtggaagatcagagcccttgttcacgagaagcaagaagccccctgaccccttgttccaaatatactcttttgtctttctctttattcccacgttcgccctttgttcagtccaatacagggttgtggggcccttaacagtgccatattaattggtatcattatttctgttgtttttgtttttgtttttgtttttgtttttgagacagagtctcactctgtcacccaggctgcagttcactggtgtgatctcagctcactgcaacctctgcctcccaggttcaagcacttctcgtacctcagactcccgaatagctgggattacagacaggcaccaccacacccagctaatttttgtattttttgtagagacggggtttcgccaagttgaccagcccagtttcaaactcctgacctcaggtgatctgcctgccttggcatcccaaagtgctgggattacaagaatgagccaccgtgcctggcctattttattatattgtaatatattttattatattagccaccatgcctgtcctattttcttatgttttaatatattttaatatattacatgtgcagtaattagattatcatgggtgaactttatgagtgagtatcttggtgatgactcctcctgaccagcccaggaccagctttcttgtcaccttgaggtcccctcgccccgtcacaccgttatgcattactctgtgtctactattatgtgtgcataatttataccgtaaatgtttactctttaaataga

SEQ ID NO: 14243 - protein, 340 aa, Homo sapiens
MGLGRVLLFLAVAFPFAPPAAAAEPHSLRYNLMVLSQDGSVQSGFLAEGHLDGQPFLRYDRQKRRAKPQGQWAENVLGAKTWDTETEDLTENGQDLRRTLTHIKDQKGVPQSSRAQTLAMNVTNFWKEDAMKTKTHYRAMQADCLQKLQRYLKSGVAIRRTVPPMVNVTCSEVSEGNITVTCRASSFYPRNITLTWRQDGVSLSHNTQQWGDVLPDGNGTYQTWVATRIRQGEEQRFTCYMEHSGNHGTHPVPSGKALVLQSQRTDFPYVSAAMPCFVIIIILCVPCCKKKTSAAEGPELVSLQVLDQHPVGTGDHRDAAQLGFQPLMSATGSTGSTEGT

SEQ ID NO: 14244 - DNA, 2446 bp, Homo sapiens
aaatttcgacggggtcttctcacgggtttcattcagttggccactgctgagcagctgagaaggtggcgacgtaggggccatggggctgggccgggtcctgctgtttctggccgtcgccttcccttttgcacccccggcagccgccgctgagccccacagtcttcgttacaacctcatggtgctgtcccaggatggatctgtgcagtcagggtttctcgctgagggacatctggatggtcagcccttcctgcgctatgacaggcagaaacgcagggcaaagccccagggacagtgggcagaaaatgtcctgggagctaagacctgggacacagagaccgaggacttgacagagaatgggcaagacctcaggaggaccctgactcatatcaaggaccagaaaggaggcttgcattccctccaggagattagggtctgtgagatccatgaagacagcagcaccaggggctcccggcatttctactacgatggggagctcttcctctcccaaaacctggagactcaagaatcgacagtgccccagtcctccagagctcagaccttggctatgaacgtcacaaatttctggaaggaagatgccatgaagaccaagacacactatcgcgctatgcaggcagactgcctgcagaaactacagcgatatctgaaatccggggtggccatcaggagaacagtgccccccatggtgaatgtcacctgcagcgaggtctcagagggcaacatcaccgtgacatgcagggcttccagcttctatccccggaatatcacactgacctggcgtcaggatggggtatctttgagccacaacacccagcagtggggggatgtcctgcctgatgggaatggaacctaccagacctgggtggccaccaggattcgccaaggagaggagcagaggttcacctgctacatggaacacagcgggaatcacggcactcaccctgtgccctctgggaaggcgctggtgcttcagagtcaacggacagactttccatatgtttctgctgctatgccatgttttgttattattattattctctgtgtcccttgttgcaagaagaaaacatcagcggcagagggtccagagcttgtgagcctgcaggtcctggatcaacacccagttgggacaggagaccacagggatgcagcacagctgggatttcagcctctgatgtcagctactgggtccactggttccactgagggcacctagactctacagccaggcggccaggattcaactccctgcctggatctcaccagcactttccctctgtttcctgacctatgaaacagagaaaataacatcacttatttattgttgttggatgctgcaaagtgttagtaggtatgaggtgtttgctgctctgccacgtagagagccagcaaagggatcatgaccaactcaacattccattggaggctatatgatcaaacagcaaattgtttatcatgaatgcaggatgtgggcaaactcacgactgctcctgccaacagaaggtttgctgagggcattcactccatggtgctcattggagttatctactgggtcatctagagcctattgtttgaggaatgcagtcttacaagcctactctggacccagcagctgactccttcttccacccctcttcttgctatctcctataccaataaatacgaagggctgtggaagatcagagcccttgttcacgagaagcaagaagccccctgaccccttgttccaaatatactcttttgtctttctctttattcccacgttcgccctttgttcagtccaatacagggttgtggggcccttaacagtgccatattaattggtatcattatttctgttgtttttgtttttgtttttgtttttgtttttgagacagagtctcactctgtcacccaggctgcagttcactggtgtgatctcagctcactgcaacctctgcctcccaggttcaagcacttctcgtacctcagactcccgaatagctgggattacagacaggcaccaccacacccagctaatttttgtattttttgtagagacggggtttcgccaagttgaccagcccagtttcaaactcctgacctcaggtgatctgcctgccttggcatcccaaagtgctgggattacaagaatgagccaccgtgcctggcctattttattatattgtaatatattttattatattagccaccatgcctgtcctattttcttatgttttaatatattttaatatattacatgtgcagtaattagattatcatgggtgaactttatgagtgagtatcttggtgatgactcctcctgaccagcccaggaccagctttcttgtcaccttgaggtcccctcgccccgtcacaccgttatgcattactctgtgtctactattatgtgtgcataatttataccgtaaatgtttactctttaaataga

SEQ ID NO: 14245 - protein, 383 aa, Homo sapiens
MGLGRVLLFLAVAFPFAPPAAAAEPHSLRYNLMVLSQDGSVQSGFLAEGHLDGQPFLRYDRQKRRAKPQGQWAENVLGAKTWDTETEDLTENGQDLRRTLTHIKDQKGGLHSLQEIRVCEIHEDSSTRGSRHFYYDGELFLSQNLETQESTVPQSSRAQTLAMNVTNFWKEDAMKTKTHYRAMQADCLQKLQRYLKSGVAIRRTVPPMVNVTCSEVSEGNITVTCRASSFYPRNITLTWRQDGVSLSHNTQQWGDVLPDGNGTYQTWVATRIRQGEEQRFTCYMEHSGNHGTHPVPSGKALVLQSQRTDFPYVSAAMPCFVIIIILCVPCCKKKTSAAEGPELVSLQVLDQHPVGTGDHRDAAQLGFQPLMSATGSTGSTEGT

SEQ ID NO: 14246 - DNA, 987 bp, Homo sapiens
agttcctggtggccgttggacagctcacacagctccctgccaggtcacccgccatggtcctccctctgccctggctctctcggtaccatttccttcgcctccttctgccctcctggtccttggcaccccagggctcccatgggtgctgctcccaaaaccccaaagcaagcatggaagagcagaccagctccagaggaaatgggaagatgacgtcccctcccaggggccctgggacccaccgcacagctgagctggcccgagctgaagagttgttggagcagcagctggagctgtaccaggccctccttgaagggcaggagggagcctgggaggcccaagccctggtgctcaagatccagaagctgaaggaacagatgaggaggcaccaagagagccttggaggaggcgcctaagtttcccccagtgcccacagcaccctccggcgctgaaaatacacgcaccacccaccaggagccttgggatcataaacaccccagcgtcttcccaggccagagaaagtggaagagaccacaaagcgcaggcaattggcaggcagtgggggagccagggctctgcagtcttagtcccattcccctttgatctcacagcaggcagggcacccaggccttataggaattcaccctggaccatgccctaaaataacctcaccccaaatacaataaagggacgaagcacttatagataccacagacacatgtgtttcatttttagttttgttaaaaaaaaattctgacaaatcagaaatgggggttcaggagtggtggtgatgcaaaagatggaagccatggggtgggggctgtcaggggtgggggcagtagtgtctccttcacccccaccctggtgtcctctcctgaaggacagacggtcacattccaaaatgggcgagtcttctaccgtgtctgttcaactgagaagaaaacgtagcatggtcagaataaggcatgaaaaggggaaagtgaggcagga

SEQ ID NO: 14247 - protein, 119 aa, Homo sapiens
MVLPLPWLSRYHFLRLLLPSWSLAPQGSHGCCSQNPKASMEEQTSSRGNGKMTSPPRGPGTHRTAELARAEELLEQQLELYQALLEGQEGAWEAQALVLKIQKLKEQMRRHQESLGGGA

SEQ ID NO: 14248 - DNA, 1151 bp, Homo sapiens
gggtaacatagggagacgcccgtctctacaaatagtaaaaataaaaaataaaaaaagtagctgggcgtggtggtgtgcacctgtggtcccagctgcttgggatgctgaggtggaaggatctcttaaacccaggagggtggaggctgcagtgacttgcgattgcaccactgcactccagtctgggggacagagtgagaccccatctcaaaaaagtgtttaattaatatacttgtgagtggtctatttgcatttaaaactgctttctagaattaggatagctcccttaggtttaatgttttggtgagcaggaatatcagttacccctccagatcttaattctagttttttatcactttttcatgaggtgatctcatcctcatctcctagcatgtctggcaattttgatttctgaactctgtgctacctcagaggccagcttccttagggaaaaatcagtgctgaagtaaagttatatttccttttctgctctaaatatatagtgggggaataagagaaatgaagaggaattcctgagaacgtaattactagaaactcccctctcccacgtaatgtctctcacacaccatggacccctattcccccaatttgcgaccccccaccccaccccacaacaggtggtgatctttgtgaagtctgtgcagcggtgcattgccttggcccaacctatttggccgaggcatggacatcgagcgggtgaacattgcttttaattatgacatgcctgaggattctgacacctacctgcatcgggtggccagagcaggccggtttggcaccaagggcttggctatcacatttgtgtccgatgagaatgatgccaagatcctcaatgatgtgcaggatcgctttgaggtcaatattagtgagctgcctgatgagatagacatctcctcctacattgaacagacacggtagaagactcgcccattttggaatgtgaccgtctgtccttcaggagaggacaccagggtgggggtgaaggagacactactgcccccacccctgacagcccccaccccatggcttccatcttttgcatcaccaccactcctgaacccccatttctgatttgtcagaatttttttttaacaaaactaaaaatgaaacacatgtgtctgtggtatctataa

SEQ ID NO: 14249 - protein, 78 aa, Homo sapiens
MDIERVNIAFNYDMPEDSDTYLHRVARAGRFGTKGLAITFVSDENDAKILNDVQDRFEVNISELPDEIDISSYIEQTR

SEQ ID NO: 14250 - DNA, 1623 bp, Homo sapiens
ggtggtgtatgcctgtagtcccagatactctggtggctgaggtgagaggatagcttgagcccaggaaattgaggctgcagtgaactatgattgcactactgtgctccagcttgggcaacagagtgagatcttgtctccaaaagtccttgaaggattttaggaagttgttaaaagtcttgaaacgatgtttgggggcatgttagggttcttgaatgtttaattcctctaataactgcttattcaagagaagcatttctgactgggtgcagggcagtggctcatgcccataatcccagtactttgggaggctgaggcaggagcattgcttgagcccaggacttcaagaccagcctgggtaacatagggagacgcccgtctctacaaatagtaaaaataaaaaataaaaaaagtagctgggcgtggtggtgtgcacctgtggtcccagctgcttgggatgctgaggtggaaggatctcttaaacccaggagggtggaggctgcagtgacttgcgattgcaccactgcactccagtctgggggacagagtgagaccccatctcaaaaaagtgtttaattaatatacttgtgagtggtctatttgcatttaaaactgctttctagaattaggatagctcccttaggtttaatgttttggtgagcaggaatatcagttacccctccagatcttaattctagttttttatcactttttcatgaggtgatctcatcctcatctcctagcatgtctggcaattttgatttctgaactctgtgctacctcagaggccagcttccttagggaaaaatcagtgctgaagtaaagttatatttccttttctgctctaaatatatagtgggggaataagagaaatgaagaggaattcctgagaacgtaattactagaaactcccctctcccacgtaatgtctctcacacaccatggacccctattcccccaatttgcgaccccccaccccaccccacaacaggtggtgatctttgtgaagtctgtgcagcggtgcattgccttggcccagctactagtggagcagaacttcccagccattgccatccaccgtgggatgccccaggaggagaggctttctcggtatcagcagtttaaagattttcaacgacgaattcttgtggctaccaacctatttggccgaggcatggacatcgagcgggtgaacattgcttttaattatgacatgcctgaggattctgacacctacctgcatcgggtggccagagcaggccggtttggcaccaagggcttggctatcacatttgtgtccgatgagaatgatgccaagatcctcaatgatgtgcaggatcgctttgaggtcaatattagtgagctgcctgatgagatagacatctcctcctacattgaacagacacggtagaagactcgcccattttggaatgtgaccgtctgtccttcaggagaggacaccagggtgggggtgaaggagacactactgcccccacccctgacagcccccaccccatggcttccatcttttgcatcaccaccactcctgaacccccatttctgatttgtcagaatttttttttaacaaaactaaaaatgaaacacatgtgtctgtggtatctataa

SEQ ID NO: 14251 - protein, 161 aa, Homo sapiens [sequence omitted]

SEQ ID NO: 14252 - DNA, 2003 bp, Homo sapiens; identical to SEQ ID NO: 1502

SEQ ID NO: 14253 - protein, 428 aa, Homo sapiens; identical to SEQ ID NO: 1501

SEQ ID NO: 14254 - DNA, 2039 bp, Homo sapiens
cagcatcggccataacaacagaaatggccagtcagtcccaaggtatccagcagcttctgcaagctgagaagcgggcagctgagaaggtggcagatgccagaaagaggaaggcccggcgactgaagcaggcaaaggaggaggcacagatggaggtggagcaataccgcagagagcgagagcacgaattccagagcaagcagcaggcgacaggcattttccaaaggcaagcctggagcgcacggatctgtataaccgcggaaggccctgtttccggtcccttgcgcctgcgctcttgcagccaagaaggcgggaggctggagtagagggaagcctgcaaccggaagtgaaggcagatttccctccttcgtcgctgttgctgccgccatacgcgctctccctgtttagctcttctgttagaaatagtatctttgttttcctttgctgttcctcaatcccctactcttcaccccttgttttcacctattttgcgagaacccatccagatcccccttcccttcttcccctgccggcccagttatggcagagaacgatgtggacaatgagctcttggactatgaagatgatgaggtggagacagcagctgggggagatggggctgaggcccctgccaagaaggatgtcaagggctcctatgtctccatccacagctctggctttcgtgacttcctgctcaagccagagttgctccgggccattgtcgactgtggctttgagcatccgtcagaagtccagcatgagtgcatccctcaggccattctgggaatggatgtcctgtgccaggccaagtcgggcatgggaaagacagcagtgtttgtcttggccacactgcaacagctggagccagttactgggcaggtgtctgtactggtgatgtgtcacactcgggagttggcttttcagatcagcaaggaatatgagcgcttctctaaatacatgcccaatgtcaaggttgctgttttttttggtggtctgtctatcaagaaggatgaagaggtgctgaagaagaactgcccgcatatcgtcgtggggactccaggccgtatcctagccctggctcgaaataagagcctcaacctcaaacacattaaacactttattttggatgaatgtgataagatgcttgaacagctcgacatgcgtcgggatgtccaggaaatttttcgcatgaccccccacgagaagcaggtcatgatgttcagtgctaccttgagcaaagagatccgtccagtctgccgcaagttcatgcaagatccaatggagatcttcgtggatgatgagacgaagttgacgctgcatgggttgcagcagtactacgtgaaactgaaggacaacgagaagaaccggaagctctttgaccttctggatgtccttgagttcaaccaggtggtgatctttgtgaagtctgtgcagcggtgcattgccttggcccagctactagtggagcagaacttcccagccattgccatccaccgtgggatgccccaggaggagaggctttctcggtatcagcagtttaaagattttcaacgacgaattcttgtggctaccaacctatttggccgaggcatggacatcgagcgggtgaacattgcttttaattatgacatgcctgaggattctgacacctacctgcatcgggtggccagagcaggccggtttggcaccaagggcttggctatcacatttgtgtccgatgagaatgatgccaagatcctcaatgatgtgcaggatcgctttgaggtcaatattagtgagctgcctgatgagatagacatctcctcctacattgaacagacacggtagaagactcgcccattttggaatgtgaccgtctgtccttcaggagaggacaccagggtgggggtgaaggagacactactgcccccacccctgacagcccccaccccatggcttccatcttttgcatcaccaccactcctgaacccccatttctgatttgtcagaatttttttttaacaaaactaaaaatgaaacacatgtgtctgtggtatctataa

SEQ ID NO: 14255 - protein, 428 aa, Homo sapiens; identical to SEQ ID NO: 1501

SEQ ID NO: 14256 - DNA, 735 bp, Homo sapiens
tcccactctcccattcccttgttttctgtttgtacatcttcattcctgcctctgggtctctttcctcttcggtcttccagtgctaccctctgtctccctccaggtggccagagcaggccggtttggcaccaagggcttggctatcacatttgtgtccgatgagaatgatgccaagatcctcaatgatgtgcaggatcgctttgaggtcctccctgttccttagtgtgtttgtccgaaatcccatcacataggtcatgggcatctgatgcataatggacacttgactggttcatgccccctggtctttgatgctgtgttgggatgtttttctgacctttatgtggggtgtcttgtcttctctcatcatattacatcccttccctcacccccacgtccgtcctctgaacccaggcagtacaccagtgtctgcatgtgtgccgtgtgttcctgcctcactttccccttttcatgccttattctgaccatgctacgttttcttctcagttgaacagacacggtagaagactcgcccattttggaatgtgaccgtctgtccttcaggagaggacaccagggtgggggtgaaggagacactactgcccccacccctgacagcccccaccccatggcttccatcttttgcatcaccaccactcctgaacccccatttctgatttgtcagaatttttttttaacaaaactaaaaatgaaacacatgtgtctgtggtatctata

SEQ ID NO: 14257 - protein, 30 aa, Homo sapiens
MRMMPRSSMMCRIALRSSLFLSVFVRNPIT

SEQ ID NO: 14258 - DNA, 2553 bp, Homo sapiens
gtggggttttcaatcttctctttcctccccatccccccatggggtgtattggagatcaacttcctccacccccccaggtttaacccccccactctgccctcctcccgttccccacccccttcctcccccccagccaatggagatcttcgtggatgatgagacgaagttgacgctgcatgggttgcagcagtactacgtgaaactgaaggacaacgagaagaaccggaagctctttgaccttctggatgtccttgagttcaaccaggtcagttagacgtccagtagggggatgagcattggagcactccagctgtagcagaaacctggatattaagtacacttttattgaggaaatcacatgtgtgatgtgggagagaataatgagggtataaatatcttaggggctgagcatgagtaaggtgggagctgcttttctattctatggctggcacgggtatgtcctcaataacctcaaggaaaataaacttcaaaaattaagatccttggccaggcacggtggcttatgtgtgtaatcccagcacttggggaggctgagggaggtggatcacttgagtccaggagtttgagaccagtcggggcaacatggcgaaacttcatcactaccaaagaagaaaaaaattagccaggtgtggtggtgtatgcccataatcccagtactttgggaggctgaggcaggagcattgcttgagcccaggacttcaagaccagcctgggtaacatagggagacgcccgtctctacaaatagtaaaaataaaaaataaaaaaagtagctgggcgtggtggtgtgcacctgtggtcccagctgcttgggatgctgaggtggaaggatctcttaaacccaggagggtggaggctgcagtgacttgcgattgcaccactgcactccagtctgggggacagagtgagaccccatctcaaaaaagtgtttaattaatatacttgtgagtggtctatttgcatttaaaactgctttctagaattaggatagctcccttaggtttaatgttttggtgagcaggaatatcagttacccctccagatcttaattctagttttttatcactttttcatgaggtgatctcatcctcatctcctagcatgtctggcaattttgatttctgaactctgtgctacctcagaggccagcttccttagggaaaaatcagtgctgaagtaaagttatatttccttttctgctctaaatatatagtgggggaataagagaaatgaagaggaattcctgagaacgtaattactagaaactcccctctcccacgtaatgtctctcacacaccatggacccctattcccccaatttgcgaccccccaccccaccccacaacaggtggtgatctttgtgaagtctgtgcagcggtgcattgccttggcccagctactagtggagcagaacttcccagccattgccatccaccgtgggatgccccaggaggagaggtgagctgaagatgggaaagatattttgtgtccttgggagaaaaagacagttgagagaagggaatctcaacatgttttaaatttcctttctcacaaaggctttctcggtatcagcagtttaaagattttcaacgacgaattcttgtggctaccaacctatttggccgaggcatggacatcgagcgggtgaacattgcttttaattatgacatgcctgaggattctgacacctacctgcatcgggtaaacctcacaggctgaaaaaatcccactctcccattcccttgttttctgtttgtacatcttcattcctgcctctgggtctctttcctcttcggtcttccagtgctaccctctgtctccctccaggtggccagagcaggccggtttggcaccaagggcttggctatcacatttgtgtccgatgagaatgatgccaagatcctcaatgatgtgcaggatcgctttgaggtcaatattagtgagctgcctgatgagatagacatctcctcctacagtgagtactgatctcatgaaaccctttaggtcctccctgttccttagtgtgtttgtccgaaatcccatcacataggtcatgggcatctgatgcataatggacacttgactggttcatgccccctggtctttgatgctgtgttgggatgtttttctgacctttatgtggggtgtcttgtcttctctcatcatattacatcccttccctcacccccacgtccgtcctctgaacccaggcagtacaccagtgtctgcatgtgtgccgtgtgttcctgcctcactttccccttttcatgccttattctgaccatgctacgttttcttctcagttgaacagacacggtagaagactcgcccattttggaatgtgaccgtctgtccttcaggagaggacaccagggtgggggtgaaggagacactactgcccccacccctgacagcccccaccccatggcttccatcttttgcatcaccaccactcctgaacccccatttctgatttgtcagaatttttttttaacaaaactaaaaatgaaacacatgtgtctgtggtatctata

SEQ ID NO: 14259 - protein, 80 aa, Homo sapiens
MHNGHLTGSCPLVFDAVLGCFSDLYVGCLVFSHHITSLPSPPRPSSEPRQYTSVCMCAVCSCLTFPFSCLILTMLRFLLS

SEQ ID NO: 14260 - DNA, 5412 bp, Homo sapiens
tgaagaggtgctgaagaagaactgcccgcatatcgtcgtggggactccaggccgtatcctagccctggctcgaaataagagcctcaacctcaaacacattaaacactttattttggatgaatgtgataagatgcttgaacagctcgacatgcgtcgggatgtccaggaaatttttcgcatgaccccccacgagaagcaggtcatgatgttcagtgctaccttgagcaaagagatccgtccagtctgccgcaagttcatgcaagatgtaaatacccttctaccttctctccctccactccccgcccgctgcctcctccccttcctcgccctcttcctcagactcccttgtcattcaagtgccaagaaggcggcttgtgcccaactgggagtaatgactccttgaagagacatacagaagcagagacagctagtgttagggcctgcgcgggtgccagggaaactccggaagacttggtcgggttaatgtgagagcgggtagtgttcgactttttcataaatcacaacatttttgaacctcttctccctttgggggagggcaggatttttctgccctaccacccacccatccatcgtctcttacatgcaccctacagccacgcaccctcaaggtggcatcgagcgtacagctggagccttctgctcaccaaaactcctacttcccggtggcaggagagcaagagagggacagacagatggcagggcatgtccaaaagaagagcatcagcacaaatgaatcctccccttccccacctccaggggtgggggcctttggcacctcaatccccgataccctactccttcccacccacatctccttgcacccatctggaacctcggttgatgtgagccggcaacagagaagcaccgtggcgcggcgagggaatgcagacggcacccagcggtggatggcggcagcggaggccgcggggaaacctgaccaggaagctgaggaccaaaccagcctctttttccgttcccggtttttttcctgaacccaacgcgtgccgtgccccgtttcccccaatatgtgttggggaggggtgtcctgaatggggtggtagattttttttcttaaaaaaatttttttgttttttttaatactcagaggagagggacataggaaaggtaaagtggatgtaatcgggtggttgttagggtttggggctaggtggggccaattgcataagcagtggagtgtgttcttcccctccctgcagtgttccttcccgtgggatgatcactctttagctgtatttggggctagaatgagatttgaaggaggccatggaacttctctttagaaagcctgccttggctgggcctggtggctcacctctaatcccagcactttgggaggccaaggtgggaggattgcttgagcccaggaatttgagactagctggggcagtgtagtgagactttgtctctaccagaaaaaccgggcgtggtggcgcatgcctgtagtcccagctacttgggaagctgaggcaggagggtttgcttgagcccgggacgtggaggtggcagtaagctgtaattgtgccactgtactccagcctgggtgatagagagagaccctgtatcaaaacaaaacaaaaaacaaaacctgccttctgggattgggcttctggtttttttcccatgacacacgcatcctttcctattttgtcctctgggtcttcatattaactatcttcccccaggatagtataaaaagtgttaggaaagttgggctttggagttgtggtaatttctgtctttgttactttcctccccttcagggggttttttaattttaaagatgaatgcagtgaggtataatggtgtgtgcctgtagtcccagctattcaggagactgaagcaggaggatcacttgagcccaggaatttgaggctatagtgtgctatgattgtgccagtgaatagccactgcactccagcctgggcaacatggtgagatcctgtcccttaaaagtgtatctgctgctctgaatttggtattttaacaccacttactgatacctttcctgtaaacctgtagatggtttaattcttagtcaagagaccagtctcatctaaaactatcctgttgtggtctgacggcaagtaactcatcttgagtaatttttgtttctccttaagtggcattttgactgtccattgcagcattctgatcttaaaagacatccactttgctaatgcacacgagattctcttagttgaagtaggagaatcaaatggagcagttgtcctccccccaccccatgttcttagaagcacctctgatggagttattctgaccttgagtcactgcctcccatcatttcccagatgtttggtccttgctctccctttgagaatcatctcccattttctttcctctcccacctctatttgaggtaatggcatctgtgccattgggtggtttcactgctccttgacttcatttgcagtttctttcccatgatagtttttagttgggcagtcttaaaactcatctgataggaaggaaattagatgtaatgtgagagagaccacagtaaaatgtgggtatttttgggagtggggtggggttttcaatcttctctttcctccccatccccccatggggtgtattggagatcaacttcctccacccccccaggtttaacccccccactctgccctcctcccgttccccacccccttcctcccccccagccaatggagatcttcgtggatgatgagacgaagttgacgctgcatgggttgcagcagtactacgtgaaactgaaggacaacgagaagaaccggaagctctttgaccttctggatgtccttgagttcaaccaggtcagttagacgtccagtagggggatgagcattggagcactccagctgtagcagaaacctggatattaagtacacttttattgaggaaatcacatgtgtgatgtgggagagaataatgagggtataaatatcttaggggctgagcatgagtaaggtgggagctgcttttctattctatggctggcacgggtatgtcctcaataacctcaaggaaaataaacttcaaaaattaagatccttggccaggcacggtggcttatgtgtgtaatcccagcacttggggaggctgagggaggtggatcacttgagtccaggagtttgagaccagtcggggcaacatggcgaaacttcatcactaccaaagaagaaaaaaattagccaggtgtggtggtgtatgcctgtagtcccagatactctggtggctgaggtgagaggatagcttgagcccaggaaattgaggctgcagtgaactatgattgcactactgtgctccagcttgggcaacagagtgagatcttgtctccaaaagtccttgaaggattttaggaagttgttaaaagtcttgaaacgatgtttgggggcatgttagggttcttgaatgtttaattcctctaataactgcttattcaagagaagcatttctgactgggtgcagggcagtggctcatgcccataatcccagtactttgggaggctgaggcaggagcattgcttgagcccaggacttcaagaccagcctgggtaacatagggagacgcccgtctctacaaatagtaaaaataaaaaataaaaaaagtagctgggcgtggtggtgtgcacctgtggtcccagctgcttgggatgctgaggtggaaggatctcttaaacccaggagggtggaggctgcagtgacttgcgattgcaccactgcactccagtctgggggacagagtgagaccccatctcaaaaaagtgtttaattaatatacttgtgagtggtctatttgcatttaaaactgctttctagaattaggatagctcccttaggtttaatgttttggtgagcaggaatatcagttacccctccagatcttaattctagttttttatcactttttcatgaggtgatctcatcctcatctcctagcatgtctggcaattttgatttctgaactctgtgctacctcagaggccagcttccttagggaaaaatcagtgctgaagtaaagttatatttccttttctgctctaaatatatagtgggggaataagagaaatgaagaggaattcctgagaacgtaattactagaaactcccctctcccacgtaatgtctctcacacaccatggacccctattcccccaatttgcgaccccccaccccaccccacaacaggtggtgatctttgtgaagtctgtgcagcggtgcattgccttggcccagctactagtggagcagaacttcccagccattgccatccaccgtgggatgccccaggaggagaggtgagctgaagatgggaaagatattttgtgtccttgggagaaaaagacagttgagagaagggaatctcaacatgttttaaatttcctttctcacaaaggctttctcggtatcagcagtttaaagattttcaacgacgaattcttgtggctaccaacctatttggccgaggcatggacatcgagcgggtgaacattgcttttaattatgacatgcctgaggattctgacacctacctgcatcgggtaaacctcacaggctgaaaaaatcccactctcccattcccttgttttctgtttgtacatcttcattcctgcctctgggtctctttcctcttcggtcttccagtgctaccctctgtctccctccaggtggccagagcaggccggtttggcaccaagggcttggctatcacatttgtgtccgatgagaatgatgccaagatcctcaatgatgtgcaggatcgctttgaggtcaatattagtgagctgcctgatgagatagacatctcctcctacagtgagtactgatctcatgaaaccctttaggtcctccctgttccttagtgtgtttgtccgaaatcccatcacataggtcatgggcatctgatgcataatggacacttgactggttcatgccccctggtctttgatgctgtgttgggatgtttttctgacctttatgtggggtgtcttgtcttctctcatcatattacatcccttccctcacccccacgtccgtcctctgaacccaggcagtacaccagtgtctgcatgtgtgccgtgtgttcctgcctcactttccccttttcatgccttattctgaccatgctacgttttcttctcagttgaacagacacggtagaagactcgcccattttggaatgtgaccgtctgtccttcaggagaggacaccagggtgggggtgaaggagacactactgcccccacccctgacagcccccaccccatggcttccatcttttgcatcaccaccactcctgaacccccatttctgatttgtcagaatttttttttaacaaaactaaaaatgaaacacatgtgtctgtggtatctata

SEQ ID NO: 14261 - protein, 90 aa, Homo sapiens [sequence omitted]

SEQ ID NO: 14262 - DNA, 7353 bp, Homo sapiens
agatttccctccttcgtcgctgttgctgccgccatacgcgctctccctgtttaggtaagctttggccttcgctacaatccgtttccatctgcgcttctccgcacccatcccgtcacatgggttcctgatacccttttcacaggcgatggtctggtcgctggggcctagttggttcgctatttccttagcttgcatccctttcgagagcaaagagctcctgggggaaggaagggaagctaaggggggacccaatccaagatggtgtcctcggcgccattgtgttcgttttgctcccttcttccaatgggttcttctcatattggaggcctcagcatcaatgagaggcggcgctcggcgtcccttggtcttggtatttgcggagggcggggctcttctcaccttccttgtcctttcttgagctctttctcggccctcggtgggactgggaggaggagctggtttctgggcccagttggatttttctcaccttgacttgcccaacttaatttggagtgccttccaagtgtttacgatacgattggtgtcattgtatgtttctccaaaaggagtctcaccttcgtagcgtaacagtgatgtgagaccacttggtaaagatcctgttaaagcctgggcggggattgcctttctctgtcacctattagctttcttattgtagggtggagacatgaattttgtttttttgtggccgagccatttgtcttgcaccgcccctcccccccatgctaattacacaaggcttgcttaaacagcggaagggaggatactgagaagtgggaggctgagagctatgggaggtggacggcggccatatgatgttttcttttcgaaaggtgagcgctttgcgcagtgatgaccctcatctatcacccttgactgatggctgctgagttaggcatccataacggtgggattataatagggaaagcggagtcttcctttgaggacttttcaggactctacttgtcatctccattttccactttactaagttattagtcgtattttaccttttattatctattctatttcctcactgttactttcagatcaagaatttataagttggtcttccccttccaacttttctggtttccgctactgtgattgctaatcttgttgggaacctctgtcctaaccactttccctggtactgctttttctgttctgttatatttgcttttcgtttttatgttttgtatctgtttttctttccaggtaaaagtttcctggtttagggaaagtgggaactggggatggaaaagaggtggtgaaggctgtgctcgtgattaagtcttgcttttttttttcccccctccagctcttctgttagaaatagtatctttgttttcctttgctgttcctcaatcccctactcttcaccccttgttttcacctattttgcgagaacccatccagatcccccttcccttcttcccctgccggcccagttatggcagagaacgatgtggacaatgagctcttggactatgaagatgatgaggtggagacagcagctgggggagatggggctgaggcccctgccaagaaggatgtcaagggctcctatgtctccatccacagctctggctttcgtgacttcctgctcaagccagagttgctccgggccattgtcgactgtggctttgagcatccgtcagaagtccagcatgagtgcatccctcaggccattctgggaatggatgtcctgtgccaggccaagtcgggcatgggaaagacagcagtgtttgtcttggccacactgcaacagctggagccagttactgggcaggtgtctgtactggtgatgtgtcacactcgggagttggcttttcagatcagcaaggaatatgagcgcttctctaaatacatgcccaatgtcaaggttgctgttttttttggtggtctgtctatcaagaaggatgaagaggtgctgaagaagaactgcccgcatatcgtcgtggggactccaggccgtatcctagccctggctcgaaataagagcctcaacctcaaacacattaaacactttattttggatgaatgtgataagatgcttgaacagctcgacatgcgtcgggatgtccaggaaatttttcgcatgaccccccacgagaagcaggtcatgatgttcagtgctaccttgagcaaagagatccgtccagtctgccgcaagttcatgcaagatgtaaatacccttctaccttctctccctccactccccgcccgctgcctcctccccttcctcgccctcttcctcagactcccttgtcattcaagtgccaagaaggcggcttgtgcccaactgggagtaatgactccttgaagagacatacagaagcagagacagctagtgttagggcctgcgcgggtgccagggaaactccggaagacttggtcgggttaatgtgagagcgggtagtgttcgactttttcataaatcacaacatttttgaacctcttctccctttgggggagggcaggatttttctgccctaccacccacccatccatcgtctcttacatgcaccctacagccacgcaccctcaaggtggcatcgagcgtacagctggagccttctgctcaccaaaactcctacttcccggtggcaggagagcaagagagggacagacagatggcagggcatgtccaaaagaagagcatcagcacaaatgaatcctccccttccccacctccaggggtgggggcctttggcacctcaatccccgataccctactccttcccacccacatctccttgcacccatctggaacctcggttgatgtgagccggcaacagagaagcaccgtggcgcggcgagggaatgcagacggcacccagcggtggatggcggcagcggaggccgcggggaaacctgaccaggaagctgaggaccaaaccagcctctttttccgttcccggtttttttcctgaacccaacgcgtgccgtgccccgtttcccccaatatgtgttggggaggggtgtcctgaatggggtggtagattttttttcttaaaaaaatttttttgttttttttaatactcagaggagagggacataggaaaggtaaagtggatgtaatcgggtggttgttagggtttggggctaggtggggccaattgcataagcagtggagtgtgttcttcccctccctgcagtgttccttcccgtgggatgatcactctttagctgtatttggggctagaatgagatttgaaggaggccatggaacttctctttagaaagcctgccttggctgggcctggtggctcacctctaatcccagcactttgggaggccaaggtgggaggattgcttgagcccaggaatttgagactagctggggcagtgtagtgagactttgtctctaccagaaaaaccgggcgtggtggcgcatgcctgtagtcccagctacttgggaagctgaggcaggagggtttgcttgagcccgggacgtggaggtggcagtaagctgtaattgtgccactgtactccagcctgggtgatagagagagaccctgtatcaaaacaaaacaaaaaacaaaacctgccttctgggattgggcttctggtttttttcccatgacacacgcatcctttcctattttgtcctctgggtcttcatattaactatcttcccccaggatagtataaaaagtgttaggaaagttgggctttggagttgtggtaatttctgtctttgttactttcctccccttcagggggttttttaattttaaagatgaatgcagtgaggtataatggtgtgtgcctgtagtcccagctattcaggagactgaagcaggaggatcacttgagcccaggaatttgaggctatagtgtgctatgattgtgccagtgaatagccactgcactccagcctgggcaacatggtgagatcctgtcccttaaaagtgtatctgctgctctgaatttggtattttaacaccacttactgatacctttcctgtaaacctgtagatggtttaattcttagtcaagagaccagtctcatctaaaactatcctgttgtggtctgacggcaagtaactcatcttgagtaatttttgtttctccttaagtggcattttgactgtccattgcagcattctgatcttaaaagacatccactttgctaatgcacacgagattctcttagttgaagtaggagaatcaaatggagcagttgtcctccccccaccccatgttcttagaagcacctctgatggagttattctgaccttgagtcactgcctcccatcatttcccagatgtttggtccttgctctccctttgagaatcatctcccattttctttcctctcccacctctatttgaggtaatggcatctgtgccattgggtggtttcactgctccttgacttcatttgcagtttctttcccatgatagtttttagttgggcagtcttaaaactcatctgataggaaggaaattagatgtaatgtgagagagaccacagtaaaatgtgggtatttttgggagtggggtggggttttcaatcttctctttcctccccatccccccatggggtgtattggagatcaacttcctccacccccccaggtttaacccccccactctgccctcctcccgttccccacccccttcctcccccccagccaatggagatcttcgtggatgatgagacgaagttgacgctgcatgggttgcagcagtactacgtgaaactgaaggacaacgagaagaaccggaagctctttgaccttctggatgtccttgagttcaaccaggtcagttagacgtccagtagggggatgagcattggagcactccagctgtagcagaaacctggatattaagtacacttttattgaggaaatcacatgtgtgatgtgggagagaataatgagggtataaatatcttaggggctgagcatgagtaaggtgggagctgcttttctattctatggctggcacgggtatgtcctcaataacctcaaggaaaataaacttcaaaaattaagatccttggccaggcacggtggcttatgtgtgtaatcccagcacttggggaggctgagggaggtggatcacttgagtccaggagtttgagaccagtcggggcaacatggcgaaacttcatcactaccaaagaagaaaaaaattagccaggtgtggtggtgtatgcctgtagtcccagatactctggtggctgaggtgagaggatagcttgagcccaggaaattgaggctgcagtgaactatgattgcactactgtgctccagcttgggcaacagagtgagatcttgtctccaaaagtccttgaaggattttaggaagttgttaaaagtcttgaaacgatgtttgggggcatgttagggttcttgaatgtttaattcctctaataactgcttattcaagagaagcatttctgactgggtgcagggcagtggctcatgcccataatcccagtactttgggaggctgaggcaggagcattgcttgagcccaggacttcaagaccagcctgggtaacatagggagacgcccgtctctacaaatagtaaaaataaaaaataaaaaaagtagctgggcgtggtggtgtgcacctgtggtcccagctgcttgggatgctgaggtggaaggatctcttaaacccaggagggtggaggctgcagtgacttgcgattgcaccactgcactccagtctgggggacagagtgagaccccatctcaaaaaagtgtttaattaatatacttgtgagtggtctatttgcatttaaaactgctttctagaattaggatagctcccttaggtttaatgttttggtgagcaggaatatcagttacccctccagatcttaattctagttttttatcactttttcatgaggtgatctcatcctcatctcctagcatgtctggcaattttgatttctgaactctgtgctacctcagaggccagcttccttagggaaaaatcagtgctgaagtaaagttatatttccttttctgctctaaatatatagtgggggaataagagaaatgaagaggaattcctgagaacgtaattactagaaactcccctctcccacgtaatgtctctcacacaccatggacccctattcccccaatttgcgaccccccaccccaccccacaacaggtggtgatctttgtgaagtctgtgcagcggtgcattgccttggcccagctactagtggagcagaacttcccagccattgccatccaccgtgggatgccccaggaggagaggtgagctgaagatgggaaagatattttgtgtccttgggagaaaaagacagttgagagaagggaatctcaacatgttttaaatttcctttctcacaaaggctttctcggtatcagcagtttaaagattttcaacgacgaattcttgtggctaccaacctatttggccgaggcatggacatcgagcgggtgaacattgcttttaattatgacatgcctgaggattctgacacctacctgcatcgggtaaacctcacaggctgaaaaaatcccactctcccattcccttgttttctgtttgtacatcttcattcctgcctctgggtctctttcctcttcggtcttccagtgctaccctctgtctccctccaggtggccagagcaggccggtttggcaccaagggcttggctatcacatttgtgtccgatgagaatgatgccaagatcctcaatgatgtgcaggatcgctttgaggtcaatattagtgagctgcctgatgagatagacatctcctcctacagtgagtactgatctcatgaaaccctttaggtcctccctgttccttagtgtgtttgtccgaaatcccatcacataggtcatgggcatctgatgcataatggacacttgactggttcatgccccctggtctttgatgctgtgttgggatgtttttctgacctttatgtggggtgtcttgtcttctctcatcatattacatcccttccctcacccccacgtccgtcctctgaacccaggcagtacaccagtgtctgcatgtgtgccgtgtgttcctgcctcactttccccttttcatgccttattctgaccatgctacgttttcttctcagttgaacagacacggtagaagactcgcccattttggaatgtgaccgtctgtccttcaggagaggacaccagggtgggggtgaaggagacactactgcccccacccctgacagcccccaccccatggcttccatcttttgcatcaccaccactcctgaacccccatttctgatttgtcagaatttttttttaacaaaactaaaaatgaaacacatgtgtctgtggtatctata

SEQ ID NO: 14263 - protein, 290 aa, Homo sapiens
MAENDVDNELLDYEDDEVETAAGGDGAEAPAKKDVKGSYVSIHSSGFRDFLLKPELLRAIVDCGFEHPSEVQHECIPQAILGMDVLCQAKSGMGKTAVFVLATLQQLEPVTGQVSVLVMCHTRELAFQISKEYERFSKYMPNVKVAVFFGGLSIKKDEEVLKKNCPHIVVGTPGRILALARNKSLNLKHIKHFILDECDKMLEQLDMRRDVQEIFRMTPHEKQVMMFSATLSKEIRPVCRKFMQDVNTLLPSLPPLPARCLLPFLALFLRLPCHSSAKKAACAQLGVMTP

SEQ ID NO: 14264 - DNA, 720 bp, Homo sapiens
gtggggttttcaatcttctctttcctccccatccccccatggggtgtattggagatcaacttcctccacccccccaggtttaacccccccactctgccctcctcccgttccccacccccttcctcccccccagccaatggagatcttcgtggatgatgagacgaagttgacgctgcatgggttgcagcagtactacgtgaaactgaaggacaacgagaagaaccggaagctctttgaccttctggatgtccttgagttcaaccaggtcagttagacgtccagtagggggatgagcattggagcactccagctgtagcagaaacctggatattaagtacacttttattgaggaaatcacatgtgtgatgtgggagagaataatgagggtataaatatcttaggggctgagcatgagtaaggtgggagctgcttttctattctatggctgcagtgaactatgattgcactactgtgctccagcttgggcaacagagtgagatcttgtctccaaaagtccttgaaggattttaggaagttgttaaaagtcttgaaacgatgtttgggggcatgttagggttcttgaatgtttaattcctctaataactgcttattcaagagaagcatttctgactgggtgcagggcagtggctcatgcccataatcccagtactttgggaggctgaggcaggagcattgcttgagcccaggacttcaagacca

SEQ ID NO: 14265 - protein, 45 aa, Homo sapiens [sequence omitted]

SEQ ID NO: 14266 - DNA, 518 bp, Homo sapiens
ccttcgctacaatccgtttccatctgcgcttctccgcacccatcccgtcacatgggttcctgatacccttttcacaggcgatggtctggtcgctggggcctagttggttcgctatttccttagcttgcatccctttcgagagcaaagagctcctgggggaaggaagggaagctaaggggggacccaatccaagatggtgtcctcggcgccattgtgttcgttttgctcccttcttccaatgggttcttctcatattggaggcctcagcatcaatgagaggcggcgctcggcgtcccttggtcttgttatggcagagaacgatgtggacaatgagctcttggactatgaagatgatgaggtggagacagcagctgggggagatggggctgaggcccctgccaagaaggatgtcaagggctcctatgtctccatccacagctctggctttcgtgacttcctgctcaagccagagttgctccgggccattgtcgactgtggctttgagcatccgtcagaag

SEQ ID NO: 14267 - protein, 145 aa, Homo sapiens
MVWSLGPSWFAISLACIPFESKELLGEGREAKGGPNPRWCPRRHCVRFAPFFQWVLLILEASASMRGGARRPLVLLWQRTMWTMSSWTMKMMRWRQQLGEMGLRPLPRRMSRAPMSPSTALAFVTSCSSQSCSGPLSTVALSIRQ

SEQ ID NO: 14268 - DNA, 520 bp, Homo sapiens
ggtcttctctgtaggcacccctccatggatgcgcgaggaacgagtgtggcgaaggctgcgagttcccacggggtccttggcccggtagtgaagagtctcgccctgtcgcccaggcgggagtgcaatgtcctgatctcggctcactgcaaccgctgcttcccgggttcaagcgattctcctgcctcagcctcccgagtagctaggattacaggcgcccgccaccacgcccagcaaatttttgtttttttagtagagacggggcttcacccatgtatgacctcaggtgatccacccacttcggcctcccagagtgctgggattacaggcgtgagccaccgcgcccggcccattaatactgttaattcgagcagaatgttcttggccccgccccaacagccccattgttcaacctggatttttttcctgaatgaaacatttgctatccccgtctttgagatggggagctacaaaagtaagacctgatgtcctgctgtgtaataaaacaacaaacgtttggccc

SEQ ID NO: 14269 - protein, 152 aa, Homo sapiens
MDARGTSVAKAASSHGVLGPVVKSLALSPRRECNVLISAHCNRCFPGSSDSPASASRVARITGARHHAQQIFVFLVETGLHPCMTSGDPPTSASQSAGITGVSHRARPINTVNSSRMFLAPPQQPHCSTWIFFLNETFAIPVFEMGSYKSKT

SEQ ID NO: 14270 - DNA, 1268 bp, Homo sapiens
ggagaagtaagcggtggggggtgggagccatctggtactttgacagcattcaaaacagcatcggccataacaacagaaatggccagtcagtcccaaggtatccagcagcttctgcaagctgagaagcgggcagctgagaaggtggcagatgccagaaagaggaaggcccggcgactgaagcaggctacaaggcgccaggtgcagggcatgcagagctcccagcagagaaaccgagagcgtgtcctggcccagcttcttggcatggtctgcgacgtcaggccccaggtccaccccaactaccggatttctgcctagggccaccgtagggcctgactccttctgccagttccctccctcaaagaaatcctccaatcaaaatcacctcccaccataatccctgtcttctttccatcccctagaaatcctgggaggcaggatccaataattttcctgtgacacttataaatatcctgctcacatctgaatctccttgttgttctttaaccctcactgggactttgtaaacttccaagtcattctcacctaaaccctctgtgaaatttgtaatatggggaagtaggaatgtggaaaacatcctgacttcagtgtctggccgatgtgggtccctctcttgaccctgtcacttgctggctgtgaaaccaggacaagctacttaacttggtagcctcgatgtcctcctctgtgaaactgggatgataataatgcctaccttgtgagggttgcttcaatgattaggaatcattctgtaaagtctagcacagttccttgcatgttgtagcagtgattcagtaagtagcaaccctgtgatactattaccaccacctgctcactggtcaaaacctacacagctgtttcctcacgtccatcactggctctctaattccacttgttcattctgtgaccctagttattttctgaaaaattggttcttctcttttcccagagaccttctgatctccaaaaagaggagatgactacatttagcccctctcttataattccaggtagataactgcattttgtagcctctctttgtttttcttttgctgatctttgtctttattagattttcctcctttcctatttccccaaagacttatcagatgctcattgctttctaagatctaaaatgatactgtgttccctcatatgcatgcccttcctttctatatccttgacaccttactttcccattgtaacaataaaaaaagtatcaataaaataattattggcaaataaattggtga

SEQ ID NO: 14271 - protein, 78 aa, Homo sapiens
MASQSQGIQQLLQAEKRAAEKVADARKRKARRLKQATRRQVQGMQSSQQRNRERVLAQLLGMVCDVRPQVHPNYRISA

SEQ ID NO: 14272 - DNA, 1488 bp, Homo sapiens
tctccgcccctgcctcatccctagacctttccgactgggatggctaacctgttgtaagcccgcagctttgggcctggtctctgctgctcccaggcggcccctttgggtactgcctgagcaagaagtgctggagaggaggaccagtcatcaataggaggatgagattgggagagacactcggtgcaggaggctgagtgagcaggggagcactaagacccaggggtagtggaggactgcagcaacgagctggaggaggagaaggaaggcccggcgactgaagcaggcaaaggaggaggcacagatggaggtggagcaataccgcagagagcgagagcacgaattccagagcaagcagcaggcggccatgggctcccaggggaacctgtctgctgaggtggagcaggctacaaggcgccaggtgcagggcatgcagagctcccagcagagaaaccgagagcgtgtcctggcccagcttcttggcatggtctgcgacgtcaggccccaggtccaccccaactaccggatttctgcctagggccaccgtagggcctgactccttctgccagttccctccctcaaagaaatcctccaatcaaaatcacctcccaccataatccctgtcttctttccatcccctagaaatcctgggaggcaggatccaataattttcctgtgacacttataaatatcctgctcacatctgaatctccttgttgttctttaaccctcactgggactttgtaaacttccaagtcattctcacctaaaccctctgtgaaatttgtaatatggggaagtaggaatgtggaaaacatcctgacttcagtgtctggccgatgtgggtccctctcttgaccctgtcacttgctggctgtgaaaccaggacaagctacttaacttggtagcctcgatgtcctcctctgtgaaactgggatgataataatgcctaccttgtgagggttgcttcaatgattaggaatcattctgtaaagtctagcacagttccttgcatgttgtagcagtgattcagtaagtagcaaccctgtgatactattaccaccacctgctcactggtcaaaacctacacagctgtttcctcacgtccatcactggctctctaattccacttgttcattctgtgaccctagttattttctgaaaaattggttcttctcttttcccagagaccttctgatctccaaaaagaggagatgactacatttagcccctctcttataattccaggtagataactgcattttgtagcctctctttgtttttcttttgctgatctttgtctttattagattttcctcctttcctatttccccaaagacttatcagatgctcattgctttctaagatctaaaatgatactgtgttccctcatatgcatgcccttcctttctatatccttgacaccttactttcccattgtaacaataaaaaaagtatcaataaaataattattggcaaataaattggtga

SEQ ID NO: 14273 - protein, 77 aa, Homo sapiens; identical to SEQ ID NO: 1507

SEQ ID NO: 14274 - DNA, 1642 bp, Homo sapiens
tctccgcccctgcctcatccctagacctttccgactgggatggctaacctgttgtaagcccgcagctttgggcctggtctctgctgctcccaggcggcccctttgggtactgcctgagcaagaagtgctggagaggaggaccagtcatcaataggaggatgagattgggagagacactcggtgcaggaggctgagtgagcaggggagcactaagacccaggggtagtggaggactgcagcaacgagctggaggaggagaagtaagcggtggggggtgggagccatctggtactttgacagcattcaaaacagcatcggccataacaacagaaatggccagtcagtcccaaggtatccagcagcttctgcaagctgagaagcgggcagctgagaaggtggcagatgccagaaagaggaaggcccggcgactgaagcaggcaaaggaggaggcacagatggaggtggagcaataccgcagagagcgagagcacgaattccagagcaagcagcaggcggccatgggctcccaggggaacctgtctgctgaggtggagcaggctacaaggcgccaggtgcagggcatgcagagctcccagcagagaaaccgagagcgtgtcctggcccagcttcttggcatggtctgcgacgtcaggccccaggtccaccccaactaccggatttctgcctagggccaccgtagggcctgactccttctgccagttccctccctcaaagaaatcctccaatcaaaatcacctcccaccataatccctgtcttctttccatcccctagaaatcctgggaggcaggatccaataattttcctgtgacacttataaatatcctgctcacatctgaatctccttgttgttctttaaccctcactgggactttgtaaacttccaagtcattctcacctaaaccctctgtgaaatttgtaatatggggaagtaggaatgtggaaaacatcctgacttcagtgtctggccgatgtgggtccctctcttgaccctgtcacttgctggctgtgaaaccaggacaagctacttaacttggtagcctcgatgtcctcctctgtgaaactgggatgataataatgcctaccttgtgagggttgcttcaatgattaggaatcattctgtaaagtctagcacagttccttgcatgttgtagcagtgattcagtaagtagcaaccctgtgatactattaccaccacctgctcactggtcaaaacctacacagctgtttcctcacgtccatcactggctctctaattccacttgttcattctgtgaccctagttattttctgaaaaattggttcttctcttttcccagagaccttctgatctccaaaaagaggagatgactacatttagcccctctcttataattccaggtagataactgcattttgtagcctctctttgtttttcttttgctgatctttgtctttattagattttcctcctttcctatttccccaaagacttatcagatgctcattgctttctaagatctaaaatgatactgtgttccctcatatgcatgcccttcctttctatatccttgacaccttactttcccattgtaacaataaaaaaagtatcaataaaataattattggcaaataaattggtga

SEQ ID NO: 14275 - protein, 118 aa, Homo sapiens; identical to SEQ ID NO: 1505

SEQ ID NO: 14276 - DNA, 1530 bp, Homo sapiens
gtcctcctctccagcacttcttgctcaggcagtacccaaaggggccgcctgggagcagcagagaccaggcccaaagctgcgggcttacaacaggttagccatcccagtcggaaaggtctagggatgaggcaggggcggagacgggggagtactgaggtgagagaaggagaacttgattggtggtaacagaggaagcataaagggttgtgaatgcggtgaaaagcccaagagttccatggcctccacttcccgccgccaacgccgagaacgtcgctttcgtcgttacttgtctgcaggacggctggtccgggcccaggccctcctccagcgacacccaggcctcgatgtagatgctgggcagcccccaccactgcaccgggcctgtgcccgccacgatgcccctgccctgtgcctgctgcttcggctcggggctgaccctgcccaccaggaccgccatggggacacggcactgcatgctgctgcccgccagggcccagatgcctacaccgatttcttcctcccgctgctaagccgctgtccctccgccatgggaataaagaataaggatggggagacccctggccaaattttgggctggggacccccctgggattctgctgaagaggaggaagaagatgatgcctccaaggagcgggaatggagacagaagctccagggtgagctggaggacgagtggcaggaagtcatggggaggtttgaaggtgatgcctcccatgaaacccaggaacctgagtccttctcagcctggtcagatcgcctggcccgggaacatgcccagaagtgccagcagcagcagcgagaagcagagggatcccgtcgacccccacgtgctgagggctccagccagagctggcgacagcaggaggaggagcagcggctcttcagggagcgagcccgggccaaggaggaagagctgcgtgagagccgagccaggagggcgcaggaggctctaggggaccgagaacccaagccaaccagggccgggcccagggaagagcaccccagaggagcggggaggggcagcctctggcgatttggtgatgtgccctggccctgccctgggggaggggacccagaggccatggctgcagccctggtggccaggggcccccctttggaggaacagggggctctgaggaggtacttgagggtccagcaggtccgctggcaccctgaccgcttcctgcagcgattccgaagccagattgagacctgggagctgggccgtgtgatgggagcagtgacagccctttctcaggccctgaatcgccatgcagaggccctcaagtgaccctagggaagaagcaagaaacttcggggctgcagcctcaggatgaggcagaaggaagggtaagggaaaggatggggaccacaaggaagagccaggtgctgctcagcagaggatatgggtgggagcgaaagttgtaacaagtgggggtggggggtgcgggccgccaccactgctccttgactctgccgtttcctaataagacctggttccacatctca

SEQ ID NO: 14277 - protein, 358 aa, Homo sapiens
MASTSRRQRRERRFRRYLSAGRLVRAQALLQRHPGLDVDAGQPPPLHRACARHDAPALCLLLRLGADPAHQDRHGDTALHAAARQGPDAYTDFFLPLLSRCPSAMGIKNKDGETPGQILGWGPPWDSAEEEEEDDASKEREWRQKLQGELEDEWQEVMGRFEGDASHETQEPESFSAWSDRLAREHAQKCQQQQREAEGSRRPPRAEGSSQSWRQQEEEQRLFRERARAKEEELRESRARRAQEALGDREPKPTRAGPREEHPRGAGRGSLWRFGDVPWPCPGGGDPEAMAAALVARGPPLEEQGALRRYLRVQQVRWHPDRFLQRFRSQIETWELGRVMGAVTALSQALNRHAEALK

SEQ ID NO: 14278 - DNA, 1429 bp, Homo sapiens
cctccagcctggagtgtctccgcccttcccgcctcccgtctccgagcttcttaaacacaggccttgggcctacggctctgggggtacttgggggggcgggggcaggtctgatgagtaacccctccccccaggttccagaggaagaagcctccacatctgtctgccggcccaagagttccatggcctccacttcccgccgccaacgccgagaacgtcgctttcgtcgttacttgtctgcaggacggctggtccgggcccaggccctcctccagcgacacccaggcctcgatgtagatgctgggcagcccccaccactgcaccgggcctgtgcccgccacgatgcccctgccctgtgcctgctgcttcggctcggggctgaccctgcccaccaggaccgccatggggacacggcactgcatgctgctgcccgccagggcccagatgcctacaccgatttcttcctcccgctgctaagccgctgtccctccgccatgggaataaagaataaggatggggagacccctggccaaattttgggctggggacccccctgggattctgctgaagaggaggaagaagatgatgcctccaaggagcgggaatggagacagaagctccagggtgatgcctcccatgaaacccaggaacctgagtccttctcagcctggtcagatcgcctggcccgggaacatgcccagaagtgccagcagcagcagcgagaagcagagggatcccgtcgacccccacgtgctgagggctccagccagagctggcgacagcaggaggaggagcagcggctcttcagggagcgagcccgggccaaggaggaagagctgcgtgagagccgagccaggagggcgcaggaggctctaggggaccgagaacccaagccaaccagggccgggcccagggaagagcaccccagaggagcggggaggggcagcctctggcgatttggtgatgtgccctggccctgccctgggggaggggacccagaggccatggctgcagccctggtggccaggggcccccctttggaggaacagggggctctgaggaggtacttgagggtccagcaggtccgctggcaccctgaccgcttcctgcagcgattccgaagccagattgagacctgggagctgggccgtgtgatgggagcagtgacagccctttctcaggccctgaatcgccatgcagaggccctcaagtgaccctagggaagaagcaagaaacttcggggctgcagcctcaggatgaggcagaaggaagggtaagggaaaggatggggaccacaaggaagagccaggtgctgctcagcagaggatatgggtgggagcgaaagttgtaacaagtgggggtggggggtgcgggccgccaccactgctccttgactctgccgtttcctaataagacctggttccacatctca

SEQ ID NO: 14279 - protein, 366 aa, Homo sapiens
MSNPSPQVPEEEASTSVCRPKSSMASTSRRQRRERRFRRYLSAGRLVRAQALLQRHPGLDVDAGQPPPLHRACARHDAPALCLLLRLGADPAHQDRHGDTALHAAARQGPDAYTDFFLPLLSRCPSAMGIKNKDGETPGQILGWGPPWDSAEEEEEDDASKEREWRQKLQGDASHETQEPESFSAWSDRLAREHAQKCQQQQREAEGSRRPPRAEGSSQSWRQQEEEQRLFRERARAKEEELRESRARRAQEALGDREPKPTRAGPREEHPRGAGRGSLWRFGDVPWPCPGGGDPEAMAAALVARGPPLEEQGALRRYLRVQQVRWHPDRFLQRFRSQIETWELGRVMGAVTALSQALNRHAEALK

SEQ ID NO: 14280 - DNA, 1469 bp, Homo sapiens
agcctggagtgtctccgcccttcccgcctcccgtctccgagcttcttaaacacaggccttgggcctacggctctgggggtacttgggggggcgggggcaggtctgatgagtaacccctccccccaggttccagaggaagaagcctccacatctgtctgccggcccaagagttccatggcctccacttcccgccgccaacgccgagaacgtcgctttcgtcgttacttgtctgcaggacggctggtccgggcccaggccctcctccagcgacacccaggcctcgatgtagatgctgggcagcccccaccactgcaccgggcctgtgcccgccacgatgcccctgccctgtgcctgctgcttcggctcggggctgaccctgcccaccaggaccgccatggggacacggcactgcatgctgctgcccgccagggcccagatgcctacaccgatttcttcctcccgctgctaagccgctgtccctccgccatgggaataaagaataaggatggggagacccctggccaaattttgggctggggacccccctgggattctgctgaagaggaggaagaagatgatgcctccaaggagcgggaatggagacagaagctccagggtgagctggaggacgagtggcaggaagtcatggggaggtttgaaggtgatgcctcccatgaaacccaggaacctgagtccttctcagcctggtcagatcgcctggcccgggaacatgcccagaagtgccagcagcagcagcgagaagcagagggatcccgtcgacccccacgtgctgagggctccagccagagctggcgacagcaggaggaggagcagcggctcttcagggagcgagcccgggccaaggaggaagagctgcgtgagagccgagccaggagggcgcaggaggctctaggggaccgagaacccaagccaaccagggccgggcccagggaagagcaccccagaggagcggggaggggcagcctctggcgatttggtgatgtgccctggccctgccctgggggaggggacccagaggccatggctgcagccctggtggccaggggcccccctttggaggaacagggggctctgaggaggtacttgagggtccagcaggtccgctggcaccctgaccgcttcctgcagcgattccgaagccagattgagacctgggagctgggccgtgtgatgggagcagtgacagccctttctcaggccctgaatcgccatgcagaggccctcaagtgaccctagggaagaagcaagaaacttcggggctgcagcctcaggatgaggcagaaggaagggtaagggaaaggatggggaccacaaggaagagccaggtgctgctcagcagaggatatgggtgggagcgaaagttgtaacaagtgggggtggggggtgcgggccgccaccactgctccttgactctgccgtttcctaataagacctggttccacatctca

SEQ ID NO: 14281 - protein, 381 aa, Homo sapiens
MSNPSPQVPEEEASTSVCRPKSSMASTSRRQRRERRFRRYLSAGRLVRAQALLQRHPGLDVDAGQPPPLHRACARHDAPALCLLLRLGADPAHQDRHGDTALHAAARQGPDAYTDFFLPLLSRCPSAMGIKNKDGETPGQILGWGPPWDSAEEEEEDDASKEREWRQKLQGELEDEWQEVMGRFEGDASHETQEPESFSAWSDRLAREHAQKCQQQQREAEGSRRPPRAEGSSQSWRQQEEEQRLFRERARAKEEELRESRARRAQEALGDREPKPTRAGPREEHPRGAGRGSLWRFGDVPWPCPGGGDPEAMAAALVARGPPLEEQGALRRYLRVQQVRWHPDRFLQRFRSQIETWELGRVMGAVTALSQALNRHAEALK

SEQ ID NO: 14282 - DNA, 1506 bp, Homo sapiens
tcccagcccacgattcccctgacccgactccctttcccagaactcagtcgcctgaacccccagcctgtggttctctcctaggcctcagcctttcctgcctttgactgaaacagcagtatcttctaagccctgggggcttccccgggccccagccccgacctagaacccgcccgctgcctgccacgctgccactgccgcttcctctataaagggacctgagcgtccgggcccaggggctccgcacagcaggttctccccatgacaccacctgaacgtctcttcctcccaagggtgtgtggcaccaccctacacctcctccttctggggctgctgctggttctgctgcctggggcccaggggctccctggtgttggcctcacaccttcagctgcccagactgcccgtcagcaccccaagatgcatcttgcccacagcaccctcaaacctgctgctcacctcattggagaccccagcaagcagaactcactgctctggagagcaaacacggaccgtgccttcctccaggatggtttctccttgagcaacaattctctcctggtccccaccagtggcatctacttcgtctactcccaggtggtcttctctgggaaagcctactctcccaaggccacctcctccccactctacctggcccatgaggtccagctcttctcctcccagtaccccttccatgtgcctctcctcagctcccagaagatggtgtatccagggctgcaggaaccctggctgcactcgatgtaccacggggctgcgttccagctcacccagggagaccagctatccacccacacagatggcatcccccacctagtcctcagccctagtactgtcttctttggagccttcgctctgtagaacttggaaaaatccagaaagaaaaaataattgatttcaagaccttctccccattctgcctccattctgaccatttcaggggtcgtcaccacctctcctttggccattccaacagctcaagtcttccctgatcaagtcaccggagctttcaaagaaggaattctaggcatcccaggggaccacacctccctgaaccatccctgatgtctgtctggctgaggatttcaagcctgcctaggaattcccagcccaaagctgttggtctgtcccaccagctaggtggggcctagatccacacacagaggaagagcaggcacatggaggagcttgggggatgactagaggcagggaggggactatttatgaaggcaaaaaaattaaattatttatttatggaggatggagagaggggaataatagaagaacatccaaggagaaacagagacaggcccaagagatgaagagtgagagggcatgcgcacaaggctgaccaagagagaaagaagtaggcatgagggatcacagggccccagaaggcagggaaaggctctgaaagccagctgccgaccagagccccacacggaggcatctgcaccctcgatgaagcccaataaacctcttttctctgaa

SEQ ID NO: 14283 - protein, 205 aa, Homo sapiens; identical to SEQ ID NO: 1511

SEQ ID NO: 14284 - DNA, 1376 bp, Homo sapiens
tgagcgtccgggcccaggggctccgcacagcaggttctccccatgacaccacctgaacgtctcttcctcccaagggtgtgtggcaccaccctacacctcctccttctggggctgctgctggttctgctgcctggggcccaggtgaggcagcaggagaatgggggctgctggggtggctcagccaaaccttgagccctagagcccccctcaactctgttctcccctaggggctccctggtgttggcctcacaccttcagctgcccagactgcccgtcagcaccccaagatgcatcttgcccacagcaccctcaaacctgctgctcacctcattggagaccccagcaagcagaactcactgctctggagagcaaacacggaccgtgccttcctccaggatggtttctccttgagcaacaattctctcctggtccccaccagtggcatctacttcgtctactcccaggtggtcttctctgggaaagcctactctcccaaggccacctcctccccactctacctggcccatgaggtccagctcttctcctcccagtaccccttccatgtgcctctcctcagctcccagaagatggtgtatccagggctgcaggaaccctggctgcactcgatgtaccacggggctgcgttccagctcacccagggagaccagctatccacccacacagatggcatcccccacctagtcctcagccctagtactgtcttctttggagccttcgctctgtagaacttggaaaaatccagaaagaaaaaataattgatttcaagaccttctccccattctgcctccattctgaccatttcaggggtcgtcaccacctctcctttggccattccaacagctcaagtcttccctgatcaagtcaccggagctttcaaagaaggaattctaggcatcccaggggaccacacctccctgaaccatccctgatgtctgtctggctgaggatttcaagcctgcctaggaattcccagcccaaagctgttggtctgtcccaccagctaggtggggcctagatccacacacagaggaagagcaggcacatggaggagcttgggggatgactagaggcagggaggggactatttatgaaggcaaaaaaattaaattatttatttatggaggatggagagaggggaataatagaagaacatccaaggagaaacagagacaggcccaagagatgaagagtgagagggcatgcgcacaaggctgaccaagagagaaagaagtaggcatgagggatcacagggccccagaaggcagggaaaggctctgaaagccagctgccgaccagagccccacacggaggcatctgcaccctcgatgaagcccaataaacctcttttctctgaa

SEQ ID NO: 14285 - protein, 152 aa, Homo sapiens
MHLAHSTLKPAAHLIGDPSKQNSLLWRANTDRAFLQDGFSLSNNSLLVPTSGIYFVYSQVVFSGKAYSPKATSSPLYLAHEVQLFSSQYPFHVPLLSSQKMVYPGLQEPWLHSMYHGAAFQLTQGDQLSTHTDGIPHLVLSPSTVFFGAFAL

SEQ ID NO: 14286 - DNA, 1418 bp, Homo sapiens
ggggctccgcacagcaggtgaggctctcctgccccatctccttgggctgcccgtgcttcgtgctttggactaccgcccagcagtgtcctgccctctgcctgggcctcggtccctcctgcacctgctgcctggatccccggcctgcctgggcctgggccttggttctccccatgacaccacctgaacgtctcttcctcccaagggtgtgtggcaccaccctacacctcctccttctggggctgctgctggttctgctgcctggggcccaggggctccctggtgttggcctcacaccttcagctgcccagactgcccgtcagcaccccaagatgcatcttgcccacagcaccctcaaacctgctgctcacctcattggagaccccagcaagcagaactcactgctctggagagcaaacacggaccgtgccttcctccaggatggtttctccttgagcaacaattctctcctggtccccaccagtggcatctacttcgtctactcccaggtggtcttctctgggaaagcctactctcccaaggccacctcctccccactctacctggcccatgaggtccagctcttctcctcccagtaccccttccatgtgcctctcctcagctcccagaagatggtgtatccagggctgcaggaaccctggctgcactcgatgtaccacggggctgcgttccagctcacccagggagaccagctatccacccacacagatggcatcccccacctagtcctcagccctagtactgtcttctttggagccttcgctctgtagaacttggaaaaatccagaaagaaaaaataattgatttcaagaccttctccccattctgcctccattctgaccatttcaggggtcgtcaccacctctcctttggccattccaacagctcaagtcttccctgatcaagtcaccggagctttcaaagaaggaattctaggcatcccaggggaccacacctccctgaaccatccctgatgtctgtctggctgaggatttcaagcctgcctaggaattcccagcccaaagctgttggtctgtcccaccagctaggtggggcctagatccacacacagaggaagagcaggcacatggaggagcttgggggatgactagaggcagggaggggactatttatgaaggcaaaaaaattaaattatttatttatggaggatggagagaggggaataatagaagaacatccaaggagaaacagagacaggcccaagagatgaagagtgagagggcatgcgcacaaggctgaccaagagagaaagaagtaggcatgagggatcacagggccccagaaggcagggaaaggctctgaaagccagctgccgaccagagccccacacggaggcatctgcaccctcgatgaagcccaataaacctcttttctctgaa

SEQ ID NO: 14287 - protein, 205 aa, Homo sapiens; identical to SEQ ID NO: 1511

SEQ ID NO: 14288 - DNA, 1496 bp, Homo sapiens
gcacagcaggtgaggctctcctgccccatctccttgggctgcccgtgcttcgtgctttggactaccgcccagcagtgtcctgccctctgcctgggcctcggtccctcctgcacctgctgcctggatccccggcctgcctgggcctgggccttggttctccccatgacaccacctgaacgtctcttcctcccaagggtgtgtggcaccaccctacacctcctccttctggggctgctgctggttctgctgcctggggcccaggtgaggcagcaggagaatgggggctgctggggtggctcagccaaaccttgagccctagagcccccctcaactctgttctcccctaggggctccctggtgttggcctcacaccttcagctgcccagactgcccgtcagcaccccaagatgcatcttgcccacagcaccctcaaacctgctgctcacctcattggagaccccagcaagcagaactcactgctctggagagcaaacacggaccgtgccttcctccaggatggtttctccttgagcaacaattctctcctggtccccaccagtggcatctacttcgtctactcccaggtggtcttctctgggaaagcctactctcccaaggccacctcctccccactctacctggcccatgaggtccagctcttctcctcccagtaccccttccatgtgcctctcctcagctcccagaagatggtgtatccagggctgcaggaaccctggctgcactcgatgtaccacggggctgcgttccagctcacccagggagaccagctatccacccacacagatggcatcccccacctagtcctcagccctagtactgtcttctttggagccttcgctctgtagaacttggaaaaatccagaaagaaaaaataattgatttcaagaccttctccccattctgcctccattctgaccatttcaggggtcgtcaccacctctcctttggccattccaacagctcaagtcttccctgatcaagtcaccggagctttcaaagaaggaattctaggcatcccaggggaccacacctccctgaaccatccctgatgtctgtctggctgaggatttcaagcctgcctaggaattcccagcccaaagctgttggtctgtcccaccagctaggtggggcctagatccacacacagaggaagagcaggcacatggaggagcttgggggatgactagaggcagggaggggactatttatgaaggcaaaaaaattaaattatttatttatggaggatggagagaggggaataatagaagaacatccaaggagaaacagagacaggcccaagagatgaagagtgagagggcatgcgcacaaggctgaccaagagagaaagaagtaggcatgagggatcacagggccccagaaggcagggaaaggctctgaaagccagctgccgaccagagccccacacggaggcatctgcaccctcgatgaagcccaataaacctcttttctctgaa

SEQ ID NO: 14289 - protein, 152 aa, Homo sapiens; identical to SEQ ID NO: 14285

SEQ ID NO: 14290 - DNA, 669 bp, Homo sapiens
taccacggggctgcgttccagctcacccagggagaccagctatccacccacacagatggcatcccccacctagtcctcagccctagtactgtcttctttggagccttcgctctgtagaacttggaaaaatccagaaagaaaaaataattgattacagctcaagtcttccctgatcaagtcaccggagctttcaaagaaggaattctaggcatcccaggggaccacacctccctgaaccatccctgatgtctgtctggctgaggatttcaagcctgcctaggaattcccagcccaaagctgttggtctgtcccaccagctaggtggggcctagatccacacacagaggaagagcaggcacatggaggagcttgggggatgactagaggcagggaggggactatttatgaaggcaaaaaaattaaattatttatttatggaggatggagagaggggaataatagaagaacatccaaggagaaacagagacaggcccaagagatgaagagtgagagggcatgcgcacaaggctgaccaagagagaaagaagtaggcatgagggatcacagggccccagaaggcagggaaaggctctgaaagccagctgccgaccagagccccacacggaggcatctgcaccctcgatgaagcccaataaacctcttttctct

SEQ ID NO: 14291 - protein, 51 aa, Homo sapiens [sequence omitted]

SEQ ID NO: 14292 - DNA, 1675 bp, Homo sapiens
agacgctccctcagcaaggacagcagaggaccagctaagagggagagaagcaactacagaccccccctgaaaacaaccctcagacgccacatcccctgacaagctgccaggcaggttctcttcctctcacatactgacccacggctccaccctctctcccctggaaaggacaccatgagcactgaaagcatgatccgggacgtggagctggccgaggaggcgctccccaagaagacaggggggccccagggctccaggcggtgcttgttcctcagcctcttctccttcctgatcgtggcaggcgccaccacgctcttctgcctgctgcactttggagtgatcggcccccagagggaagagttccccagggacctctctctaatcagccctctggcccaggcagtcagatcatcttctcgaaccccgagtgacaagcctgtagcccatgttgtagcaaaccctcaagctgaggggcagctccagtggctgaaccgccgggccaatgccctcctggccaatggcgtggagctgagagataaccagctggtggtgccatcagagggcctgtacctcatctactcccaggtcctcttcaagggccaaggctgcccctccacccatgtgctcctcacccacaccatcagccgcatcgccgtctcctaccagaccaaggtcaacctcctctctgccatcaagagcccctgccagagggagaccccagagggggctgaggccaagccctggtatgagcccatctatctgggaggggtcttccagctggagaagggtgaccgactcagcgctgagatcaatcggcccgactatctcgactttgccgagtctgggcaggtctactttgggatcattgccctgtgaggaggacgaacatccaaccttcccaaacgcctcccctgccccaatccctttattaccccctccttcagacaccctcaacctcttctggctcaaaaagagaattgggggcttagggtcggaacccaagcttagaactttaagcaacaagaccaccacttcgaaacctgggattcaggaatgtgtggcctgcacagtgaagtgctggcaaccactaagaattcaaactggggcctccagaactcactggggcctacagctttgatccctgacatctggaatctggagaccagggagcctttggttctggccagaatgctgcaggacttgagaagacctcacctagaaattgacacaagtggaccttaggccttcctctctccagatgtttccagacttccttgagacacggagcccagccctccccatggagccagctccctctatttatgtttgcacttgtgattatttattatttatttattatttatttatttacagatgaatgtatttatttgggagaccggggtatcctgggggacccaatgtaggagctgccttggctcagacatgttttccgtgaaaacggagctgaacaataggctgttcccatgtagccccctggcctctgtgccttcttttgattatgttttttaaaatatttatctgattaagttgtctaaacaatgctgatttggtgaccaactgtcactcattgctgagcctctgctccccaggggagttgtgtctgtaatcgccctactattcagtggcgagaaataaagtttgcttagaaaagaaa

SEQ ID NO: 14293 - protein, 233 aa, Homo sapiens; identical to SEQ ID NO: 1513

SEQ ID NO: 14294 - DNA, 951 bp, Homo sapiens
ggacagcagaggaccagctaagagggagagaagcaactacagaccccccctgaaaacaaccctcagacgccacatcccctgacaagctgccaggcaggttctcttcctctcacatactgacccacggctccaccctctctcccctggaaaggacaccatgagcactgaaagcatgatccgggacgtggagctggccgaggaggcgctccccctccttcagacaccctcaacctcttctggctcaaaaagagaattgggggcttagggtcggaacccaagcttagaactttaagcaacaagaccaccacttcgaaacctgggattcaggaatgtgtggcctgcacagtgaagtgctggcaaccactaagaattcaaactggggcctccagaactcactggggcctacagctttgatccctgacatctggaatctggagaccagggagcctttggttctggccagaatgctgcaggacttgagaagacctcacctagaaattgacacaagtggaccttaggccttcctctctccagatgtttccagacttccttgagacacggagcccagccctccccatggagccagctccctctatttatgtttgcacttgtgattatttattatttatttattatttatttatttacagatgaatgtatttatttgggagaccggggtatcctgggggacccaatgtaggagctgccttggctcagacatgttttccgtgaaaacggagctgaacaataggctgttcccatgtagccccctggcctctgtgccttcttttgattatgttttttaaaatatttatctgattaagttgtctaaacaatgctgatttggtgaccaactgtcactcattgctgagcctctgctccccaggggagttgtgtctgtaatcgccctactattcagtggcgagaaataaagtttgcttagaaaagaaa

SEQ ID NO: 14295 - protein, 35 aa, Homo sapiens
MSTESMIRDVELAEEALPLLQTPSTSSGSKRELGA

SEQ ID NO: 14296 - DNA, 852 bp, Homo sapiens
cagtctcaatgggggcactggggctggagggcaggggtgggaggctccaggggaggggttccctcctgctagctgtggcaggagccacttctctggtgaccttgttgctggcggtgcctatcactgtcctggctgtgctggccttagtgccccaggatcagggaggactgggtttcagaagctgccagaggaggagccagaaacagatctcagccccgggctcccagctgcccacctcataggcgctccgctgaaggggcaggggctaggctgggagacgacgaaggaacaggcgtttctgacgagcgggacgcagttctcggacgccgaggggctggcgctcccgcaggacggcctctattacctctactgtctcgtcggctaccggggccgggcgccccctggcggcggggacccccagggccgctcggtcacgctgcgcagctctctgtaccgggcggggggcgcctacgggccgggcactcccgagctgctgctcgagggcgccgagacggtgactccagtgctggacccggccaggagacaagggtacgggcctctctggtacacgagcgtggggttcggcggcctggtgcagctccggaggggcgagagggtgtacgtcaacatcagtcaccccgatatggtggacttcgcgagagggaagaccttctttggggccgtgatggtggggtgagggaatatgagtgcgtggtgcgagtgcgtgaatattgggggcccggacgcccaggaccccatggcagtgggaaaaatgtaggagactgtttggaaattgattttgaacctgatgaaaataaagaatggaaagcttcagtgctgccgataaagatg

SEQ ID NO: 14297 - protein, 77 aa, Homo sapiens; identical to SEQ ID NO: 1517

SEQ ID NO: 14298 - DNA, 1475 bp, Homo sapiens
agtctcaatgggggcactggggctggagggcaggggtgggaggctccaggggaggggttccctcctgctagctgtggcaggagccacttctctggtgaccttgttgctggcggtgcctatcactgtcctggctgtgctggccttagtgccccaggatcagggaggactggtgagtggctgcaacaggccctggtggagagttgtatcttgcggatgcttggctccctctggttgtgcctgtggtcttttgccccctctggctcagctggctcggctgtccctggtggggatgtcttgtctctttgctgactctctttccatgttcctgtgatgttgtgcttgtgtcccgacataagccccttgtgtctcctctcctcttcccgaggtacatctgtttctccgcccaagtacctatgccttgcttgttctcccttctaaggaggtgtgtgttggggatggtgctggtaggagaaaccccaggcctgcagcttgggtccactttcagaggggtaggggtgacatgagctgaatctgaactctgggcactgtgaccccacccaaccaggtaacggagacggccgaccccggggcacaggcccagcaaggactgggtaagagcagactgtctctccttccccgcttcagaccctcaggggctcccagctccctgctgcgtccccagatacctcttcctctaggaatccaggctccccatccctgcgccctgttctctcaagggtagcctgcatgggtggctgccctgcccccaatcgtggactctttgccccttccagggtttcagaagctgccagaggaggagccagaaacagatctcagccccgggctcccagctgcccacctcataggcgctccgctgaaggggcaggggctaggctgggagacgacgaaggaacaggcgtttctgacgagcgggacgcagttctcggacgccgaggggctggcgctcccgcaggacggcctctattacctctactgtctcgtcggctaccggggccgggcgccccctggcggcggggacccccagggccgctcggtcacgctgcgcagctctctgtaccgggcggggggcgcctacgggccgggcactcccgagctgctgctcgagggcgccgagacggtgactccagtgctggacccggccaggagacaagggtacgggcctctctggtacacgagcgtggggttcggcggcctggtgcagctccggaggggcgagagggtgtacgtcaacatcagtcaccccgatatggtggacttcgcgagagggaagaccttctttggggccgtgatggtggggtgagggaatatgagtgcgtggtgcgagtgcgtgaatattgggggcccggacgcccaggaccccatggcagtgggaaaaatgtaggagactgtttggaaattgattttgaacctgatgaaaataaagaatggaaagcttcagtgctgccgataaagat

SEQ ID NO: 14299 - protein, 241 aa, Homo sapiens
MGGCPAPNRGLFAPSRVSEAARGGARNRSQPRAPSCPPHRRSAEGAGARLGDDEGTGVSDERDAVLGRRGAGAPAGRPLLPLLSRRLPGPGAPWRRGPPGPLGHAAQLSVPGGGRLRAGHSRAAARGRRDGDSSAGPGQETRVRASLVHERGVRRPGAAPEGREGVRQHQSPRYGGLREREDLLWGRDGGVREYECVVRVREYWGPGRPGPHGSGKNVGDCLEIDFEPDENKEWKASVLPI

SEQ ID NO: 14300 - DNA, 897 bp, Homo sapiens
cagtctcaatgggggcactggggctggagggcaggggtgggaggctccaggggaggggttccctcctgctagctgtggcaggagccacttctctggtgaccttgttgctggcggtgcctatcactgtcctggctgtgctggccttagtgccccaggatcagggaggactggtaacggagacggccgaccccggggcacaggcccagcaaggactggggtttcagaagctgccagaggaggagccagaaacagatctcagccccgggctcccagctgcccacctcataggcgctccgctgaaggggcaggggctaggctgggagacgacgaaggaacaggcgtttctgacgagcgggacgcagttctcggacgccgaggggctggcgctcccgcaggacggcctctattacctctactgtctcgtcggctaccggggccgggcgccccctggcggcggggacccccagggccgctcggtcacgctgcgcagctctctgtaccgggcggggggcgcctacgggccgggcactcccgagctgctgctcgagggcgccgagacggtgactccagtgctggacccggccaggagacaagggtacgggcctctctggtacacgagcgtggggttcggcggcctggtgcagctccggaggggcgagagggtgtacgtcaacatcagtcaccccgatatggtggacttcgcgagagggaagaccttctttggggccgtgatggtggggtgagggaatatgagtgcgtggtgcgagtgcgtgaatattgggggcccggacgcccaggaccccatggcagtgggaaaaatgtaggagactgtttggaaattgattttgaacctgatgaaaataaagaatggaaagcttcagtgctgccgataaagat

SEQ ID NO: 14301 - protein, 244 aa, Homo sapiens; identical to SEQ ID NO: 1515

SEQ ID NO: 14302 - DNA, 708 bp, Homo sapiens
caggggtgtgcggaaagtcccagccagggtttcagaagctgccagaggaggagccagaaacagatctcagccccgggctcccagctgcccacctcataggcgctccgctgaaggggcaggggctaggctgggagacgacgaaggaacaggcgtttctgacgagcgggacgcagttctcggacgccgaggggctggcgctcccgcaggacggcctctattacctctactgtctcgtcggctaccggggccgggcgccccctggcggcggggacccccagggccgctcggtcacgctgcgcagctctctgtaccgggcggggggcgcctacgggccgggcactcccgagctgctgctcgagggcgccgagacggtgactccagtgctggacccggccaggagacaagggtacgggcctctctggtacacgagcgtggggttcggcggcctggtgcagctccggaggggcgagagggtgtacgtcaacatcagtcaccccgatatggtggacttcgcgagagggaagaccttctttggggccgtgatggtggggtgagggaatatgagtgcgtggtgcgagtgcgtgaatattgggggcccggacgcccaggaccccatggcagtgggaaaaatgtaggagactgtttggaaattgattttgaacctgatgaaaataaagaatggaaagcttcagtgctgccgataaagat

SEQ ID NO: 14303 - protein, 234 aa, Homo sapiens
RGVRKVPARVSEAARGGARNRSQPRAPSCPPHRRSAEGAGARLGDDEGTGVSDERDAVLGRRGAGAPAGRPLLPLLSRRLPGPGAPWRRGPPGPLGHAAQLSVPGGGRLRAGHSRAAARGRRDGDSSAGPGQETRVRASLVHERGVRRPGAAPEGREGVRQHQSPRYGGLREREDLLWGRDGGVREYECVVRVREYWGPGRPGPHGSGKNVGDCLEIDFEPDENKEWKASVLPI

SEQ ID NO: 14304 - DNA, 727 bp, Homo sapiens
gaaaagaaagatgttgtaaccctaaccctggagccgaacttcctctcctaacaatgctggggaggaacccaggctgggggagaagttaaagccagaggaggggcaggaatgtctgaggtggcaacacttctcttcagccagacagcactggccagtttggagtctgtccatcctgcaggccacaagctctggatgaggaacttgaggcaagtcaccagcccctgatcatttcgcctaaaagagcaaggactagagttcctgacctccaggccagtccctgatccctgacctaatgttatcgcggaatgatgtaaagaggctggagaggagctgggcccagggctcctcagagcaggaactccactatgcatctctgcagaggctgccagtgcccagcagtgagggacctgacctcaggggcagagacaagagaggcaccaaggaggatccaagagctgactatgcctgcattgctgagaacaaacccacctgagcaccccagacaccttcctcaacccaggcgggtggacagggtccccctgtggtccagccagtaaaaaccatggtccccccacttctgtgtctcagtcctctcagtccatctcgagcctccgttcaaattgatcatcatcaaaacttatgtggctttttgacctttgaatagggaattttttaaattttttaaaaattaaaataaaaaaaacacatggctcacccttccacccac

SEQ ID NO: 14305 - protein, 66 aa, Homo sapiens
MLSRNDVKRLERSWAQGSSEQELHYASLQRLPVPSSEGPDLRGRDKRGTKEDPRADYACIAENKPT

SEQ ID NO: 14306 - DNA, 495 bp, Homo sapiens
gctggggaggaacccaggctgggggagaagttaaagccagaggaggggcaggaatgtctgaggtggcaacacttctcttcagccagacagcactggccagtttggagtctgtccatcctgcaggccacaagctctggatgaggaacttgaggcaagtcaccagcccctgatcatttcgcctaaaagagcaaggactagagttcctgacctccaggccagtccctgatccctgacctaatgttatcgcggaatgatggcccagggctcctcagagcaggaactccactatgcatctctgcagaggctgccagtgcccagcagtgagggacctgacctcaggggcagagacaagagaggcaccaaggaggatccaagagctgactatgcctgcattgctgagaacaaacccacctgagcaccccagacaccttcctcaacccaggcgggtggacagggtccccctgtggtccagccagtaaaaaccatggtcccccc

SEQ ID NO: 14307 - protein, 54 aa, Homo sapiens
MMAQGSSEQELHYASLQRLPVPSSEGPDLRGRDKRGTKEDPRADYACIAENKPT

SEQ ID NO: 14308 - DNA, 627 bp, Homo sapiens
gctggggaggaacccaggctgggggagaagttaaagccagaggaggggcaggaatgtctgaggtggcaacacttctcttcagccagacagcactggccagtttggagtctgtccatcctgcaggccacaagctctggatgaggaacttgaggcaagtcaccagcccctgatcatttcgcctaaaagagcaaggactagagttcctgacctccaggccagtccctgatccctgacctaatgttatcgcggaatgatgtaaagaggctggagaggagctggaggctgccagtgcccagcagtgagggacctgacctcaggggcagagacaagagaggcaccaaggaggatccaagagctgactatgcctgcattgctgagaacaaacccacctgagcaccccagacaccttcctcaacccaggcgggtggacagggtccccctgtggtccagccagtaaaaaccatggtccccccacttctgtgtctcagtcctctcagtccatctcgagcctccgttcaaattgatcatcatcaaaacttatgtggctttttgacctttgaatagggaattttttaaattttttaaaaattaaaataaaaaaaacacatggctcacccttccacccac

SEQ ID NO: 14309 - protein, 51 aa, Homo sapiens; identical to SEQ ID NO: 1523

SEQ ID NO: 14310 - DNA, 649 bp, Homo sapiens
gctggggaggaacccaggctgggggagaagttaaagccagaggaggggcaggaatgtctgaggtggcaacacttctcttcagccagacagcactggccagtttggagtctgtccatcctgcaggccacaagctctggatgaggaacttgaggcaagtcaccagcccctgatcatttcgcctaaaagagcaaggactagagttcctgacctccaggccagtccctgatccctgacctaatgttatcgcggaatgatggcccagggctcctcagagcaggaactccactatgcatctctgcagaggctgccagtgcccagcagtgagggacctgacctcaggggcagagacaagagaggcaccaaggaggatccaagagctgactatgcctgcattgctgagaacaaacccacctgagcaccccagacaccttcctcaacccaggcgggtggacagggtccccctgtggtccagccagtaaaaaccatggtccccccacttctgtgtctcagtcctctcagtccatctcgagcctccgttcaaattgatcatcatcaaaacttatgtggctttttgacctttgaatagggaattttttaaattttttaaaaattaaaataaaaaaaacacatggctcacccttccacccac

SEQ ID NO: 14311 - protein, 54 aa, Homo sapiens; identical to SEQ ID NO: 14307

SEQ ID NO: 14312 - DNA, 765 bp, Homo sapiens
gctggggaggaacccaggctgggggagaagttaaagccagaggaggggcaggaatgtctgaggtggcaacacttctcttcagccagacagcactggccagtttggagtctgtccatcctgcaggccacaagctctggatgaggaacttgaggcaagtcaccagcccctgatcatttcgcctaaaagagcaaggactagagttcctgacctccaggccagtccctgatccctgacctaatgttatcgcggaatgatgatatatgtatctacgggggcctggggctgggcgggctcctgcttctggcagtggtccttctgtccgcctgcctgtgttggctgcatcgaagagtaaagaggctggagaggagctgggcccagggctcctcagagcaggaactccactatgcatctctgcagaggctgccagtgcccagcagtgagggacctgacctcaggggcagagacaagagaggcaccaaggaggatccaagagctgactatgcctgcattgctgagaacaaacccacctgagcaccccagacaccttcctcaacccaggcgggtggacagggtccccctgtggtccagccagtaaaaaccatggtccccccacttctgtgtctcagtcctctcagtccatctcgagcctccgttcaaattgatcatcatcaaaacttatgtggctttttgacctttgaatagggaattttttaaattttttaaaaattaaaataaaaaaaacacatggctcacccttccacccac

SEQ ID NO: 14313 - protein, 97 aa, Homo sapiens
MLSRNDDICIYGGLGLGGLLLLAVVLLSACLCWLHRRVKRLERSWAQGSSEQELHYASLQRLPVPSSEGPDLRGRDKRGTKEDPRADYACIAENKPT

SEQ ID NO: 14314 - DNA, 604 bp, Homo sapiens
gctggggaggaacccaggctgggggagaagttaaagccagaggaggggcaggaatgtctgaggtggcaacacttctcttcagccagacagcactggccagtttggagtctgtccatcctgcaggccacaagctctggatgaggaacttgaggcaagtcaccagcccctgatcatttcgcctaaaagagcaaggactagagttcctgacctccaggccagtccctgatccctgacctaatgttatcgcggaatgatgaggctgccagtgcccagcagtgagggacctgacctcaggggcagagacaagagaggcaccaaggaggatccaagagctgactatgcctgcattgctgagaacaaacccacctgagcaccccagacaccttcctcaacccaggcgggtggacagggtccccctgtggtccagccagtaaaaaccatggtccccccacttctgtgtctcagtcctctcagtccatctcgagcctccgttcaaattgatcatcatcaaaacttatgtggctttttgacctttgaatagggaattttttaaattttttaaaaattaaaataaaaaaaacacatggctcacccttccacccac

SEQ ID NO: 14315 - protein, 39 aa, Homo sapiens; identical to SEQ ID NO: 1527

SEQ ID NO: 14316 - DNA, 1833 bp, Homo sapiens
aggctgggggagaagttaaagccagaggaggggcaggaatgtctgaggtggcaacacttctcttcagccagacagcactggccagtttggagtctgtccatcctgcaggccacaagctctggatgaggaacttgaggcaagtcaccagcccctgatcatttcgcctaaaagagcaaggactagagttcctgacctccaggccagtccctgatccctgacctaatgttatcgcggaatgatggtaagtaaagtgtctcttgcatctgcatagagagagtcctgggagcttaggaagtgatggggaacagtgatgtatgcagctcatgactaggtggacaggcctctggggacagctggtacaggagggaaagggacctcacgggaggcccagaaacctggtaagaggtgaggtattaaggtctgggatggagaagctctgagggtatatttttctgcctctaaaactgttggagagggaatctgagaaagctgcaaccaaccaggaggctggggtacgctggagaaggaatgggcttcctaaccttgagccctcttccctgaagatatatgtatctacgggggcctggggctgggcgggctcctgcttctggcagtggtccttctgtccgcctgcctgtgttggctgcatcgaagaggtgagcgctgcactccctccctccccctgcagcagtgccccctgtgcccccacccccacacgctttcccactgctttcccagaacactgcctggccctggagccactgggaagccaacaggggagtccacgcctgctggtggggggagcccgggagggcccgggagaagcacaaagggtgggctgtgttgagcttcttcttttcttccagtaaagaggctggagaggagctgggtgagtctggggacagggaagggggagggcaagagagatcctgagtgggtgagtggggagaagcatggctgagcgctgagaggagggttggggacgggagacaaggagagagaaagtaggagcatgagagaggcagagaaaatcgaggcaaaagagaaagagaaaatgagacagaaaccaagagaaaaagtgagacagaggataggagagacagggagaaaatgagagtgagagagacacaaagagaagagcaatgaaagagagagagagagagaggctccagaaccaggcacagtggctcacgtctgtcattccagctatcgcaaggctgaggcaggaagatagcttgagctcaggggttgaagacaatcctggacaacatagtgggactctgtctccaaagaaaaaagagagagagagagagagagagagagagggagagagagagagagagagggagagaagtaagaaaggctggaggtgggagcagaactcacagggaaggatctgacggcatcgcctcccatcagcaccttctgtcctggtcccaggcccagggctcctcagagcaggaactccactatgcatctctgcagaggctgccagtgcccagcagtgagggacctgacctcaggggcagagacaagagaggcaccaaggaggatccaagagctgactatgcctgcattgctgagaacaaacccacctgagcaccccagacaccttcctcaacccaggcgggtggacagggtccccctgtggtccagccagtaaaaaccatggtccccccacttctgtgtctcagtcctctcagtccatctcgagcctccgttcaaattgatcatcatcaaaacttatgtggctttttgacctttgaatagggaattttttaaattttttaaaaattaaaataaaaaaaacacatggctcacccttccacccac

SEQ ID NO: 14317 - protein, 38 aa, Homo sapiens
MSEVATLLFSQTALASLESVHPAGHKLWMRNLRQVTSP

SEQ ID NO: 14318 - DNA, 714 bp, Homo sapiens
acttcagccctagcagcatctgcctgtgggaagcagctctccacaccagccaagggggcccccacactcccgcgctgctctgcggctcagggagcagcccacctgctggatgaggaacttgaggcaagtcaccagcccctgatcatttcgcctaaaagagcaaggactagagttcctgacctccaggccagtccctgatccctgacctaatgttatcgcggaatgatgatatatgtatctacgggggcctggggctgggcgggctcctgcttctggcagtggtccttctgtccgcctgcctgtgttggctgcatcgaagaggcccagggctcctcagagcaggaactccactatgcatctctgcagaggctgccagtgcccagcagtgagggacctgacctcaggggcagagacaagagaggcaccaaggaggatccaagagctgactatgcctgcattgctgagaacaaacccacctgagcaccccagacaccttcctcaacccaggcgggtggacagggtccccctgtggtccagccagtaaaaaccatggtccccccacttctgtgtctcagtcctctcagtccatctcgagcctccgttcaaattgatcatcatcaaaacttatgtggctttttgacctttgaatagggaattttttaaattttttaaaaattaaaataaaaaaaacacatggctcacccttccacccac

SEQ ID NO: 14319 - protein, 103 aa, Homo sapiens
MYLRGPGAGRAPASGSGPSVRLPVLAASKRPRAPQSRNSTMHLCRGCQCPAVRDLTSGAETREAPRRIQELTMPALLRTNPPEHPRHLPQPRRVDRVPLWSSQ

SEQ ID NO: 14320 - DNA, 604 bp, Homo sapiens
cacccacccaggcccaggctccttcccctccatcatccccttaccagcacctagaaccatccagggctgaaaagtcccctccaaaccacgtgatgaggaacttgaggcaagtcaccagcccctgatcatttcgcctaaaagagcaaggactagagttcctgacctccaggccagtccctgatccctgacctaatgttatcgcggaatgatggcccagggctcctcagagcaggaactccactatgcatctctgcagaggctgccagtgcccagcagtgagggacctgacctcaggggcagagacaagagaggcaccaaggaggatccaagagctgactatgcctgcattgctgagaacaaacccacctgagcaccccagacaccttcctcaacccaggcgggtggacagggtccccctgtggtccagccagtaaaaaccatggtccccccacttctgtgtctcagtcctctcagtccatctcgagcctccgttcaaattgatcatcatcaaaacttatgtggctttttgacctttgaatagggaattttttaaattttttaaaaattaaaataaaaaaaacacatggctcacccttccacccac

SEQ ID NO: 14321 - protein, 54 aa, Homo sapiens; identical to SEQ ID NO: 14307

SEQ ID NO: 14322 - DNA, 610 bp, Homo sapiens
cctttctgggatgggtgacctagtaaagtccaggcttgaatctcgggtctttacttgggcaacgggcaccatgataccctatgttctggggattagcaatgaggaacttgaggcaagtcaccagcccctgatcatttcgcctaaaagagcaaggactagagttcctgacctccaggccagtccctgatccctgacctaatgttatcgcggaatgatggcccagggctcctcagagcaggaactccactatgcatctctgcagaggctgccagtgcccagcagtgagggacctgacctcaggggcagagacaagagaggcaccaaggaggatccaagagctgactatgcctgcattgctgagaacaaacccacctgagcaccccagacaccttcctcaacccaggcgggtggacagggtccccctgtggtccagccagtaaaaaccatggtccccccacttctgtgtctcagtcctctcagtccatctcgagcctccgttcaaattgatcatcatcaaaacttatgtggctttttgacctttgaatagggaattttttaaattttttaaaaattaaaataaaaaaaacacatggctcacccttccacccac

SEQ ID NO: 14323 - protein, 58 aa, Homo sapiens
MGDLVKSRLESRVFTWATGTMIPYVLGISNEELEASHQPLIISPKRARTRVPDLQASP

SEQ ID NO: 14324 - DNA, 632 bp, Homo sapiens
ctttctgggatgggtgacctagtaaagtccaggcttgaatctcgggtctttacttgggcaacgggcaccatgataccctatgttctggggattagcaatgaggaacttgaggcaagtcaccagcccctgatcatttcgcctaaaagagcaaggactagagttcctgacctccaggccagtccctgatccctgacctaatgttatcgcggaatgatgtaaagaggctggagaggagctgggcccagggctcctcagagcaggaactccactatgcatctctgcagaggctgccagtgcccagcagtgagggacctgacctcaggggcagagacaagagaggcaccaaggaggatccaagagctgactatgcctgcattgctgagaacaaacccacctgagcaccccagacaccttcctcaacccaggcgggtggacagggtccccctgtggtccagccagtaaaaaccatggtccccccacttctgtgtctcagtcctctcagtccatctcgagcctccgttcaaattgatcatcatcaaaacttatgtggctttttgacctttgaatagggaattttttaaattttttaaaaattaaaataaaaaaaacacatggctcacccttccacccac

SEQ ID NO: 14325 - protein, 66 aa, Homo sapiens; identical to SEQ ID NO: 14305

SEQ ID NO: 14326 - DNA, 690 bp, Homo sapiens
ggtgacctagtaaagtccaggcttgaatctcgggtctttacttgggcaacgggcaccatgataccctatgttctggggattagcagtgaggaatggaaagtgcccagctcagggttggcacataagggaggctccccagcctgggaacgattataacagagggcccctcacttcacagatgaggaacttgaggcaagtcaccagcccctgatcatttcgcctaaaagagcaaggactagagttcctgacctccaggccagtccctgatccctgacctaatgttatcgcggaatgatggcccagggctcctcagagcaggaactccactatgcatctctgcagaggctgccagtgcccagcagtgagggacctgacctcaggggcagagacaagagaggcaccaaggaggatccaagagctgactatgcctgcattgctgagaacaaacccacctgagcaccccagacaccttcctcaacccaggcgggtggacagggtccccctgtggtccagccagtaaaaaccatggtccccccacttctgtgtctcagtcctctcagtccatctcgagcctccgttcaaattgatcatcatcaaaacttatgtggctttttgacctttgaatagggaattttttaaattttttaaaaattaaaataaaaaaaacacatggctcacccttccacccac

SEQ ID NO: 14327 - protein, 54 aa, Homo sapiens; identical to SEQ ID NO: 14307

SEQ ID NO: 14328 - DNA, 549 bp, Homo sapiens
taaagtccaggcttgaatctcgggtctttacttgggcaacgggcaccatgataccctatgttctggggattagcaatgaggaacttgaggcaagtcaccagcccctgatcatttcgcctaaaagagcaaggactagagttcctgacctccaggccagtccctgatccctgacctaatgttatcgcggaatgatgatatatgtatctacgggggcctggggctgggcgggctcctgcttctggcagtggtccttctgtccgcctgcctgtgttggctgcatcgaagagtaaagaggctggagaggagctgggcccagggctcctcagagcaggaactccactatgcatctctgcagaggctgccagtgcccagcagtgagggacctgacctcaggggcagagacaagagaggcaccaaggaggatccaagagctgactatgcctgcattgctgagaacaaacccacctgagcaccccagacaccttcctcaacccaggcgggtggacagggtccccctgtggtccagccagtaaaaaccatggtcccccc

SEQ ID NO: 14329 - protein, 97 aa, Homo sapiens; identical to SEQ ID NO: 14313

SEQ ID NO: 14330 - DNA, 703 bp, Homo sapiens
taaagtccaggcttgaatctcgggtctttacttgggcaacgggcaccatgataccctatgttctggggattagcaatgaggaacttgaggcaagtcaccagcccctgatcatttcgcctaaaagagcaaggactagagttcctgacctccaggccagtccctgatccctgacctaatgttatcgcggaatgatgatatatgtatctacgggggcctggggctgggcgggctcctgcttctggcagtggtccttctgtccgcctgcctgtgttggctgcatcgaagagtaaagaggctggagaggagctgggcccagggctcctcagagcaggaactccactatgcatctctgcagaggctgccagtgcccagcagtgagggacctgacctcaggggcagagacaagagaggcaccaaggaggatccaagagctgactatgcctgcattgctgagaacaaacccacctgagcaccccagacaccttcctcaacccaggcgggtggacagggtccccctgtggtccagccagtaaaaaccatggtccccccacttctgtgtctcagtcctctcagtccatctcgagcctccgttcaaattgatcatcatcaaaacttatgtggctttttgacctttgaatagggaattttttaaattttttaaaaattaaaataaaaaaaacacatggctcacccttccacccac

SEQ ID NO: 14331 - protein, 97 aa, Homo sapiens; identical to SEQ ID NO: 14313

SEQ ID NO: 14332 - DNA, 664 bp, Homo sapiens
cgggcaccatgataccctatgttctggggattagcagtgaggaatggaaagtgcccagctcagggttggcacataagggaggctccccagcctgggaacgattataacagagggcccctcacttcacagatgaggaacttgaggcaagtcaccagcccctgatcatttcgcctaaaagagcaaggactagagttcctgacctccaggccagtccctgatccctgacctaatgttatcgcggaatgatgtaaagaggctggagaggagctgggcccagggctcctcagagcaggaactccactatgcatctctgcagaggctgccagtgcccagcagtgagggacctgacctcaggggcagagacaagagaggcaccaaggaggatccaagagctgactatgcctgcattgctgagaacaaacccacctgagcaccccagacaccttcctcaacccaggcgggtggacagggtccccctgtggtccagccagtaaaaaccatggtccccccacttctgtgtctcagtcctctcagtccatctcgagcctccgttcaaattgatcatcatcaaaacttatgtggctttttgacctttgaatagggaattttttaaattttttaaaaattaaaataaaaaaaacacatggctcacccttccacccac

SEQ ID NO: 14333 - protein, 66 aa, Homo sapiens; identical to SEQ ID NO: 14305

SEQ ID NO: 14334 - DNA, 259 bp, Homo sapiens
cctatgttctggggattagcaatgaggaacttgaggcaagtcaccagcccctgatcatttcgcctaaaagagcaaggactagagttcctgacctccaggccagtccctgatccctgacctaatgttatcgcggaatgatgatatatgtatctacgggggcctggggctgggcgggctcctgcttctggcagtggtccttctgtccgcctgcctgtgttggctgcatcgaagagaacactgcctggccctggagccactg

SEQ ID NO: 14335 - protein, 45 aa, Homo sapiens
MLSRNDDICIYGGLGLGGLLLLAVVLLSACLCWLHRREHCLALEP

SEQ ID NO: 14336 - DNA, 509 bp, Homo sapiens
caggggagtccacgcctgctggtggggggagcccgggagggcccgggagaagcacaaagggtgggctgtgttgagcttcttcttttcttccagtaaagaggctggagaggagctgggcccagggctcctcagagcaggaactccactatgcatctctgcagaggctgccagtgcccagcagtgagggacctgacctcaggggcagagacaagagaggcaccaaggaggatccaagagctgactatgcctgcattgctgagaacaaacccacctgagcaccccagacaccttcctcaacccaggcgggtggacagggtccccctgtggtccagccagtaaaaaccatggtccccccacttctgtgtctcagtcctctcagtccatctcgagcctccgttcaaattgatcatcatcaaaacttatgtggctttttgacctttgaatagggaattttttaaattttttaaaaattaaaataaaaaaaacacatggctcacccttccacccac

SEQ ID NO: 14337 - protein, 63 aa, Homo sapiens; identical to SEQ ID NO: 1525

SEQ ID NO: 14338 - DNA, 905 bp, Homo sapiens
gagaccctgacatctcctccagcagcatctgtcctctctcctcagggaggcaagcatttgatgctcgaggtccctggcagttgtggtccttggcaagtgatgtgatcctgtgctctctgggtgtcccagccccctgagattcgtaccctggaaggatcctctgccttcctgccctgctccttcaatgccagccaagggagactggccattggctccgtcacgtggttccgagatgaggtggttccagggaaggaggtgaggaatggaaccccagagttcaggggccgcctggccccacttgcttcttcccgtttcctccatgaccaccaggctgagctgcacatccgggacgtgcgaggccatgacgccagcatctacgtgtgcagagtggaggtgctgggccttggtgtcgggacagggaatgggactcggctggtggtggagaaagaacatcctcagctaggggctggtacagtcctcctccttcgggctggattctatgctgtcagctttctctctgtggccgtgggcagcaccgtctattaccagggcaaatatgccaaatctactctctccggattcccccaactctgaactttcccttccaccaggtctgacctggaaaggtccaagaaggcagctgccggctgtggtcccagcgcccctcccaccaccatgtgggagctcagcacatctgcttcccccagtcccaggaggctgagcctgattgtcctgagaaatgggaaggatcagatatgactcctccttggcaactgccctttcctgccaggcccacacataccctcttctggctgttaggggagcttgggtccctgaacactgtcattcacccaataaattactatttgaccccagagtgggtggaagggtgagccatgtgtttt

SEQ ID NO: 14339 - protein, 73 aa, Homo sapiens
MLSAFSLWPWAAPSITRANMPNLLSPDSPNSELSLPPGLTWKGPRRQLPAVVPAPLPPPCGSSAHLLPPVPGG

SEQ ID NO: 14340 - DNA, 1109 bp, Homo sapiens
ccacaagctggccccttggcctcctagagaccctgacatctcctccagcagcatctgtcctctctcctcagggaggcaagcatttgatgctcgaggtccctggcagttgtggtccttggcaagtgatgtgtgagtcccgtgtgtcataggaagctccccatccccatctggtgaccaaaggcctggctacaagtagtgagtccttcctcctccacccagacctcactgctcagatccccttcgccaactgggacatcttccgacatggcctggatgctgttgctcatcttgatcatggtccatccaggatcctgtgctctctgggtgtcccagccccctgagattcgtaccctggaaggatcctctgccttcctgccctgctccttcaatgccagccaagggagactggccattggctccgtcacgtggttccgagatgaggtggttccagggaaggaggtgaggaatggaaccccagagttcaggggccgcctggccccacttgcttcttcccgtttcctccatgaccaccaggctgagctgcacatccgggacgtgcgaggccatgacgccagcatctacgtgtgcagagtggaggtgctgggccttggtgtcgggacagggaatgggactcggctggtggtggagaaagaacatcctcagctaggggctggtacagtcctcctccttcgggctggattctatgctgtcagctttctctctgtggccgtgggcagcaccgtctattaccagggcaaatatgccaaatctactctctccggattcccccaactctgaactttcccttccaccaggtctgacctggaaaggtccaagaaggcagctgccggctgtggtcccagcgcccctcccaccaccatgtgggagctcagcacatctgcttcccccagtcccaggaggctgagcctgattgtcctgagaaatgggaaggatcagatatgactcctccttggcaactgccctttcctgccaggcccacacataccctcttctggctgttaggggagcttgggtccctgaacactgtcattcacccaataaattactatttgaccccagagtgggtggaagggtgagccatgtgtttt

SEQ ID NO: 14341 - protein, 177 aa, Homo sapiens
MAWMLLLILIMVHPGSCALWVSQPPEIRTLEGSSAFLPCSFNASQGRLAIGSVTWFRDEVVPGKEVRNGTPEFRGRLAPLASSRFLHDHQAELHIRDVRGHDASIYVCRVEVLGLGVGTGNGTRLVVEKEHPQLGAGTVLLLRAGFYAVSFLSVAVGSTVYYQGKYAKSTLSGFPQL

SEQ ID NO: 14342 - DNA, 1041 bp, Homo sapiens
ccacaagctggccccttggcctcctagagaccctgacatctcctccagcagcatctgtcctctctcctcagggaggcaagcatttgatgctcgaggtccctggcagttgtggtccttggcaagtgatgtgtgagtcccgtgtgtcataggaagctccccatccccatctggtgaccaaaggcctggctacaagtagtgagtccttcctcctccacccagacctcactgctcagatccccttcgccaactgggacatcttccgacatggcctggatgctgttgctcatcttgatcatggtccatccaggatcctgtgctctctgggtgtcccagccccctgagattcgtaccctggaaggatcctctgccttcctgccctgctccttcaatgccagccaagggagactggccattggctccgtcacgtggttccgagatgaggtggttccagggaaggaggtgaggaatggaaccccagagttcaggggccgcctggccccacttgcttcttcccgtttcctccatgaccaccaggctgagctgcacatccgggacgtgcgaggccatgacgccagcatctacgtgtgcagagtggaggtgctgggccttggtgtcgggacagggaatgggactcggctggtggtggagaaagaacatcctcagctaggggctggtacagtcctcctccttcgggctggattctatgctgtcagctttctctctgtggccgtgggcagcaccgtctattaccagggcaaatgtctgacctggaaaggtccaagaaggcagctgccggctgtggtcccagcgcccctcccaccaccatgtgggagctcagcacatctgcttcccccagtcccaggaggctgagcctgattgtcctgagaaatgggaaggatcagatatgactcctccttggcaactgccctttcctgccaggcccacacataccctcttctggctgttaggggagcttgggtccctgaacactgtcattcacccaataaattactatttgaccccagagtgggtggaagggtg

SEQ ID NO: 14343 - protein, 201 aa, Homo sapiens; identical to SEQ ID NO: 1529

SEQ ID NO: 14344 - DNA, 875 bp, Homo sapiens
ccacaagctggccccttggcctcctagagaccctgacatctcctccagcagcatctgtcctctctcctcagggaggcaagcatttgatgctcgaggtccctggcagttgtggtccttggcaagtgatgtgtgagtcccgtgtgtcataggaagctccccatccccatctggtgaccaaaggcctggctacaagtagtgagtccttcctcctccacccagacctcactgctcagatccccttcgccaactgggacatcttccgacatggcctggatgctgttgctcatcttgatcatggtccatccaggatcctgtgctctctgggtgtcccagccccctgagattcgtaccctggaaggatcctctgccttcctgccctgctccttcaatgccagccaagggagactggccattggctccgtcacgtggttccgagatgaggtggttccagggaaggaggtgaggaatggaaccccagagttcaggggccgcctggccccacttgcttcttcccgtttcctccatgaccaccaggctgagctgcacatccgggacgtgcgaggccatgacgccagcatctacgtgtgcagagtggaggtgctgggccttggtgtcgggacagggaatgggactcggctggtggtggagaaagaacatcctcagctaggggctggtacagtcctcctccttcgggctggattctatgctgtcagctttctctctgtggccgtgggcagcaccgtctattaccagggcaaatgccactgtcacatgggaacacactgccactcctcagatgggccccgaggagtgattccagagcccagatgtccctagtcctcttcaaaagaccccaataaatctgccccaccact

SEQ ID NO: 14345 - protein, 190 aa, Homo sapiens
MAWMLLLILIMVHPGSCALWVSQPPEIRTLEGSSAFLPCSFNASQGRLAIGSVTWFRDEVVPGKEVRNGTPEFRGRLAPLASSRFLHDHQAELHIRDVRGHDASIYVCRVEVLGLGVGTGNGTRLVVEKEHPQLGAGTVLLLRAGFYAVSFLSVAVGSTVYYQGKCHCHMGTHCHSSDGPRGVIPEPRCP

SEQ ID NO: 14346 - DNA, 690 bp, Homo sapiens
gaggggaaaggggaagtttgggaggaaggcttctgagaagactggtgggagagaaggagagcctgcagacagaggcctccagcttggtctgtctccccacctctaccagcatctgctgagctatgagccaaaccagggatttacagggaggaaaagctttcggactgctgaaggcccagcaggaagagaggctggatgagatcaacaagcaattcctagacgatcccaaatatagcagtgatgaggatctgccctccaaactggaaggcttcaaagagaaatacatggagtttgaccttaatggaaatggcgatattgatatcatgtccctgaaacgaatgctggagaaacttggagtccccaagactcacctagagctaaagaaattaattggagaggtgtccagtggctccggggagacgttcagctaccctgactttctcaggatgatgctgggcaagagatctgccatcctaaaaatgatcctgatgtatgaggaaaaagcgagagaaaaggaaaagccaacaggccccccagccaagaaagctatctctgagttgccctgatttgaagggaaaagggatgatgggattgaaggggcttctaatgacccagatatggaaacagaagacaaaattgtaagccagagtcaacaaattaaataaattaccccctcctccagatcaagtc

SEQ ID NO: 14347 - protein, 147 aa, Homo sapiens; identical to SEQ ID NO: 1531

SEQ ID NO: 14348 - DNA, 1491 bp, Homo sapiens
ggggaagtttgggaggaaggcttctgagaagactggtgggagagaaggagagcctgcagacagaggcctccagcttggaggaaaagctttcggactgctgaaggcccagcaggaagagaggctggatgagatcaacaagcaattcctagacgatcccaaatatagcagtgatgaggatctgccctccaaactggaaggcttcaaaggtgagggggaaactgtaggcggtggagacagggctgggggtaggagggttaggatttccacaagaacaaggcaggaacagcagagataaaaagtttacttttgtggtagcaaaaggggaacctgcctttattgccctcctgccacactgcggtccctttcccgggcctgcctctctcagcatcccctctagctccttacaccctagcggggcccctcaactccccaaccccacttcctctgcctgcccctcctcctccttccacgttgtctcctccacctagcagttggttggcaaccccttcctcagtcccctgctgaaaaccctccagtcagcgcttatcccttctgctctctcccctcacccagagaaatacatggagtttgaccttaatggaaatggcgatattggtgagaaacgggtgatttgcgggggcagggtggtgtgcaggcctaagaagacagaggtctctcctacatgctccattcctcatgatttgggagggggcccacctaccacagtgggaggaaggagaatggggatgcggaagtgggagaggagagagagggtctccccaccttctccccatccccatcctctgcccccagatatcatgtccctgaaacgaatgctggagaaacttggagtccccaagactcacctagagctaaagaaattaattggagaggtgtccagtggctccggggagacgttcagctaccctgactttctcaggatgatgctgggcaagagatctgccatcctaaaaatgtgagtgtcaatttccaacctcccctgtacttacctgttttctcctcccccatccctacccttgtccacaggctcaacatttctacacgttgcccatcatcccttcttccatccttagagggacccttccaaggtcccgaccccatccctatccatagtcctggtccccagaaactccaacccctgcccttcctcttcccccttccaccctcacatccccatccccttctagcctttcctagcaccctatgatttattcccttgagaggagtgttccctgatccctgtgcctcttcccatctcaaccaggatcctgatgtatgaggaaaaagcgagagaaaaggaaaagccaacaggccccccagccaagaaagctatctctgagttgccctgatttgaagggaaaagggatgatgggattgaaggggcttctaatgacccagatatggaaacagaagacaaaattgtaagccagagtcaacaaattaaataaattaccccctcctccagatcaa

SEQ ID NO: 14349 - protein, 132 aa, Homo sapiens; identical to SEQ ID NO: 1533

SEQ ID NO: 14350 - DNA, 611 bp, Homo sapiens
gggaggaaggcttctgagaagactggtgggagagaaggagagcctgcagacagaggcctccagcttggaggaaaagctttcggactgctgaaggcccagcaggaagagaggctggatgagatcaacaagcaattcctagacgatcccaaatatagcagtgatgaggatctgccctccaaactggaaggcttcaaagagaaatacatggagtttgaccttaatggaaatggcgatattgatatcatgtccctgaaacgaatgctggagaaacttggagtccccaagactcacctagagctaaagaaattaattggagaggtgtccagtggctccggggagacgttcagctaccctgactttctcaggatgatgctgggcaagagatctgccatcctaaaaatgatcctgatgtatgaggaaaaagcgagagaaaaggaaaagccaacaggccccccagccaagaaagctatctctgagttgccctgatttgaagggaaaagggatgatgggattgaaggggcttctaatgacccagatatggaaacagaagacaaaattgtaagccagagtcaacaaattaaataaattaccccctcctccagatcaagtca

SEQ ID NO: 14351 - protein, 93 aa, Homo sapiens; identical to SEQ ID NO: 1535

SEQ ID NO: 14352 - DNA, 1483 bp, Homo sapiens
ccagcttggtctgtctccccacctctaccagcatctgctgagctatgagccaaaccagggatttacagggaggaaaagctttcggactgctgaaggcccagcaggaagagaggctggatgagatcaacaagcaattcctagacgatcccaaatatagcagtgatgaggatctgccctccaaactggaaggcttcaaaggtgagggggaaactgtaggcggtggagacagggctgggggtaggagggttaggatttccacaagaacaaggcaggaacagcagagataaaaagtttacttttgtggtagcaaaaggggaacctgcctttattgccctcctgccacactgcggtccctttcccgggcctgcctctctcagcatcccctctagctccttacaccctagcggggcccctcaactccccaaccccacttcctctgcctgcccctcctcctccttccacgttgtctcctccacctagcagttggttggcaaccccttcctcagtcccctgctgaaaaccctccagtcagcgcttatcccttctgctctctcccctcacccagagaaatacatggagtttgaccttaatggaaatggcgatattggtgagaaacgggtgatttgcgggggcagggtggtgtgcaggcctaagaagacagaggtctctcctacatgctccattcctcatgatttgggagggggcccacctaccacagtgggaggaaggagaatggggatgcggaagtgggagaggagagagagggtctccccaccttctccccatccccatcctctgcccccagatatcatgtccctgaaacgaatgctggagaaacttggagtccccaagactcacctagagctaaagaaattaattggagaggtgtccagtggctccggggagacgttcagctaccctgactttctcaggatgatgctgggcaagagatctgccatcctaaaaatgtgagtgtcaatttccaacctcccctgtacttacctgttttctcctcccccatccctacccttgtccacaggctcaacatttctacacgttgcccatcatcccttcttccatccttagagggacccttccaaggtcccgaccccatccctatccatagtcctggtccccagaaactccaacccctgcccttcctcttcccccttccaccctcacatccccatccccttctagcctttcctagcaccctatgatttattcccttgagaggagtgttccctgatccctgtgcctcttcccatctcaaccaggatcctgatgtatgaggaaaaagcgagagaaaaggaaaagccaacaggccccccagccaagaaagctatctctgagttgccctgatttgaagggaaaagggatgatgggattgaaggggcttctaatgacccagatatggaaacagaagacaaaattgtaagccagagtcaacaaattaaataaattaccccctcctccagatcaa

SEQ ID NO: 14353 - protein, 80 aa, Homo sapiens [sequence omitted]

SEQ ID NO: 14354 - DNA, 480 bp, Homo sapiens
tggatggggagggcctaccctggctcttattttcccctccatagcaattcctagacgatcccaaatatagcagtgatgaggatctgccctccaaactggaaggcttcaaagatatcatgtccctgaaacgaatgctggagaaacttggagtccccaagactcacctagagctaaagaaattaattggagaggtgtccagtggctccggggagacgttcagctaccctgactttctcaggatgatgctgggcaagagatctgccatcctaaaaatgatcctgatgtatgaggaaaaagcgagagaaaaggaaaagccaacaggccccccagccaagaaagctatctctgagttgccctgatttgaagggaaaagggatgatgggattgaaggggcttctaatgacccagatatggaaacagaagacaaaattgtaagccagagtcaacaaattaaataaattaccccctcctccagatcaa

SEQ ID NO: 14355 - protein, 80 aa, Homo sapiens [sequence omitted]

SEQ ID NO: 14356 - DNA, 817 bp, Homo sapiens
cccgggcctgcctctctcagcatcccctctagctccttacaccctagcggggcccctcaactccccaaccccacttcctctgcctgcccctcctcctccttccacgttgtctcctccacctagcagttggttggcaaccccttcctcagtcccctgctgaaaaccctccagtcagcgcttatcccttctgctctctcccctcacccagagaaatacatggagtttgaccttaatggaaatggcgatattggtgagaaacgggtgatttgcgggggcagggtggtgtgcaggcctaagaagacagaggtctctcctacatgctccattcctcatgatttgggagggggcccacctaccacagtgggaggaaggagaatggggatgcggaagtgggagaggagagagagggtctccccaccttctccccatccccatcctctgcccccagatatcatgtccctgaaacgaatgctggagaaacttggagtccccaagactcacctagagctaaagaaattaattggagaggtgtccagtggctccggggagacgttcagctaccctgactttctcaggatgatgctgggcaagagatctgccatcctaaaaatgatcctgatgtatgaggaaaaagcgagagaaaaggaaaagccaacaggccccccagccaagaaagctatctctgagttgccctgatttgaagggaaaagggatgatgggattgaaggggcttctaatgacccagatatggaaacagaagacaaaattgtaagccagagtcaacaaattaaataaattaccccctcctccagatcaa

SEQ ID NO: 14357 - protein, 159 aa, Homo sapiens
MEFDLNGNGDIGEKRVICGGRVVCRPKKTEVSPTCSIPHDLGGGPPTTVGGRRMGMRKWERRERVSPPSPHPHPLPPDIMSLKRMLEKLGVPKTHLELKKLIGEVSSGSGETFSYPDFLRMMLGKRSAILKMILMYEEKAREKEKPTGPPAKKAISELP

SEQ ID NO: 14358 - DNA, 528 bp, Homo sapiens
ctccttccacgttgtctcctccacctagcagttggttggcaaccccttcctcagtcccctgctgaaaaccctccagtcagcgcttatcccttctgctctctcccctcacccagagaaatacatggagtttgaccttaatggaaatggcgatattgatatcatgtccctgaaacgaatgctggagaaacttggagtccccaagactcacctagagctaaagaaattaattggagaggtgtccagtggctccggggagacgttcagctaccctgactttctcaggatgatgctgggcaagagatctgccatcctaaaaatgatcctgatgtatgaggaaaaagcgagagaaaaggaaaagccaacaggccccccagccaagaaagctatctctgagttgccctgatttgaagggaaaagggatgatgggattgaaggggcttctaatgacccagatatggaaacagaagacaaaattgtaagccagagtcaacaaattaaataaattaccccctcctccagatcaagtca

SEQ ID NO: 14359 - protein, 93 aa, Homo sapiens; identical to SEQ ID NO: 1535

SEQ ID NO: 14360 - DNA, 6867 bp, Homo sapiens
gggctcagccgcggagtgagcgagggagacgggaggagccgaacccggcgccatccgccgccatcctcccccgccccaccgccatcccgtcccggggagcccctaggcccgggtcccggatccccgcgcacccggccaggctctggcacgttttgggggaggtgcctgcaggacccaacatactcaatgagcttccagcgcaatgtccgatcgctcggggccgactgccaagggaaaggatggaaagaagtattcctcgctcaacctgtttgatacgtataagggcaagtccttagagatccagaaacccgctgttgcccctcgccatggcctgcagagtctcgggaaagttgccattgcccggcgtatgccacctccagccaaccttccaagcctgaaagccgagaacaaaggcaatgaccccaatgtctcactagtgccaaaagacggaacaggatgggcaagcaaacaggagcagtccgaccccaagagttccgatgcctcaaccgctcagccgccggaatcgcagccactgccggcttcacagacgcctgcctccaaccagccgaaacgacccccagcagcccccgagaacactcctttggttccaagcggggtaaagtcctgggcacaagccagcgtcacccatggagcacatggagatggtggaagggcatcaagcctactgtcacgattctctcgagaggaatttccgaccctgcaggcggctggcgaccaggacaaggctgccaaggaaagggagtctgccgaacagtcgtctgggcccggaccaagcctccgcccccaaaattctacaacttggagggacggaggtgggcgtggccctgatgagctggagggcccggactccaaacttcatcatggtcatgatccccggggtgggctacagccttcaggcccaccccagttccctccctaccgcggaatgatgccgcctttcatgtatcccccatatctcccgttccctccgccctatggaccccaggggccttaccgataccccactcctgatgggcccagccgttttccccgtgtggcgggcccccgaggctcagggccaccaatgcgcttagtagagcctgtgggtcgtccctctattctcaaagaggataatctcaaagagtttgatcagttggatcaggagaatgatgatggttgggcaggggcccatgaagaggttgactacactgaaaagctcaagttcagcgatgaggaagatgggcgagactctgatgaggagggtgctgagggccacagggattcccaatcagcttctggtgaggaacggccccctgaagcagatggcaaaaagggcaactcccccaacagcgaaccgcccactcctaagacggcctgggcagaaacctctcggcctccagagacagagccgggacctcctgccccaaagcctcccctacccccacctcaccggggccccgccgggaactggggcccccctggggactacccagatcgtgggggtcctccctgcaagcccccagcacctgaagatgaggatgaggcatggcggcagcgacgaaagcagtcgtcatctgagatttccctggcagtggagcgggcccggcgacggcgagaagaagaggagcggcgcatgcaagaagagcgccgggcagcctgtgctgagaagctcaagcgactcgatgaaaagtttggggcacctgacaagcggctcaaagcagagcctgctgccccacctgctgccccttctaccccagctccaccacctgcagtccctaaagaactccctgcacctccagctccacctccagcatcagccccaacaccagagacagaacctgaagagccagcacaggcccctcctgcccaatctactcctactccaggtgtggctgcggctcccactctggtgagtggtggtggcagtaccagtagcaccagcagtggcagcttcgaagccagcccagtggaaccacaactgccctcaaaagagggtcctgaaccaccagaagaggttcctcctcctaccacacccccagttccaaaggtggaacccaagggtgatgggattggtcccacccgccagccccctagtcagggcttgggctaccccaaatatcagaagtcgttgcctcctcgtttccagcggcagcagcaggagcagctcctgaagcagcagcagcagcaccagtggcagcagcatcaacagggctctgcccctcctaccccagtgcccccatcaccaccacagcctgtgaccctgggggctgtgccagctccacaggctccacccccgccccccaaggccctgtacccaggtgctctgggccggcccccacccatgcccccaatgaactttgatccccgatggatgatgattcctccttatgtggacccccggctcctccagggtcgtccccctctagacttctaccctcctggtgtgcatccctctggcctagttccccgagagcgttcagacagtgggggctcaagctcagagccatttgaccgtcatgcacctgctatgttacgggaacggggcactccaccggtggatccaaagttggcctgggtaggagatgtcttcaccgccacacccgctgaaccccgcccacttacctcacctctgcgccaggctgcggatgaggatgacaaggggatgaggagcgagactcctccagtacctcccccaccaccctatctggccagttatccaggctttcctgagaatggagcccctgggcccccaatctctcgctttcctctggaggaaccagggccccgtccactcccctggcccccaggcagtgatgaagtggccaagatacaaactccaccacccaagaaggagccccctaaggaggagactgcacagctgacggggccagaagcaggccgaaagcctgcccgcggagtcgggagtggaggccagggccccccaccaccacgcagagagagtcgcacagagacccgctggggccctcgtccagggagcagtcgtcgtggaatccctccagaggagccaggggccccaccccgccgggctgggcctataaagaaacctccaccacctacaaaagtagaagagctgcctcccaagcccctcgaacagggggatgaaacccccaaacccccaaagccagacccactcaagataaccaaggggaagctagggggccccaaggagaccccacccaatggaaatctttcccctgccccaaggcttcggagggactattcgtatgaaagagtgggtcctacctcttgccggggtcggggccgaggcgagtattttgccagagggaggggttttcgggggacctatgggggacgagggcggggagcccgaagccgggaattccgcagttaccgagagtttcgaggagatgatgggcgtggaggtgggacagggggaccaaaccaccctcctgctccccgaggccgcactgccagcgagacacggagcgagggttcagagtatgaggaaatccccaagcggcgccggcagcggggctcagaaacaggcagcgagacccatgagagtgatctggctccttcagacaaggaggctcccacacccaaggagggaacactcacccaggtccctctcgctcccccaccaccaggagccccaccttcaccagccccagcccgcttcactgcccggggtgggcgagtcttcactcccagaggggtgccatctcgccggggccgaggaggagggaggccccctcctcaagtttgcccaggctggagccctccagccaagtctctggctcccaagaaacctcccacaggccctttgccaccaagtaaggagcctttgaaagagaagttgatcccagggcctctgtcccctgtggcgcgcggaggcagcaatggaggtagcaatgtgggcatggaagatggggagcgaccccgaaggaggcgacatgggagggctcagcagcaggataaaccgcctcgtttccggaggctgaagcaggaacgggagaatgccgcaagggggtctgagggcaagccctccctaacccttccagcctccgctcctggacctgaggaggccctcacaacagtcacagtggccccagcacctcgccgggcagctgccaagtctcctgatctgtcaaaccagaactcagaccaagccaatgaggaatgggagactgcatcagagagcagtgacttcaccagtgagcgccgaggggacaaagaggcacccccaccagtactgctgacacccaaggctgtgggaactcctgggggaggtggaggtggagccgtaccaggtatttcagccatgtcccgcggagatctgagccagagagccaaggatttgagtaaacggagcttctcaagtcagcggccaggcatggaacggcagaatcggcgccctggcccagggggcaaggctggcagcagtggcagcagcagtggaggaggcggtgggggtcctggaggaaggaccgggccaggacgaggcgacaagaggagctggccctctcccaagaaccgaagtcgtcctccagaggagcgtcccccggggcttcccctgcctcccccacctcccagcagttctgctgtcttccgcctggaccaagttatccacagcaaccctgctggcatccaacaggctctggcccagcttagtagccgtcaagggagtgtaactgcaccagggggtcatccaaggcacaagcctgggcttccccaagcccctcagggcccctctcctaggcccccaacccgatacgagccccagagggtcaacagcggcctcagttctgacccccactttgaggagccggggccaatggtgagaggggtgggtgggactcctcgggactctgccggggttagtccctttccccctaaacgtcgggagcggcctcccagaaaaccagagctgctacaggaggaatctttgccacctcctcatagctctggattcttgggctctaagcctgagggcccaggccctcaggcagagtccagagatacaggcacagaggccctgacccctcacatctggaaccgtttacatactgccactagccgaaagagttaccggcccagctccatggagccttggatggagcccctgagtccttttgaggatgtggctggcacagaaatgagtcagtctgacagtggggtggacctgagtggggattctcaggtgtcatcaggtccctgcagccagcgaagttcccctgatggaggactcaagggggcagcagagggaccccccaagaggcctggaggctcctcacccctgaatgctgttccttgtgagggtccacctggctctgaacctcctaggagaccaccacctgccccccacgatggggacagaaaggagctgccccgggagcagcctctgccccctggccccattggcacagaacgatcacagcgtacagaccgaggcacagagcctggccccattcggccatcccatcgacctggtcccccagtccagtttggcactagtgacaaggactcagacttacgcctagtggtaggagacagcttgaaagcagagaaggagctaacagcatcagtcactgaggccattcctgtatcacgagactgggagctgcttcccagtgctgctgcctctgctgagccacaatccaagaacctggattctgggcactgtgtcccggagcccagctcctcaggccagcgcctgtatcctgaggttttctatggcagtgctgggccttccagttctcagatctctgggggagccatggactctcaattacatccaaacagtggaggcttccgccctgggacaccctcactgcacccttacagatcacagcccctatacctaccccccggcccagcccctccctcagcactgctctctgggttagctctcaagggccagtttctggatttctccacaatgcaagctacagagctggggaagttgccggctggaggagttctctaccctccaccttccttcctctactctccggctttctgccccagtcctttgcctgacacatcgttgcttcaggtacgccaggatctgccatccccttcggatttttattctactcctctgcagcctggtggccaaagtggctttctcccttcaggggctcctgcccagcagatgcttctacccatggtagactcacagctgcctgtggtgaactttggctccctgccgccagcaccacctcctgccccacctcccctttctctgttacctgtgggccctgctctgcagccccccagcctggctgtgcggcccccacctgctcctgctactcgggtgctgccttcacctgccaggcccttccccgctagcttggggcgagcagagctgcatccagtggaactaaagccgttccaggattatcaaaaactgagcagcaaccttgggggacctggatcatcacggactcccccaactggaaggtccttctctggcctcaattcccgtctcaaggccacgccttccacctacagtggagtcttccgcacccagcgcgtcgacctttaccagcaggcctccccaccagatgccctgcgctggatacctaagccttgggagcggacagggccgccacctcgagaagggccctcccgacgggcagaggagcctgggtcccgaggggacaaggagcctgggttgcccccaccccgctgagggagttcctcttgccccctacccccggggcttgtatatagattataaatatataagggggaaaggggtgggcggggaggggttctggggctggggcctcacttcccctcctcccccttcccctggtcccctgtccctggggctgtttgttaaaaaagagtaataaaaggatttaaaaaaaaaaacttcta

SEQ ID NO: 14361 - protein, 2157 aa, Homo sapiens
MSDRSGPTAKGKDGKKYSSLNLFDTYKGKSLEIQKPAVAPRHGLQSLGKVAIARRMPPPANLPSLKAENKGNDPNVSLVPKDGTGWASKQEQSDPKSSDASTAQPPESQPLPASQTPASNQPKRPPAAPENTPLVPSGVKSWAQASVTHGAHGDGGRASSLLSRFSREEFPTLQAAGDQDKAAKERESAEQSSGPGPSLRPQNSTTWRDGGGRGPDELEGPDSKLHHGHDPRGGLQPSGPPQFPPYRGMMPPFMYPPYLPFPPPYGPQGPYRYPTPDGPSRFPRVAGPRGSGPPMRLVEPVGRPSILKEDNLKEFDQLDQENDDGWAGAHEEVDYTEKLKFSDEEDGRDSDEEGAEGHRDSQSASGEERPPEADGKKGNSPNSEPPTPKTAWAETSRPPETEPGPPAPKPPLPPPHRGPAGNWGPPGDYPDRGGPPCKPPAPEDEDEAWRQRRKQSSSEISLAVERARRRREEEERRMQEERRAACAEKLKRLDEKFGAPDKRLKAEPAAPPAAPSTPAPPPAVPKELPAPPAPPPASAPTPETEPEEPAQAPPAQSTPTPGVAAAPTLVSGGGSTSSTSSGSFEASPVEPQLPSKEGPEPPEEVPPPTTPPVPKVEPKGDGIGPTRQPPSQGLGYPKYQKSLPPRFQRQQQEQLLKQQQQHQWQQHQQGSAPPTPVPPSPPQPVTLGAVPAPQAPPPPPKALYPGALGRPPPMPPMNFDPRWMMIPPYVDPRLLQGRPPLDFYPPGVHPSGLVPRERSDSGGSSSEPFDRHAPAMLRERGTPPVDPKLAWVGDVFTATPAEPRPLTSPLRQAADEDDKGMRSETPPVPPPPPYLASYPGFPENGAPGPPISRFPLEEPGPRPLPWPPGSDEVAKIQTPPPKKEPPKEETAQLTGPEAGRKPARGVGSGGQGPPPPRRESRTETRWGPRPGSSRRGIPPEEPGAPPRRAGPIKKPPPPTKVEELPPKPLEQGDETPKPPKPDPLKITKGKLGGPKETPPNGNLSPAPRLRRDYSYERVGPTSCRGRGRGEYFARGRGFRGTYGGRGRGARSREFRSYREFRGDDGRGGGTGGPNHPPAPRGRTASETRSEGSEYEEIPKRRRQRGSETGSETHESDLAPSDKEAPTPKEGTLTQVPLAPPPPGAPPSPAPARFTARGGRVFTPRGVPSRRGRGGGRPPPQVCPGWSPPAKSLAPKKPPTGPLPPSKEPLKEKLIPGPLSPVARGGSNGGSNVGMEDGERPRRRRHGRAQQQDKPPRFRRLKQERENAARGSEGKPSLTLPASAPGPEEALTTVTVAPAPRRAAAKSPDLSNQNSDQANEEWETASESSDFTSERRGDKEAPPPVLLTPKAVGTPGGGGGGAVPGISAMSRGDLSQRAKDLSKRSFSSQRPGMERQNRRPGPGGKAGSSGSSSGGGGGGPGGRTGPGRGDKRSWPSPKNRSRPPEERPPGLPLPPPPPSSSAVFRLDQVIHSNPAGIQQALAQLSSRQGSVTAPGGHPRHKPGLPQAPQGPSPRPPTRYEPQRVNSGLSSDPHFEEPGPMVRGVGGTPRDSAGVSPFPPKRRERPPRKPELLQEESLPPPHSSGFLGSKPEGPGPQAESRDTGTEALTPHIWNRLHTATSRKSYRPSSMEPWMEPLSPFEDVAGTEMSQSDSGVDLSGDSQVSSGPCSQRSSPDGGLKGAAEGPPKRPGGSSPLNAVPCEGPPGSEPPRRPPPAPHDGDRKELPREQPLPPGPIGTERSQRTDRGTEPGPIRPSHRPGPPVQFGTSDKDSDLRLVVGDSLKAEKELTASVTEAIPVSRDWELLPSAAASAEPQSKNLDSGHCVPEPSSSGQRLYPEVFYGSAGPSSSQISGGAMDSQLHPNSGGFRPGTPSLHPYRSQPLYLPPGPAPPSALLSGLALKGQFLDFSTMQATELGKLPAGGVLYPPPSFLYSPAFCPSPLPDTSLLQVRQDLPSPSDFYSTPLQPGGQSGFLPSGAPAQQMLLPMVDSQLPVVNFGSLPPAPPPAPPPLSLLPVGPALQPPSLAVRPPPAPATRVLPSPARPFPASLGRAELHPVELKPFQDYQKLSSNLGGPGSSRTPPTGRSFSGLNSRLKATPSTYSGVFRTQRVDLYQQASPPDALRWIPKPWERTGPPPREGPSRRAEEPGSRGDKEPGLPPPR

SEQ ID NO: 14362 - DNA, 6899 bp, Homo sapiens
cagccgcggagtgagcgagggagacgggaggagccgaacccggcgccatccgccgccatcctcccccgccccaccgccatcccgtcccggggagcccctaggcccgggtcccggatccccgcgcacccggccaggggacagagactgagacacttgctgtctggcccacaggctctggcacgttttgggggaggtgcctgcaggacccaacatactcaatgagcttccagcgcaatgtccgatcgctcggggccgactgccaagggaaaggatggaaagaagtattcctcgctcaacctgtttgatacgtataagggcaagtccttagagatccagaaacccgctgttgcccctcgccatggcctgcagagtctcgggaaagttgccattgcccggcgtatgccacctccagccaaccttccaagcctgaaagccgagaacaaaggcaatgaccccaatgtctcactagtgccaaaagacggaacaggatgggcaagcaaacaggagcagtccgaccccaagagttccgatgcctcaaccgctcagccgccggaatcgcagccactgccggcttcacagacgcctgcctccaaccagccgaaacgacccccagcagcccccgagaacactcctttggttccaagcggggtaaagtcctgggcacaagccagcgtcacccatggagcacatggagatggtggaagggcatcaagcctactgtcacgattctctcgagaggaatttccgaccctgcaggcggctggcgaccaggacaaggctgccaaggaaagggagtctgccgaacagtcgtctgggcccggaccaagcctccgcccccaaaattctacaacttggagggacggaggtgggcgtggccctgatgagctggagggcccggactccaaacttcatcatggtcatgatccccggggtgggctacagccttcaggcccaccccagttccctccctaccgcggaatgatgccgcctttcatgtatcccccatatctcccgttccctccgccctatggaccccaggggccttaccgataccccactcctgatgggcccagccgttttccccgtgtggcgggcccccgaggctcagggccaccaatgcgcttagtagagcctgtgggtcgtccctctattctcaaagaggataatctcaaagagtttgatcagttggatcaggagaatgatgatggttgggcaggggcccatgaagaggttgactacactgaaaagctcaagttcagcgatgaggaagatgggcgagactctgatgaggagggtgctgagggccacagggattcccaatcagcttctggtgaggaacggccccctgaagcagatggcaaaaagggcaactcccccaacagcgaaccgcccactcctaagacggcctgggcagaaacctctcggcctccagagacagagccgggacctcctgccccaaagcctcccctacccccacctcaccggggccccgccgggaactggggcccccctggggactacccagatcgtgggggtcctccctgcaagcccccagcacctgaagatgaggatgaggcatggcggcagcgacgaaagcagtcgtcatctgagatttccctggcagtggagcgggcccggcgacggcgagaagaagaggagcggcgcatgcaagaagagcgccgggcagcctgtgctgagaagctcaagcgactcgatgaaaagtttggggcacctgacaagcggctcaaagcagagcctgctgccccacctgctgccccttctaccccagctccaccacctgcagtccctaaagaactccctgcacctccagctccacctccagcatcagccccaacaccagagacagaacctgaagagccagcacaggcccctcctgcccaatctactcctactccaggtgtggctgcggctcccactctggtgagtggtggtggcagtaccagtagcaccagcagtggcagcttcgaagccagcccagtggaaccacaactgccctcaaaagagggtcctgaaccaccagaagaggttcctcctcctaccacacccccagttccaaaggtggaacccaagggtgatgggattggtcccacccgccagccccctagtcagggcttgggctaccccaaatatcagaagtcgttgcctcctcgtttccagcggcagcagcaggagcagctcctgaagcagcagcagcagcaccagtggcagcagcatcaacagggctctgcccctcctaccccagtgcccccatcaccaccacagcctgtgaccctgggggctgtgccagctccacaggctccacccccgccccccaaggccctgtacccaggtgctctgggccggcccccacccatgcccccaatgaactttgatccccgatggatgatgattcctccttatgtggacccccggctcctccagggtcgtccccctctagacttctaccctcctggtgtgcatccctctggcctagttccccgagagcgttcagacagtgggggctcaagctcagagccatttgaccgtcatgcacctgctatgttacgggaacggggcactccaccggtggatccaaagttggcctgggtaggagatgtcttcaccgccacacccgctgaaccccgcccacttacctcacctctgcgccaggctgcggatgaggatgacaaggggatgaggagcgagactcctccagtacctcccccaccaccctatctggccagttatccaggctttcctgagaatggagcccctgggcccccaatctctcgctttcctctggaggaaccagggccccgtccactcccctggcccccaggcagtgatgaagtggccaagatacaaactccaccacccaagaaggagccccctaaggaggagactgcacagctgacggggccagaagcaggccgaaagcctgcccgcggagtcgggagtggaggccagggccccccaccaccacgcagagagagtcgcacagagacccgctggggccctcgtccagggagcagtcgtcgtggaatccctccagaggagccaggggccccaccccgccgggctgggcctataaagaaacctccaccacctacaaaagtagaagagctgcctcccaagcccctcgaacagggggatgaaacccccaaacccccaaagccagacccactcaagataaccaaggggaagctagggggccccaaggagaccccacccaatggaaatctttcccctgccccaaggcttcggagggactattcgtatgaaagagtgggtcctacctcttgccggggtcggggccgaggcgagtattttgccagagggaggggttttcgggggacctatgggggacgagggcggggagcccgaagccgggaattccgcagttaccgagagtttcgaggagatgatgggcgtggaggtgggacagggggaccaaaccaccctcctgctccccgaggccgcactgccagcgagacacggagcgagggttcagagtatgaggaaatccccaagcggcgccggcagcggggctcagaaacaggcagcgagacccatgagagtgatctggctccttcagacaaggaggctcccacacccaaggagggaacactcacccaggtccctctcgctcccccaccaccaggagccccaccttcaccagccccagcccgcttcactgcccggggtgggcgagtcttcactcccagaggggtgccatctcgccggggccgaggaggagggaggccccctcctcaagtttgcccaggctggagccctccagccaagtctctggctcccaagaaacctcccacaggccctttgccaccaagtaaggagcctttgaaagagaagttgatcccagggcctctgtcccctgtggcgcgcggaggcagcaatggaggtagcaatgtgggcatggaagatggggagcgaccccgaaggaggcgacatgggagggctcagcagcaggataaaccgcctcgtttccggaggctgaagcaggaacgggagaatgccgcaagggggtctgagggcaagccctccctaacccttccagcctccgctcctggacctgaggaggccctcacaacagtcacagtggccccagcacctcgccgggcagctgccaagtctcctgatctgtcaaaccagaactcagaccaagccaatgaggaatgggagactgcatcagagagcagtgacttcaccagtgagcgccgaggggacaaagaggcacccccaccagtactgctgacacccaaggctgtgggaactcctgggggaggtggaggtggagccgtaccaggtatttcagccatgtcccgcggagatctgagccagagagccaaggatttgagtaaacggagcttctcaagtcagcggccaggcatggaacggcagaatcggcgccctggcccagggggcaaggctggcagcagtggcagcagcagtggaggaggcggtgggggtcctggaggaaggaccgggccaggacgaggcgacaagaggagctggccctctcccaagaaccgaagtcgtcctccagaggagcgtcccccggggcttcccctgcctcccccacctcccagcagttctgctgtcttccgcctggaccaagttatccacagcaaccctgctggcatccaacaggctctggcccagcttagtagccgtcaagggagtgtaactgcaccagggggtcatccaaggcacaagcctgggcttccccaagcccctcagggcccctctcctaggcccccaacccgatacgagccccagagggtcaacagcggcctcagttctgacccccactttgaggagccggggccaatggtgagaggggtgggtgggactcctcgggactctgccggggttagtccctttccccctaaacgtcgggagcggcctcccagaaaaccagagctgctacaggaggaatctttgccacctcctcatagctctggattcttgggctctaagcctgagggcccaggccctcaggcagagtccagagatacaggcacagaggccctgacccctcacatctggaaccgtttacatactgccactagccgaaagagttaccggcccagctccatggagccttggatggagcccctgagtccttttgaggatgtggctggcacagaaatgagtcagtctgacagtggggtggacctgagtggggattctcaggtgtcatcaggtccctgcagccagcgaagttcccctgatggaggactcaagggggcagcagagggaccccccaagaggcctggaggctcctcacccctgaatgctgttccttgtgagggtccacctggctctgaacctcctaggagaccaccacctgccccccacgatggggacagaaaggagctgccccgggagcagcctctgccccctggccccattggcacagaacgatcacagcgtacagaccgaggcacagagcctggccccattcggccatcccatcgacctggtcccccagtccagtttggcactagtgacaaggactcagacttacgcctagtggtaggagacagcttgaaagcagagaaggagctaacagcatcagtcactgaggccattcctgtatcacgagactgggagctgcttcccagtgctgctgcctctgctgagccacaatccaagaacctggattctgggcactgtgtcccggagcccagctcctcaggccagcgcctgtatcctgaggttttctatggcagtgctgggccttccagttctcagatctctgggggagccatggactctcaattacatccaaacagtggaggcttccgccctgggacaccctcactgcacccttacagatcacagcccctatacctaccccccggcccagcccctccctcagcactgctctctgggttagctctcaagggccagtttctggatttctccacaatgcaagctacagagctggggaagttgccggctggaggagttctctaccctccaccttccttcctctactctccggctttctgccccagtcctttgcctgacacatcgttgcttcaggtacgccaggatctgccatccccttcggatttttattctactcctctgcagcctggtggccaaagtggctttctcccttcaggggctcctgcccagcagatgcttctacccatggtagactcacagctgcctgtggtgaactttggctccctgccgccagcaccacctcctgccccacctcccctttctctgttacctgtgggccctgctctgcagccccccagcctggctgtgcggcccccacctgctcctgctactcgggtgctgccttcacctgccaggcccttccccgctagcttggggcgagcagagctgcatccagtggaactaaagccgttccaggattatcaaaaactgagcagcaaccttgggggacctggatcatcacggactcccccaactggaaggtccttctctggcctcaattcccgtctcaaggccacgccttccacctacagtggagtcttccgcacccagcgcgtcgacctttaccagcaggcctccccaccagatgccctgcgctggatacctaagccttgggagcggacagggccgccacctcgagaagggccctcccgacgggcagaggagcctgggtcccgaggggacaaggagcctgggttgcccccaccccgctgagggagttcctcttgccccctacccccggggcttgtatatagattataaatatataagggggaaaggggtgggcggggaggggttctggggctggggcctcacttcccctcctcccccttcccctggtcccctgtccctggggctgtttgttaaaaaagagtaataaaaggatttaaaaaaaaaaacttcta

SEQ ID NO: 14363 - protein, 2157 aa, Homo sapiens; identical to SEQ ID NO: 14361

SEQ ID NO: 14364 - DNA, 447 bp, Homo sapiens
ttcctgcctcagcctccagagtagcgggactacaggcacacgccaacacacccagctaattttttgtgtgtttttagtagagatggggtttcacatgttggccaggatggtctcgatctcttgacctcgtgatccgcccgcctcagcctcccagagtgctgggattacaggcgtgagccaccgcgcccagccagagtcttccacttttatagcatgtcctcaggaaatgtcttctgtctcctgttctgcatccccatcctaataggtggaagggcatcaagcctactgtcacgattctctcgagaggaatttccgaccctgcaggcggctggcgaccaggacaaggctgccaaggaaagggagtctgccgaacagtcgtctgggcccggaccaagcctccgcccccaaaattctacaacttggagggacggaggtgggcgtggccct

SEQ ID NO: 14365 - protein, 77 aa, Homo sapiens
MSSGNVFCLLFCIPILIGGRASSLLSRFSREEFPTLQAAGDQDKAAKERESAEQSSGPGPSLRPQNSTTWRDGGGRG

SEQ ID NO: 14366 - DNA, 718 bp, Homo sapiens
ctgtccctctgagcagctactgttggacccttttacagatgtatcccccatatctcccgttccctccgccctatggaccccaggggccttaccgataccccactcctgatgggcccaggtgagcaatccaggtctgggtttgtggctgggggcaggggaagcttattgggggaggagatggttttctagccaggaggctcagtctaggatcagtctcgcatgtggttatacaacatgccatatttcattttcttttttgtgtacagccgttttccccgtgtggcgggcccccgaggctcagggccaccaatgcgcttagtagagcctgtgggtcgtccctctattctcaaagaggataatctcaaagagtttgatcagttggatcaggagaatgatgatggttgggcaggggcccatgaagaggttgactacactgaaaagctcaagttcagcgatgaggaagatgggcgagactctgatgaggagggtgctgagggccacagggattcccaatcagcttctggtgaggaacggccccctgaagcagatggcaaaaagggcaactcccccaacagcgaaccgcccactcctaagacggcctgggcagaaacctctcggcctccagagacagagccgggacctcctgccccaaagcctcccctacccccacctcaccggggccccgccgggaactggggcccccctggggactacccag

SEQ ID NO: 14367 - protein, 165 aa, Homo sapiens
MWLYNMPYFIFFFVYSRFPRVAGPRGSGPPMRLVEPVGRPSILKEDNLKEFDQLDQENDDGWAGAHEEVDYTEKLKFSDEEDGRDSDEEGAEGHRDSQSASGEERPPEADGKKGNSPNSEPPTPKTAWAETSRPPETEPGPPAPKPPLPPPHRGPAGNWGPPGDY

SEQ ID NO: 14368 - DNA, 1013 bp, Homo sapiens
aggagcgagactcctccagtacctcccccaccaccctatctggccagttatccaggctttcctgagaatggagcccctgggcccccaatctctcgctttcctctggaggaaccagggccccgtccactcccctggcccccaggcagtgatgaagtggccaagatacaaactccaccacccaagaaggagccccctaaggaggagactgcacagctgacggggccagaagcaggccgaaagcctgcccgcggagtcgggagtggaggccagggccccccaccaccacgcagagagagtcgcacagagacccgctggggccctcgtccagggagcagtcgtcgtggaatccctccagaggagccaggggccccaccccgccgggctgggcctataaagaaacctccaccacctacaaaagtagaagagctgcctcccaagcccctcgaacagggggatgaaacccccaaacccccaaagccagacccactcaagataaccaaggggaagctagggggccccaaggagaccccacccaatggaaatctttcccctgccccaaggcttcggagggactattcgtatgaaagagtgggtcctacctcttgccggggtcggggccgaggcgagtattttgccagagggaggggttttcgggggacctatgggggacgagggcggggagcccgaagccgggaattccgcagttaccgagagtttcgaggagatgatgggcgtggaggtgggacagggggaccaaaccaccctcctgctccccgaggccgcactgccagcgagacacggagcgagggttcagagtatgaggaaatccccaagcggcgccggcagcggggctcagaaacaggcagcgagacccatgagagtgatctggctccttcagacaaggaggctcccacacccaaggagggaacactcacccaggtccctctcgctcccccttcccctggtcccctgtccctggggctgtttgttaaaaaagagtaataaaaggattt

SEQ ID NO: 14369 - protein, 158 aa, Homo sapiens
MEIFPLPQGFGGTIRMKEWVLPLAGVGAEASILPEGGVFGGPMGDEGGEPEAGNSAVTESFEEMMGVEVGQGDQTTLLLPEAALPARHGARVQSMRKSPSGAGSGAQKQAARPMRVIWLLQTRRLPHPRREHSPRSLSLPLPLVPCPWGCLLKKSNKR

SEQ ID NO: 14370 - DNA, 645 bp, Homo sapiens
cagttatccaggctttcctgagaatggagcccctgggcccccaatctctcgctttcctctggaggaaccagggccccgtccactcccctggcccccaggcagtgatgaagtggccaagatacaaactccaccacccaagaaggagccccctaaggaggagactgcacagctgacggggccagaagcaggccgaaagcctgcccgcggagtcgggagtggaggccagggccccccaccaccacgcagagaggtcaacagcggcctcagttctgacccccactttgaggagccggggccaatggtgagaggggtgggtgggactcctcgggactctgccggggttagtccctttccccctaaacgtcgggagcggcctcccagaaaaccagagctgctacaggaggaatctttgccacctcctcatagctctggattcttgggctctaagcctgagggcccaggccctcaggcagagtccagagatacaggcacagaggccctgacccctcacatctggaaccgtttacatactggtgactctcaagggccagtttctggatttctccacaatgcaagctacagagctggggaagttgccggctggaggagttctctaccctccaccttccttcctctactctccgg

SEQ ID NO: 14371 - protein, 114 aa, Homo sapiens
MVRGVGGTPRDSAGVSPFPPKRRERPPRKPELLQEESLPPPHSSGFLGSKPEGPGPQAESRDTGTEALTPHIWNRLHTGDSQGPVSGFLHNASYRAGEVAGWRSSLPSTFLPLL

SEQ ID NO: 14372 - DNA, 1998 bp, Homo sapiens
aaagaaacctccaccacctacaaaagtagaagagctgcctcccaagcccctcgaacagggggatgaaacccccaaacccccaaagccagacccactcaagataaccaaggggaagctagggggccccaaggagaccccacccaatggaaatctttcccctgccccaaggcttcggagggactattcgtatgaaagagtgggtcctacctcttgccggggtcggggccgaggcgagtattttgccagagggaggggttttcgggggacctatgggggacgagggcggggagcccgaagccgggaattccgcagttaccgagagtttcgaggagatgatgggcgtggaggtgggacagggggaccaaaccaccctcctgctccccgaggccgcactgccagcgagacacggagcgagggttcagagtatgaggaaatccccaagcggcgccggcagcggggctcagaaacaggcagcgagacccatgagagtgatctggctccttcagacaaggaggctcccacacccaaggagggaacactcacccaggtccctctcgctcccccaccaccaggagccccaccttcaccagccccagcccgcttcactgcccggggtgggcgagtcttcactcccagaggggtgccatctcgccggggccgaggaggagggaggccccctcctcaagtttgcccaggctggagccctccagccaagtctctggctcccaagaaacctcccacaggccctttgccaccaagtaaggagcctttgaaagagaagttgatcccagggcctctgtcccctgtggcgcgcggaggcagcaatggaggtagcaatgtgggcatggaagatggggagcgaccccgaaggaggcgacatgggagggctcagcagcaggataaaccgcctcgtttccggaggctgaagcaggaacgggagaatgccgcaagggggtctgagggcaagccctccctaacccttccagcctccgctcctggacctgaggaggccctcacaacagtcacagtggccccagcacctcgccgggcagctgccaagtctcctgatctgtcaaaccagaactcagaccaagccaatgaggaatgggagactgcatcagagagcagtgacttcaccagtgagcgccgaggggacaaagaggcacccccaccagtactgctgacacccaaggctgtgggaactcctgggggaggtggaggtggagccgtaccaggtatttcagccatgtcccgcggagatctgagccagagagccaaggatttgagtaaacggagcttctcaagtcagcggccaggcatggaacggcagaatcggcgccctggcccagggggcaaggctggcagcagtggcagcagcagtggaggaggcggtgggggtcctggaggaaggaccgggccaggacgaggcgacaagaggagctggccctctcccaagaaccgaagtcgtcctccagaggagcgtcccccggggcttcccctgcctcccccacctcccagcagttctgctgtcttccgcctggaccaagttatccacagcaaccctgctggcatccaacaggctctggcccagcttagtagccgtcaagggagtgtaactgcaccagggggtcatccaaggcacaagcctgggcttccccaagcccctcagggcccctctcctaggcccccaacccgatacgagccccagagggtcaacagcggcctcagttctgacccccactttgaggagccggggccaatggtgagaggggtgggtgggactcctcgggactctgccggggttagtccctttccccctaaacgtcgggagcggcctcccagaaaaccagagctgctacaggaggaatctttgccacctcctcatagctctggattcttgggctctaagcctgagggcccaggccctcaggcagagtccagagatacaggcacagaggccctgacccctcacatctggaaccgtttacatactggtga

SEQ ID NO: 14373 - protein, 383 aa, Homo sapiens
MEDGERPRRRRHGRAQQQDKPPRFRRLKQERENAARGSEGKPSLTLPASAPGPEEALTTVTVAPAPRRAAAKSPDLSNQNSDQANEEWETASESSDFTSERRGDKEAPPPVLLTPKAVGTPGGGGGGAVPGISAMSRGDLSQRAKDLSKRSFSSQRPGMERQNRRPGPGGKAGSSGSSSGGGGGGPGGRTGPGRGDKRSWPSPKNRSRPPEERPPGLPLPPPPPSSSAVFRLDQVIHSNPAGIQQALAQLSSRQGSVTAPGGHPRHKPGLPQAPQGPSPRPPTRYEPQRVNSGLSSDPHFEEPGPMVRGVGGTPRDSAGVSPFPPKRRERPPRKPELLQEESLPPPHSSGFLGSKPEGPGPQAESRDTGTEALTPHIWNRLHT

SEQ ID NO: 14374 - DNA, 2059 bp, Homo sapiens
aaagaaacctccaccacctacaaaagtagaagagctgcctcccaagcccctcgaacagggggatgaaacccccaaacccccaaagccagacccactcaagataaccaaggggaagctagggggccccaaggagaccccacccaatggaaatctttcccctgccccaaggcttcggagggactattcgtatgaaagagtgggtcctacctcttgccggggtcggggccgaggcgagtattttgccagagggaggggttttcgggggacctatgggggacgagggcggggagcccgaagccgggaattccgcagttaccgagagtttcgaggagatgatgggcgtggaggtgggacagggggaccaaaccaccctcctgctccccgaggccgcactgccagcgagacacggagcgagggttcagagtatgaggaaatccccaagcggcgccggcagcggggctcagaaacaggcagcgagacccatgagagtgatctggctccttcagacaaggaggctcccacacccaaggagggaacactcacccaggtccctctcgctcccccaccaccaggagccccaccttcaccagccccagcccgcttcactgcccggggtgggcgagtcttcactcccagaggggtgccatctcgccggggccgaggaggagggaggccccctcctcaagtttgcccaggctggagccctccagccaagtctctggctcccaagaaacctcccacaggccctttgccaccaagtaaggagcctttgaaagagaagttgatcccagggcctctgtcccctgtggcgcgcggaggcagcaatggaggtagcaatgtgggcatggaagatggggagcgaccccgaaggaggcgacatgggagggctcagcagcaggataaaccgcctcgtttccggaggctgaagcaggaacgggagaatgccgcaagggggtctgagggcaagccctccctaacccttccagcctccgctcctggacctgaggaggccctcacaacagtcacagtggccccagcacctcgccgggcagctgccaagtctcctgatctgtcaaaccagaactcagaccaagccaatgaggaatgggagactgcatcagagagcagtgacttcaccagtgagcgccgaggggacaaagaggcacccccaccagtactgctgacacccaaggctgtgggaactcctgggggaggtggaggtggagccgtaccaggtatttcagccatgtcccgcggagatctgagccagagagccaaggatttgagtaaacggagcttctcaagtcagcggccaggcatggaacggcagaatcggcgccctggcccagggggcaaggctggcagcagtggcagcagcagtggaggaggcggtgggggtcctggaggaaggaccgggccaggacgaggcgacaagaggagctggccctctcccaagaaccgaagtcgtcctccagaggagcgtcccccggggcttcccctgcctcccccacctcccagcagttctgctgtcttccgcctggaccaagttatccacagcaaccctgctggcatccaacaggctctggcccagcttagtagccgtcaagggagtgtaactgcaccagggggtcatccaaggcacaagcctgggcttccccaagcccctcagggcccctctcctaggcccccaacccgatacgagccccagagggtcaacagcggcctcagttctgacccccactttgaggagccggggccaatggtgagaggggtgggtgggactcctcgggactctgccggggttagtccctttccccctaaacgtcgggagcggcctcccagaaaaccagagctgctacaggaggaatctttgccacctcctcatagctctggattcttgggctctaagcctgagggcccaggccctcaggcagagtccagagatacaggcacagaggccctgacccctcacgcctggaggctcctcacccctgaatgctgttccttgtgagggtccacctggctctgaacctcctaggagaccaccacctgcccccca

SEQ ID NO: 14375 - protein, 388 aa, Homo sapiens
MEDGERPRRRRHGRAQQQDKPPRFRRLKQERENAARGSEGKPSLTLPASAPGPEEALTTVTVAPAPRRAAAKSPDLSNQNSDQANEEWETASESSDFTSERRGDKEAPPPVLLTPKAVGTPGGGGGGAVPGISAMSRGDLSQRAKDLSKRSFSSQRPGMERQNRRPGPGGKAGSSGSSSGGGGGGPGGRTGPGRGDKRSWPSPKNRSRPPEERPPGLPLPPPPPSSSAVFRLDQVIHSNPAGIQQALAQLSSRQGSVTAPGGHPRHKPGLPQAPQGPSPRPPTRYEPQRVNSGLSSDPHFEEPGPMVRGVGGTPRDSAGVSPFPPKRRERPPRKPELLQEESLPPPHSSGFLGSKPEGPGPQAESRDTGTEALTPHAWRLLTPECCSL

SEQ ID NO: 14376 - DNA, 611 bp, Homo sapiens
aagcagaagttgggaaacataacttgtgggaaaaagtaacgatttagtggatactggagctaatgctctgttttctccagtcgtcctccagaggagcgtcccccggggcttcccctgcctcccccacctcccagcagttctgctgtcttccgcctggaccaagttatccacagcaaccctgctggcatccaacaggctctggcccagcttagtagccgtcaagggagtgtaactgcaccagggggtcatccaaggcacaagcctgggcttccccaagcccctcagggcccctctcctaggcccccaacccgatacgagccccagagggtcaacagcggcctcagttctgacccccactttgaggagccggggccaatggtgagaggggtgggtgggactcctcgggactctgccggggttagtccctttccccctaaacgtcgggagcggcctcccagaaaaccagagctgctacaggaggaatctttgccacctcctcatagctctggattcttgggctctaagcctgagggcccaggccctcaggcagagtccagagatacaggcacagaggccctgacccctcacatctggaaccgtttacatactgg

SEQ ID NO: 14377 - protein, 77 aa, Homo sapiens
MVRGVGGTPRDSAGVSPFPPKRRERPPRKPELLQEESLPPPHSSGFLGSKPEGPGPQAESRDTGTEALTPHIWNRLH

SEQ ID NO: 14378 - DNA, 989 bp, Homo sapiens
aaagtggctttctcccttcaggggctcctgcccagcaggtatattgtatcttcacacttccccttcatttgatttctctgtccagttgctggctttgattttccctggttttctgacattcctccctgcccccaacatgcacacccaaatttcttgttacagatgcttctacccatggtagactcacagctgcctgtggtgaactttggctccctgccgccagcaccacctcctgccccacctcccctttctctgttacctgtgggccctgctctgcagccccccagcctggctgtgcggcccccacctgctcctgctactcgggtgctgccttcacctgccaggcccttccccgctagcttggggcgagcagaggtaaggtacaggaactgaggggctagggagcgccaagacttgggagtagggattctgtatttcaaggtaggcagctcatgatttttttcccctcagctgcatccagtggaactaaagccgttccaggattatcaaaaactgagcagcaaccttgggggacctggatcatcacggactcccccaactggaaggtccttctctggcctcaattcccgtctcaaggccacgccttccacctacagtggagtcttccgcacccagcgcgtcgacctttaccagcaggcctccccaccagatgccctgcgctggatacctaagccttgggagcggacagggccgccacctcgagaagggccctcccgacgggcagaggagcctgggtcccgaggggacaaggagcctgggttgcccccaccccgctgagggagttcctcttgccccctacccccggggcttgtatatagattataaatatataagggggaaaggggtgggcggggaggggttctggggctggggcctcacttcccctcctcccccttcccctggtcccctgtccctggggctgtttgttaaaaaagagtaataaaaggatttaaaaaaaaaaacttcta

SEQ ID NO: 14379 - protein, 79 aa, Homo sapiens
MIFFPSAASSGTKAVPGLSKTEQQPWGTWIITDSPNWKVLLWPQFPSQGHAFHLQWSLPHPARRPLPAGLPTRCPALDT

SEQ ID NO: 14380 - DNA, 1110 bp, Homo sapiens
aaagtggctttctcccttcaggggctcctgcccagcaggtatattgtatcttcacacttccccttcatttgatttctctgtccagttgctggctttgattttccctggttttctgacattcctccctgcccccaacatgcacacccaaatttcttgttacagatgcttctacccatggtagactcacagctgcctgtggtgaactttggctccctgccgccagcaccacctcctgccccacctcccctttctctgttacctgtgggccctgctctgcagccccccagcctggctgtgcggcccccacctgctcctgctactcgggtgctgccttcacctgccaggcccttccccgctagcttggggcgagcagaggtaaggtacaggaactgaggggctagggagcgccaagacttgggagtagggattctgtatttcaaggtaggcagctcatgatttttttcccctcagctgcatccagtggaactaaagccgttccaggattatcaaaaactgagcagcaaccttgggggacctggatcatcacggactcccccaactggaaggtccttctctggcctcaattcccgtctcaaggccacgccttccacctacagtggagtcttccgcacccagcgcgtcgacctttaccagcaggtgaaggagaaacccttgtggccccaactctaaattcgagttgccacctgatttcctgtccttccgtctcatcgctgacctctcactgtgactcactgtttaacacatgcctgtcccctaggcctccccaccagatgccctgcgctggatacctaagccttgggagcggacagggccgccacctcgagaagggccctcccgacgggcagaggagcctgggtcccgaggggacaaggagcctgggttgcccccaccccgctgagggagttcctcttgccccctacccccggggcttgtatatagattataaatatataagggggaaaggggtgggcggggaggggttctggggctggggcctcacttcccctcctcccccttcccctggtcccctgtccctggggctgtttgttaaaaaagagtaataaaaggatttaaaaaaaaaaacttcta

SEQ ID NO: 14381 - protein, 209 aa, Homo sapiens
MIFFPSAASSGTKAVPGLSKTEQQPWGTWIITDSPNWKVLLWPQFPSQGHAFHLQWSLPHPARRPLPAGEGETLVAPTLNSSCHLISCPSVSSLTSHCDSLFNTCLSPRPPHQMPCAGYLSLGSGQGRHLEKGPPDGQRSLGPEGTRSLGCPHPAEGVPLAPYPRGLYIDYKYIRGKGVGGEGFWGWGLTSPPPPSPGPLSLGLFVKKE

SEQ ID NO: 14382 - DNA, 3644 bp, Homo sapiens
ggggaagtcgggggcggagccgcggggtggtgggtgtgtgtgtgtgtgtgtgtgtgtgtgtgtgtgtgtgtgtttggctgtgggttagttgtgccgttctgctggaacaccgtgggaaggcagtagacgcgggcagtcagctagcagagacctgtcggccatggagcctaatgatagtaccagtaccgctgtggaggagcctgacagcttggaggtgttggtgaagaccttggactctcaaactcgtacctttattgtgggggcccagatgaatgtaaaagagtttaaggagcacattgctgcctctgtcagcatcccatctgaaaaacaacggctcatttaccagggacgagttctgcaagatgataagaagcttcaggaatacaatgttgggggaaaggttatccacctggtggaacgggctcctcctcagactcacctcccttctggggcatcttctgggacggggtctgcctcagccactcatggtgggggatccccccctggtactcgggggcctggggcctctgttcatgaccggaatgccaacagctatgtcatggttggaaccttcaatcttcctagtgacggctctgctgtggatgttcacatcaacatggaacaggccccgattcagagtgagccccgggtacggctggtgatggctcagcacatgatcagggatatacagaccttactatcccggatggagtgtcgaggagggccccaaccgcagcacagtcagccgcccccgcagccaccggctgtgaccccggagccagtagccttgagctctcaaacatcagaaccagttgaaagtgaagcacctccccgggagcccatggaggcagaagaagtggaggagcgtgccccagcccagaacccggagctcactcctggcccagccccagcgggcccaacacctgccccggaaacaaatgcacccaaccatccttcccctgcggagtatgtcgaggtgctccaggagctacagcggctggagagtcgcctccagcccttcttgcagcgctactacgaggttctgggtgctgctgccaccacggactacaataacaatcacgagggccgggaggaggatcagcggttgatcaacttggtaggggagagcctgcgactgctgggcaacacctttgttgcactgtctgacctgcgctgcaatctggcctgcacgcccccacgacacctgcatgtggtccggcctatgtctcactacaccacccccatggtgctccagcaggcagccattcccatacagatcaatgtgggaaccactgtgaccatgacaggaaatgggactcggccccccccaactcccaatgcagaggcacctccccctggtcctgggcaggcctcatccgtggctccgtcttctaccaatgtcgagtcctcagctgagggggctcccccgccaggtccagctcccccgccagccaccagccacccgagggtcatccggatttcccaccagagtgtggaacccgtggtcatgatgcacatgaacattcaagattctggcacacagcctggtggtgttccgagtgctcccactggccccctgggaccccctggtcatggccaaaccctgggacagcaggtgccaggcttcccaacagctccaacccgggtggtgattgcccggcccactcctccacaggctcggccttcccatcctggagggcccccagtctctgggacactgcagggcgccggtctgggtaccaatgcctcgttggcccagatggtgagcggccttgtggggcagcttcttatgcagccagtccttgtggctcaggggaccccaggtatggctccaccgccagcccctgccactgcttctgccagtgctggcaccaccaacacagctaccacagctggccccgctcctggggggcctgcccagcctccacccacccctcaaccctccatggctgatcttcagttctctcagcttctggggaacctgctagggcctgcagggccaggggctggagggtctggtgtggcttctcccaccatcactgtggcgatgcctggtgtccctgcctttctccaaggcatgactgacttcttgcaggcaacacagacagcccctccaccacccccacctcctccacccccaccacctgccccagagcagcagaccatgcccccaccaggctccccttctggtggcgcagggagtcctggaggcctgggtcttgagagcctgtcaccggagttttttacctcagtggtgcagggtgtgctcagctccctgctgggctccctgggggctcgggctggcagcagtgaaagtattgctgccttcatacaacgcctcagtggatccagcaacatctttgagcctggagctgatggggcccttggattctttggggccttgctttctcttctgtgccagaacttctctatggtggacgtagtgatgcttctccatgggcatttccagccactacaacggctccagccccagctgcgatccttcttccaccagcactacctgggtggtcaggagcccacacccagtaacatccggatggcaacccacacattgatcacggggctagaagagtatgtgcgggagagtttttccttggtgcaggttcagccaggtgtggacatcatccggacaaacctggaatttctccaagagcagtttaatagcattgctgcgcatgtgctgcattgcacagatagtggatttggggcccggttgctggagttgtgtaaccaaggcctgtttgaatgcctggccctaaacctgcactgcttggggggacagcagatggagcttgctgctgttatcaatggccgaattcgtcgtatgtctcgtggggtgaatccctccttggtgagctggctgaccactatgatgggactgaggcttcaggtggtactggagcacatgcctgtaggccctgatgccattctcagatacgttcgcagggttggtgatcccccccagccacttcctgaggagccaatggaagttcagggagcagaaagagcttcccctgagcctcagcgggagaatgcttccccagcccctggaacaacagcagaagaggccatgtcccgaggtccacctcctgctcctgaggggggctcccgggatgaacaggatggagcttcagctgagacagaaccttgggcagctgcagtccccccagaatgggtccctattatccagcaggacattcagagccagcggaaggtgaaaccgcagccccctctgagtgatgcctacctcagtggtatgcctgccaagagacgcaagacgatgcagggtgagggcccccagctgcttctctcagaggctgtgagccgggcagctaaggcagccggagctcggcccctgacgagccccgagagcctgagccgggacctggaggcaccagaggttcaggagagctacaggcagcagctccggtctgatatacaaaaacgactgcaggaagaccccaactacagtccccagcgcttccccaatgcccagcgggcctttgctgatgatccttagctctttgctctatggcccttcctcatcaggggaccgtttcccccctcttccttcacagtatttaagaaataaaagtcggatttttctggctgctttctctcta

SEQ ID NO: 14383 - protein, 1126 aa, Homo sapiens; identical to SEQ ID NO: 1543

SEQ ID NO: 14384 - DNA, 3774 bp, Homo sapiens
tggggcgatgcttaagtgtccacgcatccgtagtgcgacgcacgcaggcgtagtacggtcccccgggcgacagcggtggcggctcctcggggtgctcggctccctcccacctaggccggccccggcccgactcgccctcagaaactcactgtttggggctgcggactttctcgtcgtgccccacaaaagtaaagcttggggacctggggggagccggaagtatcgcttcgagatccccaaatactatcggggaaacggaagtggccgtcggtggcagagacctgtcggccatggagcctaatgatagtaccagtaccgctgtggaggagcctgacagcttggaggtgttggtgaagaccttggactctcaaactcgtacctttattgtgggggcccagatgaatgtaaaagagtttaaggagcacattgctgcctctgtcagcatcccatctgaaaaacaacggctcatttaccagggacgagttctgcaagatgataagaagcttcaggaatacaatgttgggggaaaggttatccacctggtggaacgggctcctcctcagactcacctcccttctggggcatcttctgggacggggtctgcctcagccactcatggtgggggatccccccctggtactcgggggcctggggcctctgttcatgaccggaatgccaacagctatgtcatggttggaaccttcaatcttcctagtgacggctctgctgtggatgttcacatcaacatggaacaggccccgattcagagtgagccccgggtacggctggtgatggctcagcacatgatcagggatatacagaccttactatcccggatggagtgtcgaggagggccccaaccgcagcacagtcagccgcccccgcagccaccggctgtgaccccggagccagtagccttgagctctcaaacatcagaaccagttgaaagtgaagcacctccccgggagcccatggaggcagaagaagtggaggagcgtgccccagcccagaacccggagctcactcctggcccagccccagcgggcccaacacctgccccggaaacaaatgcacccaaccatccttcccctgcggagtatgtcgaggtgctccaggagctacagcggctggagagtcgcctccagcccttcttgcagcgctactacgaggttctgggtgctgctgccaccacggactacaataacaatcacgagggccgggaggaggatcagcggttgatcaacttggtaggggagagcctgcgactgctgggcaacacctttgttgcactgtctgacctgcgctgcaatctggcctgcacgcccccacgacacctgcatgtggtccggcctatgtctcactacaccacccccatggtgctccagcaggcagccattcccatacagatcaatgtgggaaccactgtgaccatgacaggaaatgggactcggccccccccaactcccaatgcagaggcacctccccctggtcctgggcaggcctcatccgtggctccgtcttctaccaatgtcgagtcctcagctgagggggctcccccgccaggtccagctcccccgccagccaccagccacccgagggtcatccggatttcccaccagagtgtggaacccgtggtcatgatgcacatgaacattcaagattctggcacacagcctggtggtgttccgagtgctcccactggccccctgggaccccctggtcatggccaaaccctgggacagcaggtgccaggcttcccaacagctccaacccgggtggtgattgcccggcccactcctccacaggctcggccttcccatcctggagggcccccagtctctgggacactgcagggcgccggtctgggtaccaatgcctcgttggcccagatggtgagcggccttgtggggcagcttcttatgcagccagtccttgtggctcaggggaccccaggtatggctccaccgccagcccctgccactgcttctgccagtgctggcaccaccaacacagctaccacagctggccccgctcctggggggcctgcccagcctccacccacccctcaaccctccatggctgatcttcagttctctcagcttctggggaacctgctagggcctgcagggccaggggctggagggtctggtgtggcttctcccaccatcactgtggcgatgcctggtgtccctgcctttctccaaggcatgactgacttcttgcaggcaacacagacagcccctccaccacccccacctcctccacccccaccacctgccccagagcagcagaccatgcccccaccaggctccccttctggtggcgcagggagtcctggaggcctgggtcttgagagcctgtcaccggagttttttacctcagtggtgcagggtgtgctcagctccctgctgggctccctgggggctcgggctggcagcagtgaaagtattgctgccttcatacaacgcctcagtggatccagcaacatctttgagcctggagctgatggggcccttggattctttggggccttgctttctcttctgtgccagaacttctctatggtggacgtagtgatgcttctccatgggcatttccagccactacaacggctccagccccagctgcgatccttcttccaccagcactacctgggtggtcaggagcccacacccagtaacatccggatggcaacccacacattgatcacggggctagaagagtatgtgcgggagagtttttccttggtgcaggttcagccaggtgtggacatcatccggacaaacctggaatttctccaagagcagtttaatagcattgctgcgcatgtgctgcattgcacagatagtggatttggggcccggttgctggagttgtgtaaccaaggcctgtttgaatgcctggccctaaacctgcactgcttggggggacagcagatggagcttgctgctgttatcaatggccgaattcgtcgtatgtctcgtggggtgaatccctccttggtgagctggctgaccactatgatgggactgaggcttcaggtggtactggagcacatgcctgtaggccctgatgccattctcagatacgttcgcagggttggtgatcccccccagccacttcctgaggagccaatggaagttcagggagcagaaagagcttcccctgagcctcagcgggagaatgcttccccagcccctggaacaacagcagaagaggccatgtcccgaggtccacctcctgctcctgaggggggctcccgggatgaacaggatggagcttcagctgagacagaaccttgggcagctgcagtccccccagaatgggtccctattatccagcaggacattcagagccagcggaaggtgaaaccgcagccccctctgagtgatgcctacctcagtggtatgcctgccaagagacgcaagacgatgcagggtgagggcccccagctgcttctctcagaggctgtgagccgggcagctaaggcagccggagctcggcccctgacgagccccgagagcctgagccgggacctggaggcaccagaggttcaggagagctacaggcagcagctccggtctgatatacaaaaacgactgcaggaagaccccaactacagtccccagcgcttccccaatgcccagcgggcctttgctgatgatccttagctctttgctctatggcccttcctcatcaggggaccgtttcccccctcttccttcacagtatttaagaaataaaagtcggatttttctggctgctttctctcta

SEQ ID NO: 14385 - protein, 1126 aa, Homo sapiens; identical to SEQ ID NO: 1543

SEQ ID NO: 14386 - DNA, 852 bp, Homo sapiens
ccgtcatgcctggaatcaaactatgtagagatggtgggagctcttgttattcagtctcccctcccctcgtttaatgaggaaactttttctgggattcagacttgctcttggttgttgcataaccatacaggacttgaccttagtctgtttgctagcagtcctgtattagttgctcagctgcctaatccccatgtgcttagatcccattttcctttaaggtgggtttcctcttgtggattacctagctctgaatcccggatggcttgaccccttctgcctttcgttttgaagagcacgttcaagcacattcactttagttttggctagtgccaaagagaattaggaaggcatttctgctgtaaaaaccacatcctggactcttaatttcccctctctccactagcatggagactcagtggagtggttgactcatggaaagggtgagccggatggtggcactggatctgacgttgatcctcttttccctcccaaccccctgtcccccagacgatgcagggtgagggcccccagctgcttctctcagaggctgtgagccgggcagctaaggcagccggagctcggcccctgacgagccccgagagcctgagccgggacctggaggcaccagaggttcaggagagctacaggcagcagctccggtctgatatacaaaaacgactgcaggaagaccccaactacagtccccagcgcttccccaatgcccagcgggcctttgctgatgatccttagctctttgctctatggcccttcctcatcaggggaccgtttcccccctcttccttcacagtatttaagaaataaaagtcggatttttctggctgctttctctct

SEQ ID NO: 14387 - protein, 79 aa, Homo sapiens
MQGEGPQLLLSEAVSRAAKAAGARPLTSPESLSRDLEAPEVQESYRQQLRSDIQKRLQEDPNYSPQRFPNAQRAFADDP

SEQ ID NO: 14388 - DNA, 495 bp, Homo sapiens
gcagaagaggccatgtcccgaggtccacctcctgctcctgaggggggctcccgggatgaacaggatggagcttcagctgagacagaaccttgggcagctgcagtccccccagtaagtgtcaggaagtaatccagtgggtcatggcagctgaaagtcaaggacattactattttctcttttcctccccaggaatgggtccctattatccagcaggacattcagagccagcggaaggtgaaaccgcagccccctctgagtgatgcctacctcagtggtatgcctgccaagagacgcaagctccggtctgatatacaaaaacgactgcaggaagaccccaactacagtccccagcgcttccccaatgcccagcgggcctttgctgatgatccttagctctttgctctatggcccttcctcatcaggggaccgtttcccccctcttccttcacagtatttaagaaataaaagtcggatttttctggctgctttctctct

SEQ ID NO: 14389 - protein, 77 aa, Homo sapiens
MPTSVVCLPRDASSGLIYKNDCRKTPTTVPSASPMPSGPLLMILSSLLYGPSSSGDRFPPLPSQYLRNKSRIFLAAF

SEQ ID NO: 14390 - DNA, 355 bp, Homo sapiens
gtcatccggatttcccaccagagtgtggaacccgtggtcatgatgcacatgaacattcaagattctggcacacagcctggtggtgttccgagtgctcccactggccccctgggaccccctggtcatggccaaaccctgggtaagagtgagggcatcagggcaggctgagctctgggtagagaaagggaagggctgagtgggtgggttgaaggggtccaggttcaaggttacatcagacccgccccccaggctccaccctcatccagctgccctccctgccccctgagttcatgcacgccgtcgcccaccagatcactcatcaggccatggtggcagctgttgcctccgcggccgc

SEQ ID NO: 14391 - protein, 42 aa, Homo sapiens
MMHMNIQDSGTQPGGVPSAPTGPLGPPGHGQTLGKSEGIRAG

SEQ ID NO: 14392 - DNA, 601 bp, Homo sapiens
acctcaatcttctagcgctcaagcgcgcgcacagacgtgaacgccgccagaggggggagggggtggggcgatgcttaagtgtccacgcatccgtagtgcgacgcacgcaggcgtagtacggtcccccgggcgacagcggtggcggctcctcggggtgctcggctccctcccacctaggccggccccggcccgactcgccctcagaaactcactgtttggggctgcggactttctcgtcgtgccccacaaaagtaaagcttggggacctggggggagccggaagtatcgcttcgagatccccaaatactatcggggaaacggaagtggccgtcggtggcagagacctgtcggccatggagcctaatgatagtaccagtaccgctgtggaggagcctgacagcttggaggtgttggtgaagaccttggactctcaaactcgtacctttattgtgggggcccagatgaatgtaaaagagtttaaggagcacattgctgcctctgtcagcatcccatctgaaaaacaacggctcatttaccagttgaaagtgaagcacctccccgggagcccatggaggcagaagaagtggaggagcgtgcccca

SEQ ID NO: 14393 - protein, 97 aa, Homo sapiens [sequence omitted]

SEQ ID NO: 14394 - DNA, 716 bp, Homo sapiens
ggtctcccccaaacctgccaccgacggccacttccgtttccccgatagtatttggggatctcgaagcgatacttccggctccccccaggtccccaagctttacttttgtggggcacgacgagaaagtccgcagccccaaacattcccagaggtccacttgggccagtggtactttatcgcaggggcagctcccaccaaggaggagttggcaacttttgaccctgtggacaacattgtcttcaatatggctgctggctctgccccgatgcagctccaccttcgtgctaccatccgcatgaaagatgggctctgtgtgccccggaaatggatctaccacctgactgaagggagcacagatctcagaactgaaggccgccctgacatgaagactgagctcttttccagctcatgcccaggtggaatcatgctgaatgagacaggccagggttaccagcgctttctcctctacaatcgctcaccacatcctcccgaaaagtgtgtggaggaattcaagtccctgacttcctgcctggactccaaagccttcttattgactcctaggaatcaagaggcctgtgagctgtccaataactgacctgtaacttcatctaagtccccagatgggtacaatgggagctgagttgttggagggagaagctggagacttccagctccagctcccactcaagataataaagataatttttcaatcctca

SEQ ID NO: 14395 - protein, 116 aa, Homo sapiens
MAAGSAPMQLHLRATIRMKDGLCVPRKWIYHLTEGSTDLRTEGRPDMKTELFSSSCPGGIMLNETGQGYQRFLLYNRSPHPPEKCVEEFKSLTSCLDSKAFLLTPRNQEACELSNN

SEQ ID NO: 14396 - DNA, 1049 bp, Homo sapiens
ccccaaacctgccaccgacggccacttccgtttccccgatagtatttggggatctcgaagcgatacttccggctccccccaggtccccaagctttacttttgtggggcacgacgagaaagtccgcagccccaaacattcccagaggtccacttgggccagtggtactttatcgcaggggcagctcccaccaaggaggagttggcaacttttgaccctgtggacaacattgtcttcaatatggctgctggctctgccccgatgcagctccaccttcgtgctaccatccgcatgaaagatgggctctgtgtgccccggaaatggatctaccacctgactgaagggagcacagatctcagaactgaaggccgccctgacatgaagactgagctcttttccagctcatgcccaggtggaatcatgctgaatgagacaggccagggttaccagcgctttctcctctacaatcgctcaccacatcctcccgaaaagtgtgtggaggaattcaagtccctgacttcctgcctggactccaaagccttcttattgactcctaggaatcaaggtaaggggttaaaatctcataaaacaggattaggactcaccaagtcttctggtgttacagggtgaaagaggctcgtgtgatgtcaccagagggatgtggctaagagctgtgatgtcacctgagggaggcaggatgggttctgggctactcaaaagagaggtttctgagtttgcactggataaagggggcagagggtcatacgtggagggaaaagagccttagagactcccctttgacacagggaatgaaagaacacgttctcccccaccccattactatcaactttgcttttctccctggacttcccttctgtccttctttttccctccccccatcacagaggcctgtgagctgtccaataactgacctgtaacttcatctaagtccccagatgggtacaatgggagctgagttgttggagggagaagctggagacttccagctccagctcccactcaagataataaagataatttttcaatcctc

SEQ ID NO: 14397 - protein, 129 aa, Homo sapiens
MAAGSAPMQLHLRATIRMKDGLCVPRKWIYHLTEGSTDLRTEGRPDMKTELFSSSCPGGIMLNETGQGYQRFLLYNRSPHPPEKCVEEFKSLTSCLDSKAFLLTPRNQGKGLKSHKTGLGLTKSSGVTG

SEQ ID NO: 14398 - DNA, 787 bp, Homo sapiens
gggtcgaacgcaagggagctgaaagcagagtggactgagcagccagtaggggagagagcagttaaggcacacagagcaccagctccctcctgcctgaagatgttccaccaaatttgggcagctctgctctacttctatggtattatccttaactccatctaccagtgccctgagcacagtcaactgacaactctgggcgtggatgggaaggagttcccagaggtccacttgggccagtggtactttatcgcaggggcagctcccaccaaggaggagttggcaacttttgaccctgtggacaacattgtcttcaatatggctgctggctctgccccgatgcagctccaccttcgtgctaccatccgcatgaaagatgggctctgtgtgccccggaaatggatctaccacctgactgaagggagcacagatctcagaactgaaggccgccctgacatgaagactgagctcttttccagctcatgcccaggtggaatcatgctgaatgagacaggccagggttaccagcgctttctcctctacaatcgctcaccacatcctcccgaaaagtgtgtggaggaattcaagtccctgacttcctgcctggactccaaagccttcttattgactcctaggaatcaagaggcctgtgagctgtccaataactgacctgtaacttcatctaagtccccagatgggtacaatgggagctgagttgttggagggagaagctggagacttccagctccagctcccactcaagataataaagataatttttcaatcctca

SEQ ID NO: 14399 - protein, 188 aa, Homo sapiens; identical to SEQ ID NO: 1547

SEQ ID NO: 14400 - DNA, 1544 bp, Homo sapiens
gccccgacgctgggcccgggagcggtccccgcgcacagcgcccggacgcgtaggtcccgaagtaggcccgcgctttgcttcgtaactggggatctctgaggacatcttagttctgaccttgtggaggccgcgtctctgctgcgtgttcgcgggccagtcgggccactttgtagaaatcatagccctctaaatcaagggacgaacgctgctggctggagtttgctggacactttcattccacctcctaacaaagagaattcctattccttgaggtcccttggggcagcagttaaagactacacgatccaggagcacctaggacctctgcagtaagagagtggttgggaaacccagggtgttccttggatctcaggatctgagccatcgagggaagagtggggctgctaggcaagtggattagggggtctggatagggccccacaggtgacagggagcctgcagggcggatctggtgatcatgggagccagagggagtggggacagtgcaggcagtattggcaggagggccagtgcagaagggctggtagctcaggcagtgtgggggaagcactgaagcctgtagtccccacttgggggctaggggtttgctcactcagcaataaataactgtgtcacatcaaatcctaaatataccactacaaagtgagagttactgccactctgttcttactgacaccgtccagctgggagtttaggtggtagaggatccagggggaatgttgaaatgggaggagtgggaatgacgtctggagacaaaccccagaatgagatgaggattgaaaaattatctttattatcttgagtgggagctggagctggaagtctccagcttctccctccaacaactcagctcccattgtacccatctggggacttagatgaagttacaggtcagttattggacagctcacaggcctctgtgatggggggagggaaaaagaaggacagaagggaagtccagggagaaaagcaaagttgatagtaatggggtgggggagaacgtgttctttcattccctgtgtcaaaggggagtctctaaggctcttttccctccacgtatgaccctctgccccctttatccagtgcaaactcagaaacctctcttttgagtagcccagaacccatcctgcctccctcaggtgacatcacagctcttagccacatccctctggtgacatcacacgagcctctttcaccctgtaacaccagaagacttggtgagtcctaatcctgttttatgagattttaaccccttaccttgattcctaggagtcaataagaaggctttggagtccaggcaggaagtcagggacttgaattcctccacacacttttcgggaggatgtggtgagcgatctggaagggcaaggtggggtcaggccagtcaaaacccctggaagcacctagctcttcctgggagggtgtcataggacccagagtgaggagttctcctgccctcccttgtttccctccaacccttcctgccttgtatccctactcactgtagaggagaaagcgctggt

SEQ ID NO: 14401 - protein, 31 aa, Homo sapiens
MGARGSGDSAGSIGRRASAEGLVAQAVWGKH

SEQ ID NO: 14402 - DNA, 2467 bp, Homo sapiens
tgcttccgggcttcgcggctcccggcggctccccaaggccgcggccccgacgctgggcccgggagcggtccccgcgcacagcgcccggacgcgtaggtcccgaagtaggcccgcgctttgcttcgtaactggggatctctgaggacatcttagttctgaccttgtggaggccgcgtctctgctgcgtgttcgcgggccagtcgggccactttgtagaaatcatagccctctaaatcaagggacgaacgctgctggctggagtttgctggacactttcattccacctcctaacaaagagaattcctattccttgaggtcccttggggcagcagttaaagactacacgatccaggagcacctaggacctggggccaccttcctgcccgctttattggatggagcactgcctccccagtttctgggacaccttggggtgtggccttggtgagtgaaacttggggtgctgcctgctgggaaggaaatccggaaacgcagagaggactctctggtggtgacccaggccttgtcagatctgagattcttggaatctcagattgtgggggtgtggatggtgaatgaatttgggtatgcccccctttaccccagaactgaagaggaagcaaactacttgccacacttgaggctgcatgactattcagagaagggaggagccacttctgaattcagagtaggactgcatcaccaggcaaatacctgttctgagccagaaagactctggcttctgaggagatcctgagagtctgagtagtgccaggaagcagcctcagaatttgggggcccattacacaccccagccatgttcctgcgacggcttggtggctggctacctcgcccttggggccgccggaaaccaatgaggcctgacccgccttacccagaacccagacgggtggacagctcctcggagaattcaggaagtgactgggatagtgccccagaaaccatggaagatgtggggcatcccaagactaaggactcgggggcattgagggtttctggggctgcttccgaaccaagcaaggaggagccccaagttgagcagctagggagcaaaagaatggattccctcaagtgggaccagcctatctctagcactcaagagtctgggagactggaggctggaggggccagtcccaaactcagatgggatcatgtggattcaggtggcaccaggagaccaggggtgtcccctgaagggggactgagcgtccctgggccaggagccccattggagaaacctggtaggcgtgagaagctgttgggctggctgcggggggaaccaggagctccctcccggtacttggggggcccagaagagtgtctgcagatctccaccaacctgaccctgcatcttctggagctgctggcctctgccctgctggccctgtgctcacgaccactgcgggcagccttggacacactgggcctgcgtggaccgctgggcctctggctacatggcctactgtccttcctggctgccctgcatgggctccatgctgttctgagcctacttactgcccaccctttgcacttcgcctgcctctttggtctcctgcaggccttggtgctggctgtcagcctccgggagcccaatggggatgaggcggccactgactgggagagtgaggggttggagagggaaggtgaggagcagaggggagacccgggaaaggggctgtgaccgtggggtgggggcaaagggtgaagagagtgtgggctttaggagaaaagtgtgaggcatgacccaaattgtaagcatagggacctcagggatggggaagaaacccgagtacgagggtgcagggccccccttcatacacaggagagaacagaactatttagggtgtttgtgtttatggacagtgagggcactgctcttggattcaccagctgttatttttgcttttacttttctcccaccttcagttttttttttttttccacctccactttttaaaagcaaaaaaaaaaaaaagtatgatggtggtgaataaagaccaaagggtcctctctacctttgaaaactctcctggggtggaggagaccagggcaggatagacagacctctgcagtaagagagtggttgggaaacccagggtgttccttggatctcaggatctgagccatcgagggaagagtggggctgctaggcaagtggattagggggtctggatagggccccacaggtgacagggagcctgcagggcggatctggtgatcatgggagccagagggagtggggacagtgcaggcagtattggcaggagggccagtgcagaagggctggtagctcaggcagtgtgggggaagcactgaagcctgtagtccccacttgggggctaggggtttgctcactcagcaataaataactgtgtcacatcaaatcctaaatataccactacaaagtgagagttactgccactctgttcttactgacaccgtccag

SEQ ID NO: 14403 - protein, 294 aa, Homo sapiens; identical to SEQ ID NO: 1549

SEQ ID NO: 14404 - DNA, 3034 bp, Homo sapiens
cacatcaaagtccggagaccccatgtgccgctcccagcgacaagggactcggagcagcgacgacttcagactcaccggctggacggggaccaggactggggtggggtagggaagttgctacttccagggaacggcggcgaccgctacagcgcaggccgcggacccgaccgcggcaggcgaagtggggtggggggagtggaaattagggagggtggggaagagggcaacacgcaagcgccaagggtcaggtgccgcggtggatgccgggacacggagtccccggtagagaaagaaactggctaaatgagagaaagcgaactaccaatcccaggatgacccgcgcacgacctggctgtcacgaaggcccggaggagggcgcttgcgggcggggcacaacgagaagccaccggaagcggaagccagaatggcgccattttgcggtacggaagctacacagcaacacgtataggagactctccccgagatcttctagggagtgacccatctatttttgtttgggaagaggaaactccgaaatgggatcgcggaagacttaaagggccaggctgatttttttttcctactgcaggtctctgaggctgtggttgctacagggtcaccacgagcttggcttacttgtctcatccttcccttgcctggtatcattttctcagttctcccaaaagccatgtcccggcccttgctcatcaccttcaccccagccactgaccccagcgacctctggaaggatgggcagcagcagccacagcccgagaagccagagtccaccctggatggggctgcagcccgagctttctatgaggccctgattggggatgagagcagcgctcctgactcccagagatctcagactgaacctgccagagaaagaaagagaaagaaaagaagaataatgaaggcaccagcagcagaagcagtggcagaaggagcatcaggaagacatggacaagggagatcccttgaggctgaggataagatgactcaccggatactgagggcagcccaggagggggacctgccagaacttaggagactgctggaaccgcatgaggcaggaggagctggggggaatatcaacgcccgggatgccttctggtggaccccactgatgtgtgctgctcgagcgggccagggggcagctgtgagctatctcctgggccgtggggctgcctgggtgggggtctgtgagctgagtggcagggatgcggctcagctcgctgaagaagctggcttccctgaggtagcccgcatggtcagggagagccatggagagacaaggagcccggaaaaccggtctcctactccctccctccagtactgcgagaactgtgacacccacttccaagattccaaccaccgcacatccactgctcacctgctgtcactgtcgcagggtcctcagcctcccaaccttccacttggggtgcccatctccagcccgggcttcaaactgctgctgagggggggctgggagccaggaatggggctgggaccccggggtgagggccgtgccaatcccatccccactgtcctcaagagggaccaggaaggactaggctacagatcagcaccccagccccgagtgacacatttcccagcttgggatacccgagctgtggctgggagggagagaccccctcgggtggccacactgagctggagggaggagagaaggagggaggagaaagacagggcttgggagcgggatctaaggacttacatgaacctcgagttctgactttggtaaagtctgaccctagtctgctgctgaagtctgaacttgggcctctgacctgggccctttgacttccccttcctgggatctgctcagatgcagatcctgaagtttttggtcaataggctctgtcttcgtgagagacgggctgagagtcagaaataaatcaaccatttgtggtttattcacttttctggaagctattttgaggaagccaaacagaagcctgggagccacatgcaagtcccacctgagtcagaaggggcagcctctccaggtggcatgataaggtcacctccctgccaatctgggttcactttcaggtcccagaccctcctgggagtcccccacctattctttcaacccccctggaccaagaattgcccagcttcgtgcaagtctcacttcccccaggaggagttccctgactacagccaattcactgatttcacaaacataagtccatatactatgtgccaagaatacaggtaaagacattcccaaccctcaaagagttcacagctggagagggaaagtgccatgttatcaatttttttcttttttttttgagatgcagtttcgctctcattgcccaggctggagtgcaatggcatgatctcggctcaccacaacctctgccccccgagttcaagggattctcctgcctcagcctccccagtagctgggattacaggcatgccccaccacgcccagctaattttgtatttttagtagagacggggtttctccatgttggccaagctggtcttgaactcccgacctcaggtgatccgccggcctcggcttcccaaagtgctggggttgcaggcatgagccaccactcccggcccatgttatcaaatattataatgcagggtgataagggaagtcaaggcctctagagatgagaatgggtagggttttgctggaagaggccagtgtgataggaaggcccacgattatcaagcttgtacacttagttgaactgggaccagaactctagcccccaaatctaaactttaaacttctttgttccacccatttgtctacacttttctttcccacacttccccactctcccaccacccacccccttgtcttgctcatgccgggtggtaggcacaagaagagctcactgttgtgaaatccaggaattcaaatttgcagacgggcaggggagggctgttcaagtcgcaagactcctcattttttcttttctgggaaagcctttcatgaagtcttggatgcgaaatggaggagtggtgggggatgtggaaa

SEQ ID NO: 14405 - protein, 356 aa, Homo sapiens; identical to SEQ ID NO: 1551

SEQ ID NO: 14406 - DNA, 2331 bp, Homo sapiens
ctgacttagggcggggaaaggagggagccaggctggatctctttccgcagctctcctcacgttcccctctagtcccggcgcggcgctgctgcccaggggactggcctatcctcggccaatccgctgggtccttattgcctgttgggcccctagtgcgaatcagtcccgccagagacccttgacgggcatactgtttcctccgggctcctgcctcatgaggggagaggtgcggcttggctccgtgcgtagggacttgggtggggtggggtgggcggtgtgagaactggaacgtcccagtgcgctaacctgaggtggtgccagccattctgctcgtccctttgcacttctccatttccccttaggctctaagtgtgaccttcgaaccctggtcagagtaatggtgaggggcaggcgtgacgttatttcattacacggcttctcggcattccacaggtttccctccgcctcctgagggcctttcctaacccacagagtggattcctggctccagaaaatgggcttggagcgggggccacgttgaggaaggcgaagggcattgtgggggcgttatgtaaaagtaggaccccaaccgacagatcctagtgctcgcgccacctgggcgcgcggagctttgctcgtttactattgaaaaagttccagcgcgggaaactgaacccggagctttgcgcacgcccgagccctcaagtaatgtgggttgtggtttttgttgttgttgtcgccacgcatgcgtcttcgtgccgtgtggctatttgattgtgtcaactcttctgattagaatggcgccattttgcggtacggaagctacacagcaacacgtataggagactctccccgagatcttctagggagtgacccatctatttttgtttgggaagaggaaactccgaaatgggatcgcggaagacttaaagggccaggctgatttttttttcctactgcaggtctctgaggctgtggttgctacagggtcaccacgagcttggcttacttgtctcatccttcccttgcctggtatcattttctcagttctcccaaaagccatgtcccggcccttgctcatcaccttcaccccagccactgaccccagcgacctctggaaggatgggcagcagcagccacagcccgagaagccagagtccaccctggatggggctgcagcccgagctttctatgaggccctgattggggatgagagcagcgctcctgactcccagagatctcagactgaacctgccagagaaagaaagagaaagaaaagaagaataatgaaggcaccagcagcagaagcagtggcagaaggagcatcaggaagacatggacaagggagatcccttgaggctgaggataagatgactcaccggatactgagggcagcccaggagggggacctgccagaacttaggagactgctggaaccgcatgaggcaggaggagctggggggaatatcaacgcccgggatgccttctggtggaccccactgatgtgtgctgctcgagcgggccagggggcagctgtgagctatctcctgggccgtggggctgcctgggtgggggtctgtgagctgagtggcagggatgcggctcagctcgctgaagaagctggcttccctgaggtagcccgcatggtcagggagagccatggagagacaaggagcccggaaaaccggtctcctactccctccctccagtactgcgagaactgtgacacccacttccaagattccaaccaccgcacatccactgctcacctgctgtcactgtcgcagggtcctcagcctcccaaccttccacttggggtgcccatctccagcccgggcttcaaactgctgctgagggggggctgggagccaggaatggggctgggaccccggggtgagggccgtgccaatcccatccccactgtcctcaagagggaccaggaaggactaggctacagatcagcaccccagccccgagtgacacatttcccagcttgggatacccgagctgtggctgggagggagagaccccctcgggtggccacactgagctggagggaggagagaaggagggaggagaaagacagggcttgggagcgggatctaaggacttacatgaacctcgagttctgactttggtaaagtctgaccctagtctgctgctgaagtctgaacttgggcctctgacctgggccctttgacttccccttcctgggatctgctcagatgcagatcctgaagtttttggtcaataggctctgtcttcgtgagagacgggctgagagtcagaaataaatcaaccatttgtggtttattcacttttctggaagct

SEQ ID NO: 14407 - protein, 356 aa, Homo sapiens; identical to SEQ ID NO: 1551

SEQ ID NO: 14408 - DNA, 378 bp, Homo sapiens
agaataatgaaggcaccagcagcagaagcagtggcagaaggagcatcaggaagacatggacaagggagatcccttgaggctgaggataagatgactcaccggatactgagggcagcccaggagggggacctgccagaacttaggagactgagggcttgggagcgggatctaaggacttacatgaacctcgagttctgactttggtaaagtctgaccctagtctgctgctgaagtctgaacttgggcctctgacctgggccctttgacttccccttcctgggatctgctcagatgcagatcctgaagtttttggtcaataggctctgtcttcgtgagagacgggctgagagtcagaaataaatcaaccatttgtggttt

SEQ ID NO: 14409 - protein, 63 aa, Homo sapiens
MKAPAAEAVAEGASGRHGQGRSLEAEDKMTHRILRAAQEGDLPELRRLRAWERDLRTYMNLEF

SEQ ID NO: 14410 - DNA, 1055 bp, Homo sapiens
aatgcccttcgccttcctcaacgtggcccccgctccaagcccattttctggagccaggaatccactctgtgggttaggaaaggccctcaggaggcggagggaaacctgtggaatgccgagaagccgtgtaatgaaataacgtcacgcctgcccctcaccattactctgaccagggttcgaaggtcacacttagagcctaaggggaaatggagaagtgcaaagggacgagcagaatggctggcaccacctcagctgacgtgaagatgagcagctcagaggaggtgtcctggatttcctggttctgtgggctccgtggcaatgaattcttctgtgaagtggatgaagactacatccaggacaaatttaatcttactggactcaatgagcaggtccctcactatcgacaagctctagacatgatcttggacctggagcctgatgaagaactggaagacaaccccaaccagagtgacctgattgagcaggcagccgagatgctttatggattgatccacgcccgctacatccttaccaaccgtggcatcgcccagatgttggaaaagtaccagcaaggagactttggttactgtcctcgtgtgtactgtgagaaccagccaatgcttcccattggcctttcagacatcccaggtgaagccatggtgaagctctactgccccaagtgcatggatgtgtacacacccaagtcatcaagacaccatcacacggatggcgcctacttcggcactggtttccctcacatgctcttcatggtgcatcccgagtaccggcccaagagacctgccaaccagtttgtgcccaggctctacggtttcaagatccatccgatggcctaccagctgcagctccaagccgccagcaacttcaagagcccagtcaagacgattcgctgattccctcccccacctgtcctgcagtctttgacttttcctttcttttttgccaccctttcaggaaccctgtatggtttttagtttaaattaaaggagtcgttatcgtggtgggaatatgaaataaagtagaagaaaaggccatga

SEQ ID NO: 14411 - protein, 234 aa, Homo sapiens
MEKCKGTSRMAGTTSADVKMSSSEEVSWISWFCGLRGNEFFCEVDEDYIQDKFNLTGLNEQVPHYRQALDMILDLEPDEELEDNPNQSDLIEQAAEMLYGLIHARYILTNRGIAQMLEKYQQGDFGYCPRVYCENQPMLPIGLSDIPGEAMVKLYCPKCMDVYTPKSSRHHHTDGAYFGTGFPHMLFMVHPEYRPKRPANQFVPRLYGFKIHPMAYQLQLQAASNFKSPVKTIR

SEQ ID NO: 14412 - DNA, 1132 bp, Homo sapiens
gcttctcgttgtgccccgcccgcaagcgccctcctccgggccttcgtgacagccaggtcgtgcgcgggtcatcctgggattggtagttcgctttctctcatttagccagtttctttctctaccggggactccgtgtcccggcatccaccgcggcacctgacccttggcgcttgcgtgttgccctcttccccaccctccctaatttccactccccccaccccacttcgcctgccgcggtcgggtccgcggcctgcgctgtagcggtcgccgccgttccctggaagtagcaacttccctaccccaccccagtcctggtccccgtccagccgctgacgtgaagatgagcagctcagaggaggtgtcctggatttcctggttctgtgggctccgtggcaatgaattcttctgtgaagtggatgaagactacatccaggacaaatttaatcttactggactcaatgagcaggtccctcactatcgacaagctctagacatgatcttggacctggagcctgatgaagaactggaagacaaccccaaccagagtgacctgattgagcaggcagccgagatgctttatggattgatccacgcccgctacatccttaccaaccgtggcatcgcccagatgttggaaaagtaccagcaaggagactttggttactgtcctcgtgtgtactgtgagaaccagccaatgcttcccattggcctttcagacatcccaggtgaagccatggtgaagctctactgccccaagtgcatggatgtgtacacacccaagtcatcaagacaccatcacacggatggcgcctacttcggcactggtttccctcacatgctcttcatggtgcatcccgagtaccggcccaagagacctgccaaccagtttgtgcccaggctctacggtttcaagatccatccgatggcctaccagctgcagctccaagccgccagcaacttcaagagcccagtcaagacgattcgctgattccctcccccacctgtcctgcagtctttgacttttcctttcttttttgccaccctttcaggaaccctgtatggtttttagtttaaattaaaggagtcgttatcgtggtgggaatatgaaataaagtagaagaaaaggccatga

SEQ ID NO: 14413 - protein, 215 aa, Homo sapiens; identical to SEQ ID NO: 1553

SEQ ID NO: 14414 - DNA, 718 bp, Homo sapiens
cttccccaccctccctaatttccactccccccaccccacttcgcctgccgcggtcgggtccgcggcctgcgctgtagcggtcgccgccgttccctggaagtagcaacttccctaccccaccccagtcctggtccccgtccagccgctgacgtgaagatgagcagctcagaggaggtgtcctggatttcctggttctgtgggctccgtggcaatgaattcttctgtgaagtggatgaagactacatccaggacaaatttaatcttactggactcaatgagcaggtccctcactatcgacaagctctagacatgatcttggacctggagcctgatgaagaactggaagacaaccccaaccagagtgacctgattgagcaggcagccgagatgctttatggattgatccacgcccgctacatccttaccaaccgtggcatcgcccagatgttggaaaagtaccagcaaggagactttggttactgtcctcgtgtgtactgtgagaaccagccaatgcttcccattggtgagtgttgaagaagggaaaggaaagcaccgtgtggcagtcttatgggaaggagttggggctcaacacattggagcctgagtcctgaggggaggttaggtaggaatagggggatacctggcctgctgagtctggctgtctcccaggcctttcagacatcccaggtgaagccatggtgaagctctactgccccaa

SEQ ID NO: 14415 - protein, 125 aa, Homo sapiens [sequence omitted]

SEQ ID NO: 14416 - DNA, 1069 bp, Homo sapiens
ctccctaatttccactccccccaccccacttcgcctgccgcggtcgggtccgcggcctgcgctgtagcggtcgccgccgttccctggaagtagcaacttccctaccccaccccagtcctggtccccgtccagccgctgacgtgaagatgagcagctcagaggaggtgtcctggatttcctggttctgtgggctccgtggcaatgaattcttctgtgaagtggatgaagactacatccaggacaaatttaatcttactggactcaatgagcaggtccctcactatcgacaagctctagacatgatcttggacctggagcctgatgaagaactggaagacaaccccaaccagagtgacctgattgagcaggcagccgagatgctttatggattgatccacgcccgctacatccttaccaaccgtggcatcgcccagatggtgaggcctctctgctcctacctgcctccttctgagcagtaagagacacaggttcctgcagcaagaagtcatgtttaagccctgtttaaggaagctagctgagaagaggggaagaaccccagaacttgggcctgggaattgaattctgattgggggtcatcctgaagggattgttttcagggagggagacagaccttgaatcagagagttgtgatagactgcctcttcctcaaggaacaaacaacaaatggctctgatggtttgtagcctgcctaattggaagaaaggcaacacagaagtttgagagcccatctagtccagagaaggggcctctggacagaggtgggaggagtgggggacagagtggtatgggttgggctgcgaagggagttgcctcttctttacatctacctgccaaccccttccattgtattcacctcagttggaaaagtaccagcaaggagactttggttactgtcctcgtgtgtactgtgagaaccagccaatgcttcccattggtgagtgttgaagaagggaaaggaaagcaccgtgtggcagtcttatgggaaggagttggggctcaacacattggagcctgagtcctgaggggaggttaggtaggaataggggga

SEQ ID NO: 14417 - protein, 110 aa, Homo sapiens [sequence omitted]

SEQ ID NO: 14418 - DNA, 908 bp, Homo sapiens
ggaggaagcgaccaggtccggcacgaaggagggagaggtggcctgaggagcggaggggggatgtgtggattccggtgaaagggacctgacaatcgcccccaacccctgacgtgaagatgagcagctcagaggaggtgtcctggatttcctggttctgtgggctccgtggcaatgaattcttctgtgaagtggatgaagactacatccaggacaaatttaatcttactggactcaatgagcaggtccctcactatcgacaagctctagacatgatcttggacctggagcctgatgaagaactggaagacaaccccaaccagagtgacctgattgagcaggcagccgagatgctttatggattgatccacgcccgctacatccttaccaaccgtggcatcgcccagatgttggaaaagtaccagcaaggagactttggttactgtcctcgtgtgtactgtgagaaccagccaatgcttcccattggcctttcagacatcccaggtgaagccatggtgaagctctactgccccaagtgcatggatgtgtacacacccaagtcatcaagacaccatcacacggatggcgcctacttcggcactggtttccctcacatgctcttcatggtgcatcccgagtaccggcccaagagacctgccaaccagtttgtgcccaggctctacggtttcaagatccatccgatggcctaccagctgcagctccaagccgccagcaacttcaagagcccagtcaagacgattcgctgattccctcccccacctgtcctgcagtctttgacttttcctttcttttttgccaccctttcaggaaccctgtatggtttttagtttaaattaaaggagtcgttatcgtggtgggaatatgaaataaagtagaagaaaaggccatga

SEQ ID NO: 14419 - protein, 215 aa, Homo sapiens; identical to SEQ ID NO: 1553

SEQ ID NO: 14420 - DNA, 1205 bp, Homo sapiens
cagatgaagaactggaagacaaccccaaccagagtgacctgattgagcaggcagccgagatgctttatggattgatccacgcccgctacatccttaccaaccgtggcatcgcccagatggtgaggcctctctgctcctacctgcctccttctgagcagtaagagacacaggttcctgcagcaagaagtcatgtttaagccctgtttaaggaagctagctgagaagaggggaagaaccccagaacttgggcctgggaattgaattctgattgggggtcatcctgaagggattgttttcagggagggagacagaccttgaatcagagagttgtgatagactgcctcttcctcaaggaacaaacaacaaatggctctgatggtttgtagcctgcctaattggaagaaaggcaacacagaagtttgagagcccatctagtccagagaaggggcctctggacagaggtgggaggagtgggggacagagtggtatgggttgggctgcgaagggagttgcctcttctttacatctacctgccaaccccttccattgtattcacctcagttggaaaagtaccagcaaggagactttggttactgtcctcgtgtgtactgtgagaaccagccaatgcttcccattggtgagtgttgaagaagggaaaggaaagcaccgtgtggcagtcttatgggaaggagttggggctcaacacattggagcctgagtcctgaggggaggttaggtaggaatagggggatacctggcctgctgagtctggctgtctcccaggcctttcagacatcccaggtgaagccatggtgaagctctactgccccaagtgcatggatgtgtacacacccaagtcatcaagacaccatcacacggatggcgcctacttcggcactggtttccctcacatgctcttcatggtgcatcccgagtaccggcccaagagacctgccaaccagtttgtgcccaggctctacggtttcaagatccatccgatggcctaccagctgcagctccaagccgccagcaacttcaagagcccagtcaagacgattcgctgattccctcccccacctgtcctgcagtctttgacttttcctttcttttttgccaccctttcaggaaccctgtatggtttttagtttaaattaaaggagtcgttatcgtggtgggaatatgaaataaagtagaagaaaaggcca

SEQ ID NO: 14421 - protein, 84 aa, Homo sapiens
MCTHPSHQDTITRMAPTSALVSLTCSSWCIPSTGPRDLPTSLCPGSTVSRSIRWPTSCSSKPPATSRAQSRRFADSLPHLSCSL

SEQ ID NO: 14422 - DNA, 1481 bp, Homo sapiens
cagatgaagaactggaagacaaccccaaccagagtgacctgattgagcaggcagccgagatgctttatggattgatccacgcccgctacatccttaccaaccgtggcatcgcccagatggtgaggcctctctgctcctacctgcctccttctgagcagtaagagacacaggttcctgcagcaagaagtcatgtttaagccctgtttaaggaagctagctgagaagaggggaagaaccccagaacttgggcctgggaattgaattctgattgggggtcatcctgaagggattgttttcagggagggagacagaccttgaatcagagagttgtgatagactgcctcttcctcaaggaacaaacaacaaatggctctgatggtttgtagcctgcctaattggaagaaaggcaacacagaagtttgagagcccatctagtccagagaaggggcctctggacagaggtgggaggagtgggggacagagtggtatgggttgggctgcgaagggagttgcctcttctttacatctacctgccaaccccttccattgtattcacctcagttggaaaagtaccagcaaggagactttggttactgtcctcgtgtgtactgtgagaaccagccaatgcttcccattggtgagtgttgaagaagggaaaggaaagcaccgtgtggcagtcttatgggaaggagttggggctcaacacattggagcctgagtcctgaggggaggttaggtaggaatagggggatacctggcctgctgagtctggctgtctcccaggcctttcagacatcccaggtgaagccatggtgaagctctactgccccaagtgcatggatgtgtacacacccaagtcatcaagacaccatcacacggatggcgcctacttcggcactggtttccctcacatgctcttcatggtgcatcccgagtaccggcccaagagacctgccaaccagtttgtgcccaggctctacggtttcaagatccatccgatggcctaccagctgcagctccaagccgccagcaacttcaagagcccagtcaagacgattcgctgattccctcccccacctgtcctgcagtctttgacttttcctttcttttttgccaccctttcaggaaccctgtatggtttttagtttaaattaaaggagtcgttatcgtggtgggaatatgaaataaagtagaagaaaaggccatgagctagtctgctggtgcttgctgttggggaagggaaggtgatggtgtgttggactccaggggccctcatggcccagcccaccctccccagattgaaaaccaggacagatttgtgctcagtggattgggtggtgtttttagtatggagcagaacagaattcctaggactgcgtgtgatgaaatgcaaggtcaaaaggaaaagacaaagcatatttcaaagatgagaaatatttgtttggatatctatgactgtctgtttatactgtaaggggctt

SEQ ID NO: 14423 - protein, 84 aa, Homo sapiens; identical to SEQ ID NO: 14421

SEQ ID NO: 14424 - DNA, 1690 bp, Homo sapiens
ggaaaagtagcctaaagtcagtataactaaagggtggaacgaggtgggacaaggtccggaattgctgctcagtgatgtgtgtgtgcctgccgctggtggagctgagactgctcatctcagaaggatggggatgcttgatttcctggccaggttgtcccagcacagtggggattggccctgttgtatgacgaagacagcacatggtggcagagatagatactaacccatggactttccaagggagggaataggtctttggagggtatgcaagacaaaggtagacactggataaagaacccggtagtgcccaggtattaccccatctgggccattactcccacactcaggaaccagacgttgtgggtgaggacatgctgtccctcctgccaagtaataacttccttcccagccaggatcctgccccaagtaggaatatagctctgcatttacagcagctcctgctcagaccttgtcaaaaccaccctgcagcttaggattaaggagcatggtcacaggaaggtggggtttcagggcatcccctcaggaactgcccatctccccagaattccaaaatgaaggtccatatgcttgtaggtgtgctggtcatggtgggcttcacagtaggaaagggtaagtggggcccaggggcagggagggaggaaggggtaactgagtccaggaagggggtggagcgtggccatggataatcgggcttcctactggcccagggtatttgagagtgacccagtgcctccatccctccttctgcctccccagttcctgttcccgacatccggacgtgccacttctgcctcgtagaagacccttctgtaggatgcatttcaggctcagagaagtgtaccatcagcagctcatccctgtgcatggtgatcaccatctattatgatgtcaaggttcgcttcatcgttcgaggctgtggacagtacatttcctaccgctgccaagaaaaacgcaacacctactttgcagagtactggtatcaggcccagtgctgtcagtacgattattgcaactcctggtcaagcccccaactccagagctctctgccggagccccatgacaggcccctggccctgcctctgtctgactcccagattcagtggttctaccaggccctgaacctctccctgcccctccccaatttccatgctgggacggagcctgatggcctggaccccatggtcacactgtccctgaacctgggcttgtcttttgctgagctgcgccgcatgtacttgttcctcaatagttcaggacttttggttcttccccaggctggactcttgacacctcacccttcctgaattccacagtgcaaatatctttctgtaacaccctcagcatcctgcatgcactccagcctgggtgacacagtgagactccgtctccaaaaaaaaggatgaggaatagaattctgtgcagatgtcctgacttggcaattttgtgtccctgcctcactgtctccaccaacccccgcctgtcctagtgttgttctgcctcctgtcctctcttgctctcttgtcagtctctggcttcctcggccccatttcacttcactgagtcctgacacccatctccctaggggcctgtgagaggagagggaagggtctgttctgctcagctccatgtcccccattttcctccacaataaactgggactgggctaaaa

SEQ ID NO: 14425 - protein, 146 aa, Homo sapiens
MVITIYYDVKVRFIVRGCGQYISYRCQEKRNTYFAEYWYQAQCCQYDYCNSWSSPQLQSSLPEPHDRPLALPLSDSQIQWFYQALNLSLPLPNFHAGTEPDGLDPMVTLSLNLGLSFAELRRMYLFLNSSGLLVLPQAGLLTPHPS

SEQ ID NO: 14426 - DNA, 948 bp, Homo sapiens
cctaaagtcagtataactaaagggtggaacgaggtgggacaaggtccggaattgctgctcagtgatgtgtgtgtgcctgccgctggtggagctgagactgctcatctcagaaggatggggatgcttgatttcctggccaggttgtcccagcacagtggggattggccctgttgtatgacgaagacagcacatggtggcagagatagatactaacccatggactttccaagggagggaataggtctttggagggtatgcaagacaaaggtagacactggataaagaacccggtagtgcccaggtattaccccatctgggccattactcccacactcaggaaccagacgttgtgggtgaggacatgctgtccctcctgccaagtaataacttccttcccagccaggatcctgccccaagtaggaatatagctctgcatttacagcagctcctgctcagaccttgtcaaaaccaccctgcagcttaggattaaggagcatggtcacaggaaggtggggtttcagggcatcccctcaggaactgcccatctccccagaattccaaaatgaaggtccatatgcttgtaggtgtgctggtcatggtgggcttcacagtaggaaagggtaagtggggcccaggggcagggagggaggaaggggtaactgagtccaggaagggggtggagcgtggccatggaattctgtgcagatgtcctgacttggcaattttgtgtccctgcctcactgtctccaccaacccccgcctgtcctagtgttgttctgcctcctgtcctctcttgctctcttgtcagtctctggcttcctcggccccatttcacttcactgagtcctgacacccatctccctaggggcctgtgagaggagagggaagggtctgttctgctcagctccatgtcccccattttcctccacaataaactgggactgggct

SEQ ID NO: 14427 - protein, 68 aa, Homo sapiens
MKVHMLVGVLVMVGFTVGKGKWGPGAGREEGVTESRKGVERGHGILCRCPDLAILCPCLTVSTNPRLS

SEQ ID NO: 14428 - DNA, 753 bp, Homo sapiens
ggtgtgctggtcatggtgggcttcacagtaggaaaggttcctgttcccgacatccggacgtgccacttctgcctcgtagaagacccttctgtaggatgcatttcaggctcagagaagtgtaccatcagcagctcatccctgtgcatggtgatcaccatctattatgatgtcaaggttcgcttcatcgttcgaggctgtggacagtacatttcctaccgctgccaagaaaaacgcaacacctactttgcagagtactggtatcaggcccagtgctgtcagtacgattattgcaactcctggtcaagcccccaactccagagctctctgccggagccccatgacaggcccctggccctgcctctgtctgactcccagattcagtggttctaccaggccctgaacctctccctgcccctccccaatttccatgctgggacggagcctgatggcctggaccccatggtcacactgtccctgaacctgggcttgtcttttgctgagctgcgccgcatgtacttgttcctcaatagttcaggacttttggttcttccccaggctggactcttgacacctcacccttcctgaattccacagtgcaaatatctttctgtaacaccctcagcatcctgcactgccctctctgaaaacacccacattctttggtcactgtgatttcttaggcctccgtctgttgtaccactagcatctatatgacttttgtgtaattttctctcttgaactctggtgctgttt

SEQ ID NO: 14429 - protein, 190 aa, Homo sapiens
MVGFTVGKVPVPDIRTCHFCLVEDPSVGCISGSEKCTISSSSLCMVITIYYDVKVRFIVRGCGQYISYRCQEKRNTYFAEYWYQAQCCQYDYCNSWSSPQLQSSLPEPHDRPLALPLSDSQIQWFYQALNLSLPLPNFHAGTEPDGLDPMVTLSLNLGLSFAELRRMYLFLNSSGLLVLPQAGLLTPHPS

SEQ ID NO: 14430 - DNA, 1405 bp, Homo sapiens
gggctgagtgcaatggctcatgcctgtaaccctagcactttgggaggctgaggcaggtggatcacttaagctctagagttcaagaccagcctaggcaacatagtgagaccctgtctctacaaaaaaatagccaggcatggtggtatgcacctgtagtcccagctactcgggaggctgaggtgggagatctcttaaactcaggaggcataggttgcagtgagccaagattgcgccaccatgctccagcctgagtaacagagctagaccctgtctcaaaaaaaaccagaagaatcttggaaggaggggtctaaggttctagggggccagcagagctcacttttctagcctcttgaaggactctgggttagaagtaaattaggtctgggtgaaggatgggaaaagtcagtagcaggggttcttggactatgggaagctattggaaggggttatcagctttcccctctccctcagatgtcaaggttcgcttcatcgttcgaggctgtggacagtacatttcctaccgctgccaagaaaaacgcaacacctactttgcagagtactggtatcaggcccagtgctgtcagtacgattattgcaactcctggtcaagcccccaactccagagctctctgccggagccccatgacaggcccctggccctgcctctgtctgactcccagattcagtggttctaccaggccctgaacctctccctgcccctccccaatttccatgctgggacggagcctgatggcctggaccccatggtcacactgtccctgaacctgggcttgtcttttgctgagctgcgccgcatgtacttgttcctcaatagttcaggacttttggttcttccccaggctggactcttgacacctcacccttcctgaattccacagtgcaaatatctttctgtaacaccctcagcatcctgcactgccctctctgaaaacacccacattctttggtcactgtgatttcttaggcctccgtctgttgtaccactagcatctatatgacttttgtgtaattttctctcttgaactctggtgctgtttttttgtttgtttgagacaaagtctcgcttgcactccagcctgggtgacacagtgagactccgtctccaaaaaaaaggatgaggaatagaattctgtgcagatgtcctgacttggcaattttgtgtccctgcctcactgtctccaccaacccccgcctgtcctagtgttgttctgcctcctgtcctctcttgctctcttgtcagtctctggcttcctcggccccatttcacttcactgagtcctgacacccatctccctaggggcctgtgagaggagagggaagggtctgttctgctcagctccatgtcccccattttcctccacaataaactgggactgggctaaaa

SEQ ID NO: 14431 - protein, 165 aa, Homo sapiens [sequence omitted]

SEQ ID NO: 14432 - DNA, 932 bp, Homo sapiens
gacagtacatttcctaccgctgccaagaaaaacgcaacacctactttgcagagtactggtatcaggcccagtgctgtcagtacgattattgcaactcctggtcaagcccccaactccagagctctctgccggagccccatgacaggcccctggccctgcctctgtctgactcccagattcagtggttctaccaggccctgaacctctccctgcccctccccaatttccatgctgggacggagcctgatggcctggaccccatggtcacactgtccctgaacctgggcttgtcttttgctgagctgcgccgcatgtacttgttcctcaatagttcaggacttttggttcttccccaggctggactcttgacacctcacccttcctgaattccacagtgcaaatatctttctgtaacaccctcagcatcctgcactgccctctctgaaaacacccacattctttggtcaatggtaaaacccgctctctattaaaaatagaaaaatcagctgggtgtggtggcacacctctgtaatcccagctactcaggaggctgagacaggagaatcacttgaacccgggaggcagaggttgcagtgagccgagatcgcgccactgcactccagcctgggtgacacagtgagactccgtctccaaaaaaaaggatgaggaatagaattctgtgcagatgtcctgacttggcaattttgtgtccctgcctcactgtctccaccaacccccgcctgtcctagtgttgttctgcctcctgtcctctcttgctctcttgtcagtctctggcttcctcggccccatttcacttcactgagtcctgacacccatctccctaggggcctgtgagaggagagggaagggtctgttctgctcagctccatgtcccccattttcctccacaataaactgggactgggctaaaa

SEQ ID NO: 14433 - protein, 41 aa, Homo sapiens
MVTLSLNLGLSFAELRRMYLFLNSSGLLVLPQAGLLTPHPS

SEQ ID NO: 14434 - DNA, 943 bp, Homo sapiens
atggcaggccctgcagggagccagagtctgggtcccctgtgcttccacagcagcccccaagccctctacacggtcctcttaatagtgctggtcatgatgagcttggtgtttggtaagtggctccaagggttcagaagggtctcctggcctggatggagaaacccacagacaccaagtgtctgggtacacctgtccaggatgctcaggtaagtttgttcctgtcaattgggaaccccctcaaccacttccattccccaaatacctgcgctgctaccgatgcctcttggagaccaaggagttagggtgccttctgggatctgacatctgcctcaccccagctggcagcagctgcatcactctccacaaaaagaacagcagcggttctgacgtcatggtgagtgactgccgaagtaaggagcagatgagtgattgttcaaatacccgaacttctccggtgtctggcttctggatattctctcaatactgcttcctggatttctgcaatgaccctcaaaacagagggctctatactccttagtgtgactgcagcaaactttggtgtaaaattccaccagtttccagccaccttcctgacttctatctgggcttggccaggacttctagtccctcataccagccctccttgcctccctccagccactggaccccagccttggctcttcctcttggttgacgcccttcagcacacttactgctactctgtacccccagccctactgcccaccaggtttcctctcttgtcccctagtccctggatgtttctcccaaataaatttgtgtgtaaactgtttggtatgtctctttcttctggtggaggtgaaggctgagggaggtgcacctgcctaactgccctaccatgggtcaggtaagggacccccagctctgctgagctgtcctcttgtcctgccttggtatgtgattt

SEQ ID NO: 14435 - protein, 69 aa, Homo sapiens; identical to SEQ ID NO: 1559

SEQ ID NO: 14436 - DNA, 849 bp, Homo sapiens
atggcaggccctgcagggagccagagtctgggtcccctgtgcttccacagcagcccccaagccctctacacggtcctcttaatagtgctggtcatgatgagcttggtgtttggtaagtttgttcctgtcaattgggaaccccctcaaccacttccattccccaaatacctgcgctgctaccgatgcctcttggagaccaaggagttagggtgccttctgggatctgacatctgcctcaccccagctggcagcagctgcatcactctccacaaaaagaacagcagcggttctgacgtcatggtgagtgactgccgaagtaaggagcagatgagtgattgttcaaatacccgaacttctccggtgtctggcttctggatattctctcaatactgcttcctggatttctgcaatgaccctcaaaacagagggctctatactccttagtgtgactgcagcaaactttggtgtaaaattccaccagtttccagccaccttcctgacttctatctgggcttggccaggacttctagtccctcataccagccctccttgcctccctccagccactggaccccagccttggctcttcctcttggttgacgcccttcagcacacttactgctactctgtacccccagccctactgcccaccaggtttcctctcttgtcccctagtccctggatgtttctcccaaataaatttgtgtgtaaactgtttggtatgtctctttcttctggtggaggtgaaggctgagggaggtgcacctgcctaactgccctaccatgggtcaggtaagggacccccagctctgctgagctgtcctcttgtcctgccttggtatgtgattt

SEQ ID NO: 14437 - protein, 147 aa, Homo sapiens; identical to SEQ ID NO: 1561

SEQ ID NO: 14438 - DNA, 1833 bp, Homo sapiens
atggcaggccctgcagggagccagagtctgggtcccctgtgcttccacagcagcccccaagccctctacacggtcctcttaatagtgctggtcatgatgagcttggtgtttggtaagtggctccaagggttcagaagggtctcctggcctggatggagaaacccacagacaccaagtgtctgggtacacctgtccaggatgctcaggtaaacccatgcaggaggagagatgggacagatgggtttggtagggaatgcctgctcatggactgatgtgcaatctgaagatttttaaaaatttattattattattatttttgagatggagtctcgctctgtatcccaggccggagtgcagtggcgagatctcggctcactgcaacctccacctcccgggttcaagcgattctcatgcctcagcctcccgaataactgggattacaggcataagccaccaagcccagctaatttttgtatatttagtagagacggggtttcaccatgttggccaggctggtctcgaactcctgacctcaggtacctgcccgccttggcctcccaaagtgctgggattacaggcgtgagccaccgcacccagcctctgaaggagatttctagtgaccaccccagggctgtctcacttcacagcagtgacctgaatagagatactgaaggaatcctctctggatctgagggcaacatagaatagggagggttagggagtgtgctggatgagaaaaccagaatccacaggatagaacaagactgagtccagcctgctgggctccccacttggctgcaaagcaccagccacagagacacaggattcaaagtgttggtttagcactttcctctgcctaacaccaagtgctctgctgggtctggggatttgttaacatgtggtctggccttaggaccagaggaaaagggggatgtatgtgtatgcagttggggaaggaagcagagaattggggctttgatggttttctgagacaggaagggagggaggagtggggctgagtggcctggaatcaggcagtggtagggtgtgaggtagaatggggtgtgagtggggtcagcacttctctgtgttctaggtaagtttgttcctgtcaattgggaaccccctcaaccacttccattccccaaatacctgcgctgctaccgatgcctcttggagaccaaggagttagggtgccttctgggatctgacatctgcctcaccccagctggcagcagctgcatcactctccacaaaaagaacagcagcggttctgacgtcatggtgagtgactgccgaagtaaggagcagatgagtgattgttcaaatacccgaacttctccggtgtctggcttctggatattctctcaatactgcttcctggatttctgcaatgaccctcaaaacagagggctctatactccttagtgtgactgcagcaaactttggtgtaaaattccaccagtttccagccaccttcctgacttctatctgggcttggccaggacttctagtccctcataccagccctccttgcctccctccagccactggaccccagccttggctcttcctcttggttgacgcccttcagcacacttactgctactctgtacccccagccctactgcccaccaggtttcctctcttgtcccctagtccctggatgtttctcccaaataaatttgtgtgtaaactgtttggtatgtctctttcttctggtggaggtgaaggctgagggaggtgcacctgcctaactgccctaccatgggtcaggtaagggacccccagctctgctgagctgtcctcttgtcctgccttggtatgtgattt

SEQ ID NO: 14439 - protein, 128 aa, Homo sapiens [sequence omitted]

SEQ ID NO: 14440 - DNA, 1211 bp, Homo sapiens
cgttccaggacgctgaggaccacctcctcccctaacgcacagcccaacgatcctaaaagtaaaaaccctgagtttctgagtcaagactgagctggtggggtggggaccgagtaggcgtggatggggagcccagcgggtccccagcggagaaaatgggtgagacgcctggggccgcggtctccagaattcgcctgggagggagagtggcgctacggcgccgccttcctggggagccgcttcgggctccggatgtccgctggggcccgacgcttgggtcccgacgcgcggttcgcactttccaggtttcttccccagggaacagagcttgagcggggggccacccccccgtcctaccggagttctgaggtgcggtcaggcgcggagagcggacgcccagcgccagattctgtgggctccggagttcaggcccactgagccgcagctgagcacaggcggggcaggaaaaaggatgaggtaagtttgttcctgtcaattgggaaccccctcaaccacttccattccccaaatacctgcgctgctaccgatgcctcttggagaccaaggagttagggtgccttctgggatctgacatctgcctcaccccagctggcagcagctgcatcactctccacaaaaagaacagcagcggttctgacgtcatggtgagtgactgccgaagtaaggagcagatgagtgattgttcaaatacccgaacttctccggtgtctggcttctggatattctctcaatactgcttcctggatttctgcaatgaccctcaaaacagagggctctatactccttagtgtgactgcagcaaactttggtgtaaaattccaccagtttccagccaccttcctgacttctatctgggcttggccaggacttctagtccctcataccagccctccttgcctccctccagccactggaccccagccttggctcttcctcttggttgacgcccttcagcacacttactgctactctgtacccccagccctactgcccaccaggtttcctctcttgtcccctagtccctggatgtttctcccaaataaatttgtgtgtaaactgtttggtatgtctctttcttctggtggaggtgaaggctgagggaggtgcacctgcctaactgccctaccatgggtcaggtaagggacccccagctctgctgagctgtcctcttgtcctgccttggtatgtgattt

SEQ ID NO: 14441 - protein, 114 aa, Homo sapiens
MTLKTEGSILLSVTAANFGVKFHQFPATFLTSIWAWPGLLVPHTSPPCLPPATGPQPWLFLLVDALQHTYCYSVPPALLPTRFPLLSPSPWMFLPNKFVCKLFGMSLSSGGGEG

SEQ ID NO: 14442 - DNA, 852 bp, Homo sapiens
atgcagaccttcccagttgctggggcgctggaccctgctatactggacacaagcagcccccaagccctctacacggtcctcttaatagtgctggtcatgatgagcttggtgtttggtaagtttgttcctgtcaattgggaaccccctcaaccacttccattccccaaatacctgcgctgctaccgatgcctcttggagaccaaggagttagggtgccttctgggatctgacatctgcctcaccccagctggcagcagctgcatcactctccacaaaaagaacagcagcggttctgacgtcatggtgagtgactgccgaagtaaggagcagatgagtgattgttcaaatacccgaacttctccggtgtctggcttctggatattctctcaatactgcttcctggatttctgcaatgaccctcaaaacagagggctctatactccttagtgtgactgcagcaaactttggtgtaaaattccaccagtttccagccaccttcctgacttctatctgggcttggccaggacttctagtccctcataccagccctccttgcctccctccagccactggaccccagccttggctcttcctcttggttgacgcccttcagcacacttactgctactctgtacccccagccctactgcccaccaggtttcctctcttgtcccctagtccctggatgtttctcccaaataaatttgtgtgtaaactgtttggtatgtctctttcttctggtggaggtgaaggctgagggaggtgcacctgcctaactgccctaccatgggtcaggtaagggacccccagctctgctgagctgtcctcttgtcctgccttggtatgtgattt

SEQ ID NO: 14443 - protein, 148 aa, Homo sapiens
MQTFPVAGALDPAILDTSSPQALYTVLLIVLVMMSLVFGKFVPVNWEPPQPLPFPKYLRCYRCLLETKELGCLLGSDICLTPAGSSCITLHKKNSSGSDVMVSDCRSKEQMSDCSNTRTSPVSGFWIFSQYCFLDFCNDPQNRGLYTP

SEQ ID NO: 14444 - DNA, 1082 bp, Homo sapiens
atgcagaccttcccagttgctggggcgctggaccctgctatactggacacaaggtaggagcactcagaagggacaccgtcatctgctgctgtcgccatggcgattattcaacgccctgcctcttcaccccaggaaaaccttcgcggaacccgtcaccatggaaacgaactctctggactcttagcgcgccctgggctggccctgctgggtggacaggagaggagcaaaacgcaacaaagacgggattaattactcggaggccgcgccccctccgaagaaggccccaccctgccccggcctcacccctccccgaaataattcgaggaaatattccgcgaatgctgggtaagtttgttcctgtcaattgggaaccccctcaaccacttccattccccaaatacctgcgctgctaccgatgcctcttggagaccaaggagttagggtgccttctgggatctgacatctgcctcaccccagctggcagcagctgcatcactctccacaaaaagaacagcagcggttctgacgtcatggtgagtgactgccgaagtaaggagcagatgagtgattgttcaaatacccgaacttctccggtgtctggcttctggatattctctcaatactgcttcctggatttctgcaatgaccctcaaaacagagggctctatactccttagtgtgactgcagcaaactttggtgtaaaattccaccagtttccagccaccttcctgacttctatctgggcttggccaggacttctagtccctcataccagccctccttgcctccctccagccactggaccccagccttggctcttcctcttggttgacgcccttcagcacacttactgctactctgtacccccagccctactgcccaccaggtttcctctcttgtcccctagtccctggatgtttctcccaaataaatttgtgtgtaaactgtttggtatgtctctttcttctggtggaggtgaaggctgagggaggtgcacctgcctaactgccctaccatgggtcaggtaagggacccccagctctgctgagctgtcctcttgtcctgccttggtatgtgattt

SEQ ID NO: 14445 - protein, 112 aa, Homo sapiens
MLGKFVPVNWEPPQPLPFPKYLRCYRCLLETKELGCLLGSDICLTPAGSSCITLHKKNSSGSDVMVSDCRSKEQMSDCSNTRTSPVSGFWIFSQYCFLDFCNDPQNRGLYTP

SEQ ID NO: 14446 - DNA, 962 bp, Homo sapiens
atgcagaccttcccagttgctggggcgctggaccctgctatactggacacaaggtttcttccccagggaacagagcttgagcggggggccacccccccgtcctaccggagttctgaggtgcggtcaggcgcggagagcggacgcccagcgccagattctgtgggctccggagttcaggcccactgagccgcagctgagcacaggcggggcaggaaaaaggatgaggtaagtttgttcctgtcaattgggaaccccctcaaccacttccattccccaaatacctgcgctgctaccgatgcctcttggagaccaaggagttagggtgccttctgggatctgacatctgcctcaccccagctggcagcagctgcatcactctccacaaaaagaacagcagcggttctgacgtcatggtgagtgactgccgaagtaaggagcagatgagtgattgttcaaatacccgaacttctccggtgtctggcttctggatattctctcaatactgcttcctggatttctgcaatgaccctcaaaacagagggctctatactccttagtgtgactgcagcaaactttggtgtaaaattccaccagtttccagccaccttcctgacttctatctgggcttggccaggacttctagtccctcataccagccctccttgcctccctccagccactggaccccagccttggctcttcctcttggttgacgcccttcagcacacttactgctactctgtacccccagccctactgcccaccaggtttcctctcttgtcccctagtccctggatgtttctcccaaataaatttgtgtgtaaactgtttggtatgtctctttcttctggtggaggtgaaggctgagggaggtgcacctgcctaactgccctaccatgggtcaggtaagggacccccagctctgctgagctgtcctcttgtcctgccttggtatgtgattt

SEQ ID NO: 14447 - protein, 61 aa, Homo sapiens; identical to SEQ ID NO: 1557

SEQ ID NO: 14448 - DNA, 1701 bp, Homo sapiens
atggcaggccctgcagggagccagagtctgggtcccctgtgcttccacagcagcccccaagccctctacacggtcctcttaatagtgctggtcatgatgagcttggtgtttggtaagtggctccaagggttcagaagggtctcctggcctggatggagaaacccacagacaccaagtgtctgggtacacctgtccaggatgctcaggtaaacccatgcaggaggagagatgggacagatgggtttggtagggaatgcctgctcatggactgatgtgcaatctgaagatttttaaaaatttattattattattatttttgagatggagtctcgctctgtatcccaggccggagtgcagtggcgagatctcggctcactgcaacctccacctcccgggttcaagcgattctcatgcctcagcctcccgaataactgggattacaggcataagccaccaagcccagctaatttttgtatatttagtagagacggggtttcaccatgttggccaggctggtctcgaactcctgacctcaggtacctgcccgccttggcctcccaaagtgctgggattacaggcgtgagccaccgcacccagcctctgaaggagatttctagtgaccaccccagggctgtctcacttcacagcagtgacctgaatagagatactgaaggaatcctctctggatctgagggcaacatagaatagggagggttagggagtgtgctggatgagaaaaccagaatccacaggatagaacaagactgagtccagcctgctgggctccccacttggctgcaaagcaccagccacagagacacaggattcaaagtgttggtttagcactttcctctgcctaacaccaagtgctctgctgggtctggggatttgttaacatgtggtctggccttaggaccagaggaaaagggggatgtatgtgtatgcagttggggaaggaagcagagaattggggctttgatggttttctgagacaggaagggagggaggagtggggctgagtggcctggaatcaggcagtggtagggtgtgaggtagaatggggtgtgagtggggtcagcacttctctgtgttctaggtaagtttgttcctgtcaattgggaaccccctcaaccacttccattccccaaatacctgcgctgctaccgatgcctcttggagaccaaggagttagggtgccttctgggatctgacatctgcctcaccccagctggcagcagctgcatcactctccacaaaaagaacagcagcggttctgacgtcatggtgagtgactgccgaagtaaggagcagatgagtgattgttcaaatacccgaacttctccggtgtctggcttctggatattctctcaatactgcttcctggatttctgcaatgaccctcaaaacagagggctctatactccttagtgtgactgcagcaaactttggtgtaaaattccaccagtttccagccaccttcctgacttctatctgggcttggccaggacttctagtccctcataccagccctccttgcctccctccagccactggaccccagccttggctcttcctcttggttgacgcccttcagcacacttactgctactctgtacccccagccctactgcccaccaggtttcctctcttgtcccctagtccctggatgtttctcccaaataaatttgtgtgtaaactgtt

SEQ ID NO: 14449 - protein, 128 aa, Homo sapiens [sequence omitted]

SEQ ID NO: 14450 - DNA, 811 bp, Homo sapiens
atggcaggccctgcagggagccagagtctgggtcccctgtgcttccacagcagcccccaagccctctacacggtcctcttaatagtgctggtcatgatgagcttggtgtttggtaagtggctccaagggttcagaagggtctcctggcctggatggagaaacccacagacaccaagtgtctgggtacacctgtccaggatgctcaggtaagtttgttcctgtcaattgggaaccccctcaaccacttccattccccaaatacctgcgctgctaccgatgcctcttggagaccaaggagttagggtgccttctgggatctgacatctgcctcaccccagctggcagcagctgcatcactctccacaaaaagaacagcagcggttctgacgtcatggtgagtgactgccgaagtaaggagcagatgagtgattgttcaaatacccgaacttctccggtgtctggcttctggatattctctcaatactgcttcctggatttctgcaatgaccctcaaaacagagggctctatactccttagtgtgactgcagcaaactttggtgtaaaattccaccagtttccagccaccttcctgacttctatctgggcttggccaggacttctagtccctcataccagccctccttgcctccctccagccactggaccccagccttggctcttcctcttggttgacgcccttcagcacacttactgctactctgtacccccagccctactgcccaccaggtttcctctcttgtcccctagtccctggatgtttctcccaaataaatttgtgtgtaaactgtt

SEQ ID NO: 14451 - protein, 69 aa, Homo sapiens; identical to SEQ ID NO: 1559

SEQ ID NO: 14452 - DNA, 717 bp, Homo sapiens
atggcaggccctgcagggagccagagtctgggtcccctgtgcttccacagcagcccccaagccctctacacggtcctcttaatagtgctggtcatgatgagcttggtgtttggtaagtttgttcctgtcaattgggaaccccctcaaccacttccattccccaaatacctgcgctgctaccgatgcctcttggagaccaaggagttagggtgccttctgggatctgacatctgcctcaccccagctggcagcagctgcatcactctccacaaaaagaacagcagcggttctgacgtcatggtgagtgactgccgaagtaaggagcagatgagtgattgttcaaatacccgaacttctccggtgtctggcttctggatattctctcaatactgcttcctggatttctgcaatgaccctcaaaacagagggctctatactccttagtgtgactgcagcaaactttggtgtaaaattccaccagtttccagccaccttcctgacttctatctgggcttggccaggacttctagtccctcataccagccctccttgcctccctccagccactggaccccagccttggctcttcctcttggttgacgcccttcagcacacttactgctactctgtacccccagccctactgcccaccaggtttcctctcttgtcccctagtccctggatgtttctcccaaataaatttgtgtgtaaactgtt

SEQ ID NO: 14453 - protein, 147 aa, Homo sapiens; identical to SEQ ID NO: 1561

SEQ ID NO: 14454 - DNA, 1079 bp, Homo sapiens
cgttccaggacgctgaggaccacctcctcccctaacgcacagcccaacgatcctaaaagtaaaaaccctgagtttctgagtcaagactgagctggtggggtggggaccgagtaggcgtggatggggagcccagcgggtccccagcggagaaaatgggtgagacgcctggggccgcggtctccagaattcgcctgggagggagagtggcgctacggcgccgccttcctggggagccgcttcgggctccggatgtccgctggggcccgacgcttgggtcccgacgcgcggttcgcactttccaggtttcttccccagggaacagagcttgagcggggggccacccccccgtcctaccggagttctgaggtgcggtcaggcgcggagagcggacgcccagcgccagattctgtgggctccggagttcaggcccactgagccgcagctgagcacaggcggggcaggaaaaaggatgaggtaagtttgttcctgtcaattgggaaccccctcaaccacttccattccccaaatacctgcgctgctaccgatgcctcttggagaccaaggagttagggtgccttctgggatctgacatctgcctcaccccagctggcagcagctgcatcactctccacaaaaagaacagcagcggttctgacgtcatggtgagtgactgccgaagtaaggagcagatgagtgattgttcaaatacccgaacttctccggtgtctggcttctggatattctctcaatactgcttcctggatttctgcaatgaccctcaaaacagagggctctatactccttagtgtgactgcagcaaactttggtgtaaaattccaccagtttccagccaccttcctgacttctatctgggcttggccaggacttctagtccctcataccagccctccttgcctccctccagccactggaccccagccttggctcttcctcttggttgacgcccttcagcacacttactgctactctgtacccccagccctactgcccaccaggtttcctctcttgtcccctagtccctggatgtttctcccaaataaatttgtgtgtaaactgtt

SEQ ID NO: 14455 - protein, 104 aa, Homo sapiens [sequence omitted]

SEQ ID NO: 14456 - DNA, 720 bp, Homo sapiens
atgcagaccttcccagttgctggggcgctggaccctgctatactggacacaagcagcccccaagccctctacacggtcctcttaatagtgctggtcatgatgagcttggtgtttggtaagtttgttcctgtcaattgggaaccccctcaaccacttccattccccaaatacctgcgctgctaccgatgcctcttggagaccaaggagttagggtgccttctgggatctgacatctgcctcaccccagctggcagcagctgcatcactctccacaaaaagaacagcagcggttctgacgtcatggtgagtgactgccgaagtaaggagcagatgagtgattgttcaaatacccgaacttctccggtgtctggcttctggatattctctcaatactgcttcctggatttctgcaatgaccctcaaaacagagggctctatactccttagtgtgactgcagcaaactttggtgtaaaattccaccagtttccagccaccttcctgacttctatctgggcttggccaggacttctagtccctcataccagccctccttgcctccctccagccactggaccccagccttggctcttcctcttggttgacgcccttcagcacacttactgctactctgtacccccagccctactgcccaccaggtttcctctcttgtcccctagtccctggatgtttctcccaaataaatttgtgtgtaaactgtt

SEQ ID NO: 14457 - protein, 148 aa, Homo sapiens; identical to SEQ ID NO: 14443

SEQ ID NO: 14458 - DNA, 950 bp, Homo sapiens
atgcagaccttcccagttgctggggcgctggaccctgctatactggacacaaggtaggagcactcagaagggacaccgtcatctgctgctgtcgccatggcgattattcaacgccctgcctcttcaccccaggaaaaccttcgcggaacccgtcaccatggaaacgaactctctggactcttagcgcgccctgggctggccctgctgggtggacaggagaggagcaaaacgcaacaaagacgggattaattactcggaggccgcgccccctccgaagaaggccccaccctgccccggcctcacccctccccgaaataattcgaggaaatattccgcgaatgctgggtaagtttgttcctgtcaattgggaaccccctcaaccacttccattccccaaatacctgcgctgctaccgatgcctcttggagaccaaggagttagggtgccttctgggatctgacatctgcctcaccccagctggcagcagctgcatcactctccacaaaaagaacagcagcggttctgacgtcatggtgagtgactgccgaagtaaggagcagatgagtgattgttcaaatacccgaacttctccggtgtctggcttctggatattctctcaatactgcttcctggatttctgcaatgaccctcaaaacagagggctctatactccttagtgtgactgcagcaaactttggtgtaaaattccaccagtttccagccaccttcctgacttctatctgggcttggccaggacttctagtccctcataccagccctccttgcctccctccagccactggaccccagccttggctcttcctcttggttgacgcccttcagcacacttactgctactctgtacccccagccctactgcccaccaggtttcctctcttgtcccctagtccctggatgtttctcccaaataaatttgtgtgtaaactgtt

SEQ ID NO: 14459 - protein, 112 aa, Homo sapiens; identical to SEQ ID NO: 14445

SEQ ID NO: 14460 - DNA, 830 bp, Homo sapiens
atgcagaccttcccagttgctggggcgctggaccctgctatactggacacaaggtttcttccccagggaacagagcttgagcggggggccacccccccgtcctaccggagttctgaggtgcggtcaggcgcggagagcggacgcccagcgccagattctgtgggctccggagttcaggcccactgagccgcagctgagcacaggcggggcaggaaaaaggatgaggtaagtttgttcctgtcaattgggaaccccctcaaccacttccattccccaaatacctgcgctgctaccgatgcctcttggagaccaaggagttagggtgccttctgggatctgacatctgcctcaccccagctggcagcagctgcatcactctccacaaaaagaacagcagcggttctgacgtcatggtgagtgactgccgaagtaaggagcagatgagtgattgttcaaatacccgaacttctccggtgtctggcttctggatattctctcaatactgcttcctggatttctgcaatgaccctcaaaacagagggctctatactccttagtgtgactgcagcaaactttggtgtaaaattccaccagtttccagccaccttcctgacttctatctgggcttggccaggacttctagtccctcataccagccctccttgcctccctccagccactggaccccagccttggctcttcctcttggttgacgcccttcagcacacttactgctactctgtacccccagccctactgcccaccaggtttcctctcttgtcccctagtccctggatgtttctcccaaataaatttgtgtgtaaactgtt

SEQ ID NO: 14461 - protein, 61 aa, Homo sapiens; identical to SEQ ID NO: 1557

SEQ ID NO: 14462 - DNA, 908 bp, Homo sapiens
tagcgcgccctgggctggccctgctgggtggacaggagaggagcaaaacgcaacaaagacgggattaattactcggaggccgcgccccctccgaagaaggccccaccctgccccggcctcacccctccccgaaataattcgaggaaatattccgcgaatgctggtctttctgggcgggcgtctcccgtctgtttcttcccatcttcccccttatcatcctgggactggataattcttgaatagtctgggaggtagcagggaacccgagttcggagcctcgaccagaacctccagacgggaaattggagcaggtggtgtcgttccaggacgctgaggaccacctcctcccctaacgcacagcccaacgatcctaaaaggaacagagcttgagcggggggccacccccccgtcctaccggagttctgaggtgcggtcaggcgcggagagcggacgcccagcgccagattctgtgggctccggagttcaggcccactgagccgcagctgagcacaggcggggcaggaaaaaggatgaggtaagtttgttcctgtcaattgggaaccccctcaaccacttccattccccaaatacctgcgctgctaccgatgcctcttggagaccaaggagttagggtgccttctgggatctgacatctgcctcaccccagctggcagcagctgcatcactctccacaaaaagaacactgaatagcttctaccctatcaaggtgcgcagctttgacggggaccctccagatctccaggtgcccttgcctgtcctcaagctgtctgcttccgcatctgtctgcagttactgctggtgttgctcttctcctgcatcctccacggcttcttcagtctccttcatggagcgttttctctctgacccttagtggttcatgttcacca

SEQ ID NO: 14463 - protein, 79 aa, Homo sapiens
RALGWPCWVDRRGAKRNKDGINYSEAAPPPKKAPPCPGLTPPRNNSRKYSANAGLSGRASPVCFFPSSPLSSWDWIILE

SEQ ID NO: 14464 - DNA, 919 bp, Homo sapiens
tgctaccagtgcagggataggggtgggccagttgtcacccgtctccctctgagctctcccttcccactgctctgttctctgaagataccagggtcctgtactgctgatccggagaaccaaggatgagatcatcaccaccacgtgagtgcgtgggaatctcggccctcaggaaccccagagatggccaggaacttgtcccttctacctctgcccaccagaaacctgggtatctagacccttcctcctaacctccagcccctccagggtacattcttctcacccccagggttcctgaggacatcatgtccaaccgaggcaatgacctcctgctgaagctcctgcagcatcggtatccccgggtgatggcagaggagggtcttcgagtggtgaggcagtggttggaggcctcctcacagctggaggaagcctcaatttatagccgatgggaggtggaagaggactggtgtctgtctgtcctccgctcctaccaggcagaacacgggcccgacttcccctggagcgtgggggaggacatgagtgcagatggacggcggcagctggctttgtttctggctcggaagcatctgcacaactttgaggccactcactgcaccccactcccagcccagaacttccagatgccctggcacctctagggaccaactgggactcattatggaagaatggggtgagaggagacatgaggaaagaccctcttatttgtgattctctgtgttcatgttgctgtttatagtttgtggaaagtgggggaccatcccccttctcaccactgttcctcttgcacgtttcccctcattcatgtggctgtacttaaccttctccaacatacatcctgcattacatgaatggattattcctaataattaataaaaaggtattttttctactatcaggctaa

SEQ ID NO: 14465 - protein, 117 aa, Homo sapiens [sequence omitted]

SEQ ID NO: 14466 - DNA, 1088 bp, Homo sapiens
gccacgtgggcagccatgtcctacccagatgttagtgccatgatcctggatgcctcctttgatgacctggtgcccttggccttgaaggtcatgccagacagctggagtgagtgcagctcccaggcctgcccttcctgggaaggggtgggctggaactgggaactgttctgagatggctcccttttcttgggtggggagtaagtcgccccattgttggaagcaggaggactcctttgtctgggggcctcagttttctttctccgtgaatagtgaggacctttatgttgggcaagggctttgtctctgccatcccttcacctttatcccactctagggggcctggtgaccaggaccgtgaggcagcatctcaatctaaacaacgcggagcagctgtgcagataccagggtcctgtactgctgatccggagaaccaaggatgagatcatcaccaccacggttcctgaggacatcatgtccaaccgaggcaatgacctcctgctgaagctcctgcagcatcggtatccccgggtgatggcagaggagggtcttcgagtggtgaggcagtggttggaggcctcctcacagctggaggaagcctcaatttatagccgatgggaggtggaagaggactggtgtctgtctgtcctccgctcctaccaggcagaacacgggcccgacttcccctggagcgtgggggaggacatgagtgcagatggacggcggcagctggctttgtttctggctcggaagcatctgcacaactttgaggccactcactgcaccccactcccagcccagaacttccagatgccctggcacctctagggaccaactgggactcattatggaagaatggggtgagaggagacatgaggaaagaccctcttatttgtgattctctgtgttcatgttgctgtttatagtttgtggaaagtgggggaccatcccccttctcaccactgttcctcttgcacgtttcccctcattcatgtggctgtacttaaccttctccaacatacatcctgcattacatgaatggattattcctaataattaataaaaaggtattttttctactatcaggctaa

SEQ ID NO: 14467 - protein, 117 aa, Homo sapiens [sequence omitted]

SEQ ID NO: 14468 - DNA, 2270 bp, Homo sapiens
cataatgggaaataaggggagcctgcttgtcaagccagttatccgcaaaatctgcgctctgtgtgcttcctgagttaaagtcacgcctacggactggccgcctcctttctttttcgctctttaccgctttctcattccgactgccactctttgttctttcctctccgcgtccccccgaccctgtgtgtcgtggttcgtgccggtcccagttgagtcttgagtcccgggaagagaccctgcgcggactggggagccgttgaattttgctgtcagactcccagtttcctcttcttcagtgcctcttcatgcctcccccggctctgtttttatcttccctttaccctcgccttgaatttcagaatgacttttacagatcctgtatccgtcggtcctcccctcaacccccgcccaacctagcctggagacccgagtcattgtattctggagagctggcgggtggtggatacgtactatcagccccgtgccctggagaaacatgctgacagcatcctggcactggcttcagtattctggtccatctcttattactcctctcccttcgccttcttctacttgtacaggaaaggttacttgagtttgtccaaagtggtgccgttttctcactatgctgggacattgctgctacttctggcaggtgtggcctgcctccgaggcattggccgctggaccaacccccagtaccggcagttcatcaccatcttggaagcaacacatcggaaccagtcttcagaaaacaagaggcagcttgccaactacaactttgacttccggagctggccagtcgacttccactgggaagaacccagcagccggaaggagtctcgagggggcccttcccgccggggtgtggccctgcttcgcccagagcccctgcaccgggggacagcagacaccctcctcaaccgggttaagaagctgccttgtcagatcaccagctacctggtggcgcacaccctagggcgccggatgctgtatccaggctctgtgtacctgctgcagaaggccctcatgcctgtgctgctgcagggccaggcccgactggtggaagagtgtaatgggcgccgggcaaagctgctggcctgtgatggcaatgagattgacaccatgtttgtggaccggcgggggacagctgagccccagggacagaagctggtgatctgctgtgaggggaatgctgggttttatgaggtgggctgcgtctccacgcccctggaagctggatattcagtcctgggctggaatcatccaggctttgctggaagcacgggggtgccattcccgcagaatgaggctaatgccatggatgtggtggtccagtttgccatccaccgcctaggcttccagccccaggacatcatcatctacgcctggtccatcggcggcttcactgccacgtgggcagccatgtcctacccagatgttagtgccatgatcctggatgcctcctttgatgacctggtgcccttggccttgaaggtcatgccagacagctggaggggcctggtgaccaggaccgtgaggcagcatctcaatctaaacaacgcggagcagctgtgcagataccagggtcctgtactgctgatccggagaaccaaggatgagatcatcaccaccacggttcctgaggacatcatgtccaaccgaggcaatgacctcctgctgaagctcctgcagcatcggtatccccgggtgatggcagaggagggtcttcgagtggtgaggcagtggttggaggcctcctcacagctggaggaagcctcaatttatagccgatgggaggtggaagaggactggtgtctgtctgtcctccgctcctaccaggcagaacacgggcccgacttcccctggagcgtgggggaggacatgagtgcagatggacggcggcagctggctttgtttctggctcggaagcatctgcacaactttgaggccactcactgcaccccactcccagcccagaacttccagatgccctggcacctctagggaccaactgggactcattatggaagaatggggtgagaggagacatgaggaaagaccctcttatttgtgattctctgtgttcatgttgctgtttatagtttgtggaaagtgggggaccatcccccttctcaccactgttcctcttgcacgtttcccctcattcatgtggctgtacttaaccttctccaacatacatcctgcattacatgaatggattattcctaataattaataaaaaggtattttttctactatcaggctaa

SEQ ID NO: 14469 - protein, 339 aa, Homo sapiens
MLYPGSVYLLQKALMPVLLQGQARLVEECNGRRAKLLACDGNEIDTMFVDRRGTAEPQGQKLVICCEGNAGFYEVGCVSTPLEAGYSVLGWNHPGFAGSTGVPFPQNEANAMDVVVQFAIHRLGFQPQDIIIYAWSIGGFTATWAAMSYPDVSAMILDASFDDLVPLALKVMPDSWRGLVTRTVRQHLNLNNAEQLCRYQGPVLLIRRTKDEIITTTVPEDIMSNRGNDLLLKLLQHRYPRVMAEEGLRVVRQWLEASSQLEEASIYSRWEVEEDWCLSVLRSYQAEHGPDFPWSVGEDMSADGRRQLALFLARKHLHNFEATHCTPLPAQNFQMPWHL

SEQ ID NO: 14470 - DNA, 2075 bp, Homo sapiens
ctgaaaatgtcgcaactcgcccggaggcggagccggtacgggctgacgtcaagggcacacaacacctcagaggcagggagggcggggccggcagggggacctgctgctggaagagcagcggcccgagccggggccatggcgaagctgctgagctgcgtcctaggcccccggctctacaaaatctaccgggagagggactctgaaagggccccggccagcgtccctgagacgccaacggcagtcactgccccccattccagctcctgggatacgtactatcagccccgtgccctggagaaacatgctgacagcatcctggcactggcttcagtattctggtccatctcttattactcctctcccttcgccttcttctacttgtacaggaaaggttacttgagtttgtccaaagtggtgccgttttctcactatgctgggacattgctgctacttctggcaggtgtggcctgcctccgaggcattggccgctggaccaacccccagtaccggcagttcatcaccatcttggaagcaacacatcggaaccagtcttcagaaaacaagaggcagcttgccaactacaactttgacttccggagctggccagtcgacttccactgggaagaacccagcagccggaaggagtctcgagggggcccttcccgccggggtgtggccctgcttcgcccagagcccctgcaccgggggacagcagacaccctcctcaaccgggttaagaagctgccttgtcagatcaccagctacctggtggcgcacaccctagggcgccggatgctgtatccaggctctgtgtacctgctgcagaaggccctcatgcctgtgctgctgcagggccaggcccgactggtggaagagtgtaatgggcgccgggcaaagctgctggcctgtgatggcaatgagattgacaccatgtttgtggaccggcgggggacagctgagccccagggacagaagctggtgatctgctgtgaggggaatgctgggttttatgaggtgggctgcgtctccacgcccctggaagctggatattcagtcctgggctggaatcatccaggctttgctggaagcacgggggtgccattcccgcagaatgaggctaatgccatggatgtggtggtccagtttgccatccaccgcctaggcttccagccccaggacatcatcatctacgcctggtccatcggcggcttcactgccacgtgggcagccatgtcctacccagatgttagtgccatgatcctggatgcctcctttgatgacctggtgcccttggccttgaaggtcatgccagacagctggaggggcctggtgaccaggaccgtgaggcagcatctcaatctaaacaacgcggagcagctgtgcagataccagggtcctgtactgctgatccggagaaccaaggatgagatcatcaccaccacggttcctgaggacatcatgtccaaccgaggcaatgacctcctgctgaagctcctgcagcatcggtatccccgggtgatggcagaggagggtcttcgagtggtgaggcagtggttggaggcctcctcacagctggaggaagcctcaatttatagccgatgggaggtggaagaggactggtgtctgtctgtcctccgctcctaccaggcagaacacgggcccgacttcccctggagcgtgggggaggacatgagtgcagatggacggcggcagctggctttgtttctggctcggaagcatctgcacaactttgaggccactcactgcaccccactcccagcccagaacttccagatgccctggcacctctagggaccaactgggactcattatggaagaatggggtgagaggagacatgaggaaagaccctcttatttgtgattctctgtgttcatgttgctgtttatagtttgtggaaagtgggggaccatcccccttctcaccactgttcctcttgcacgtttcccctcattcatgtggctgtacttaaccttctccaacatacatcctgcattacatgaatggattattcctaataattaataaaaaggtattttttctactatcaggctaa

SEQ ID NO: 14471 - protein, 601 aa, Homo sapiens
MSQLARRRSRYGLTSRAHNTSEAGRAGPAGGPAAGRAAARAGAMAKLLSCVLGPRLYKIYRERDSERAPASVPETPTAVTAPHSSSWDTYYQPRALEKHADSILALASVFWSISYYSSPFAFFYLYRKGYLSLSKVVPFSHYAGTLLLLLAGVACLRGIGRWTNPQYRQFITILEATHRNQSSENKRQLANYNFDFRSWPVDFHWEEPSSRKESRGGPSRRGVALLRPEPLHRGTADTLLNRVKKLPCQITSYLVAHTLGRRMLYPGSVYLLQKALMPVLLQGQARLVEECNGRRAKLLACDGNEIDTMFVDRRGTAEPQGQKLVICCEGNAGFYEVGCVSTPLEAGYSVLGWNHPGFAGSTGVPFPQNEANAMDVVVQFAIHRLGFQPQDIIIYAWSIGGFTATWAAMSYPDVSAMILDASFDDLVPLALKVMPDSWRGLVTRTVRQHLNLNNAEQLCRYQGPVLLIRRTKDEIITTTVPEDIMSNRGNDLLLKLLQHRYPRVMAEEGLRVVRQWLEASSQLEEASIYSRWEVEEDWCLSVLRSYQAEHGPDFPWSVGEDMSADGRRQLALFLARKHLHNFEATHCTPLPAQNFQMPWHL

SEQ ID NO: 14472 - DNA, 575 bp, Homo sapiens
gctggaagagcagcggcccgagccggggccatggcgaagctgctgagctgcgtcctaggcccccggctctacaaaatctaccgggagagggactctgaaagggccccggccagcgtccctgagacgccaacggcagtcactgccccccattccagctcctgggatacgtactatcagccccgtgccctggagaaacatgctgacagcatcctggcactgctggctttgtttctggctcggaagcatctgcacaactttgaggccactcactgcaccccactcccagcccagaacttccagatgccctggcacctctagggaccaactgggactcattatggaagaatggggtgagaggagacatgaggaaagaccctcttatttgtgattctctgtgttcatgttgctgtttatagtttgtggaaagtgggggaccatcccccttctcaccactgttcctcttgcacgtttcccctcattcatgtggctgtacttaaccttctccaacatacatcctgcattacatgaatggattattcctaataattaataaaaaggtattttttctactatca

SEQ ID NO: 14473 - protein, 95 aa, Homo sapiens
MAKLLSCVLGPRLYKIYRERDSERAPASVPETPTAVTAPHSSSWDTYYQPRALEKHADSILALLALFLARKHLHNFEATHCTPLPAQNFQMPWHL

SEQ ID NO: 14474 - DNA, 615 bp, Homo sapiens
gctctgttctctgaagataccagggtcctgtactgctgatccggagaaccaaggatgagatcatcaccaccacgtgagtgcgtgggaatctcggccctcaggaaccccagagatggccaggaacttgtcccttctacctctgcccaccagaaacctgggtatctagacccttcctcctaacctccagcccctccagggtacattcttctcacccccagggttcctgaggacatcatgtccaaccgaggcaatgacctcctgctgaagctcctgcagcatcggtatccccgggtgatggcagaggagggtcttcgagtggtgaggcagtggttggaggcctcctcacagctggaggaagcctcaatttatagccgatgggaggtggaagaggactggtgtctgtctgtcctccgctcctaccaggcagaacacgggcccgacttcccctggagcgtgggggaggacatgagtgcagatggacggcggcagctggctttgtttctggtgagctaaggagtgggaagtgggaagggttcttgaatggccagggctcacatagggggactggggataccctataagcattggaagtggcagcttttgtagagtgggtgg

SEQ ID NO: 14475 - protein, 92 aa, Homo sapiens [sequence omitted]

SEQ ID NO: 14476 - DNA, 1030 bp, Homo sapiens
ataatgggaaataaggggagcctgcttgtcaagccagttatccgcaaaatctgcgctctgtgtgcttcctgagttaaagtcacgcctacggactggccgcctcctttctttttcgctctttaccgctttctcattccgactgccactctttgttctttcctctccgcgtccccccgaccctgtgtgtcgtggttcgtgccggtcccagttgagtcttgagtcccgggaagagaccctgcgcggactggggagccgttgaattttgctgtcagactcccagtttcctcttcttcagtgcctcttcatgcctcccccggctctgtttttatcttccctttaccctcgccttgaatttcagaatgacttttacagatcctgtatccgtcggtcctcccctcaacccccgcccaacctagcctggagacccgagtcattgtattctggagagctggcgggtggtggatacgtactatcagccccgtgccctggagaaacatgctgacagcatcctggcactggcttcagtattctggtccatctcttattactcctctcccttcgccttcttctacttgtacaggaaaggttacttgagtttgtccaaagtggtgccgttttctcactatgctgggacattgctgctacttctggcaggtgtggcctgcctccgaggcattggccgctggaccaacccccagtaccggcagttcatcaccatcttggaagcaacacatcggaaccagtcttcagaaaacaagaggcagcttgccaactacaactttgacttccggagctggccagtcgacttccactgggaagaacccagcagccggaaggagtctcgagggggcccttcccgccggggtgtggccctgcttcgcccagagcccctgcaccgggggacagcagacaccctcctcaaccgggttaagaagctgccttgtcagatcaccaggtgggaaacagcagcgaggagaggcccactggggtggaggggccatttcaggagtgctctgggagtgggcgctcc

SEQ ID NO: 14477 - protein, 134 aa, Homo sapiens
MLGHCCYFWQVWPASEALAAGPTPSTGSSSPSWKQHIGTSLQKTRGSLPTTTLTSGAGQSTSTGKNPAAGRSLEGALPAGVWPCFAQSPCTGGQQTPSSTGLRSCLVRSPGGKQQRGEAHWGGGAISGVLWEWA

SEQ ID NO: 14478 - DNA, 1267 bp, Homo sapiens
cccatggcagtcttattcctcctcctgttcctatgtggaactccccaggctgcagacaacatgcaggccatctatgtggccttgggggaggcagtagagctgccatgtccctcaccacctactctacatggggacgaacacctgtcatggttctgcagccctgcagcaggctccttcaccaccctggtagcccaagtccaagtgggcaggccagccccagaccctggaaaaccaggaagggaatccaggctcagactgctggggaactattctttgtggttggagggatccaaagaggaagatgccgggcggtactggtgcgctgtgctaggtcagcaccacaactaccagaactggagggtgtacgacgtcttggtgctcaaaggatcccagttatctgcaagggctgcagatggatccccctgcaatgtcctcctgtgctctgtggtccccagcagacgcatggactctgtgacctggcaggaagggaagggtcccgtgaggggccgtgttcagtccttctggggcagtgaggctgccctgctcttggtgtgtcctggggaggggctttctgagcccaggagccgaagaccaagaatcatccgctgcctcatgactcacaacaaaggggtcagctttagcctggcagcctccatcgatgcttctcctgccctctgtgccccttccacgggctgggacatgccttggattctgatgctgctgctcacaatgggccagggagttgtcatcctggccctcagcatcgtgctctggaggcagagggtccgtggggctccaggcagaggaaaccgaatgcggtgctacaactgtggtggaagccccagcagttcttgcaaagaggccgtgaccacctgtggcgagggcagaccccagccaggcctggaacagatcaagctacctggaaaccccccagtgaccttgattcaccaacatccagcctgcgtcgcagcccatcattgcaatcaagtggagacagagtcggtgggagacgtgacttatccagcccacagggactgctacctgggagacctgtgcaacagcgccgtggcaagccatgtggcccctgcaggcattttggctgcagcagctaccgccctgacctgtctcttgccaggactgtggagcggatagggggagtaggagtagagaagggaacaagggagcaagggaacaagggacatctgaacatctaatgtgagaagagaaacatccttctgtgagtcattaaaatctatgaaccactcta

SEQ ID NO: 14479 - protein, 382 aa, Homo sapiens
MAVLFLLLFLCGTPQAADNMQAIYVALGEAVELPCPSPPTLHGDEHLSWFCSPAAGSFTTLVAQVQVGRPAPDPGKPGRESRLRLLGNYSLWLEGSKEEDAGRYWCAVLGQHHNYQNWRVYDVLVLKGSQLSARAADGSPCNVLLCSVVPSRRMDSVTWQEGKGPVRGRVQSFWGSEAALLLVCPGEGLSEPRSRRPRIIRCLMTHNKGVSFSLAASIDASPALCAPSTGWDMPWILMLLLTMGQGVVILALSIVLWRQRVRGAPGRGNRMRCYNCGGSPSSSCKEAVTTCGEGRPQPGLEQIKLPGNPPVTLIHQHPACVAAHHCNQVETESVGDVTYPAHRDCYLGDLCNSAVASHVAPAGILAAAATALTCLLPGLWSG

SEQ ID NO: 14480 - DNA, 898 bp, Homo sapiens; identical to SEQ ID NO: 4736

SEQ ID NO: 14481 - protein, 297 aa, Homo sapiens; identical to SEQ ID NO: 4737

SEQ ID NO: 14482 - DNA, 404 bp, Homo sapiens
atgggcacctccagcatcttcctctgcgtgctgttcctctgtggggcactgggtctcaccatgtcccctgcccggggaaggctccgctgctacatctgtggcttcaccaaaccctgccaccctgttcccaccgagtgtcgggacgatgaagcttgtggcatcagtattggcacttcagaccagagtgagatcactgagtgaaaaagctgcctctcaagggcccagtgccctctgccaggctatgccacctactggctgcactcctacactctgtggcaccactgctgcgagcaggacctgtgcaacatagccgcttccccacagcagctcaccagcctcctcgcctccctgcccctctttgtggccagcttcgctgggagaggacacctcctccactagcttcc

SEQ ID NO: 14483 - protein, 66 aa, Homo sapiens
MGTSSIFLCVLFLCGALGLTMSPARGRLRCYICGFTKPCHPVPTECRDDEACGISIGTSDQSEITE

SEQ ID NO: 14484 - DNA, 501 bp, Homo sapiens
atgggcacctccagcatcttcctctgcgtgctgttcctctgtggggcactgggtctcaccatgtcccctgcccggggaaggctccgctgctacatctgtggcttcaccaaaccctgccaccctgttcccaccgagtgtcgggacgatgaagcttgtggcatcagtattggcacttcaggtaggactctggtccaatggcccttctccaggaggctccctacctccatccatccggcctttcctgtggcccccgcctcagcatgcctctttcatcccacagaccagagtgagatcactgagtgaaaaagctgcctctcaagggcccagtgccctctgccaggctatgccacctactggctgcactcctacactctgtggcaccactgctgcgagcaggacctgtgcaacatagccgcttccccacagcagctcaccagcctcctcgcctccctgcccctctttgtggccagcttcgctgggagaggacacctcctccactag

SEQ ID NO: 14485 - protein, 100 aa, Homo sapiens
MGTSSIFLCVLFLCGALGLTMSPARGRLRCYICGFTKPCHPVPTECRDDEACGISIGTSGRTLVQWPFSRRLPTSIHPAFPVAPASACLFHPTDQSEITE

SEQ ID NO: 14486 - DNA, 638 bp, Homo sapiens
atgaaaccccagtttgttgggatcttgctcagctccctgctaggggctgccttgggaaaccgaatgcggtgctacaactgtggtggaagccccagcagttcttgcaaagaggccgtgaccacctgtggcgagggcagaccccagccaggcctggaacagatcaagctacctggaaaccggaggtgttttttgagggggctgaaaatccctttgggctccttgaaatcacatctgctctgccccagaaggcaagtcctgaagccaggagtccaacaccccagtttcattctctctctcagccccagtgaccttgattcaccaacatccagcctgcgtcgcagcccatcattgcaatcaagtggagacagagtcggtgggagacgtgacttatccagcccacagggactgctacctgggagacctgtgcaacagcgccgtggcaagccatgtggcccctgcaggcattttggctgcagcagctaccgccctgacctgtctcttgccaggactgtggagcggatagggggagtaggagtagagaagggaacaagggagcaagggaacaagggacatctgaacatctaatgtgagaagagaaacatccttctgtgagtcattaaaatctatgaaccactcta

SEQ ID NO: 14487 - protein, 194 aa, Homo sapiens
MKPQFVGILLSSLLGAALGNRMRCYNCGGSPSSSCKEAVTTCGEGRPQPGLEQIKLPGNRRCFLRGLKIPLGSLKSHLLCPRRQVLKPGVQHPSFILSLSPSDLDSPTSSLRRSPSLQSSGDRVGGRRDLSSPQGLLPGRPVQQRRGKPCGPCRHFGCSSYRPDLSLARTVERIGGVGVEKGTREQGNKGHLNI

SEQ ID NO: 14488 - DNA, 517 bp, Homo sapiens
atgaaaccccagtttgttgggatcttgctcagctccctgctaggggctgccttgggaaaccgaatgcggtgctacaactgtggtggaagccccagcagttcttgcaaagaggccgtgaccacctgtggcgagggcagaccccagccaggcctggaacagatcaagctacctggaaaccccccagtgaccttgattcaccaacatccagcctgcgtcgcagcccatcattgcaatcaagtggagacagagtcggtgggagacgtgacttatccagcccacagggactgctacctgggagacctgtgcaacagcgccgtggcaagccatgtggcccctgcaggcattttggctgcagcagctaccgccctgacctgtctcttgccaggactgtggagcggatagggggagtaggagtagagaagggaacaagggagcaagggaacaagggacatctgaacatctaatgtgagaagagaaacatccttctgtgagtcattaaaatctatgaaccactcta

SEQ ID NO: 14489 - protein, 133 aa, Homo sapiens; identical to SEQ ID NO: 1565

SEQ ID NO: 14490 - DNA, 608 bp, Homo sapiens
atgaaaccccagtttgttgggatcttgctcagctccctgctaggggctgccttgggtaaggaggcggccagctagcttctcacacaggccttctgccagccggctccaccgagggcccaggtccagcgcctcttttctcctgccaggaaaccgaatgcggtgctacaactgtggtggaagccccagcagttcttgcaaagaggccgtgaccacctgtggcgagggcagaccccagccaggcctggaacagatcaagctacctggaaaccccccagtgaccttgattcaccaacatccagcctgcgtcgcagcccatcattgcaatcaagtggagacagagtcggtgggagacgtgacttatccagcccacagggactgctacctgggagacctgtgcaacagcgccgtggcaagccatgtggcccctgcaggcattttggctgcagcagctaccgccctgacctgtctcttgccaggactgtggagcggatagggggagtaggagtagagaagggaacaagggagcaagggaacaagggacatctgaacatctaatgtgagaagagaaacatccttctgtgagtcattaaaatctatgaaccactcta

SEQ ID NO: 14491 - protein, 112 aa, Homo sapiens
MRCYNCGGSPSSSCKEAVTTCGEGRPQPGLEQIKLPGNPPVTLIHQHPACVAAHHCNQVETESVGDVTYPAHRDCYLGDLCNSAVASHVAPAGILAAAATALTCLLPGLWSG

SEQ ID NO: 14492 - DNA, 1070 bp, Homo sapiens
tttcctgggaggtgacctgacccttaggtcttcttataataaatgtacattttatcagactcagacatttattactcaaaatggaaagagggtctggctggctctgtcgcccaggctggagtgcaatggcctgatcacagttcactgcaacctcgacctcctgagctcaagcgatcctccctcctcagcctcctaagtagctgggattacaggcgcacctgaaaactgctaccgctgctgctctcgagggcccaagggaaccctggggcttctctggacggccgccctggggaccgggtgaatctctcctgcggaggagtctctcatcccatccgctgggtctgggcacccagcttcccggcctgcaagggcctgtccaaaggacgccgaccgatcctgtgggcctcttcgagcgggacccccaccgtgcctcccctccagcctttcgtcggccgcctacgctccctggactctggtatccggcggctggagctcctcttgagcgcgggggactcgggcacttttttctgcaagggccgccacgaggacgagagccgtacagtgcttcacgtgctgggggacaggacctattgcaaggcccccgggcctacccatgggtccgtgtatccccagctcctgatcccgctgctgggcgctgggttggtgctcggactgggagctttgggcctggtctggtggctgcacaggcgcctgcccccgcaaccgattcgaccactccctagatttggtgagactaattccaccccattttctttctcctacatgcccactccccacccctcaattcctgagtctgagcccttgctgggagcagacacgttggtcaccttctctccatccttcagctctgtcccccccacatagctccacttgtgaaaaccgagccccagaggccagtaaaggaggaagagcccaagattccaggggacctggaccaggaaccgagcctgctctatgcggatctggaccatctagccctcagcaggccccgccggctgtccacagcggaccctgctgatgcctccaccatctatgcagttgtagtttga

SEQ ID NO: 14493 - protein, 59 aa, Homo sapiens
MYILSDSDIYYSKWKEGLAGSVAQAGVQWPDHSSLQPRPPELKRSSLLSLLSSWDYRRT

SEQ ID NO: 14494 - DNA, 789 bp, Homo sapiens
caaacagccaaacagctgacattcgctgtcactcctgctacaaggtccctgtgctgggctgtgtggaccggcagtcctgccgcctggagccaggacagcaatgcctgacaacacatgcataccttggtaagatgtgggttttctccaatctgcgctgtggcacaccagaagagccctgtcaggaggccttcaaccaaaccaaccgcaagctgggtctgacatataacaccacctgctgcaacaaggacaactgcaacagcgcaggaccccggcccactccagccctgggccttgtcttccttacctccttggctggccttggcctctggctgctgcactgagactcattccattggctgcccctcctcccacctgccttggcctgagcctctctccctgtgtctctgtatcccctggctttacagaatcgtctctccctagctcccatttctttaattaaacactgttccgagtggtctcctcatccatccttcccacctcacacccttcactctcctttttctgggtcccttcccacttccttccaggacctccattggctcctagaagggctccccactttgcttcctatactctgctgtcccctacttgaggagggattgggatctgggcctgaaatggggcttctgtgttgtccccagtgaaggctcccacaaggacctgatgacctcactgtacagagctgactccccaaacccaggctcccatatgtaccccatcccccatactcacctctttccattttgagtaataaatgtctgagtctga

SEQ ID NO: 14495 - protein, 34 aa, Homo sapiens
MHTLVRCGFSPICAVAHQKSPVRRPSTKPTASWV

SEQ ID NO: 14496 - DNA, 937 bp, Homo sapiens
atgaaagcccttatgctgctcaccctgtctgttctgctctgctgggtctcagatggttgcagtgacatctaagagcctccatggaaacagagcgttttcttgagccttctgaagaggggacaactgggccacttacctccagggtgaagtggatttcactgagctgacattcgctgtcactcctgctacaaggtccctgtgctgggctgtgtggaccggcagtcctgccgcctggagccaggacagcaatgcctgacaacacatgcataccttggtaagatgtgggttttctccaatctgcgctgtggcacaccagaagagccctgtcaggaggccttcaaccaaaccaaccgcaagctgggtctgacatataacaccacctgctgcaacaaggacaactgcaacagcgcaggaccccggcccactccagccctgggccttgtcttccttacctccttggctggccttggcctctggctgctgcactgagactcattccattggctgcccctcctcccacctgccttggcctgagcctctctccctgtgtctctgtatcccctggctttacagaatcgtctctccctagctcccatttctttaattaaacactgttccgagtggtctcctcatccatccttcccacctcacacccttcactctcctttttctgggtcccttcccacttccttccaggacctccattggctcctagaagggctccccactttgcttcctatactctgctgtcccctacttgaggagggattgggatctgggcctgaaatggggcttctgtgttgtccccagtgaaggctcccacaaggacctgatgacctcactgtacagagctgactccccaaacccaggctcccatatgtaccccatcccccatactcacctctttccattttgagtaataaatgtctgagtctga

SEQ ID NO: 14497 - protein, 34 aa, Homo sapiens; identical to SEQ ID NO: 14495

SEQ ID NO: 14498 - DNA, 992 bp, Homo sapiens
ctggtcagctgcgtagtaagtgagaagggaggggctaccagaggcagggaagggaggagcctttgggtttataaattccaaaaaggccactcaactcctagagctggatccttgaaaatctactctatcagctgctgtggttgccaccattctcaggaccctcgccatgaaagcccttatgctgctcaccctgtctgttctgctctgctgggtctcagctgacattcgctgtcactcctgctacaaggtccctgtgctgggctgtgtggaccggcagtcctgccgcctggagccaggacagcaatgcctgacaacacatgcataccttggtaagatgtgggttttctccaatctgcgctgtggcacaccagaagagccctgtcaggaggccttcaaccaaaccaaccgcaagctgggtctgacatataacaccacctgctgcaacaaggacaactgcaacagcgcaggaccccggcccactccagccctgggccttgtcttccttacctccttggctggccttggcctctggctgctgcactgagactcattccattggctgcccctcctcccacctgccttggcctgagcctctctccctgtgtctctgtatcccctggctttacagaatcgtctctccctagctcccatttctttaattaaacactgttccgagtggtctcctcatccatccttcccacctcacacccttcactctcctttttctgggtcccttcccacttccttccaggacctccattggctcctagaagggctccccactttgcttcctatactctgctgtcccctacttgaggagggattgggatctgggcctgaaatggggcttctgtgttgtccccagtgaaggctcccacaaggacctgatgacctcactgtacagagctgactccccaaacccaggctcccatatgtaccccatcccccatactcacctctttccattttgagtaataaatgtctgagtctga

SEQ ID NO: 14499 - protein, 125 aa, Homo sapiens; identical to SEQ ID NO: 1569

SEQ ID NO: 14500 - DNA, 2396 bp, Homo sapiens
acatcctaaccatggctgtgtttctgcagctgctaccgctgctgctctcgagggcccaagggaaccctggggcttctctggacggccgccctggggaccgggtgaatctctcctgcggaggagtctctcatcccatccgctgggtctgggcacccagcttcccggcctgcaagggcctgtccaaaggacgccgaccgatcctgtgggcctcttcgagcgggacccccaccgtgcctcccctccagcctttcgtcggccgcctacgctccctggactctggtatccggcggctggagctcctcttgagcgcgggggactcgggcacttttttctgcaagggccgccacgaggacgagagccgtacagtgcttcacgtgctgggggacaggacctattgcaaggcccccgggcctacccatgggtccgtgtatccccagctcctgatcccgctgctgggcgctgggttggtgctcggactgggagctttgggcctggtctggtggctgcacaggcgcctgcccccgcaaccgattcgaccactccctagatttgctctgtcccccccacatagctccacttgtgaaaaccgagccccagaggccagtaaaggaggaagagcccaagattccaggggacctggaccaggaaccgagcctgctctatgcggatctggaccatctagccctcagcaggccccgccggctgtccacagcggaccctgctgatgcctccaccatctatgcagttgtagtttgaagggaagcccttactccaaacctcccaagctaggggatcccagctccccataatccctctcccctccttggttcctcacctggaagaggaaggcaccatggtatagaaataagtgctagactgggagttgggagacctgggttccaggctgtctctgccactggtcttacttctaaacttactcccatctctcctataacctccatgtctccctcaccaccagtgtcctctctatacccaatcaagccctagctccttttttttttttttttgagacggagtctcgctctgttgcccaggctggagtgcagtgacaccatctccctcactgcaagctccgcctgccgggttcacaccattctcctgcctcaggctcctgagtagctgggactacaggcgcccgccaccacgcccagctaattttttgtatttttagtagagacggggtttcactgtgttagccaggatggtcttgatctgctaacctcgtgatccacccgccccggcctcccaaagtgctaggattacaggtgtgagccaccgcgcccggcctgattctttaagctgtttttctttgttgctggtgttttctttttggactcctcttccttgctccatatccctacagtatttcccaccattctaggtttgtccctttctcttcttctgggacactctcatcaacagtcagtcctcagccccctcctctgcaaatgacactcagaactctctctggctcagatctcagatttgggattaacaaacttccacttagacattctgcctgactgacctcaggcatttcgcactctgaatgtcaaacccaactcattgtcatctctgaagctgctcacttaattctcctctgtattctctttaacaacccagttgcccaacccagaaactgggagtcacgcagacctcctttctctcttactcccacacaatgagccatgaagtccagtctttctatcttaacatcactgtcaaacccacactgtattccatgcccagcgctgccacgtgaatgtactctgctcacttccttcctggattacccatagccccacctcatcctcctacccttgctttcctccctgaagtcagagagatcctactcaagagataactgctcctgacagcccttattacagaactgaagtactctccttagcttcagctctgtgcccacgtgccttggctttggatacaaggtactacagcactttgtccactctccaggcttacctgtgtcattccacatgcacatcttagaaaatgccagccttagagaattctccctagccccaaaatgtctttgcccagtgcaattccttcttcctgtattacccctttccctccttcacactatctgcctggctaattcttatttatccttagttcaagtatggccttttctgggaaggtgaccctccttggccaccccttgcatatactttgatgccctagggcgcaccccctttatttccctcatagaaacagccttctgtaaattgttccatgacaacctgtatttcaatttgtaagaaatttgcatgtactgtgagctccccaacgtcaggagactgacccttttgatatcattgctaagcctcattaaatgaatgaatgaaaatgaa

SEQ ID NO: 14501 - protein, 237 aa, Homo sapiens; identical to SEQ ID NO: 1571

SEQ ID NO: 14502 - DNA, 654 bp, Homo sapiens
atggctgtgtttctgcagctgctaccgctgctgctctcgagggcccaagggaaccctggggcttctctggacggccgccctggggaccgggtgaatctctcctgcggaggagtctctcatcccatccgctgggtctgggcacccagcttcccggcctgcaagggcctgtccaaaggacgccgaccgatcctgtgggcctcttcgagcgggacccccaccgtgcctcccctccagcctttcgtcggccgcctacgctccctggactctggtatccggcggctggagctcctcttgagcgcgggggactcgggcacttttttctgcaagggccgccacgaggacgagagccgtacagtgcttcacgtgctgggggacaggacctattgcaaggcccccgggcctacccatggcgcctgcccccgcaaccgattcgaccactccctagatttgctctgtcccccccacatagctccacttgtgaaaaccgagccccagaggccagtaaaggaggaagagcccaagattccaggggacctggaccaggaaccgagcctgctctatgcggatctggaccatctagccctcagcaggccccgccggctgtccacagcggaccctgctgatgcctccaccatctatgcagttgtagtttga

SEQ ID NO: 14503 - protein, 217 aa, Homo sapiens; identical to SEQ ID NO: 1575

SEQ ID NO: 14504 - DNA, 870 bp, Homo sapiens
atggctgtgtttctgcagctgctaccgctgctgctctcgagggcccaagggaaccctggggcttctctggacggccgccctggggaccgggtgaatctctcctgcggaggagtctctcatcccatccgctgggtctgggcacccagcttcccggcctgcaagggcctgtccaaaggacgccgaccgatcctgtgggcctcttcgagcgggacccccaccgtgcctcccctccagcctttcgtcggccgcctacgctccctggactctggtatccggcggctggagctcctcttgagcgcgggggactcgggcacttttttctgcaagggccgccacgaggacgagagccgtacagtgcttcacgtgctgggggacaggacctattgcaaggcccccgggcctacccatgggtccgtgtatccccagctcctgatcccgctgctgggcgctgggttggtgctcggactgggagctttgggcctggtctggtggctgcacaggcgcctgcccccgcaaccgattcgaccactccctagatttgctctgtcccccccacatagctccacttgtgaaaaccgagccccagaggccagtaaaggaggaagagcccaagattccaggggacctggaccaggaaccggtaagggcatggggatgggaaggggatagccagaatctctgaggaaaatggaccaaaaaaaaaaaggcctgaaccccaaggaagactgtggagaccatcttgtcttcctccccttcctcctccagagcctgctctatgcggatctggaccatctagccctcagcaggccccgccggctgtccacagcggaccctgctgatgcctccaccatctatgcagttgtagtttga

SEQ ID NO: 14505 - protein, 222 aa, Homo sapiens; identical to SEQ ID NO: 1583

SEQ ID NO: 14506 - DNA, 2234 bp, Homo sapiens
atggctgtgtttctgcagctgctaccgctgctgctctcgagggcccaagggaaccctggggcttctctggacggccgccctggggaccgggtgaatctctcctgcggaggagtctctcatcccatccgctgggtctgggcacccagcttcccggcctgcaagggcctgtccaaaggacgccgaccgatcctgtgggcctcttcgagcgggacccccaccgtgcctcccctccagcctttcgtcggccgcctacgctccctggactctggtatccggcggctggagctcctcttgagcgcgggggactcgggcacttttttctgcaagggccgccacgaggacgagagccgtacagtgcttcacgtgctgggggacaggacctattgcaaggcccccgggcctacccatgctccacttgtgaaaaccgagccccagaggccagtaaaggaggaagagcccaagattccaggggacctggaccaggaaccgagcctgctctatgcggatctggaccatctagccctcagcaggccccgccggctgtccacagcggaccctgctgatgcctccaccatctatgcagttgtagtttgaagggaagcccttactccaaacctcccaagctaggggatcccagctccccataatccctctcccctccttggttcctcacctggaagaggaaggcaccatggtatagaaataagtgctagactgggagttgggagacctgggttccaggctgtctctgccactggtcttacttctaaacttactcccatctctcctataacctccatgtctccctcaccaccagtgtcctctctatacccaatcaagccctagctccttttttttttttttttgagacggagtctcgctctgttgcccaggctggagtgcagtgacaccatctccctcactgcaagctccgcctgccgggttcacaccattctcctgcctcaggctcctgagtagctgggactacaggcgcccgccaccacgcccagctaattttttgtatttttagtagagacggggtttcactgtgttagccaggatggtcttgatctgctaacctcgtgatccacccgccccggcctcccaaagtgctaggattacaggtgtgagccaccgcgcccggcctgattctttaagctgtttttctttgttgctggtgttttctttttggactcctcttccttgctccatatccctacagtatttcccaccattctaggtttgtccctttctcttcttctgggacactctcatcaacagtcagtcctcagccccctcctctgcaaatgacactcagaactctctctggctcagatctcagatttgggattaacaaacttccacttagacattctgcctgactgacctcaggcatttcgcactctgaatgtcaaacccaactcattgtcatctctgaagctgctcacttaattctcctctgtattctctttaacaacccagttgcccaacccagaaactgggagtcacgcagacctcctttctctcttactcccacacaatgagccatgaagtccagtctttctatcttaacatcactgtcaaacccacactgtattccatgcccagcgctgccacgtgaatgtactctgctcacttccttcctggattacccatagccccacctcatcctcctacccttgctttcctccctgaagtcagagagatcctactcaagagataactgctcctgacagcccttattacagaactgaagtactctccttagcttcagctctgtgcccacgtgccttggctttggatacaaggtactacagcactttgtccactctccaggcttacctgtgtcattccacatgcacatcttagaaaatgccagccttagagaattctccctagccccaaaatgtctttgcccagtgcaattccttcttcctgtattacccctttccctccttcacactatctgcctggctaattcttatttatccttagttcaagtatggccttttctgggaaggtgaccctccttggccaccccttgcatatactttgatgccctagggcgcaccccctttatttccctcatagaaacagccttctgtaaattgttccatgacaacctgtatttcaatttgtaagaaatttgcatgtactgtgagctccccaacgtcaggagactgacccttttgatatcattgctaagcctcattaaatgaatgaatgaaaatgaa

SEQ ID NO: 14507 - protein, 197 aa, Homo sapiens; identical to SEQ ID NO: 1579

SEQ ID NO: 14508 - DNA, 2143 bp, Homo sapiens
ccggagccgccagaccgtcgcgcccctgccccatcgtagtatatgagctcgcctacacaaggacccgcgctaaaagccagagctcccagtccccgaggcttgaagacggggactcccttctccaccaactctgtcctcggggggtggggccccagccgagatcacagcgcgacaggagtgggggtggccgctggaggtgagtcttgcgtggggggccctgaaccgtgtgggggccggagtttgggggtgccgggcccatgcctgcaccagacagagagtatggggagccggtatttgggcgcggagctaggcggggtggactttgggacatagacggggaaccgggtcctggagccgggagtagtgccagcgccccggaaccacgccccctgttaccccgcccctcgcatttcgttttagacctctcccagtccttcgggactcggtctggtttatactaggtcgcgctaggggcagcgtgaccagccagggcggagagaggatgcttaactccttaggctcgaactcctcccttcctacccacctctctcccttctcgttcgggtattcaggacttccattccccagcccctgcctctccagctttctccttctgtcccataacccctgcgggtcgcgggctggacttccagtccctgcggtagcgagcagctgagggttaagggggcggggctgctgcatttttggggagtgagcgcatcctagtggctgccaagaggggcgcccgacagggacctcacaagcccccaagcaggggcaacaggtgttttggagattagagaccctagccttgttcctcaggctcctcttaaagaatctgacccctgagggtgctgggtagagtgaggtcgacaggagcggaaggtctggagtgggtggggcggagtgggagggacgcctagagatggcaggaggaagacctgggcgctcttaaccacccccaacgcccttgtctgcatgtctttttctctgtctcctccttttctgtttcttctcccagacaggtgaagaaacaagaaaactaagaaatccgagcggttggagggggagtctgtgtggatgggatggggacgccgggggaggggctgggccgctgctcccatgccctgatccggggagtcccagagagcctggcgtcgggggaaggtgcgggggctggccttcccgctctggatctggccaaagctcaaagggagcacggggtgctgggaggtaaactgaggcaacgactggggctacagctgctagaactgccacctgaggagtcattgccgctgggaccgctgcttggcgacacggccgtgatccaaggggacacggccctaatcacgcggccctggagccccgctcgtaggccagaggtcgatggagtccgcaaagccctgcaagacctggggctccgaattgtggaaataggagacgagaacgcgacgctggatggcactgacgttctcttcaccggccgggagtttttcgtaggcctctccaaatggaccaatcaccgaggagctgagatcgtggcggacacgttccgggacttcgccgtctccactgtgccagtctcgggtccctcccacctgcgcggtctctgcggcatggggggacctcgcactgttgtggcaggcagcagcgacgctgcccaaaaggctgtccgggcaatggcagtgctgacagatcacccatatgcctccctgaccctcccagatgacgcagctgctgactgtctctttcttcgtcctgggttgcctggtgtgccccctttcctcctgcaccgtggaggtggggatctgcccaacagccaggaggcactgcagaagctctctgatgtcaccctggtacctgtgtcctgctcagaactggagaaggctggcgccgggctcagctccctctgcttggtgctcagcacacgcccccacagctgagggcctggccttggggtactgctggccaggggtaggatagtataggaagtagaaggggaaggagggttagatagagaatgctgaataggcagtagttgggagagagcctcaatattgggggaggggagagtgtagggaaaaggatccactgggtgaatcctccctctcagaaccaataaaatagaattgaccttttagac

SEQ ID NO: 14509 - protein, 285 aa, Homo sapiens; identical to SEQ ID NO: 1585

SEQ ID NO: 14510 - DNA, 2099 bp, Homo sapiens
tccctctcctctccccatcctcaggtggtgtgtaagaagtaccggggattcaccatccccgaggccttccggggagtgcatcggtacttgagcaatgcctacgcccgggaagaattcgcttccacctgtccagatgatgaggagatcgagctcgcctatgagcaagtggcaaaggccctcaaataagcccctcctgggactccctcaaccccctccattttctccacaaaggccctggtggtttccacattgctacccaatggacacactccaaaatggccagtgggcagggaatcctggagcacttgttccgggatggtgtggtggaagaggggatgagggaaagaaatggggggcctgggtcagatttttattgtggggtgggatgagtaggacaacatatttcagtaataaaatacagaataaaaatcaagtgtttttacgcaatggggatttaaagtgtgggcgacatggaatgaggggtgggtcagtgatcttgagctcagggcagaagccaggaattaagaagggaaatgtttgtggtggggctgctatgtttcgtgccggtccgccggtccgccgttgcgctgttctgaggtctacgaagcgtttgcagccccgtcgccagggccggccagatctgggtgggcctgggcagcgctcgctgggcggtgccgatttctggcaaggggggcgcagtctggatgtaatgggcgaggcttagcagggcggaatgggcgtggcccgaagaagccccgccccgtcccgcttagacaatgccccggagccgccagaccgtcgcgcccctgccccatcgtagtatatgagctcgcctacacaaggacccgcgctaaaagccagagctcccagtccccgaggcttgaagacggggactcccttctccaccaactctgtcctcggggggtggggccccagccgagatcacagcgcgacaggagtgggggtggccgctggagacaggtgaagaaacaagaaaactaagaaatccgagcggttggagggggagtctgtgtggatgggatggggacgccgggggaggggctgggccgctgctcccatgccctgatccggggagtcccagagagcctggcgtcgggggaaggtgcgggggctggccttcccgctctggatctggccaaagctcaaagggagcacggggtgctgggaggtaaactgaggcaacgactggggctacagctgctagaactgccacctgaggagtcattgccgctgggaccgctgcttggcgacacggccgtgatccaaggggacacggccctaatcacgcggccctggagccccgctcgtaggccagaggtcgatggagtccgcaaagccctgcaagacctggggctccgaattgtggaaataggagacgagaacgcgacgctggatggcactgacgttctcttcaccggccgggagtttttcgtaggcctctccaaatggaccaatcaccgaggagctgagatcgtggcggacacgttccgggacttcgccgtctccactgtgccagtctcgggtccctcccacctgcgcggtctctgcggcatggggggacctcgcactgttgtggcaggcagcagcgacgctgcccaaaaggctgtccgggcaatggcagtgctgacagatcacccatatgcctccctgaccctcccagatgacgcagctgctgactgtctctttcttcgtcctgggttgcctggtgtgccccctttcctcctgcaccgtggaggtggggatctgcccaacagccaggaggcactgcagaagctctctgatgtcaccctggtacctgtgtcctgctcagaactggagaaggctggcgccgggctcagctccctctgcttggtgctcagcacacgcccccacagctgagggcctggccttggggtactgctggccaggggtaggatagtataggaagtagaaggggaaggagggttagatagagaatgctgaataggcagtagttgggagagagcctcaatattgggggaggggagagtgtagggaaaaggatccactgggtgaatcctccctctcagaaccaataaaatagaattgaccttttagac

SEQ ID NO: 14511 - protein, 285 aa, Homo sapiens; identical to SEQ ID NO: 1585

SEQ ID NO: 14512 - DNA, 461 bp, Homo sapiens
actgtgccagtctcgggtccctcccacctgcgcggtctctgcggcatggggggacctcgcatgtctctttcttcgtcctgggttgcctggtgtgccccctttcctcctgcaccgtggaggtggggatctgcccaacagccaggaggcactgcagaagctctctgatgtcaccctggtacctgtgtcctgctcagaactggagaaggctggcgccgggctcagctccctctgcttggtgctcagcacacgcccccacagctgagggcctggccttggggtactgctggccaggggtaggatagtataggaagtagaaggggaaggagggttagatagagaatgctgaataggcagtagttgggagagagcctcaatattgggggaggggagagtgtagggaaaaggatccactgggtgaatcctccctctcagaaccaataaaatagaattgaccttttaga

SEQ ID NO: 14513 - protein, 39 aa, Homo sapiens [sequence omitted]

SEQ ID NO: 14514 - DNA, 991 bp, Homo sapiens
gaaataggagacgagaacgcgacgctggatggcactgacgttctcttcaccggtgaggctggggggaggcataggtcttggcacagggaagtagagtttgggagactcggccgtctggagccttgtttctaactcactcccgccctcaaacctccgcggcctcccggactcaggccgggagtttttcgtaggcctctccaaatggaccaatcaccgaggagctgagatcgtggcggacacgttccgggtgcggagcgggaccagcctagggagggagggggtgcaggtgggggtcggaagggcctgggcgcccgctgaggaaatgagaggcagagagcagcctatgtttgaagataccccatcacccctcccgcgcccctgaatacctcccttcgctctccctaggacttcgccgtctccactgtgccagtctcgggtccctcccacctgcgcggtctctgcggcatggggggacctcgcactgttgtggcaggcagcagcgacgctgcccaaaaggctgtccgggcaatggcagtgctgacagatcacccatatgcctccctgaccctcccagatgacgcagctgctgactgtctctttcttcgtcctgggttgcctggtgtgccccctttcctcctgcaccgtggaggtggggatctgcccaacagccaggaggcactgcagaagctctctgatgtcaccctggtacctgtgtcctgctcagaactggagaaggctggcgccgggctcagctccctctgcttggtgctcagcacacgcccccacagctgagggcctggccttggggtactgctggccaggggtaggatagtataggaagtagaaggggaaggagggttagatagagaatgctgaataggcagtagttgggagagagcctcaatattgggggaggggagagtgtagggaaaaggatccactgggtgaatcctccctctcagaaccaataaaatagaattgaccttttaga

SEQ ID NO: 14515 - protein, 108 aa, Homo sapiens [sequence omitted]

SEQ ID NO: 14516 - DNA, 1381 bp, Homo sapiens
cgctaggggcagcgtgaccagccagggcggagagaggatgcttaactccttaggctcgaactcctcccttcctacccacctctctcccttctcgttcgggtattcaggacttccattccccagcccctgcctctccagctttctccttctgtcccataacccctgcgggtcgcgggctggacttccagtccctgcggtagcgagcagctgagggttaagggggcggggctgctgcatttttggggagtgagcgcatcctagtggctgccaagaggggcgcccgacagggacctcacaagcccccaagcaggggcaacaggtgttttggagattagagaccctagccttgttcctcaggctcctcttaaagaatctgacccctgagggtgctgggtagagtgaggtcgacaggagcggaaggtctggagtgggtggggcggagtgggagggacgcctagagatggcaggaggaagacctgggcgctcttaaccacccccaacgcccttgtctgcatgtctttttctctgtctcctccttttctgtttcttctcccagacaggtgaagaaacaagaaaactaagaaatccgagcggttggagggggagtctgtgtggatgggatggggacgccgggggaggggctgggccgctgctcccatgccctgatccggggagtcccagagagcctggcgtcgggggaaggtgcgggggctggccttcccgctctggatctggccaaagctcaaagggagcacggggtgctgggaggtaaactgaggcaacgactggggctacagctgctagaactgccacctgaggagtcattgccgctgggaccgctgcttggcgacacggccgtgatccaaggggacacggccctaatcacgcggccctggagccccgctcgtaggccagaggtcgatggagtccgcaaagccctgcaagacctggggctccgaattgtggaaataggagacgagaacgcgacgctggatggcactgacgttctcttcaccggccgggagtttttcgtaggcctctccaaatggaccaatcaccgaggaggcactgcagaagctctctgatgtcaccctggtacctgtgtcctgctcagaactggagaaggctggcgccgggctcagctccctctgcttggtgctcagcacacgcccccacagctgagggcctggccttggggtactgctggccaggggtaggatagtataggaagtagaaggggaaggagggttagatagagaatgctgaataggcagtagttgggagagagcctcaatattgggggaggggagagtgtagggaaaaggatccactgggtgaatcctccctctcagaaccaataaaatagaattgaccttttaga

SEQ ID NO: 14517 - protein, 154 aa, Homo sapiens
MGTPGEGLGRCSHALIRGVPESLASGEGAGAGLPALDLAKAQREHGVLGGKLRQRLGLQLLELPPEESLPLGPLLGDTAVIQGDTALITRPWSPARRPEVDGVRKALQDLGLRIVEIGDENATLDGTDVLFTGREFFVGLSKWTNHRGGTAEAL

SEQ ID NO: 14518 - DNA, 898 bp, Homo sapiens
ccgcttagacaatgccccggagccgccagaccgtcgcgcccctgccccatcgtagtatatgagctcgcctacacaaggacccgcgctaaaagccagagctcccagtccccgaggcttgaagacggggactcccttctccaccaactctgtcctcggggggtggggccccagccgagatcacagcgcgacaggagtgggggtggccgctggaggtcgatggagtccgcaaagccctgcaagacctggggctccgaattgtggaaataggagacgagaacgcgacgctggatggcactgacgttctcttcaccggacttcgccgtctccactgtgccagtctcgggtccctcccacctgcgcggtctctgcggcatggggggacctcgcactgttgtggcaggcagcagcgacgctgcccaaaaggctgtccgggcaatggcagtgctgacagatcacccatatgcctccctgaccctcccagatgacgcagctgctgactgtctctttcttcgtcctgggttgcctggtgtgccccctttcctcctgcaccgtggaggtggggatctgcccaacagccaggaggcactgcagaagctctctgatgtcaccctggtacctgtgtcctgctcagaactggagaaggctggcgccgggctcagctccctctgcttggtgctcagcacacgcccccacagctgagggcctggccttggggtactgctggccaggggtaggatagtataggaagtagaaggggaaggagggttagatagagaatgctgaataggcagtagttgggagagagcctcaatattgggggaggggagagtgtagggaaaaggatccactgggtgaatcctccctctcagaaccaataaaatagaattgaccttttaga

SEQ ID NO: 14519 - protein, 136 aa, Homo sapiens [sequence omitted]

SEQ ID NO: 14520 - DNA, 1831 bp, Homo sapiens
tccctctcctctccccatcctcaggtggtgtgtaagaagtaccggggattcaccatccccgaggccttccggggagtgcatcggtacttgagcaatgcctacgcccgggaagaattcgcttccacctgtccagatgatgaggagatcgagctcgcctatgagcaagtggcaaaggccctcaaataagcccctcctgggactccctcaaccccctccattttctccacaaaggccctggtggtttccacattgctacccaatggacacactccaaaatggccagtgggcagggaatcctggagcacttgttccgggatggtgtggtggaagaggggatgagggaaagaaatggggggcctgggtcagatttttattgtggggtgggatgagtaggacaacatatttcagtaataaaatacagaataaaaatcaagtgtttttacgcaatggggatttaaagtgtgggcgacatggaatgaggggtgggtcagtgatcttgagctcagggcagaagccaggaattaagaagggaaatgtttgtggtggggctgctatgtttcgtgccggtccgccggtccgccgttgcgctgttctgaggtctacgaagcgtttgcagccccgtcgccagggccggccagatctgggtgggcctgggcagcgctcgctgggcggtgccgatttctggcaaggggggcgcagtctggatgtaatgggcgaggcttagcagggcggaatgggcgtggcccgaagaagccccgccccgtcccgcttagacaatgccccggagccgccagaccgtcgcgcccctgccccatcgtagtatatgagctcgcctacacaaggacccgcgctaaaagccagagctcccagtccccgaggcttgaagacggggactcccttctccaccaactctgtcctcggggggtggggccccagccgagatcacagcgcgacaggagtgggggtggccgctggagacaggtgaagaaacaagaaaactaagaaatccgagcggttggagggggagtctgtgtggatgggatggggacgccgggggaggggctgggccgctgctcccatgccctgatccggggagtcccagagagcctggcgtcgggggaaggtgcgggggctggccttcccgctctggatctggccaaagctcaaagggagcacggggtgctgggaggtaaactgaggcaacgactggggctacagctgctagaactgccacctgaggagtcattgccgctgggaccgctgcttggcgacacggccgtgatccaaggggacacggccctaatcacgcggccctggagccccgctcgtaggccagaggtcgatggagtccgcaaagccctgcaagacctggggctccgaattgtggaaataggagacgagaacgcgacgctggatggcactgacgttctcttcaccggtgaggctggggggaggcataggtcttggcacagggaagtagagtttgggagactcggccgtctggagccttgtttctaactcactcccgccctcaaacctccgcggcctcccggactcaggccgggagtttttcgtaggcctctccaaatggaccaatcaccgaggagctgagatcgtggcggacacgttccgggtgcggagcgggaccagcctagggagggagggggtgcaggtgggggtcggaagggcctgggcgcccgctgaggaaatgagaggcagagagcagcctatgtttgaagataccccatcacccctcccgcgcccctgaatacctcccttcgctctccctaggacttcgccgtctccactgtgccagtctcgggtccctccc

SEQ ID NO: 14521 - protein, 158 aa, Homo sapiens
MGTPGEGLGRCSHALIRGVPESLASGEGAGAGLPALDLAKAQREHGVLGGKLRQRLGLQLLELPPEESLPLGPLLGDTAVIQGDTALITRPWSPARRPEVDGVRKALQDLGLRIVEIGDENATLDGTDVLFTGEAGGRHRSWHREVEFGRLGRLEPCF

SEQ ID NO: 14522 - DNA, 1848 bp, Homo sapiens
ccggagccgccagaccgtcgcgcccctgccccatcgtagtatatgagctcgcctacacaaggacccgcgctaaaagccagagctcccagtccccgaggcttgaagacggggactcccttctccaccaactctgtcctcggggggtggggccccagccgagatcacagcgcgacaggagtgggggtggccgctggaggtgagtcttgcgtggggggccctgaaccgtgtgggggccggagtttgggggtgccgggcccatgcctgcaccagacagagagtatggggagccggtatttgggcgcggagctaggcggggtggactttgggacatagacggggaaccgggtcctggagccgggagtagtgccagcgccccggaaccacgccccctgttaccccgcccctcgcatttcgttttagacctctcccagtccttcgggactcggtctggtttatactaggtcgcgctaggggcagcgtgaccagccagggcggagagaggatgcttaactccttaggctcgaactcctcccttcctacccacctctctcccttctcgttcgggtattcaggacttccattccccagcccctgcctctccagctttctccttctgtcccataacccctgcgggtcgcgggctggacttccagtccctgcggtagcgagcagctgagggttaagggggcggggctgctgcatttttggggagtgagcgcatcctagtggctgccaagaggggcgcccgacagggacctcacaagcccccaagcaggggcaacaggtgttttggagattagagaccctagccttgttcctcaggctcctcttaaagaatctgacccctgagggtgctgggtagagtgaggtcgacaggagcggaaggtctggagtgggtggggcggagtgggagggacgcctagagatggcaggaggaagacctgggcgctcttaaccacccccaacgcccttgtctgcatgtctttttctctgtctcctccttttctgtttcttctcccagacaggtgaagaaacaagaaaactaagaaatccgagcggttggagggggagtctgtgtggatgggatggggacgccgggggaggggctgggccgctgctcccatgccctgatccggggagtcccagagagcctggcgtcgggggaaggtgcgggggctggccttcccgctctggatctggccaaagctcaaagggagcacggggtgctgggaggtaaactgaggcaacgactggggctacagctgctagaactgccacctgaggagtcattgccgctgggaccgctgcttggcgacacggccgtgatccaaggggacacggccctaatcacgcggccctggagccccgctcgtaggccagaggtcgatggagtccgcaaagccctgcaagacctggggctccgaattgtggaaataggagacgagaacgcgacgctggatggcactgacgttctcttcaccggtgaggctggggggaggcataggtcttggcacagggaagtagagtttgggagactcggccgtctggagccttgtttctaactcactcccgccctcaaacctccgcggcctcccggactcaggccgggagtttttcgtaggcctctccaaatggaccaatcaccgaggagctgagatcgtggcggacacgttccgggtgcggagcgggaccagcctagggagggagggggtgcaggtgggggtcggaagggcctgggcgcccgctgaggaaatgagaggcagagagcagcctatgtttgaagataccccatcacccctcccgcgcccctgaatacctcccttcgctctccctaggacttcgccgtct

SEQ ID NO: 14523 - protein, 158 aa, Homo sapiens; identical to SEQ ID NO: 14521

SEQ ID NO: 14524 - DNA, 1524 bp, Homo sapiens
ccggagccgccagaccgtcgcgcccctgccccatcgtagtatatgagctcgcctacacaaggacccgcgctaaaagccagagctcccagtccccgaggcttgaagacggggactcccttctccaccaactctgtcctcggggggtggggccccagccgagatcacagcgcgacaggagtgggggtggccgctggaggtgagtcttgcgtggggggccctgaaccgtgtgggggccggagtttgggggtgccgggcccatgcctgcaccagacagagagtatggggagccggtatttgggcgcggagctaggcggggtggactttgggacatagacggggaaccgggtcctggagccgggagtagtgccagcgccccggaaccacgccccctgttaccccgcccctcgcatttcgttttagacctctcccagtccttcgggactcggtctggtttatactaggtcgcgctaggggcagcgtgaccagccagggcggagagaggatgcttaactccttaggctcgaactcctcccttcctacccacctctctcccttctcgttcgggtattcaggacttccattccccagcccctgcctctccagctttctccttctgtcccataacccctgcgggtcgcgggctggacttccagtccctgcggtagcgagcagctgagggttaagggggcggggctgctgcatttttggggagtgagcgcatcctagtggctgccaagaggggcgcccgacagggacctcacaagcccccaagcaggggcaacaggtgttttggagattagagaccctagccttgttcctcaggctcctcttaaagaatctgacccctgagggtgctgggtagagtgaggtcgacaggagcggaaggtctggagtgggtggggcggagtgggagggacgcctagagatggcaggaggaagacctgggcgctcttaaccacccccaacgcccttgtctgcatgtctttttctctgtctcctccttttctgtttcttctcccagacaggtgaagaaacaagaaaactaagaaatccgagcggttggagggggagtctgtgtggatgggatggggacgccgggggaggggctgggccgctgctcccatgccctgatccggggagtcccagagagcctggcgtcgggggaaggtgcgggggctggccttcccgctctggatctggccaaagctcaaagggagcacggggtgctgggaggtaaactgaggcaacgactggggctacagctgctagaactgccacctgaggagtcattgccgctgggaccgctgcttggcgacacggccgtgatccaaggggacacggccctaatcacgcggccctggagccccgctcgtaggccagaggtcgatggagtccgcaaagccctgcaagacctggggctccgaattgtggaaataggagacgagaacgcgacgctggatggcactgacgttctcttcaccggccgggagtttttcgtaggcctctccaaatggaccaatcacc

SEQ ID NO: 14525 - protein, 145 aa, Homo sapiens
MGTPGEGLGRCSHALIRGVPESLASGEGAGAGLPALDLAKAQREHGVLGGKLRQRLGLQLLELPPEESLPLGPLLGDTAVIQGDTALITRPWSPARRPEVDGVRKALQDLGLRIVEIGDENATLDGTDVLFTGREFFVGLSKWTN

SEQ ID NO: 14526 - DNA, 1466 bp, Homo sapiens
tccctctcctctccccatcctcaggtggtgtgtaagaagtaccggggattcaccatccccgaggccttccggggagtgcatcggtacttgagcaatgcctacgcccgggaagaattcgcttccacctgtccagatgatgaggagatcgagctcgcctatgagcaagtggcaaaggccctcaaataagcccctcctgggactccctcaaccccctccattttctccacaaaggccctggtggtttccacattgctacccaatggacacactccaaaatggccagtgggcagggaatcctggagcacttgttccgggatggtgtggtggaagaggggatgagggaaagaaatggggggcctgggtcagatttttattgtggggtgggatgagtaggacaacatatttcagtaataaaatacagaataaaaatcaagtgtttttacgcaatggggatttaaagtgtgggcgacatggaatgaggggtgggtcagtgatcttgagctcagggcagaagccaggaattaagaagggaaatgtttgtggtggggctgctatgtttcgtgccggtccgccggtccgccgttgcgctgttctgaggtctacgaagcgtttgcagccccgtcgccagggccggccagatctgggtgggcctgggcagcgctcgctgggcggtgccgatttctggcaaggggggcgcagtctggatgtaatgggcgaggcttagcagggcggaatgggcgtggcccgaagaagccccgccccgtcccgcttagacaatgccccggagccgccagaccgtcgcgcccctgccccatcgtagtatatgagctcgcctacacaaggacccgcgctaaaagccagagctcccagtccccgaggcttgaagacggggactcccttctccaccaactctgtcctcggggggtggggccccagccgagatcacagcgcgacaggagtgggggtggccgctggagacaggtgaagaaacaagaaaactaagaaatccgagcggttggagggggagtctgtgtggatgggatggggacgccgggggaggggctgggccgctgctcccatgccctgatccggggagtcccagagagcctggcgtcgggggaaggtgcgggggctggccttcccgctctggatctggccaaagctcaaagggagcacggggtgctgggaggtaaactgaggcaacgactggggctacagctgctagaactgccacctgaggagtcattgccgctgggaccgctgcttggcgacacggccgtgatccaaggggacacggccctaatcacgcggccctggagccccgctcgtaggccagaggtcgatggagtccgcaaagccctgcaagacctggggctccgaattgtggaaataggagacgagaacgcgacgctggatggcactgacgttctcttcaccggccgggagtttttcgtaggcctctccaa

SEQ ID NO: 14527 - protein, 140 aa, Homo sapiens
MGTPGEGLGRCSHALIRGVPESLASGEGAGAGLPALDLAKAQREHGVLGGKLRQRLGLQLLELPPEESLPLGPLLGDTAVIQGDTALITRPWSPARRPEVDGVRKALQDLGLRIVEIGDENATLDGTDVLFTGREFFVGL

SEQ ID NO: 14528 - DNA, 735 bp, Homo sapiens
gctgtgccctcccaggtaccccaagctggcagctctgaaccctgagtccaacacagctgggctggacatatttgccaaattttctgcctacatcaagaattcaaacccagcactcaatgacaatctggagaagggactcctgaaagccctgaaggttttagacaattacttaacatcccccctcccagaagaagtggatgaaaccagtgctgaagatgaaggtgtctctcagaggaagtttttggatggcaacgagctcaccctggctgactgcaacctgttgccaaagttacacatagtacaggtggtgtgtaagaagtaccggggattcaccatccccgaggccttccggggagtgcatcggtacttgagcaatgcctacgcccgggaagaattcgcttccacctgtccagatgatgaggagatcgagctcgcctatgagcaagtggcaaaggccctcaaataagcccctcctgggactccctcaaccccctccattttctccacaaaggccctggtggtttccacattgctacccaatggacacactccaaaatggccagtgggcagggaatcctggagcacttgttccgggatggtgtggtggaagaggggatgagggaaagaaatggggggcctgggtcagatttttattgtggggtgggatgagtaggacaacatatttcagtaataaaatacagaataaaaatcaagtgtttttacgcaatggggatt

SEQ ID NO: 14529 - protein, 119 aa, Homo sapiens
MPTPGKNSLPPVQMMRRSSSPMSKWQRPSNKPLLGLPQPPPFSPQRPWWFPHCYPMDTLQNGQWAGNPGALVPGWCGGRGDEGKKWGAWVRFLLWGGMSRTTYFSNKIQNKNQVFLRNG

SEQ ID NO: 14530 - DNA, 1263 bp, Homo sapiens
ccaggttcagggcggggccggtcggtgagtcagcggctctctgatccagcccgggagaggaccgagctggaggagctgggtgtggggtgcgttgggctggtggggaggcctagtttgggtgcaagtaggtctgattgagcttgtgttgtgctgaagggacagccctgggtctaggggagagagtccctgagtgtgagacccgccttccccggtcccagcccctcccagttcccccagggacggccacttcctggtccccgacgcaaccatggctgaagaacaaccgcaggtcgaattgttcgtgaaggctggcagtgatggggccaagattgggaactgcccattctcccagagactgttcatggtactgtggctcaagggagtcaccttcaatgttaccaccgttgacaccaaaaggcggaccgagacagtgcagaagctgtgcccaggggggcagctcccattcctgctgtatggcactgaagtgcacacagacaccaacaagattgaggaatttctggaggcagtgctgtgccctcccaggtaccccaagctggcagctctgaaccctgagtccaacacagctgggctggacatatttgccaaattttctgcctacatcaagaattcaaacccagcactcaatgacaatctggagaagggactcctgaaagccctgaaggttttagacaattacttaacatcccccctcccagaagaagtggatgaaaccagtgctgaagatgaaggtgtctctcagaggaagtttttggatggcaacgagctcaccctggctgactgcaacctgttgccaaagttacacatagtacaggtggtgtgtaagaagtaccggggattcaccatccccgaggccttccggggagtgcatcggtacttgagcaatgcctacgcccgggaagaattcgcttccacctgtccagatgatgaggagatcgagctcgcctatgagcaagtggcaaaggccctcaaataagcccctcctgggactccctcaaccccctccattttctccacaaaggccctggtggtttccacattgctacccaatggacacactccaaaatggccagtgggcagggaatcctggagcacttgttccgggatggtgtggtggaagaggggatgagggaaagaaatggggggcctgggtcagatttttattgtggggtgggatgagtaggacaacatatttcagtaataaaatacagaataaaaatcaagtgtttttacgcaatggggatt

SEQ ID NO: 14531 - protein, 241 aa, Homo sapiens; identical to SEQ ID NO: 1587

SEQ ID NO: 14532 - DNA, 1568 bp, Homo sapiens
ccaagtagctgggattacaggtgcccaccaccccgcctggcaaatttttgtatttttagtagagacagggtttcaccatgttggccagtctggtcttgactccctgacctcaggtgatccaccccccttggcctcctaaagtgttgggattacaggcgtgagccacctcacccggcccctaactctatttcctatgcccaatcccaagtgtaggccacaaggactgcaagtcctagtgctgagctgggcccggagacagtagactgcggggggcacaggacctactgagacaccagtctgggcagctcagggagtgctggcgtcaccccttccctaatcccaggctgcatggctaacggttcctatctgcagtcccagccttccacttccgagttcttctctcagaccacagtcccagcaacccagaatttggattggagtctggaagaaatgcagaatgattaaacgaccacctttccatttgaagtccccatccctgaatcttcacgggtgtgcccaagctcccctcccagttcccccagggacggccacttcctggtccccgacgcaaccatggctgaagaacaaccgcaggtcgaattgttcgtgaaggctggcagtgatggggccaagattgggaactgcccattctcccagagactgttcatggtactgtggctcaagggagtcaccttcaatgttaccaccgttgacaccaaaaggcggaccgagacagtgcagaagctgtgcccaggggggcagctcccattcctgctgtatggcactgaagtgcacacagacaccaacaagattgaggaatttctggaggcagtgctgtgccctcccaggtaccccaagctggcagctctgaaccctgagtccaacacagctgggctggacatatttgccaaattttctgcctacatcaagaattcaaacccagcactcaatgacaatctggagaagggactcctgaaagccctgaaggttttagacaattacttaacatcccccctcccagaagaagtggatgaaaccagtgctgaagatgaaggtgtctctcagaggaagtttttggatggcaacgagctcaccctggctgactgcaacctgttgccaaagttacacatagtacaggtggtgtgtaagaagtaccggggattcaccatccccgaggccttccggggagtgcatcggtacttgagcaatgcctacgcccgggaagaattcgcttccacctgtccagatgatgaggagatcgagctcgcctatgagcaagtggcaaaggccctcaaataagcccctcctgggactccctcaaccccctccattttctccacaaaggccctggtggtttccacattgctacccaatggacacactccaaaatggccagtgggcagggaatcctggagcacttgttccgggatggtgtggtggaagaggggatgagggaaagaaatggggggcctgggtcagatttttattgtggggtgggatgagtaggacaacatatttcagtaataaaatacagaataaaaatcaagtgtttttacgcaatggggatt

SEQ ID NO: 14533 - protein, 241 aa, Homo sapiens; identical to SEQ ID NO: 1587

SEQ ID NO: 14534 - DNA, 260 bp, Homo sapiens
caggtggtgtgtaagaagtaccggggattcaccatccccgaggccttccggggagtgcatcggtacttgagcaatgcctacgcccgggaagaattcgcttccacctgtccagatgatgaggagatcgagctcgcctatgagcaagtggcaaaggccctcaaataagcccctcctgggagagggaaagaaatggggggcctgggtcagatttttattgtggggtgggatgagtaggacaacatatttcagtaataaaatac

SEQ ID NO: 14535 - protein, 61 aa, Homo sapiens
MPTPGKNSLPPVQMMRRSSSPMSKWQRPSNKPLLGEGKKWGAWVRFLLWGGMSRTTYFSNK

SEQ ID NO: 14536 - DNA, 841 bp, Homo sapiens
ccaggttcagggcggggccggtcggtgagtcagcggctctctgatccagcccgggagaggaccgagctggaggagctgggtgtggggtgcgttgggctggtggggaggcctagtttgggtgcaagtaggtctgattgagcttgtgttgtgctgaagggacagccctgggtctaggggagagagtccctgagtgtgagacccgccttccccggtcccagcccctcccagttcccccagggacggccacttcctggtccccgacgcaaccatggctgaagaacaaccgcaggtcgaattgttcgtgaaggctggcagtgatggggccaagattgggaactgcccattctcccagagactgttcatggtactgtggctcaagggagtcaccttcaatgttaccaccgttgacaccaaaaggcggaccgagacagtgcagaagctgtgcccaggggggcagctcccattcctgctgtatggcactgaagtgcacacagacaccaacaagattgaggaatttctggaggcagtgctgtgccctcccaggtaccccaagctggcagctctgaaccctgagtccaacacagctgggctggacatatttgccaaattttctgcctacatcaagaattcaaacccagcactcaatgacaatctggagaagggactcctgaaagccctgaaggttttagacaattacttaacatcccccctcccagaagaagtggatgaaaccagtgctgaagatgaaggtgtctctcagaggaagtttttggatggcaacgagctcaccctggctgactgcaacctgttgccaaagttacacatagtacaggtgtgtggt

SEQ ID NO: 14537 - protein, 190 aa, Homo sapiens
MAEEQPQVELFVKAGSDGAKIGNCPFSQRLFMVLWLKGVTFNVTTVDTKRRTETVQKLCPGGQLPFLLYGTEVHTDTNKIEEFLEAVLCPPRYPKLAALNPESNTAGLDIFAKFSAYIKNSNPALNDNLEKGLLKALKVLDNYLTSPLPEEVDETSAEDEGVSQRKFLDGNELTLADCNLLPKLHIVQVC

SEQ ID NO: 14538 - DNA, 311 bp, Homo sapiens
gctgtgccctcccaggtaccccaagctggcagctctgaaccctgagtccaacacagctgggctggacatatttgccaaattttctgcctacatcaagaattcaaacccagcactcaatgacaatctggagaagggactcctgaaagccctgaaggttttagacaattacttaacatcccccctcccagaagaagtggatgaaaccagtgctgaagatgaaggtgtctctcagaggaagtttttggatggcaacgagctcaccctggctgactgcaacctgttgccaaagttacacatagtacaggtgtgtg

SEQ ID NO: 14539 - protein, 33 aa, Homo sapiens
MKPVLKMKVSLRGSFWMATSSPWLTATCCQSYT

SEQ ID NO: 14540 - DNA, 714 bp, Homo sapiens
gcgctccttttgcaggctcgtggcggtcggtcagcggggcgttctcccacctgtagcgactcagagcctccaagctcatggcctccttaggagcgaacccaaggaggacaccgcagggaccgagacctggggcggcctcctccggcttccccagcccggccccagtgccgggccccagggaggccgaggaggaggaagtcgaggaggaggaggagctggccgagatccatctgtgtgtgctgtggaattcaggatacttgggcattgcctactatgatactagtgactccactatccacttcatgccagatgccccagaccacgagagcctcaagcttctccagagagttctggatgagatcaatccccagtctgttgttacgagtgccaaacaggatgagaatatgactcgatttctgggaaagcttgcctcccaggagcacagagagcctaaaagacctgaaatcatatttttgccaagtgtggattttggtctggagataagcaaacaacgcctcctttctggaaactactccttcatcccagacgccatgactgccactgagaaaatcctcttcctctcttccattattccctttgactgcctcctcacagtgagattggtcctgggggataagggctgggaggcggcacaagtgctagggctgaattctgggaggtactggcctagccctggaaaatagtaactttccc

SEQ ID NO: 14541 - protein, 208 aa, Homo sapiens [sequence omitted]

SEQ ID NO: 14542 - DNA, 774 bp, Homo sapiens
gcgctccttttgcaggctcgtggcggtcggtcagcggggcgttctcccacctgtagcgactcagagcctccaagctcatggcctccttaggagcgaacccaaggaggacaccgcagggaccgagacctggggcggcctcctccggcttccccagcccggccccagtgccgggccccagggaggccgaggaggaggaagtcgaggaggaggaggagctggccgagatccatctgtgtgtgctgtggaattcaggatacttgggcattgcctactatgatactagtgactccactatccacttcatgccagatgccccagaccacgagagcctcaagcttctccagagagttctggatgagatcaatccccagtctgttgttacgagtgccaaacaggatgagaatatgactcgatttctgggaaagcttgcctcccaggagcacagagagcctaaaagacctgaaatcatatttttgccaagtgtggattttggtctggagataagcaaacaacgcctcctttctggaaactactccttcatcccagacgccatgactgccactgagaaaatcctcttcctctcttccattattccctttgactgcctcctcacagttcgagcacttggagggctgctgaagttcctgggtcgaagaagaatcggggttgaactggaagactataatgtcagcgtccccatcctgggctttaagaaatttatgttgactcatctggtgaacatagatcaagacacttacaggctggagtgcaatg

SEQ ID NO: 14543 - protein, 231 aa, Homo sapiens
MASLGANPRRTPQGPRPGAASSGFPSPAPVPGPREAEEEEVEEEEELAEIHLCVLWNSGYLGIAYYDTSDSTIHFMPDAPDHESLKLLQRVLDEINPQSVVTSAKQDENMTRFLGKLASQEHREPKRPEIIFLPSVDFGLEISKQRLLSGNYSFIPDAMTATEKILFLSSIIPFDCLLTVRALGGLLKFLGRRRIGVELEDYNVSVPILGFKKFMLTHLVNIDQDTYRLEC

SEQ ID NO: 14544 - DNA, 2688 bp, Homo sapiens
gcgctccttttgcaggctcgtggcggtcggtcagcggggcgttctcccacctgtagcgactcagagcctccaagctcatggcctccttaggagcgaacccaaggaggacaccgcagggaccgagacctggggcggcctcctccggcttccccagcccggccccagtgccgggccccagggaggccgaggaggaggaagtcgaggaggaggaggagctggccgagatccatctgtgtgtgctgtggaattcaggatacttgggcattgcctactatgatactagtgactccactatccacttcatgccagatgccccagaccacgagagcctcaagcttctccagagagttctggatgagatcaatccccagtctgttgttacgagtgccaaacaggatgagaatatgactcgatttctgggaaagcttgcctcccaggagcacagagagcctaaaagacctgaaatcatatttttgccaagtgtggattttggtctggagataagcaaacaacgcctcctttctggaaactactccttcatcccagacgccatgactgccactgagaaaatcctcttcctctcttccattattccctttgactgcctcctcacacccccaggagatttaagatttaccccgattccactgctgatcccctcccaggttcgagcacttggagggctgctgaagttcctgggtcgaagaagaatcggggttgaactggaagactataatgtcagcgtccccatcctgggctttaagaaatttatgttgactcatctggtgaacatagatcaagacacttacagtgttctacagatttttaagagtgagtctcacccctcagtgtacaaagtggccagtggactgaaggaggggctcagcctctttggaatcctcaacagatgccactgtaagtggggagagaagctgctcaggctatggttcacacgtccgactcatgacctgggggagctcagttctcgtctggacgtcattcagttttttctgctgccccagaatctggacatggctcagatgctgcatcggctcctgggtcacatcaagaacgtgcctctgattctgaaacgcatgaagttgtcccacaccaaggtcagcgactggcaggttctctacaagactgtgtacagtgccctgggcctgagggatgcctgccgctccctgccgcagtccatccagctctttcgggacattgcccaagagttctctgatgacctgcaccatatcgccagcctcattgggaaagtagtggactttgagggcagccttgctgaaaatcgcttcacagtcctccccaacatagatcctgaaattgatgagaaaaagcgaagactgatgggacttcccagtttccttactgaggttgcccgcaaggagctggagaatctggactcccgtattccttcatgcagtgtcatctacatccctctgattggcttccttctttctattccccgcctgccttccatggtagaggccagtgactttgagattaatggactggacttcatgtttctctcagaggagaagctgcactatcgtagtgcccgaaccaaggagctggatgcattgctgggggacctgcactgcgagatccgggaccaggagacgctgctgatgtaccagctacagtgccaggtgctggcacgagcagctgtcttaacccgagtattggaccttgcctcccgcctggacgtcctgctggctcttgccagtgctgcccgggactatggctactcaaggccgcgttactccccacaagtccttggggtacgaatccagaatggcagacatcctctgatggaactctgtgcccgaacctttgtgcccaactccacagaatgtggtggggacaaagggagggtcaaagtcatcactggacccaactcatcagggaagagcatatacctcaaacaggtaggcttgatcacattcatggccctggtaggcagctttgtgccagcagaggaggccgaaattggggcagtagacgccatcttcacacgaattcatagctgcgaatccatctcccttggcctctccaccttcatgatcgacctcaaccaggtggcgaaagcagtgaacaatgccactgcacagtcgctggtccttattgatgaatttggaaagggaaccaacacggtggatgggctcgcgcttctggccgctgtgctccgacactggctggcacgtggacccacatgcccccacatctttgtggccaccaactttctgagccttgttcagctacaactgctgccacaagggcccctggtgcagtatttgaccatggagacctgtgaggatggcaacgatcttgtcttcttctatcaggtctcagacttgatccgcagtggaaaacccatcaagcctgtcaaggatttgctaaagaagaaccaaatggaaaattgccagacattagtggataagtttatgaaactggatttggaagatcctaacctggacttgaacgttttcatgagccaggaagtgctgcctgctgccaccagcatcctctgagagtccttccagtgtcctccccagcctcctgagactccggtgggctgccatgccctctttgtttccttatctccctcagacgcagagtttttagtttctctagaaattttgtttcatattaggaataaagtttattttgaagaaa

SEQ ID NO: 14545 - protein, 821 aa, Homo sapiens
MASLGANPRRTPQGPRPGAASSGFPSPAPVPGPREAEEEEVEEEEELAEIHLCVLWNSGYLGIAYYDTSDSTIHFMPDAPDHESLKLLQRVLDEINPQSVVTSAKQDENMTRFLGKLASQEHREPKRPEIIFLPSVDFGLEISKQRLLSGNYSFIPDAMTATEKILFLSSIIPFDCLLTPPGDLRFTPIPLLIPSQVRALGGLLKFLGRRRIGVELEDYNVSVPILGFKKFMLTHLVNIDQDTYSVLQIFKSESHPSVYKVASGLKEGLSLFGILNRCHCKWGEKLLRLWFTRPTHDLGELSSRLDVIQFFLLPQNLDMAQMLHRLLGHIKNVPLILKRMKLSHTKVSDWQVLYKTVYSALGLRDACRSLPQSIQLFRDIAQEFSDDLHHIASLIGKVVDFEGSLAENRFTVLPNIDPEIDEKKRRLMGLPSFLTEVARKELENLDSRIPSCSVIYIPLIGFLLSIPRLPSMVEASDFEINGLDFMFLSEEKLHYRSARTKELDALLGDLHCEIRDQETLLMYQLQCQVLARAAVLTRVLDLASRLDVLLALASAARDYGYSRPRYSPQVLGVRIQNGRHPLMELCARTFVPNSTECGGDKGRVKVITGPNSSGKSIYLKQVGLITFMALVGSFVPAEEAEIGAVDAIFTRIHSCESISLGLSTFMIDLNQVAKAVNNATAQSLVLIDEFGKGTNTVDGLALLAAVLRHWLARGPTCPHIFVATNFLSLVQLQLLPQGPLVQYLTMETCEDGNDLVFFYQVSDLIRSGKPIKPVKDLLKKNQMENCQTLVDKFMKLDLEDPNLDLNVFMSQEVLPAATSIL

SEQ ID NO: 14546 - DNA, 2886 bp, Homo sapiens
gcgctccttttgcaggctcgtggcggtcggtcagcggggcgttctcccacctgtagcgactcaggttactgaaaaggcgggaaaacgctgcgatggcggcagctgggggaggaggaagataagcgcgtgaggctggggtcctggcgcgtggttggcagaggcagagacataagacgtgcacgactcgccccacagggccctcagaccccttccttccaaaggagcctccaagctcatggcctccttaggagcgaacccaaggaggacaccgcagggaccgagacctggggcggcctcctccggcttccccagcccggccccagtgccgggccccagggaggccgaggaggaggaagtcgaggaggaggaggagctggccgagatccatctgtgtgtgctgtggaattcaggatacttgggcattgcctactatgatactagtgactccactatccacttcatgccagatgccccagaccacgagagcctcaagcttctccagagagttctggatgagatcaatccccagtctgttgttacgagtgccaaacaggatgagaatatgactcgatttctgggaaagcttgcctcccaggagcacagagagcctaaaagacctgaaatcatatttttgccaagtgtggattttggtctggagataagcaaacaacgcctcctttctggaaactactccttcatcccagacgccatgactgccactgagaaaatcctcttcctctcttccattattccctttgactgcctcctcacagttcgagcacttggagggctgctgaagttcctgggtcgaagaagaatcggggttgaactggaagactataatgtcagcgtccccatcctgggctttaagaaatttatgttgactcatctggtgaacatagatcaagacacttacagtgttctacagatttttaagagtgagtctcacccctcagtgtacaaagtggccagtggactgaaggaggggctcagcctctttggaatcctcaacagatgccactgtaagtggggagagaagctgctcaggctatggttcacacgtccgactcatgacctgggggagctcagttctcgtctggacgtcattcagttttttctgctgccccagaatctggacatggctcagatgctgcatcggctcctgggtcacatcaagaacgtgcctctgattctgaaacgcatgaagttgtcccacaccaaggtcagcgactggcaggttctctacaagactgtgtacagtgccctgggcctgagggatgcctgccgctccctgccgcagtccatccagctctttcgggacattgcccaagagttctctgatgacctgcaccatatcgccagcctcattgggaaagtagtggactttgagggcagccttgctgaaaatcgcttcacagtcctccccaacatagatcctgaaattgatgagaaaaagcgaagactgatgggacttcccagtttccttactgaggttgcccgcaaggagctggagaatctggactcccgtattccttcatgcagtgtcatctacatccctctgattggcttccttctttctattccccgcctgccttccatggtagaggccagtgactttgagattaatggactggacttcatgtttctctcagaggagaagctgcactatcgtagtgcccgaaccaaggagctggatgcattgctgggggacctgcactgcgagatccgggaccaggagacgctgctgatgtaccagctacagtgccaggtgctggcacgagcagctgtcttaacccgagtattggaccttgcctcccgcctggacgtcctgctggctcttgccagtgctgcccgggactatggctactcaaggccgcgttactccccacaagtccttggggtacgaatccagaatggcagacatcctctgatggaactctgtgcccgaacctttgtgcccaactccacagaatgtggtggggacaaagggagggtcaaagtcatcactggacccaactcatcagggaagagcatatacctcaaacaggtaggcttgatcacattcatggccctggtaggcagctttgtgccagcagaggaggccgaaattggggcagtagacgccatcttcacacgaattcatagctgcgaatccatctcccttggcctctccaccttcatgatcgacctcaaccaggtggcgaaagcagtgaacaatgccactgcacagtcgctggtccttattgatgaatttggaaagggaaccaacacggtggatgggctcgcgcttctggccgctgtgctccgacactggctggcacgtggacccacatgcccccacatctttgtggccaccaactttctgagccttgttcagctacaactgctgccacaagggcccctggtgcagtatttgaccatggagacctgtgaggatggcaacgatcttgtcttcttctatcaggtttgcgaaggtgttgcgaaggccagccatgcctcccacacagctgcccaggctgggcttcctgacaagcttgtggctcgtggcaaggaggtctcagacttgatccgcagtggaaaacccatcaagcctgtcaaggatttgctaaagaagaaccaaatggaaaattgccagacattagtggataagtttatgaaactggatttggaagatcctaacctggacttgaacgttttcatgagccaggaagtgctgcctgctgccaccagcatcctctgagagtccttccagtgtcctccccagcctcctgagactccggtgggctgccatgccctctttgtttccttatctccctcagacgcagagtttttagtttctctagaaattttgtttcatattaggaataaagtttattttgaagaaag

SEQ ID NO: 14547 - protein, 834 aa, Homo sapiens; identical to SEQ ID NO: 1589

SEQ ID NO: 14548 - DNA, 2728 bp, Homo sapiens
gcgctccttttgcaggctcgtggcggtcggtcagcggggcgttctcccacctgtagcgactcagagcctccaagctcatggcctccttaggagcgaacccaaggaggacaccgcagggaccgagacctggggcggcctcctccggcttccccagcccggccccagtgccgggccccagggaggccgaggaggaggaagtcgaggaggaggaggagctggccgagatccatctgtgtgtgctgtggaattcaggatacttgggcattgcctactatgatactagtgactccactatccacttcatgccagatgccccagaccacgagagcctcaagcttctccagagagttctggatgagatcaatccccagtctgttgttacgagtgccaaacaggatgagaatatgactcgatttctgggaaagcttgcctcccaggagcacagagagcctaaaagacctgaaatcatatttttgccaagtgtggattttggtctggagataagcaaacaacgcctcctttctggaaactactccttcatcccagacgccatgactgccactgagaaaatcctcttcctctcttccattattccctttgactgcctcctcacagttcgagcacttggagggctgctgaagttcctgggtcgaagaagaatcggggttgaactggaagactataatgtcagcgtccccatcctgggctttaagaaatttatgttgactcatctggtgaacatagatcaagacacttacagtgttctacagatttttaagagtgagtctcacccctcagtgtacaaagtggccagtggactgaaggaggggctcagcctctttggaatcctcaacagatgccactgtaagtggggagagaagctgctcaggctatggttcacacgtccgactcatgacctgggggagctcagttctcgtctggacgtcattcagttttttctgctgccccagaatctggacatggctcagatgctgcatcggctcctgggtcacatcaagaacgtgcctctgattctgaaacgcatgaagttgtcccacaccaaggtcagcgactggcaggttctctacaagactgtgtacagtgccctgggcctgagggatgcctgccgctccctgccgcagtccatccagctctttcgggacattgcccaagagttctctgatgacctgcaccatatcgccagcctcattgggaaagtagtggactttgagggcagccttgctgaaaatcgcttcacagtcctccccaacatagatcctgaaattgatgagaaaaagcgaagactgatgggacttcccagtttccttactgaggttgcccgcaaggagctggagaatctggactcccgtattccttcatgcagtgtcatctacatccctctgattggcttccttctttctattccccgcctgccttccatggtagaggccagtgactttgagattaatggactggacttcatgtttctctcagaggagaagctgcactatcgtagtgcccgaaccaaggagctggatgcattgctgggggacctgcactgcgagatccgggaccaggagacgctgctgatgtaccagctacagtgccaggtgctggcacgagcagctgtcttaacccgagtattggaccttgcctcccgcctggacgtcctgctggctcttgccagtgctgcccgggactatggctactcaaggccgcgttactccccacaagtccttggggtacgaatccagaatggcagacatcctctgatggaactctgtgcccgaacctttgtgcccaactccacagaatgtggtggggacaaagggagggtcaaagtcatcactggacccaactcatcagggaagagcatatacctcaaacaggtaggcttgatcacattcatggccctggtaggcagctttgtgccagcagaggaggccgaaattggggcagtagacgccatcttcacacgaattcatagctgcgaatccatctcccttggcctctccaccttcatgatcgacctcaaccaggtggcgaaagcagtgaacaatgccactgcacagtcgctggtccttattgatgaatttggaaagggaaccaacacggtggatgggctcgcgcttctggccgctgtgctccgacactggctggcacgtggacccacatgcccccacatctttgtggccaccaactttctgagccttgttcagctacaactgctgccacaagggcccctggtgcagtatttgaccatggagacctgtgaggatggcaacgatcttgtcttcttctatcaggtttgcgaaggtgttgcgaaggccagccatgcctcccacacagctgcccaggctgggcttcctgacaagcttgtggctcgtggcaaggaggtctcagacttgatccgcagtggaaaacccatcaagcctgtcaaggatttgctaaagaagaaccaaatggaaaattgccagacattagtggataagtttatgaaactggatttggaagatcctaacctggacttgaacgttttcatgagccaggaagtgctgcctgctgccaccagcatcctctgagagtccttccagtgtcctccccagcctcctgagactccggtgggctgccatgccctctttgtttccttatctccctcagacgcagagtttttagtttctctagaaattttgtttcatattaggaataaagtttattttgaagaaag

SEQ ID NO: 14549 - protein, 834 aa, Homo sapiens; identical to SEQ ID NO: 1589

SEQ ID NO: 14550 - DNA, 4007 bp, Homo sapiens
gcgctccttttgcaggctcgtggcggtcggtcagcggggcgttctcccacctgtagcgactcagagcctccaagctcatggcctccttaggagcgaacccaaggaggacaccgcagggaccgagacctggggcggcctcctccggcttccccagcccggccccagtgccgggccccagggaggccgaggaggaggaagtcgaggaggaggaggagctggccgagatccatctgtgtgtgctgtggaattcaggatacttgggcattgcctactatgatactagtgactccactatccacttcatgccagatgccccagaccacgagagcctcaagcttctccagagagttctggatgagatcaatccccagtctgttgttacgagtgccaaacaggatgagaatatgactcgatttctgggaaagcttgcctcccaggagcacagagagcctaaaagacctgaaatcatatttttgccaagtgtggattttggtctggagataagcaaacaacgcctcctttctggaaactactccttcatcccagacgccatgactgccactgagaaaatcctcttcctctcttccattattccctttgactgcctcctcacacccccaggagatttaagatttaccccgattccactgctgatcccctcccaggttcgagcacttggagggctgctgaagttcctgggtcgaagaagaatcggggttgaactggaagactataatgtcagcgtccccatcctgggctttaagaaatttatgttgactcatctggtgaacatagatcaagacacttacagtgttctacagatttttaagagtgagtctcacccctcagtgtacaaagtggccagtggactgaaggaggggctcagcctctttggaatcctcaacagatgccactgtaagtggggagagaagctgctcaggctatggttcacacgtccgactcatgacctgggggagctcagttctcgtctggacgtcattcagttttttctgctgccccagaatctggacatggctcagatgctgcatcggctcctgggtcacatcaagaacgtgcctctgattctgaaacgcatgaagttgtcccacaccaaggtcagcgactggcaggttctctacaagactgtgtacagtgccctgggcctgagggatgcctgccgctccctgccgcagtccatccagctctttcgggacattgcccaagagttctctgatgacctgcaccatatcgccagcctcattgggaaagtagtggactttgagggcagccttgctgaaaatcgcttcacagtcctccccaacatagatcctgaaattgatgagaaaaagcgaagactgatgggacttcccagtttccttactgaggttgcccgcaaggagctggagaatctggactcccgtattccttcatgcagtgtcatctacatccctctgattggcttccttctttctattccccgcctgccttccatggtagaggccagtgactttgagattaatggactggacttcatgtttctctcagaggagaagctgcactatcgtagtgcccgaaccaaggagctggatgcattgctgggggacctgcactgcgagatccgggaccaggagacgctgctgatgtaccagctacagtgccaggtgctggcacgagcagctgtcttaacccgagtattggaccttgcctcccgcctggacgtcctgctggctcttgccagtgctgcccgggactatggctactcaaggccgcgttactccccacaagtccttggggtacgaatccagaatggcagacatcctctgatggaactctgtgcccgaacctttgtgcccaactccacagaatgtggtggggacaaagggagggtcaaagtcatcactggacccaactcatcagggaagagcatatacctcaaacaggtaggcttgatcacattcatggccctggtaggcagctttgtgccagcagaggaggccgaaattggggcagtagacgccatcttcacacgaattcatagctgcgaatccatctcccttggcctctccaccttcatgatcgacctcaaccaggtggcgaaagcagtgaacaatgccactgcacagtcgctggtccttattgatgaatttggaaagggaaccaacacggtggatgggctcgcgcttctggccgctgtgctccgacactggctggcacgtggacccacatgcccccacatctttgtggccaccaactttctgagccttgttcagctacaactgctgccacaagggcccctggtgcagtatttgaccatggagacctgtgaggatggcaacgatcttgtcttcttctatcaggtttgcgaaggtgttgcgaaggccagccatgcctcccacacagctgcccaggctgggcttcctgacaagcttgtggctcgtggcaaggaggtctcagacttgatccgcagtggaaaacccatcaagcctgtcaaggatttgctaaagaagaaccaaatggaaaattgccagacattagtggataagtttatgaaactggatttggaagatcctaacctggacttgaacgttttcatgagccaggaagtgctgcctgctgccaccagcatcctctgagagtccttccagtgtcctccccagcctcctgagactccggtgggctgccatgccctctttgtttccttatctccctcagacgcagagtttttagtttctctagaaattttgtttcatattaggaataaagtttattttgaagaaagatattgtttctttagtctcaaaacaagagactaggaaagatccaaaacacagagcaggagtccacaggggaacctgccctgcctcagtaaaaatacagtgttgttgctgtaggaagactcccggattctaccccaggatacttcatgagaacgaaccccttcagagaggccctacaaaacagattagagggaagacagaggggtccaagggagatggtctctcttctcaagtaggaacaccccagcctcagacagacacagcaggaaggggcctgagaggctgacagaggcaggatgggtgcaaggcaggggtggaggggagggaccagcccgggctgcaccagtgggagtggctccacccttcccacctcagagccatggggagccagggctctggcggggtgcccttggtgcaggctccctacacagtcctgctgctgccgctggggacaagccgccaagacccaggggcccagagcttcttcctttggctacgcaggatgcaggctctggagagagaacaggatgccctgtggcagggtctggagctgctacagcatggccaggcctggtttgaagaccatctgagggaggcacagcgacagcagctgcatctaggggcccttggtgagaattttctaacagatttacactcagagcctggtcgccccccgttagcccagattcaaaaggtgaacatctgtttgcagaatctgattcatgagaagttctccccaagtccactgaacaaggctagttcctgcaccacccaggattcaaaggaaagacgaagggagcagaacttgtggcagcaacaggagttgtcaaggcagcagaaaggagtcacccagccaaaggaggagatggctcagcggggctgcaccaaggggccaagaggccctacccgtgtctaaaccctcctctcactcccctaagcctggtgaaagagtcagaagccccaggctcctttttctgtttcttaactcaacagctaaaaaatggctccaggtagtgagtcaatgaagttcagacatgttggtgtaaagtttctcctctgctcctgaaaacttcatcttcttggtgtctcatgtcctcattctcccctatatgacatgcaaaaacgatctttctttgaaatccctctgggaagaagcatgtttattgaaactgtccttcagccttaaatacaaaaataaaactgaaactgctccagaaagcagctttctcc

SEQ ID NO: 14551 - protein, 851 aa, Homo sapiens; identical to SEQ ID NO: 1591

SEQ ID NO: 14552 - DNA, 4114 bp, Homo sapiens
gcgctccttttgcaggctcgtggcggtcggtcagcggggcgttctcccacctgtagcgactcaggttactgaaaaggcgggaaaacgctgcgatggcggcagctgggggaggaggaagataagcgcgtgaggctggggtcctggcgcgtggttggcagaggcagagacataagacgtgcacgactcgccccacagggccctcagaccccttccttccaaaggagcctccaagctcatggcctccttaggagcgaacccaaggaggacaccgcagggaccgagacctggggcggcctcctccggcttccccagcccggccccagtgccgggccccagggaggccgaggaggaggaagtcgaggaggaggaggagctggccgagatccatctgtgtgtgctgtggaattcaggatacttgggcattgcctactatgatactagtgactccactatccacttcatgccagatgccccagaccacgagagcctcaagcttctccagagagttctggatgagatcaatccccagtctgttgttacgagtgccaaacaggatgagaatatgactcgatttctgggaaagcttgcctcccaggagcacagagagcctaaaagacctgaaatcatatttttgccaagtgtggattttggtctggagataagcaaacaacgcctcctttctggaaactactccttcatcccagacgccatgactgccactgagaaaatcctcttcctctcttccattattccctttgactgcctcctcacagttcgagcacttggagggctgctgaagttcctgggtcgaagaagaatcggggttgaactggaagactataatgtcagcgtccccatcctgggctttaagaaatttatgttgactcatctggtgaacatagatcaagacacttacagtgttctacagatttttaagagtgagtctcacccctcagtgtacaaagtggccagtggactgaaggaggggctcagcctctttggaatcctcaacagatgccactgtaagtggggagagaagctgctcaggctatggttcacacgtccgactcatgacctgggggagctcagttctcgtctggacgtcattcagttttttctgctgccccagaatctggacatggctcagatgctgcatcggctcctgggtcacatcaagaacgtgcctctgattctgaaacgcatgaagttgtcccacaccaaggtcagcgactggcaggttctctacaagactgtgtacagtgccctgggcctgagggatgcctgccgctccctgccgcagtccatccagctctttcgggacattgcccaagagttctctgatgacctgcaccatatcgccagcctcattgggaaagtagtggactttgagggcagccttgctgaaaatcgcttcacagtcctccccaacatagatcctgaaattgatgagaaaaagcgaagactgatgggacttcccagtttccttactgaggttgcccgcaaggagctggagaatctggactcccgtattccttcatgcagtgtcatctacatccctctgattggcttccttctttctattccccgcctgccttccatggtagaggccagtgactttgagattaatggactggacttcatgtttctctcagaggagaagctgcactatcgtagtgcccgaaccaaggagctggatgcattgctgggggacctgcactgcgagatccgggaccaggagacgctgctgatgtaccagctacagtgccaggtgctggcacgagcagctgtcttaacccgagtattggaccttgcctcccgcctggacgtcctgctggctcttgccagtgctgcccgggactatggctactcaaggccgcgttactccccacaagtccttggggtacgaatccagaatggcagacatcctctgatggaactctgtgcccgaacctttgtgcccaactccacagaatgtggtggggacaaagggagggtcaaagtcatcactggacccaactcatcagggaagagcatatacctcaaacaggtaggcttgatcacattcatggccctggtaggcagctttgtgccagcagaggaggccgaaattggggcagtagacgccatcttcacacgaattcatagctgcgaatccatctcccttggcctctccaccttcatgatcgacctcaaccaggtggcgaaagcagtgaacaatgccactgcacagtcgctggtccttattgatgaatttggaaagggaaccaacacggtggatgggctcgcgcttctggccgctgtgctccgacactggctggcacgtggacccacatgcccccacatctttgtggccaccaactttctgagccttgttcagctacaactgctgccacaagggcccctggtgcagtatttgaccatggagacctgtgaggatggcaacgatcttgtcttcttctatcaggtttgcgaaggtgttgcgaaggccagccatgcctcccacacagctgcccaggctgggcttcctgacaagcttgtggctcgtggcaaggaggtctcagacttgatccgcagtggaaaacccatcaagcctgtcaaggatttgctaaagaagaaccaaatggaaaattgccagacattagtggataagtttatgaaactggatttggaagatcctaacctggacttgaacgttttcatgagccaggaagtgctgcctgctgccaccagcatcctctgagagtccttccagtgtcctccccagcctcctgagactccggtgggctgccatgccctctttgtttccttatctccctcagacgcagagtttttagtttctctagaaattttgtttcatattaggaataaagtttattttgaagaaagatattgtttctttagtctcaaaacaagagactaggaaagatccaaaacacagagcaggagtccacaggggaacctgccctgcctcagtaaaaatacagtgttgttgctgtaggaagactcccggattctaccccaggatacttcatgagaacgaaccccttcagagaggccctacaaaacagattagagggaagacagaggggtccaagggagatggtctctcttctcaagtaggaacaccccagcctcagacagacacagcaggaaggggcctgagaggctgacagaggcaggatgggtgcaaggcaggggtggaggggagggaccagcccgggctgcaccagtgggagtggctccacccttcccacctcagagccatggggagccagggctctggcggggtgcccttggtgcaggctccctacacagtcctgctgctgccgctggggacaagccgccaagacccaggggcccagagcttcttcctttggctacgcaggatgcaggctctggagagagaacaggatgccctgtggcagggtctggagctgctacagcatggccaggcctggtttgaagaccatctgagggaggcacagcgacagcagctgcatctaggggcccttggtgagaattttctaacagatttacactcagagcctggtcgccccccgttagcccagattcaaaaggtgaacatctgtttgcagaatctgattcatgagaagttctccccaagtccactgaacaaggctagttcctgcaccacccaggattcaaaggaaagacgaagggagcagaacttgtggcagcaacaggagttgtcaaggcagcagaaaggagtcacccagccaaaggaggagatggctcagcggggctgcaccaaggggccaagaggccctacccgtgtctaaaccctcctctcactcccctaagcctggtgaaagagtcagaagccccaggctcctttttctgtttcttaactcaacagctaaaaaatggctccaggtagtgagtcaatgaagttcagacatgttggtgtaaagtttctcctctgctcctgaaaacttcatcttcttggtgtctcatgtcctcattctcccctatatgacatgcaaaaacgatctttctttgaaatccctctgggaagaagcatgtttattgaaactgtccttcagccttaaatacaaaaataaaactgaaactgctccagaaagcagctttctcc

SEQ ID NO: 14553 - protein, 834 aa, Homo sapiens; identical to SEQ ID NO: 1589

SEQ ID NO: 14554 - DNA, 3956 bp, Homo sapiens
gcgctccttttgcaggctcgtggcggtcggtcagcggggcgttctcccacctgtagcgactcagagcctccaagctcatggcctccttaggagcgaacccaaggaggacaccgcagggaccgagacctggggcggcctcctccggcttccccagcccggccccagtgccgggccccagggaggccgaggaggaggaagtcgaggaggaggaggagctggccgagatccatctgtgtgtgctgtggaattcaggatacttgggcattgcctactatgatactagtgactccactatccacttcatgccagatgccccagaccacgagagcctcaagcttctccagagagttctggatgagatcaatccccagtctgttgttacgagtgccaaacaggatgagaatatgactcgatttctgggaaagcttgcctcccaggagcacagagagcctaaaagacctgaaatcatatttttgccaagtgtggattttggtctggagataagcaaacaacgcctcctttctggaaactactccttcatcccagacgccatgactgccactgagaaaatcctcttcctctcttccattattccctttgactgcctcctcacagttcgagcacttggagggctgctgaagttcctgggtcgaagaagaatcggggttgaactggaagactataatgtcagcgtccccatcctgggctttaagaaatttatgttgactcatctggtgaacatagatcaagacacttacagtgttctacagatttttaagagtgagtctcacccctcagtgtacaaagtggccagtggactgaaggaggggctcagcctctttggaatcctcaacagatgccactgtaagtggggagagaagctgctcaggctatggttcacacgtccgactcatgacctgggggagctcagttctcgtctggacgtcattcagttttttctgctgccccagaatctggacatggctcagatgctgcatcggctcctgggtcacatcaagaacgtgcctctgattctgaaacgcatgaagttgtcccacaccaaggtcagcgactggcaggttctctacaagactgtgtacagtgccctgggcctgagggatgcctgccgctccctgccgcagtccatccagctctttcgggacattgcccaagagttctctgatgacctgcaccatatcgccagcctcattgggaaagtagtggactttgagggcagccttgctgaaaatcgcttcacagtcctccccaacatagatcctgaaattgatgagaaaaagcgaagactgatgggacttcccagtttccttactgaggttgcccgcaaggagctggagaatctggactcccgtattccttcatgcagtgtcatctacatccctctgattggcttccttctttctattccccgcctgccttccatggtagaggccagtgactttgagattaatggactggacttcatgtttctctcagaggagaagctgcactatcgtagtgcccgaaccaaggagctggatgcattgctgggggacctgcactgcgagatccgggaccaggagacgctgctgatgtaccagctacagtgccaggtgctggcacgagcagctgtcttaacccgagtattggaccttgcctcccgcctggacgtcctgctggctcttgccagtgctgcccgggactatggctactcaaggccgcgttactccccacaagtccttggggtacgaatccagaatggcagacatcctctgatggaactctgtgcccgaacctttgtgcccaactccacagaatgtggtggggacaaagggagggtcaaagtcatcactggacccaactcatcagggaagagcatatacctcaaacaggtaggcttgatcacattcatggccctggtaggcagctttgtgccagcagaggaggccgaaattggggcagtagacgccatcttcacacgaattcatagctgcgaatccatctcccttggcctctccaccttcatgatcgacctcaaccaggtggcgaaagcagtgaacaatgccactgcacagtcgctggtccttattgatgaatttggaaagggaaccaacacggtggatgggctcgcgcttctggccgctgtgctccgacactggctggcacgtggacccacatgcccccacatctttgtggccaccaactttctgagccttgttcagctacaactgctgccacaagggcccctggtgcagtatttgaccatggagacctgtgaggatggcaacgatcttgtcttcttctatcaggtttgcgaaggtgttgcgaaggccagccatgcctcccacacagctgcccaggctgggcttcctgacaagcttgtggctcgtggcaaggaggtctcagacttgatccgcagtggaaaacccatcaagcctgtcaaggatttgctaaagaagaaccaaatggaaaattgccagacattagtggataagtttatgaaactggatttggaagatcctaacctggacttgaacgttttcatgagccaggaagtgctgcctgctgccaccagcatcctctgagagtccttccagtgtcctccccagcctcctgagactccggtgggctgccatgccctctttgtttccttatctccctcagacgcagagtttttagtttctctagaaattttgtttcatattaggaataaagtttattttgaagaaagatattgtttctttagtctcaaaacaagagactaggaaagatccaaaacacagagcaggagtccacaggggaacctgccctgcctcagtaaaaatacagtgttgttgctgtaggaagactcccggattctaccccaggatacttcatgagaacgaaccccttcagagaggccctacaaaacagattagagggaagacagaggggtccaagggagatggtctctcttctcaagtaggaacaccccagcctcagacagacacagcaggaaggggcctgagaggctgacagaggcaggatgggtgcaaggcaggggtggaggggagggaccagcccgggctgcaccagtgggagtggctccacccttcccacctcagagccatggggagccagggctctggcggggtgcccttggtgcaggctccctacacagtcctgctgctgccgctggggacaagccgccaagacccaggggcccagagcttcttcctttggctacgcaggatgcaggctctggagagagaacaggatgccctgtggcagggtctggagctgctacagcatggccaggcctggtttgaagaccatctgagggaggcacagcgacagcagctgcatctaggggcccttggtgagaattttctaacagatttacactcagagcctggtcgccccccgttagcccagattcaaaaggtgaacatctgtttgcagaatctgattcatgagaagttctccccaagtccactgaacaaggctagttcctgcaccacccaggattcaaaggaaagacgaagggagcagaacttgtggcagcaacaggagttgtcaaggcagcagaaaggagtcacccagccaaaggaggagatggctcagcggggctgcaccaaggggccaagaggccctacccgtgtctaaaccctcctctcactcccctaagcctggtgaaagagtcagaagccccaggctcctttttctgtttcttaactcaacagctaaaaaatggctccaggtagtgagtcaatgaagttcagacatgttggtgtaaagtttctcctctgctcctgaaaacttcatcttcttggtgtctcatgtcctcattctcccctatatgacatgcaaaaacgatctttctttgaaatccctctgggaagaagcatgtttattgaaactgtccttcagccttaaatacaaaaataaaactgaaactgctccagaaagcagctttctcc

SEQ ID NO: 14555 - protein, 834 aa, Homo sapiens; identical to SEQ ID NO: 1589

SEQ ID NO: 14556 - DNA, 1044 bp, Homo sapiens
cgtggcggtcggtcagcggggcgttctcccacctgtagcgactcagagcctccaagctcatggcctccttaggagcgaacccaaggaggacaccgcagggaccgagacctggggcggcctcctccggcttccccagcccggccccagtgccgggccccagggaggccgaggaggaggaagtcgaggaggaggaggagctggccgagatccatctgtgtgtgctgtggaattcaggatacttgggcattgcctactatgatactagtgactccactatccacttcatgccagatgccccagaccacgagagcctcaagcttctccagagagttctggatgagatcaatccccagtctgttgttacgagtgccaaacaggatgagaatatgactcgatttctgggaaagcttgcctcccaggagcacagagagcctaaaagacctgaaatcatatttttgccaagtgtggattttggtatctccttccttttgctttgcctaactccctgttccggtgtcccattctttcccccaactctaccttcatcatcacagatctcccctctgccttatgtcatcctaaacctttgtgctcctcatgccctatgacctgtccccccaagatctctcctgctccctaccctttaataacctgcagcttattgggaagcctctgcttaagtcatgtctagggatgagggcctcccctgaggagtggtgacactttttggacagggttttattgttggaattctccccattaagttaaagccttttatcaccaaaccaaaaggcactgcctcagtgacccttattatgatccataaggcacttctataactttcctaggtttacaataagaacaggagtgtactatcctaattagatattaaggcattagtgttactagttctattaataccattattttgaccaaaatcctcaattccagacagatgtctactttcctcagccatttatctttctcaggctgtgctttcagacaagtatctttatattatatgtagaataaaaagagaattag

SEQ ID NO: 14557 - protein, 182 aa, Homo sapiens
MASLGANPRRTPQGPRPGAASSGFPSPAPVPGPREAEEEEVEEEEELAEIHLCVLWNSGYLGIAYYDTSDSTIHFMPDAPDHESLKLLQRVLDEINPQSVVTSAKQDENMTRFLGKLASQEHREPKRPEIIFLPSVDFGISFLLLCLTPCSGVPFFPPTLPSSSQISPLPYVILNLCAPHAL

SEQ ID NO: 14558 - DNA, 637 bp, Homo sapiens
agtggtggtgcacccctgtaatcccagctactccagaggctgagacacgagaatcgcttgaacctgggaggcggaggttgcagtgagctgagatcgcaccactgcactccagcctggacaacagagcaagactctgtctcagaaaaaaaaaaaaagatgctatggttcacacgtccgactcatgacctgggggagctcagttctcgtctggacgtcattcagttttttctgctgccccagaatctggacatggctcagatgctgcatcggctcctgggtcacatcaagaacgtgcctctgattctgaaacgcatgaagttgtcccacaccaaggtcagcgactggcaggttctctacaagactgtgtacagtgccctgggcctgagggatgcctgccgctccctgccgcagtccatccagctctttcgggacattgcccaagagttctctgatgacctgcaccatatcgccagcctcattgggaaagtaaaaagcgaagactgatgggacttcccagtttccttactgaggttgcccgcaaggagctggagaatctggactcccgtattccttcatgcagtgtcatctacatccctctgattggcttccttctttctattccccgcctgccttccat

SEQ ID NO: 14559 - protein, 115 aa, Homo sapiens
MLWFTRPTHDLGELSSRLDVIQFFLLPQNLDMAQMLHRLLGHIKNVPLILKRMKLSHTKVSDWQVLYKTVYSALGLRDACRSLPQSIQLFRDIAQEFSDDLHHIASLIGKVKSED

SEQ ID NO: 14560 - DNA, 2705 bp, Homo sapiens
gtgatagaaatcatatagaaatacagaaaattgcttgatatttcccccactcttttttttttgagacagagtcttgctctgtcaccaggctggagtgcagtggcacaatcttggctcactgcaacctccacctcccgggttgggtttcaagtgattctcctgcctcagcctcccgagtagctgggactataggcgtgtgccaccatgcctggctaatttttgtatttttagtagagacagggtttcaccatgatggccaggatggtcttgatctcttgacctcgtgatccacccgcctcggcctcccaaagtgctgggattacaggtgtgagccaccgcgcccggccctgatagccgatgaggtttttttgtcattgttcttcttgtatcattacagactcatggccttttatagctatatttctctttctcccgactctgtacaaactcctttgttttagagtttgcacaaccctctatcaaagcacctaccacctcacttttaaatcttctgcatgtatttctgtcttccttcctagactgtgagcacatctgggacagggaccatatctttttttgtttatttgttttgttttgagacagagtctcgctctgtcggccaggctggagtgcaatggcgtgatctggctataacctccacctcccgggttcaagagattctcctgcctcagcctcccaagtagctggaattacatgtgcatgccaccaagcccagttaatttttgtattttgagtagagacagggtttcaccatgttggtgaggctgatctcgaactcctgacctcaggtgatctacccacctcagcctcccaaagtgctgggattacaggcatgagccactgtgcctggccaggaccatatcttaattgtctttgtagtttcagtgtttggtacagtgcctctcactgtttctttttgcctttgagatcttccctctttgttactgtgatcttccctactggtctttgttcttctgagtctgtccctatcaccacctcaacccgagctggatgtggcctgtcctcctttttgtgtttctctcacagactgtgtacagtgccctgggcctgagggatgcctgccgctccctgccgcagtccatccagctctttcgggacattgcccaagagttctctgatgacctgcaccatatcgccagcctcattgggaaagtagtggactttgagggcagccttgctgaaaatcgcttcacagtcctccccaacatagatcctgaaattgatgagaaaaagcgaagactgatgggacttcccagtttccttactgaggttgcccgcaaggagctggagaatctggactcccgtattccttcatgcagtgtcatctacatccctctgattggcttccttctttctattccccgcctgccttccatggtagaggccagtgactttgagattaatggactggacttcatgtttctctcagaggagaagctgcactatcgtagtgcccgaaccaaggagctggatgcattgctgggggacctgcactgcgagatccgggaccaggagacgctgctgatgtaccagctacagtgccaggtgctggcacgagcagctgtcttaacccgagtattggaccttgcctcccgcctggacgtcctgctggctcttgccagtgctgcccgggactatggctactcaaggccgcgttactccccacaagtccttggggtacgaatccagaatggcagacatcctctgatggaactctgtgcccgaacctttgtgcccaactccacagaatgtggtggggacaaagggagggtcaaagtcatcactggacccaactcatcagggaagagcatatacctcaaacaggtaggcttgatcacattcatggccctggtaggcagctttgtgccagcagaggaggccgaaattggggcagtagacgccatcttcacacgaattcatagctgcgaatccatctcccttggcctctccaccttcatgatcgacctcaaccaggtggcgaaagcagtgaacaatgccactgcacagtcgctggtccttattgatgaatttggaaagggaaccaacacggtggatgggctcgcgcttctggccgctgtgctccgacactggctggcacgtggacccacatgcccccacatctttgtggccaccaactttctgagccttgttcagctacaactgctgccacaagggcccctggtgcagtatttgaccatggagacctgtgaggatggcaacgatcttgtcttcttctatcaggtttgcgaaggtgttgcgaaggccagccatgcctcccacacagctgcccaggctgggcttcctgacaagcttgtggctcgtggcaaggaggtctcagacttgatccgcagtggaaaacccatcaagcctgtcaaggatttgctaaagaagaaccaaatggaaaattgccagacattagtggataagtttatgaaactggatttggaagatcctaacctggacttgaacgttttcatgagccaggaagtgctgcctgctgccaccagcatcctctgagagtccttccagtgtcctccccagcctcctgagactccggtgggctgccatgccctctttgtttccttatctccctcagacgcagagtttttagtttctctagaaattttgtttcatattaggaataaagtttattttgaagaaag

SEQ ID NO: 14561 - protein, 508 aa, Homo sapiens
MWPVLLFVFLSQTVYSALGLRDACRSLPQSIQLFRDIAQEFSDDLHHIASLIGKVVDFEGSLAENRFTVLPNIDPEIDEKKRRLMGLPSFLTEVARKELENLDSRIPSCSVIYIPLIGFLLSIPRLPSMVEASDFEINGLDFMFLSEEKLHYRSARTKELDALLGDLHCEIRDQETLLMYQLQCQVLARAAVLTRVLDLASRLDVLLALASAARDYGYSRPRYSPQVLGVRIQNGRHPLMELCARTFVPNSTECGGDKGRVKVITGPNSSGKSIYLKQVGLITFMALVGSFVPAEEAEIGAVDAIFTRIHSCESISLGLSTFMIDLNQVAKAVNNATAQSLVLIDEFGKGTNTVDGLALLAAVLRHWLARGPTCPHIFVATNFLSLVQLQLLPQGPLVQYLTMETCEDGNDLVFFYQVCEGVAKASHASHTAAQAGLPDKLVARGKEVSDLIRSGKPIKPVKDLLKKNQMENCQTLVDKFMKLDLEDPNLDLNVFMSQEVLPAATSIL

SEQ ID NO: 14562 - DNA, 2951 bp, Homo sapiens
gtgatagaaatcatatagaaatacagaaaattgcttgatatttcccccactcttttttttttgagacagagtcttgctctgtcaccaggctggagtgcagtggcacaatcttggctcactgcaacctccacctcccgggttgggtttcaagtgattctcctgcctcagcctcccgagtagctgggactataggcgtgtgccaccatgcctggctaatttttgtatttttagtagagacagggtttcaccatgatggccaggatggtcttgatctcttgacctcgtgatccacccgcctcggcctcccaaagtgctgggattacaggtgtgagccaccgcgcccggccctgatagccgatgaggtttttttgtcattgttcttcttgtatcattacagactcatggccttttatagctatatttctctttctcccgactctgtacaaactcctttgttttagagtttgcacaaccctctatcaaagcacctaccacctcacttttaaatcttctgcatgtatttctgtcttccttcctagactgtgagcacatctgggacagggaccatatctttttttgtttatttgttttgttttgagacagagtctcgctctgtcggccaggctggagtgcaatggcgtgatctggctataacctccacctcccgggttcaagagattctcctgcctcagcctcccaagtagctggaattacatgtgcatgccaccaagcccagttaatttttgtattttgagtagagacagggtttcaccatgttggtgaggctgatctcgaactcctgacctcaggtgatctacccacctcagcctcccaaagtgctgggattacaggcatgagccactgtgcctggccaggaccatatcttaattgtctttgtagtttcagtgtttggtacagtgcctctcactgtttctttttgcctttgagatcttccctctttgttactgtgatcttccctactggtctttgttcttctgagtctgtccctatcaccacctcaacccgagctggatgtggcctgtcctcctttttgtgtttctctcacagactgtgtacagtgccctgggcctgagggatgcctgccgctccctgccgcagtccatccagctctttcgggacattgcccaagagttctctgatgacctgcaccatatcgccagcctcattgggaaagtagtggactttgagggcagccttgctgaaaatcgcttcacagtcctccccaacatagatcctgaaattgatgagaaaaagcgaagactgatgggacttcccagtttccttactgaggttgcccgcaaggagctggagaatctggactcccgtattccttcatgcagtgtcatctacatccctctgattggcttccttctttctattccccgcctgccttccatggtagaggccagtgactttgagattaatggactggacttcatgtttctctcagaggagaagctgcactatcgtagtgcccgaaccaaggagctggatgcattgctgggggacctgcactgcgagatccgggaccaggagacgctgctgatgtaccagctacagtgccaggtgctggcacgagcagctgtcttaacccgagtattggaccttgcctcccgcctggacgtcctgctggctcttgccagtgctgcccgggactatggctactcaaggccgcgttactccccacaagtccttggggtacgaatccagaatggcagacatcctctgatggaactctgtgcccgaacctttgtgcccaactccacagaatgtggtggggacaaagggagggtcaaagtcatcactggacccaactcatcagggaagagcatatacctcaaacaggtaggcttgatcacattcatggccctggtaggcagctttgtgccagcagaggaggccgaaattggggcagtagacgccatcttcacacgaattcatagctgcgaatccatctcccttggcctctccaccttcatgatcgacctcaaccaggtggcgaaagcagtgaacaatgccactgcacagtcgctggtccttattgatgaatttggaaagggaaccaacacggtggatgggctcgcgcttctggccgctgtgctccgacactggctggcacgtggacccacatgcccccacatctttgtggccaccaactttctgagccttgttcagctacaactgctgccacaagggcccctggtgcagtatttgaccatggagacctgtgaggatggcaacgatcttgtcttcttctatcaggtttgcgaaggtgttgcgaaggccagccatgcctcccacacagctgcccaggctgggcttcctgacaagcttgtggctcgtggcaaggaggtctcagacttgatccgcagtggaaaacccatcaagcctgtcaaggatttgctaaagaagaaccaaatggaaaattgccagacattagtggataagtttatgaaactggatttggaagatcctaacctggacttgaacgttttcatgagccaggaagtgctgcctgctgccaccagcatcctctgagagtccttccagtgtcctccccagcctcctgagactccggtgggctgccatgccctctttgtttccttatctccctcagacgcagagtttttagtttctctagaaattttgtttcatattaggaataaagtttattttgaagaaagatattgtttctttagtctcaaaacaagagactaggaaagatccaaaacacagagcaggagtccacaggggaacctgccctgcctcagtaaaaatacagtgttgttgctgtaggaagactcccggattctaccccaggatacttcatgagaacgaaccccttcagagaggccctacaaaacagattagagggaagacagaggggtccaagggagatggtctctcttctcaagtaggaacaccccagc

SEQ ID NO: 14563 - protein, 508 aa, Homo sapiens; identical to SEQ ID NO: 14561

SEQ ID NO: 14564 - DNA, 727 bp, Homo sapiens
gatccaaatgtgcaaccacctccacatcagagctccctttcattcctagtcctactgggcctgggtctaggtccacaggatttctgacccttatttccccttctcttccccactccccttactcctcccaccttcttgcttgttcctaggtctcagacttgatccgcagtggaaaacccatcaagcctgtcaaggatttgctaaagaagaaccaaatggaaaattgccagacattagtggataagtttatgaaactggatttggaagatcctaacctggacttgaacgttttcatgagccaggaagtgctgcctgctgccaccagcatcctctgagagtccttccagtgtcctccccagcctcctgagactccggtgggctgccatgccctctttgtttccttatctccctcagacgcagagtttttagtttctctagaaattttgtttcatattaggaataaagtttattttgaagaaagatattgtttctttagtctcaaaacaagagactaggaaagatccaaaacacagagcaggagtccacaggggaacctgccctgcctcagtaaaaatacagtgttgttgctgtaggaagactcccggattctaccccaggatacttcatgagaacgaaccccttcagagaggccctacaaaacagattagagggaagacagaggggtccaagggagatggtctctcttctcaagtaggaacaccccagc

SEQ ID NO: 14565 - protein, 39 aa, Homo sapiens
MENCQTLVDKFMKLDLEDPNLDLNVFMSQEVLPAATSIL

SEQ ID NO: 14566 - DNA, 1101 bp, Homo sapiens
ggagggaccagcccgggctgcaccagtgggagtggctccacccttcccacctcagagccatggggagccagggctctggcggggtgcccttggtgcaggctccctacacagtcctgctgctgccgctggggacaagccgccaagacccaggggcccagagcttcttcctttggctacgcaggatgcaggctctggagagagaacaggatgccctgtggcagggtctggagctgctacagcatggccaggcctggtttgaagaccatctgagggaggcacagcgacagcagctgcatctaggggcccttggtgagaattttctaacagatttacactcagagcctggtcgccccccgttagcccagattcaaaaggtgaacatctgtttgcagaatctgattcatgagaagttctccccaagtccactgaacaaggctagttcctgcaccacccaggattcaaaggaaagacgaagggagcagaacttgtggcagcaacaggagttgtcaaggcagcagaaaggagtcacccagccaaaggaggagatggctcagcggggctgcaccaaggggccaagaggccctacccgtgtctaaaccctcctctcactcccctaagcctggtgaaagagtcagaagccccaggctcctttttctgtttcttaactcaacagctaaaaaatggctccaggtagtgagtcaatgaagttcagacatgttggtgtaaagtttctcctctgctcctgaaaacttcatcttcttggtgtctcatgtcctcattctcccctatatgacatgcaaaaacgatctttctttgaaatccctctgggaagaagcatgtttattgaaactgtccttcagccttaaatacaaaaataaaactgaaactgctccagaaagcagctttctccaaaaatgtctttggtttgtttctcatagggttaggaaaagtgcattgtgggaatatccattgccctctatcccagtcttgcagggtgttttgttttgttttgtttctgagatagggtctcactgtcgctcaggctgtagtgcagtggttcgaccacaactcactgcagcctcaacctcctgggctcaagtg

SEQ ID NO: 14567 - protein, 178 aa, Homo sapiens
MGSQGSGGVPLVQAPYTVLLLPLGTSRQDPGAQSFFLWLRRMQALEREQDALWQGLELLQHGQAWFEDHLREAQRQQLHLGALGENFLTDLHSEPGRPPLAQIQKVNICLQNLIHEKFSPSPLNKASSCTTQDSKERRREQNLWQQQELSRQQKGVTQPKEEMAQRGCTKGPRGPTRV

SEQ ID NO: 14568 - DNA, 931 bp, Homo sapiens
atggggagccagggctctggcggggtgcccttggtgcaggctccctacacagtcctgctgctgccgctggggacaagccgccaagacccaggggcccagagcttcttcctttggctacgcaggatgcaggctctggagagagaacaggatgccctgtggcagggtctggagctgctacagcatggccaggcctggtttgaagaccatctgagggaggcacagcgacagcagctgcatctaggggcccttggtgagaattttctaacagatttacactcagagcctggtcgccccccgttagcccagattcaaaaggtgaacatctgtttgcagaatctgattcatgagaagttctccccaagtccactgaacaaggctagttcctgcaccacccaggattcaaaggaaagacgaagggagcagaacttgtggcagcaacaggtaaacttcaagaaggagggcaggagccccaccctacagggctgggaggagcccagaggccccatctgtttctcctccaggagttgtcaaggcagcagaaaggagtcacccagccaaaggaggagatggctcagcggggctgcaccaaggggccaagaggccctacccgtgtctaaaccctcctctcactcccctaagcctggtgaaagagtcagaagccccaggctcctttttctgtttcttaactcaacagctaaaaaatggctccaggtagtgagtcaatgaagttcagacatgttggtgtaaagtttctcctctgctcctgaaaacttcatcttcttggtgtctcatgtcctcattctcccctatatgacatgcaaaaacgatctttctttgaaatccctctgggaagaagcatgtttattgaaactgtccttcagccttaaatacaaaaataaaactgaaactgctccagaaagcagctttctcc

SEQ ID NO: 14569 - protein, 241 aa, Homo sapiens [sequence omitted]

SEQ ID NO: 14570 - DNA, 1122 bp, Homo sapiens
atggggagccagggctctggcggggtgcccttggtgcaggctccctacacagtcctgctgctgccgctggggacaagccgccaagacccaggggcccagagcttcttcctttggctacgcaggatgcaggctctggagagagaacaggatgccctgtggcagggtctggagctgctacagcatggccaggcctggtttgaagaccatctgagggaggcacagcgacagcagctgcatctaggggcccttggtgagaattttctaacagatttacactcagagcctggtcgccccccgttagcccagattcaaaaggtgaacatctgtttgcagaatctgattcatgagaagttctccccaagtccactgaacaaggctagttcctgcaccacccaggattcaaaggaaagacgaagggagcagaacttgtggcagcaacaggtaaacttcaagaaggagggcaggagccccaccctacagggctgggaggagcccagaggccccatctgtttctcctccaggagttgtcaaggcagcagaaaggagtcacccagccaaaggaggagatggctcagcggggctgcaccaaggggccaagaggccctacccgtgtctaaaccctcctctcactcccctaagcctggtgaaagagtcagaagccccaggctcctttttctgtttcttaactcaacagctaaaaaatggctccaggtagtgagtcaatgaagttcagacatgttggtgtaaagtttctcctctgctcctgaaaacttcatcttcttggtgtctcatgtcctcattctcccctatatgacatgcaaaaacgatctttctttgaaatccctctgggaagaagcatgtttattgaaactgtccttcagccttaaatacaaaaataaaactgaaactgctccagaaagcagctttctccaaaaatgtctttggtttgtttctcatagggttaggaaaagtgcattgtgggaatatccattgccctctatcccagtcttgcagggtgttttgttttgttttgtttctgagatagggtctcactgtcgctcaggctgtagtgcagtggttcgaccacaactcactgcagcctcaacctcctgggctcaagtg

SEQ ID NO: 14571 - protein, 241 aa, Homo sapiens [sequence omitted]

SEQ ID NO: 14572 - DNA, 633 bp, Homo sapiens
cgggctctaaagggatgggtctccagcactattttcaacctgccccattggggagaatgaggacatgagacaccaagaagatgaagttttcaggagcagaggagaaactttacaccaacatgtctgaacttcattgactcactacctggagccattttttagctgttgagttaagaaacagaaaaaggagcctggggcttctgactctttcaccaggcttaggggagtgagaggagggtttagacacgggtagggcctcttggccccttggtgcagccccgctgagccatctcctcctttggctgggtgactcctttctgctgccttgacaactcctggaggagaaacagatggggcctctgggctcctcccagccctgtagggtggggctcctgccctccttcttgaagtttacctgttgctgccacaagttctgctcccttcgtctttcctttgaatcctgggtggtgcaggaactagccttgttcagtggacttggggagaactggaggggaaattcgctgtgttttctgttaagccagcactgaccccaacaactcccctctctagtccaacttcccaaaagtctaaactgaaaacaataaactcaccttctcatgaatcagattctgc

SEQ ID NO: 14573 - protein, 65 aa, Homo sapiens [sequence omitted]

SEQ ID NO: 14574 - DNA, 2671 bp, Homo sapiens
ggggaagccaggctggagcagacacgacttttgaggtaaagcaggttcccatggagacccgcagagccggcctgccctggaatcgcggctgcttcctcctcccttgagagccttctgtctcccaggtccatgtctcagccatgctccccacggaggtcccccaatcccacccgggcccctcagcgttgcttctgctgcagctgttgctgccccccacatctgccttcttccccaacatctggagcctgctggctgcccctggctccatcacccaccaagacctaactgaggaggcagcgctcaacgtcaccctgcagctcttcctggagcagccacccccaggccgcccccctcttcgtcttgaggacttcctgggtcgaacactccttgctgatgacctctttgccgcctactttggacctggttcttctcggcggttccgagcagccttaggtgaggtgtctcgtgccaatgcagcccaggacttcctgccaacttccaggaatgaccccgacctgcactttgatgctgagcgactgggtcagggacgcgcgcgcctggtaggggctctgcgggagaccgtggtggcagccagggcccttgaccacaccctggctcgccagcgcctcggggctgcacttcatgccctgcaggatttctacagtcatagcaactgggtggagctgggcgagcagcagccacaccctcacctcctctggccaaggcaggagctccagaacctggcacaagtggccgatcctacctgctccgattgcgaggagttgagctgccccaggaattggctgggcttcacactcctcacctctggctactttggaactcatcccccgaaacctccagggaaatgtagccacgggggccattttgaccggagcagctcccagccaccgaggggaggcatcaacaaggacagcacatccccaggcttctcccctcaccacatgctgcacctccaggctgcaaaactggcccttctagcctccatccaggccttcagccttctgcgaagccgcctgggagacagggatttctccaggctgctggacatcaccccagcctccagcctgagctttgtcctggacaccacgggcagcatgggtgaggagatcaacgctgccaaaatccaggctcgccaccttgtggagcagcggagaggcagccccatggagcctgtccactatgtcctggtgccttttcatgacccagggttcggccctgtctttacaaccagtgaccctgacagcttctggcaacagcttaatgagatccatgccttggggggtggagacgagcctgagatgtgcctgtcagccctgcagctggccctgctgcacacacctccactctcagatatctttgtcttcacggatgcctcccccaaggatgcctttctcaccaaccaggtggaatccctgactcaggagcggcgctgccgggtaacattcctggtgactgaagatacatcaagggttcagggtcgagctcggcgtgagatcttgtcccctctgcgttttgagccatacaaagcagtggccctggcctcaggaggagaggtgatcttcaccaaagaccagcacattcgagacgtggcagccattgttggggagagcatggctgccctggtgactcttcccctggaccctcctgttgtggtgcctgggcagccacttgtgttcagcgtggatgggctgctccagaagatcacagtccggatccacggagacatcagcagcttctggatcaagaaccctgcaggggtctcccagggccaggaggaaggcgggggtcctctaggtcacactcgccgctttgggcagttctggatggtgaccatggatgaccctccacagacaggaacctgggagatccaggtcacagctgaggacacccctggggtgagagtgcaagcccagacctccctggacttcctcttccactttgggatccccatggaggatggaccccaccctggcctctaccccctgactcagccagttgcaggtcttcagacccagctgctggtagaagtgacagggttgggttccagagccaatcctggggatcctcagccgcatttctcccacgtcatccttcgaggggtcccagagggtgccgaactaggccaggtgcccttggagcccgtgggacctccggagcgaggtctcctcgcagcctcgctgtcgcccacgctgctgtccacccctagacccttctccctggagctgattggccaggacgcagcggggcggcgcctgcacagggctgcccctcagcctagcactgtagtccctgtccttctggagcttagtggcccctcgggtttcttggccccgggcagcaaagtcccgctcagtctccgcatcgccagcttctcgggccctcaggatcttgaccttaggactttcgtcaaccccagcttctccctcacctccaacctctccagggctcacctggaactgaatgagtcggcctggggccgcctgtggctggaggtcccagattcagcggccccggattccgtggtgatggtgactgtgactgcagggggacgagaagccaacccagtacccccgactcatgctttcctccggctcctggtatcggccccagccccgcaggaccggcacaccacccctaccggctcatctga

SEQ ID NO: 14575 - protein, 842 aa, Homo sapiens
MLPTEVPQSHPGPSALLLLQLLLPPTSAFFPNIWSLLAAPGSITHQDLTEEAALNVTLQLFLEQPPPGRPPLRLEDFLGRTLLADDLFAAYFGPGSSRRFRAALGEVSRANAAQDFLPTSRNDPDLHFDAERLGQGRARLVGALRETVVAARALDHTLARQRLGAALHALQDFYSHSNWVELGEQQPHPHLLWPRQELQNLAQVADPTCSDCEELSCPRNWLGFTLLTSGYFGTHPPKPPGKCSHGGHFDRSSSQPPRGGINKDSTSPGFSPHHMLHLQAAKLALLASIQAFSLLRSRLGDRDFSRLLDITPASSLSFVLDTTGSMGEEINAAKIQARHLVEQRRGSPMEPVHYVLVPFHDPGFGPVFTTSDPDSFWQQLNEIHALGGGDEPEMCLSALQLALLHTPPLSDIFVFTDASPKDAFLTNQVESLTQERRCRVTFLVTEDTSRVQGRARREILSPLRFEPYKAVALASGGEVIFTKDQHIRDVAAIVGESMAALVTLPLDPPVVVPGQPLVFSVDGLLQKITVRIHGDISSFWIKNPAGVSQGQEEGGGPLGHTRRFGQFWMVTMDDPPQTGTWEIQVTAEDTPGVRVQAQTSLDFLFHFGIPMEDGPHPGLYPLTQPVAGLQTQLLVEVTGLGSRANPGDPQPHFSHVILRGVPEGAELGQVPLEPVGPPERGLLAASLSPTLLSTPRPFSLELIGQDAAGRRLHRAAPQPSTVVPVLLELSGPSGFLAPGSKVPLSLRIASFSGPQDLDLRTFVNPSFSLTSNLSRAHLELNESAWGRLWLEVPDSAAPDSVVMVTVTAGGREANPVPPTHAFLRLLVSAPAPQDRHTTPTGS

SEQ ID NO: 14576 - DNA, 366 bp, Homo sapiens
ccacgctgctgtccacccctagacccttctccctggagctgattggccaggacgcagcggggcggcgcctgcacagggctgcccctcagcctagcactgtagtccctgtccttctggaggtgagacgccaggggaaagtgcggctggggctggagagagttagagcggccccttccctgaagaacccttctctgcagcttagtggcccctcgggtttcttggccccgggcagcaaagtcccgctcagtctccgcatcgccagcttctcgggccctcaggatcttgaccttaggactttcgtcaaccccagcttctccctcacctccaacctctccagggctcacctggaactgaatgagtcggcct

SEQ ID NO: 14577 - protein, 120 aa, Homo sapiens
TLLSTPRPFSLELIGQDAAGRRLHRAAPQPSTVVPVLLEVRRQGKVRLGLERVRAAPSLKNPSLQLSGPSGFLAPGSKVPLSLRIASFSGPQDLDLRTFVNPSFSLTSNLSRAHLELNES

SEQ ID NO: 14578 - DNA, 4248 bp, Homo sapiens
tccgcgcccagcgccccgcgccccgcgctgttcctcgtgagaccggcgggcggcgagccgcgcggcccccggggcagtgtcggacacggcgggcgcgcactcgcaggcggggcacggccgcccccgccaggacccgcaggcccggaaacgctccctgtcacaaaggggggaacacgtgggcgccggctgccggggcggcgatcttagggaactagggtcacctggagagccgcccaccgtctctgcccgctcgactcctccgcccgggccgctcggccggtccagccgcggccggcgcctggctgtgaggtggattcccggcccagtctgaccatctccctccagtttttccacttcgttcggaccttctcataactatgtccaccctctacgtctcccctcacccagatgccttccccagcctccgagccctcatagccgctcgctatggggaggctggggagggtcccggatggggaggagcccacccccgcatctgtctccagccacccccgactagcaggactccctttcccccaccccgcctgccggccctggagcaggggcccggtgggctctgggtgtggggggccacggctgtggcccagctgctgtggccagcaggcctggggggcccagggggcagccgggcggctgtccttgtccaacagtgggtcagttacgccgacacggagttaataccagctgcctgtggagcaacgctgccggccctgggactccgaagctcggcccaggacccccaggctgtgctgggggccctgggcagggccctgagccccttggaggagtggcttcggctgcacacctacttggccggggaggcccccactctggctgacctggcggctgtcacagccttgctgctgcctttccgatacgtcctagacccacctgcccgccggatctggaataatgtgactcgctggtttgtcacgtgtgtccggcagccagaattccgagccgtgctaggagaagtggttctatactcaggagccaggcctctctctcatcagccaggccccgaggctcctgccctcccaaagacagctgctcagctcaagaaagaggcaaagaaacgggagaagctagagaaattccaacagaagcagaagatccaacagcagcagccacctccaggggagaagaaaccaaaaccagagaagagggagaaacgggatcctggggtcattacctatgacctcccaaccccacccggggaaaagaaagatgtcagtggccccatgcccgactcctacagccctcggtatgtggaggctgcctggtacccttggtgggagcagcagggcttcttcaagccagagtatgggcgtcctaatgtgtcagcagcaaatccccgaggtgtcttcatgatgtgcatcccaccccccaatgtgacaggctccctgcacctgggccatgcactcaccaacgccatccaggactccctgactcgatggcaccgcatgcgtggggagaccaccctgtggaaccctggctgtgaccatgcaggtattgccacccaggtggtggtggagaagaagctatggcgtgagcagggactgagccggcaccagctgggccgcgaggcctttctacaggaagtctggaagtggaaggaggagaaaggtgaccggatttaccaccagttgaagaagcttggcagctccttggactgggatcgagcctgtttcaccatggaccctaaactctcagcagctgtgacagaggcctttgtccggcttcacgaggaaggcatcatctatcgcagtacccgccttgttaactggtcctgcaccctcaactccgccatctctgacattgaggtggataagaaggagctgacaggtcgcaccctgctctccgtgcctggctacaaggagaaggtggagttcggggtcctcgtgtcctttgcctataaggtccaaggctcagatagcgacgaggaggtggtggtggcaacaactcggatcgagacaatgctgggagatgtggctgtagctgtgcaccccaaagataccagataccagcacctgaaggggaagaacgtgatccacccattcctgtctcggagccttcccattgtcttcgatgaatttgtggacatggactttggcacaggtgctgtgaagatcacccccgcacatgaccaaaatgactatgaagttgggcagcggcacgggctggaggccatcagcatcatggactcccggggggccctcatcaatgtgcctccgcctttcctgggcctgcccaggtttgaggccaggaaagcggtgctggtggcgctgaaggagcggggactgttccgtggcattgaggacaaccccatggtggtgccactttgcaaccggtcgaaggacgtggtagagcctctgctgcggccgcagtggtacgttcgctgcggggagatggcccaggctgccagcgccgctgtgactcggggtgacctccgcatcctgcctgaggcccatcagcgcacatggcatgcctggatggacaacatccgggagtggtgcatttccaggcagctgtggtggggccatcgcatcccagcctactttgtcactgtcagtgacccagcggtgccccctggggaggaccctgatgggcggtactgggtgagtggacgcaatgaggcggaggcccgggagaaggcagccaaggagttcggagtgtcccctgacaagatcagtctccagcaagatgaggatgtattggatacctggttctcctctggcctcttccccttatccattttgggctggcccaaccagtcagaagacctgagtgtgttctaccccgggacactgctggagaccggtcatgacatcctcttcttctgggtggcccggatggtcatgctgggcctgaagctcacgggcaggctgccctttagagaggtctacctccatgccatcgtgcgagatgctcacggccggaagatgagcaagtctctaggcaatgtcatcgatcccctggacgtcatctatggaatctccctgcagggcctccacaaccagctgctgaacagcaacctggatcccagcgaggtggagaaggccaaagaagggcagaaagctgacttcccagcggggattcctgaatgtggcaccgatgctctccggtttggattatgtgcctacatgtcccagggtcgtgacatcaacctggatgtgaaccggatactgggttaccgccacttctgcaacaagctctggaatgccaccaagtttgcccttcgtggccttgggaagggttttgtgccctcacccacctcccagcccggaggccatgagagcctggtggaccgctggatccgcagccgcctgacagaggctgtgaggctcagcaatcaaggcttccaggcctacgacttcccggccgtcaccactgcccagtacagcttctggctctatgagctctgtgatgtctacttggagtgcctgaaacctgtactgaatggggtggaccaggtggcagctgagtgtgcccgccagaccctgtacacttgcctggacgttggcctgcggctgctctcacccttcatgcccttcgtgacggaggagctgttccagaggctgccccggaggatgccgcaagctccccctagcctctgtgttaccccctacccggagccctcagagtgctcctggaaggaccccgaggcagaagccgcccttgagctggcgctaagcatcacgcgagccgtgcgctccctgcgggccgactacaacctcacccggatccggcctgactgtttcctggaagtggcggatgaggccacgggcgccctggcatcggcggtgtcgggctacgtgcaggccctggccagcgcaggtgtggtggctgttctggccctgggggctcccgccccccagggttgcgctgtggctctggcttctgatcgctgctccatccacctgcagcttcaggggctggtggaccctgcacgggagctgggcaagctgcaagccaagcgagttgaggcccagcggcaggcccagcgtctgcgggaacgccgtgctgcctcgggctatcctgtcaaggtgccgctcgaagtccaggaggcagatgaagccaagctccaacagacagaagcagagctcaggaaggtggatgaggccatcgccctattccagaagatgctgtgatccaccacccagcttcacccctcacccccagcggctcaccatggggatggcagcaataaaatattttcccacaaaa

SEQ ID NO: 14579 - protein, 1264 aa, Homo sapiens; identical to SEQ ID NO: 1599

SEQ ID NO: 14580 - DNA, 796 bp, Homo sapiens
cagtgagccgagatcatgccactgcacttgagcctgggcaacagagagaagaccctgtctggaaaaaaaacaaaacaaaacaaaaaccaatcctggtctggaagctggactctgtacccaaccctggggaatccactggggagcatggagcccaggcgctttgagcagggaccatagaaggccctccccttacacatggggagcagctgggggctgggcacaacccagggtcacacaacaggtgggagacggaggctgacctagaaccaggcatcctatctcccagccagacccttcgtaccccacccagctgcccaaaatgtggaaacctgcatgcctggggctgggcttggggtccacatgtagtcggggagccctgggcctcccaccacttactttcaagcctactgggctgaccctggaaggccagtcttgtttgtcccctgcctcctgggttccgccagagagaagcagtggagtaaactgcacagacacagagaaaaccagtcatggaggccaagagctagagagccttgagtggacgtggttaatctcacttggttctcccaagagccctgggaggggggcaatatcatcatcatcatctgacaaatgaagtgaccggcctgggagactgtgctctcctgcttagctccaacagacagaagcagagctcaggaaggtggatgaggccatcgccctattccagaagatgctgtgatccaccacccagcttcacccctcacccccagcggctcaccatggggatggcagcaataaaatattttcccacaaa

SEQ ID NO: 14581 - protein, 98 aa, Homo sapiens
MWKPACLGLGLGSTCSRGALGLPPLTFKPTGLTLEGQSCLSPASWVPPERSSGVNCTDTEKTSHGGQELESLEWTWLISLGSPKSPGRGAISSSSSDK

SEQ ID NO: 14582 - DNA, 666 bp, Homo sapiens
ctaagcatcacgcgagccgtgcgctccctgcgggccgactacaacctcacccggatccggcctgactgtgagcctcaggcccccatgtccgccccatcccactgtcccctcagcctactctgggacccagtgtccggcagtgactgcttggtttcctgtctccatggagctaggcctcacctttctccctccctggcaggtttcctggaagtggcggatgaggccacgggcgccctggcatcggcggtgtcgggctacgtgcaggccctggccagcgcaggtgtggtggctgttctggccctgggggctcccgccccccagggttgcgctgtggctctggcttctgatcgctgctccatccacctgcagcttcaggggctggtggaccctgcacgggagctgggcaagctgcaagccaagcgagttgaggcccagcggcaggcccagcgtctgcgggaacgccgtgctgcctcgggctatcctgtcaaggtgccgctcgaagtccaggaggcagatgaagccaagctccaacagacagaagcagagctcaggaaggtggatgaggccatcgccctattccagaagatgctgtgatccaccacccagcttcacccctcacccccagcggctcaccatggggatggcagcaataaaatattttcccac

SEQ ID NO: 14583 - protein, 169 aa, Homo sapiens
MSAPSHCPLSLLWDPVSGSDCLVSCLHGARPHLSPSLAGFLEVADEATGALASAVSGYVQALASAGVVAVLALGAPAPQGCAVALASDRCSIHLQLQGLVDPARELGKLQAKRVEAQRQAQRLRERRAASGYPVKVPLEVQEADEAKLQQTEAELRKVDEAIALFQKML

SEQ ID NO: 14584 - DNA, 802 bp, Homo sapiens
gcggccgcagtggtacgttcgctgcggggagatggcccaggctgccagcgccgctgtgactcggggtgacctccgcatcctgcctgaggcccatcagcgcacatggcatgcctggatggacaacatccggtgtgtagggtcctcagtgtgggaggggcttgccgagggctgagcagggctcactcgggccaggctccatcaggccctccctgatttctcctccccgacatttgcagggagtggtgcatttccaggcagctgtggtggggccatcgcatcccagcctactttgtcactgtcagtgacccagcggtgccccctggggaggaccctgatgggcggtactgggtgagtggacgcaatgaggcggaggcccgggagaaggcagccaaggagttcggagtgtcccctgacaagatcagtctccagcaaggcaaggcggggctttgagggtctggagggagttgtggggggcagagctccactccctctgacctctgacctttggcctctctcagatgaggatgtattggatacctggttctcctctggcctcttccccttatccattttgggctggcccaaccagtcagaagacctgagtgtgttctaccccgggacactgctggagaccggtcatgacatcctcttcttctgggtggcccggatggtcatgctgggcctgaagctcacgggcaggctgccctttagagaggtgcggagacagccgagaccctcccatcgcccccagcctcctctcctaccgtcctgtgctgcagcgcagaccccgcgtggctggggc

SEQ ID NO: 14585 - protein, 146 aa, Homo sapiens
MRRRPGRRQPRSSECPLTRSVSSKARRGFEGLEGVVGGRAPLPLTSDLWPLSDEDVLDTWFSSGLFPLSILGWPNQSEDLSVFYPGTLLETGHDILFFWVARMVMLGLKLTGRLPFREVRRQPRPSHRPQPPLLPSCAAAQTPRGW

SEQ ID NO: 14586 - DNA, 497 bp, Homo sapiens
aatcacggcgtctggccctgcttcatgcgtttttggtatctttccgcccccagcacctgaaggggaagaacgtgatccacccattcctgtctcggagccttcccattgtcttcgatgaatttgtggacatggactttggcacaggtgctgtgaagatcacccccgcacatgaccaaaatgactatgaagttgggcagcggcacgggctggaggccatcagcatcatggactcccggggggccctcatcaatgtgcctccgcctttcctggtgaggctgcctgaggcaagagtgcccgggtcagggagatggagggatggctgggcatcgccatgatgaggcctcattcctacccagggcctgcccaggtttgaggccaggaaagcggtgctggtggcgctgaaggagcggggactgttccgtggcattgaggacaaccccatggtggtgccactttgcaaccggtcgaaggacgtggtagagcctctgctgcggccg

SEQ ID NO: 14587 - protein, 68 aa, Homo sapiens
MDFGTGAVKITPAHDQNDYEVGQRHGLEAISIMDSRGALINVPPPFLVRLPEARVPGSGRWRDGWASP

SEQ ID NO: 14588 - DNA, 776 bp, Homo sapiens
ccggagtttttatcttcatctttagtactgtactgtttctcaggttcattgaggaggcactgagaacaaatgggatattttttccatgatgagggaaaaaaccccaaccctgagagagattcagtgaggatagcgggagacggaaaatcccttgtgggcaaggatgtggtcgtggaactaaagaatgacctgagcatctgtggaaccctccattctgtggatcagtatctcaacatcaaactaactgacatcagtgtcacagaccctgagaaataccctcacatgttatcagtgaagaactgcttcattcggggctcagtggtccgatacgtgcagctgccagcagatgaggtcgacacacagttgctacaggatgcggcaaggaaggaagccctgcagcagaaacagtgatggctcctcctcctcttcccctccctctttcattggtgacccataaccccaagtcccagcccagaacccctaacccccaatacttgaaggggttttgtttttttactaatgatggttttgtgggttttttttaagggatgagtggatgagaggagtaatagggaacagctatcctctcttgagaaggggaggataagtaggctgggaaacttcaaagccttcccagtccccagcacctgcctttctcactacttctctggagatggtaggagagtttcctaggtctttccagggcagcatgtgattcatttggggatggaaggaatctgtcccgcatcgggaataaaatttatgatgcaaatttg

SEQ ID NO: 14589 - protein, 113 aa, Homo sapiens
MGYFFHDEGKNPNPERDSVRIAGDGKSLVGKDVVVELKNDLSICGTLHSVDQYLNIKLTDISVTDPEKYPHMLSVKNCFIRGSVVRYVQLPADEVDTQLLQDAARKEALQQKQ

SEQ ID NO: 14590 - DNA, 717 bp, Homo sapiens
gccccacgcgcgggctcgcgcttcggtttccccagacctgctcgcagcaccctgctgtcttcccggtccggcccgctgcccgcggcgccagcaccatgctcttctattcttttttcaagtcccttgtgggcaaggatgtggtcgtggaactaaagaatgacctgagtatctcaacatcaaactaactgacatcagtgtcacagaccctgagaaataccctcacatgttatcagtgaagaactgcttcattcggggctcagtggtccgatacgtgcagctgccagcagatgaggtcgacacacagttgctacaggatgcggcaaggaaggaagccctgcagcagaaacagtgatggctcctcctcctcttcccctccctctttcattggtgacccataaccccaagtcccagcccagaacccctaacccccaatacttgaaggggttttgtttttttactaatgatggttttgtgggttttttttaagggatgagtggatgagaggagtaatagggaacagctatcctctcttgagaaggggaggataagtaggctgggaaacttcaaagccttcccagtccccagcacctgcctttctcactacttctctggagatggtaggagagtttcctaggtctttccagggcagcatgtgattcatttggggatggaaggaatctgtcccgcatcgggaataaaatttatgatgcaaatttg

SEQ ID NO: 14591 - protein, 42 aa, Homo sapiens
MLSVKNCFIRGSVVRYVQLPADEVDTQLLQDAARKEALQQKQ

SEQ ID NO: 14592 - DNA, 873 bp, Homo sapiens
ccggcttcctcctcccctctactctacccagcttgcgctccccagccgcaagtcggccgcgctttgcccgtcagcgcttggagctttctgcgtcgcttcccgctgcgcctgcgcggtcccgcctcgccccacgcgcgggctcgcgcttcggtttccccagacctgctcgcagcaccctgctgtcttcccggtccggcccgctgcccgcggcgccagcaccatgctcttctattcttttttcaagtcccttgtgggcaaggatgtggtcgtggaactaaagaatgacctgagcatctgtggaaccctccattctgtggatcagtatctcaacatcaaactaactgacatcagtgtcacagaccctgagaaataccctcacatgttatcagtgaagaactgcttcattcggggctcagtggtccgatacgtgcagctgccagcagatgaggtcgacacacagttgctacaggatgcggcaaggaaggaagccctgcagcagaaacagtgatggctcctcctcctcttcccctccctctttcattggtgacccataaccccaagtcccagcccagaacccctaacccccaatacttgaaggggttttgtttttttactaatgatggttttgtgggttttttttaagggatgagtggatgagaggagtaatagggaacagctatcctctcttgagaaggggaggataagtaggctgggaaacttcaaagccttcccagtccccagcacctgcctttctcactacttctctggagatggtaggagagtttcctaggtctttccagggcagcatgtgattcatttggggatggaaggaatctgtcccgcatcgggaataaaatttatgatgcaaatttg

SEQ ID NO: 14593 - protein, 95 aa, Homo sapiens; identical to SEQ ID NO: 1601

SEQ ID NO: 14594 - DNA, 1202 bp, Homo sapiens
aagagaaaggaattggagcagatgtgtaaccctatcatcacaaaactctaccaaggaggatgcactgggcctgcctgcggaacagggtatgtgcctggaaggcctgccacaggccccacaattgaagaagtagattaattctttttagaactgaagcatcctaggatgcctctacatgtatttcattcccctcatcttcaaacatcattattattcttgaccagacctgaatctaagttaccatcccttggaaattctggagaaggagtctcatgcaccacctatcacactccctcacatcctgtttctgactttggaatggactcaggaaaactaggcccctctttaaaccgtgtgatgtatttgaatgtctgttatttccagccaccctaacattcttcttcctgtgtggatgcttatttgtcaatcagtaaatttgttcgtaaagaaaattacttctggtatttaggctgtgaatgtaccttgaaggggagagttcatggagagagcatgtgttctctgattgtgaggtcactgtgaatgattaaattgctcttctattcttttttcaagtcccttgtgggcaaggatgtggtcgtggaactaaagaatgacctgagcatctgtggaaccctccattctgtggatcagtatctcaacatcaaactaactgacatcagtgtcacagaccctgagaaataccctcacatgttatcagtgaagaactgcttcattcggggctcagtggtccgatacgtgcagctgccagcagatgaggtcgacacacagttgctacaggatgcggcaaggaaggaagccctgcagcagaaacagtgatggctcctcctcctcttcccctccctctttcattggtgacccataaccccaagtcccagcccagaacccctaacccccaatacttgaaggggttttgtttttttactaatgatggttttgtgggttttttttaagggatgagtggatgagaggagtaatagggaacagctatcctctcttgagaaggggaggataagtaggctgggaaacttcaaagccttcccagtccccagcacctgcctttctcactacttctctggagatggtaggagagtttcctaggtctttccagggcagcatgtgattcatttggggatggaaggaatctgtcccgcatcgggaataaaatttatgatgcaaatttg

SEQ ID NO: 14595 - protein, 98 aa, Homo sapiens
MIKLLFYSFFKSLVGKDVVVELKNDLSICGTLHSVDQYLNIKLTDISVTDPEKYPHMLSVKNCFIRGSVVRYVQLPADEVDTQLLQDAARKEALQQKQ

SEQ ID NO: 14596 - DNA, 767 bp, Homo sapiens
ctcccctctactctacccagcttgcgctccccagccgcaagtcggccgcgctttgcccgtcagcgcttggagctttctgcgtcgcttcccgctgcgcctgcgcggtcccgcctcgccccacgcgcgggctcgcgcttcggtttccccagacctgctcgcagcaccctgctgtcttcccggtccggcccgctgcccgcggcgccagcaccatgctcttctattcttttttcaagtcccttgtgggcaaggatgtggtcgtggaactaaagaatgacctgagttatcagtgaagaactgcttcattcggggctcagtggtccgatacgtgcagctgccagcagatgaggtcgacacacagttgctacaggatgcggcaaggaaggaagccctgcagcagaaacagtgatggctcctcctcctcttcccctccctctttcattggtgacccataaccccaagtcccagcccagaacccctaacccccaatacttgaaggggttttgtttttttactaatgatggttttgtgggttttttttaagggatgagtggatgagaggagtaatagggaacagctatcctctcttgagaaggggaggataagtaggctgggaaacttcaaagccttcccagtccccagcacctgcctttctcactacttctctggagatggtaggagagtttcctaggtctttccagggcagcatgtgattcatttggggatggaaggaatctgtcccgcatcgggaataaaatttatgatgcaaa

SEQ ID NO: 14597 - protein, 44 aa, Homo sapiens
MAPPPLPLPLSLVTHNPKSQPRTPNPQYLKGFCFFTNDGFVGFF

SEQ ID NO: 14598 - DNA, 2540 bp, Homo sapiens
cagtttggaaaaagattactgagttggagccgtctcaaatttgcagggagggacggggtggggggtggggggaccccggttgtgcagtttgatattgagggagcccccacctactcgctggggctgcgtaatctggacgtttccaaactgaagcgaaggcgtcgggagactaggcctcagagaaccatggctactgccaagggaatcgccataggcatcgacctgggcaccacctactcctgtgtgggggtgttccagcacggcaaggtggagatcatcgccaacgaccagggcaaccgcaccacccccagctacgtggccttcacagacaccgagcggctcattggggatgcggccaagaaccaggtagcaatgaatccccagaacactgtttttgatgctaaacgtctgatcggcaggaaatttaatgatcctgttgtacaagcagatatgaaactttggccttttcaagtgattaatgaaggaggcaagcccaaagtccttgtgtcctacaaaggggagaataaagctttctaccctgaggaaatctcttcgatggtattgactaagttgaaggagactgctgaggcctttttgggccaccctgtcaccaatgcagtgattaccgtgccagcctatttcaatgactctcaacgtcaggctactaaggatgcaggtgtgattgctggacttaatgtgctaagaatcatcaatgagcccacggctgctgccattgcctatggtttagataaaggaggtcaaggagaacgacatgtcctgatttttgatctgggtggaggcacatttgatgtgtcaattctgaccatagatgatgggatttttgaggtaaaggccactgctggggacactcacctgggtggggaggactttgacaacaggcttgtgagccacttcgtggaggagttcaagaggaaacacaaaaaggacatcagccagaacaagcgagccgtgaggcggctgcgcaccgcctgcgagagggccaagaggaccctgtcgtccagcacccaggccaacctagaaattgattcactttatgaaggcattgacttctatacatccatcaccagagctcgatttgaagagttgtgtgcagacctgtttaggggtaccctggagcctgtagaaaaagcgcttcgggatgccaagatggataaggctaaaatccatgacattgttttagtagggggctccacccgcatccccaaggtgcagcggctgcttcaggactacttcaatggacgtgatctcaacaagagcatcaaccctgatgaggccgtagcatatggggctgcggtacaagcagccatcctgatgggggacaagtctgagaaggtacaggacctgctgctgctggacgtggctcccctgtccctggggctggagacggctgggggcgtgatgactgccctgataaagcgcaactccaccatccccaccaagcagacacagattttcaccacctactctgacaaccaacccggggtgctgatccaggtgtatgagggcgagagggccatgacaaaggacaacaacctgctggggcggtttgacctgactggaatccctccagcacccaggggagttcctcagatcgaggtgacgtttgacattgatgccaatggtattctcaatgtcacagccacggacaagagcaccggcaaggtgaacaagatcaccatcaccaatgacaagggccgcctgagcaaggaggagattgagcgcatggttctggatgctgagaaatataaagctgaagatgaggtccagagggagaaaattgctgcaaagaatgccttagaatcctatgcttttaacatgaagagtgttgtgagtgatgaaggtttgaagggcaagattagtgagtctgataaaaataaaatattggataaatgcaacgagctcctttcgtggctggaggtcaatcaactggcagagaaagatgagtttgatcataagagaaaggaattggagcagatgtgtaaccctatcatcacaaaactctaccaaggaggatgcactgggcctgcctgcggaacagggtatgtgcctggaaggcctgccacaggccccacaattgaagaagtagattaattctttttagaactgaagcatcctaggatgcctctacatgtatttcattcccctcatcttcaaacatcattattattcttgaccagacctgaatctaagttaccatcccttggaaattctggagaaggagtctcatgcaccacctatcacactccctcacatcctgtttctgactttggaatggactcaggaaaactaggcccctctttaaaccgtgtgatgtatttgaatgtctgttatttccagccaccctaacattcttcttcctgtgtggatgcttatttgtcaatcagtaaatttgttcgtaaagaaaattacttctggtatttaggctgtgaatgtaccttgaaggggagagttcatggagagagcatgtgttctctgattgtgaggtcactgtgaatgattaaattggtaagggtaaagta

SEQ ID NO: 14599 - protein, 641 aa, Homo sapiens
MATAKGIAIGIDLGTTYSCVGVFQHGKVEIIANDQGNRTTPSYVAFTDTERLIGDAAKNQVAMNPQNTVFDAKRLIGRKFNDPVVQADMKLWPFQVINEGGKPKVLVSYKGENKAFYPEEISSMVLTKLKETAEAFLGHPVTNAVITVPAYFNDSQRQATKDAGVIAGLNVLRIINEPTAAAIAYGLDKGGQGERHVLIFDLGGGTFDVSILTIDDGIFEVKATAGDTHLGGEDFDNRLVSHFVEEFKRKHKKDISQNKRAVRRLRTACERAKRTLSSSTQANLEIDSLYEGIDFYTSITRARFEELCADLFRGTLEPVEKALRDAKMDKAKIHDIVLVGGSTRIPKVQRLLQDYFNGRDLNKSINPDEAVAYGAAVQAAILMGDKSEKVQDLLLLDVAPLSLGLETAGGVMTALIKRNSTIPTKQTQIFTTYSDNQPGVLIQVYEGERAMTKDNNLLGRFDLTGIPPAPRGVPQIEVTFDIDANGILNVTATDKSTGKVNKITITNDKGRLSKEEIERMVLDAEKYKAEDEVQREKIAAKNALESYAFNMKSVVSDEGLKGKISESDKNKILDKCNELLSWLEVNQLAEKDEFDHKRKELEQMCNPIITKLYQGGCTGPACGTGYVPGRPATGPTIEEVD

SEQ ID NO: 14600 - DNA, 2428 bp, Homo sapiens
cagtttggaaaaagattactgagttggagccgtctcaaatttgcagggagggacggggtggggggtggggggaccccggttgtgcagtttgatattgagggagcccccacctactcgctggggctgcgtaatctggacgtttccaaactgaagcgaaggcgtcgggagactaggcctcagagaaccatggctactgccaagggaatcgccataggcatcgacctgggcaccacctactcctgtgtgggggtgttccagcacggcaaggtggagatcatcgccaacgaccagggcaaccgcaccacccccagctacgtggccttcacagacaccgagcggctcattggggatgcggccaagaaccaggtagcaatgaatccccagaacactgtttttgatgctaaacgtctgatcggcaggaaatttaatgatcctgttgtacaagcagatatgaaactttggccttttcaagtgattaatgaaggaggcaagcccaaagtccttgtgtcctacaaaggggagaataaagctttctaccctgaggaaatctcttcgatggtattgactaagttgaaggagactgctgaggcctttttgggccaccctgtcaccaatgcagtgattaccgtgccagcctatttcaatgactctcaacgtcaggctactaaggatgcaggtgtgattgctggacttaatgtgctaagaatcatcaatgagcccacggctgctgccattgcctatggtttagataaaggaggtcaaggagaacgacatgtcctgatttttgatctgggtggaggcacatttgatgtgtcaattctgaccatagatgatgggatttttgaggtaaaggccactgctggggacactcacctgggtggggaggactttgacaacaggcttgtgagccacttcgtggaggagttcaagaggaaacacaaaaaggacatcagccagaacaagcgagccgtgaggcggctgcgcaccgcctgcgagagggccaagaggaccctgtcgtccagcacccaggccaacctagaaattgattcactttatgaaggcattgacttctatacatccatcaccagagctcgatttgaagagttgtgtgcagacctgtttaggggtaccctggagcctgtagaaaaagcgcttcgggatgccaagatggataaggctaaaatccatgacattgttttagtagggggctccacccgcatccccaaggtgcagcggctgcttcaggactacttcaatggacgtgatctcaacaagagcatcaaccctgatgaggccgtagcatatggggctgcggtacaagcagccatcctgatgggggacaagtctgagaaggtacaggacctgctgctgctggacgtggctcccctgtccctggggctggagacggctgggggcgtgatgactgccctgataaagcgcaactccaccatccccaccaagcagacacagattttcaccacctactctgacaaccaacccggggtgctgatccaggtgtatgagggcgagagggccatgacaaaggacaacaacctgctggggcggtttgacctgactggaatccctccagcacccaggggagttcctcagatcgaggtgacgtttgacattgatgccaatggtattctcaatgtcacagccacggacaagagcaccggcaaggtgaacaagatcaccatcaccaatgacaagggccgcctgagcaaggaggagattgagcgcatggttctggatgctgagaaatataaagctgaagatgaggtccagagggagaaaattgctgcaaagaatgccttagaatcctatgcttttaacatgaagagtgttgtgagtgatgaaggtttgaagggcaagattagtgagtctgataaaaataaaatattggataaatgcaacgagctcctttcgtggctggaggtcaatcaactggcagagaaagatgagtttgatcataagagaaaggaattggagcagatgtgtaaccctatcatcacaaaactctaccaaggaggatgcactgggcctgcctgcggaacagggtatgtgcctggaaggcctgccacaggccccacaattgaagaagtagattaattctttttagaactgaagcatcctaggatgcctctacatgtatttcattcccctcatcttcaaacatcattattattcttgaccagacctgaatctaagttaccatcccttggaaattctggagaaggagtctcatgcaccacctatcacactccctcacatcctgtttctgactttggaatggactcaggaaaactaggcccctctttaaaccgtgtgatgtatttgaatgtctgttatttccagccaccctaacattcttcttcctgtgtggatgcttatttgtcaatcagtaaatttgttcgtaaagaaaatt

SEQ ID NO: 14601 - protein, 641 aa, Homo sapiens; identical to SEQ ID NO: 14599

SEQ ID NO: 14602 - DNA, 2648 bp, Homo sapiens
caactagggaactttccagtactttcccaaacaaggacctactgagcctttcaggttcacaatcaatcagatccctactggctcacctagtctcccgacgccttcgcttcagtttggaaacgtccagattacgcagccccagcgagtaggtgggggctccctcaatatcaaactgcacaaccggggtccccccaccccccaccccgtccctccctgcaaatttgagacggctccaactcagtaatctttttccaaactggcccatgaggtcagagacagtatctccattgtaacgtggccgggcggtgtcaacacaaacgcccccaccctcccctggacgcgcgtaacccgctccccgcaccagccccctgcccacaactgcgcaggcccagcaagcccccacaattaaaagcccagcgccgacccttcctgtcaattaggcgctgaagcgcaggcggtcagcatcgccatggagaccaacacccttcccaccgccactcccccttcctctcagggtccctgtcccctccagtgaatcccagaagactctggagagttctgagcagggggcggcactctggcctctgattggtccaaggaaggctggggggcaggacgggaggcgaaaaccctggaatattcccgacctggcagcctcatcgagctcggtgattggctcagaagggaaaaggcgggtctccgtgacgacttataaaagcccaggggcaagcggtccggataacggctagcctgaggagctgctgcgacagtccactacctttttcgagagtgactcccgttgtcccaaggcttcccagagcgaacctgtgcggctgcaggcaccggcgcgtcgagtttccggcgtccggaaggaccgagctcttctcgcggatccagtgttccgtttccagcccccaatctcagagcggagccgacagagagcagggaaccggcatggccaaagccgcggcgatcggcatcgacctgggcaccacctactcctgcgtgggggtgttccaacacggcaagggggagcgcaacgtgctcatctttgacctgggcgggggcaccttcgacgtgtccatcctgacgatcgacgacggcatcttcgaggtgaaggccacggccggggacacccacctgggtggggaggactttgacaacaggctggtgaaccacttcgtggaggagttcaagagaaaacacaagaaggacatcagccagaacaagcgagccgtgaggcggctgcgcaccgcctgcgagagggccaagaggaccctgtcgtccagcacccaggccagcctggagatcgactccctgtttgagggcatcgacttctacacgtccatcaccagggcgaggttcgaggagctgtgctccgacctgttccgaagcaccctggagcccgtggagaaggctctgcgcgacgccaagctggacaaggcccagattcacgacctggtcctggtcgggggctccacccgcatccccaaggtgcagaagctgctgcaggacttcttcaacgggcgcgacctgaacaagagcatcaaccccgacgaggctgtggcctacggggcggcggtgcaggcggccatcctgatgggggacaagtccgagaacgtgcaggacctgctgctgctggacgtggctcccctgtcgctggggctggagacggccggaggcgtgatgactgccctgatcaagcgcaactccaccatccccaccaagcagacgcagatcttcaccacctactccgacaaccaacccggggtgctgatccaggtgtacgagggcgagagggccatgacgaaagacaacaatctgttggggcgcttcgagctgagcggcatccctccggcccccaggggcgtgccccagatcgaggtgaccttcgacatcgatgccaacggcatcctgaacgtcacggccacggacaagagcaccggcaaggccaacaagatcaccatcaccaacgacaagggccgcctgagcaaggaggagatcgagcgcatggtgcaggaggcggagaagtacaaagcggaggacgaggtgcagcgcgagagggtgtcagccaagaacgccctggagtcctacgccttcaacatgaagagcgccgtggaggatgaggggctcaagggcaagatcagcgaggcggacaagaagaaggtgctggacaagtgtcaagaggtcatctcgtggctggacgccaacaccttggccgagaaggacgagtttgagcacaagaggaaggagctggagcaggtgtgtaaccccatcatcagcggactgtaccagggtgccggtggtcccgggcctgggggcttcggggctcagggtcccaagggagggtctgggtcaggccccaccattgaggaggtagattaggggcctttccaagattgctgtttttgttttggagcttcaagactttgcatttcctagtatttctgtttgtcagttctcaatttcctgtgtttgcaatgttgaaattttttggtgaagtactgaacttgctttttttccggtttctacatgcagagatgaatttatactgccatcttacgactatttcttctttttaatacacttaactcaggccattttttaagttggttacttcaaagtaaataaactttaaaattcaagtg

SEQ ID NO: 14603 - protein, 476 aa, Homo sapiens
MAKAAAIGIDLGTTYSCVGVFQHGKGERNVLIFDLGGGTFDVSILTIDDGIFEVKATAGDTHLGGEDFDNRLVNHFVEEFKRKHKKDISQNKRAVRRLRTACERAKRTLSSSTQASLEIDSLFEGIDFYTSITRARFEELCSDLFRSTLEPVEKALRDAKLDKAQIHDLVLVGGSTRIPKVQKLLQDFFNGRDLNKSINPDEAVAYGAAVQAAILMGDKSENVQDLLLLDVAPLSLGLETAGGVMTALIKRNSTIPTKQTQIFTTYSDNQPGVLIQVYEGERAMTKDNNLLGRFELSGIPPAPRGVPQIEVTFDIDANGILNVTATDKSTGKANKITITNDKGRLSKEEIERMVQEAEKYKAEDEVQRERVSAKNALESYAFNMKSAVEDEGLKGKISEADKKKVLDKCQEVISWLDANTLAEKDEFEHKRKELEQVCNPIISGLYQGAGGPGPGGFGAQGPKGGSGSGPTIEEVD

SEQ ID NO: 14604 - DNA, 1293 bp, Homo sapiens
caactagggaactttccagtactttcccaaacaaggacctactgagcctttcaggttcacaatcaatcagatccctactggctcacctagtctcccgacgccttcgcttcagtttggaaacgtccagattacgcagccccagcgagtaggtgggggctccctcaatatcaaactgcacaaccggggtccccccaccccccaccccgtccctccctgcaaatttgagacggctccaactcagtaatctttttccaaactggcccatgaggtcagagacagtatctccattgtaacgtggccgggcggtgtcaacacaaacgcccccaccctcccctggacgcgcgtaacccgctccccgcaccagccccctgcccacaactgcgcaggcccagcaagcccccacaattaaaagcccagcgccgacccttcctgtcaattaggcgctgaagcgcaggcggtcagcatcgccatggagaccaacacccttcccaccgccactcccccttcctctcagggtccctgtcccctccagtgaatcccagaagactctggagagttctgagcagggggcggcactctggcctctgattggtccaaggaaggctggggggcaggacgggaggcgaaaaccctggaatattcccgacctggcagcctcatcgagctcggtgattggctcagaagggaaaaggcgggtctccgtgacgacttataaaagcccaggggcaagcggtccggataacggctagcctgaggagctgctgcgacagtccactacctttttcgagagtgactcccgttgtcccaaggcttcccagagcgaacctgtgcggctgcaggcaccggcgcgtcgagtttccggcgtccggaaggaccgagctcttctcgcggatccagtgttccgtttccagcccccaatctcagagcggagctgtaccagggtgccggtggtcccgggcctgggggcttcggggctcagggtcccaagggagggtctgggtcaggccccaccattgaggaggtagattaggggcctttccaagattgctgtttttgttttggagcttcaagactttgcatttcctagtatttctgtttgtcagttctcaatttcctgtgtttgcaatgttgaaattttttggtgaagtactgaacttgctttttttccggtttctacatgcagagatgaatttatactgccatcttacgactatttcttctttttaatacacttaactcaggccattttttaagttggttacttcaaagtaaataaactttaaaattcaagtg

SEQ ID NO: 14605 - protein, 33 aa, Homo sapiens
MLKFFGEVLNLLFFRFLHAEMNLYCHLTTISSF

SEQ ID NO: 14606 - DNA, 2697 bp, Homo sapiens
caactagggaactttccagtactttcccaaacaaggacctactgagcctttcaggttcacaatcaatcagatccctactggctcacctagtctcccgacgccttcgcttcagtttggaaacgtccagattacgcagccccagcgagtaggtgggggctccctcaatatcaaactgcacaaccggggtccccccaccccccaccccgtccctccctgcaaatttgagacggctccaactcagtaatctttttccaaactggcccatgaggtcagagacagtatctccattgtaacgtggccgggcggtgtcaacacaaacgcccccaccctcccctggacgcgcgtaacccgctccccgcaccagccccctgcccacaactgcgcaggcccagcaagcccccacaattaaaagcccagcgccgacccttcctgtcaattaggcgctgaagcgcaggcggtcagcatcgccatggagaccaacacccttcccaccgccactcccccttcctctcagggtccctgtcccctccagtgaatcccagaagactctggagagttctgagcagggggcggcactctggcctctgattggtccaaggaaggctggggggcaggacgggaggcgaaaaccctggaatattcccgacctggcagcctcatcgagctcggtgattggctcagaagggaaaaggcgggtctccgtgacgacttataaaagcccaggggcaagcggtccggataacggctagcctgaggagctgctgcgacagtccactacctttttcgagagtgactcccgttgtcccaaggcttcccagagcgaacctgtgcggctgcaggcaccggcgcgtcgagtttccggcgtccggaaggaccgagctcttctcgcggatccagtgttccgtttccagcccccaatctcagagcggagccgacagagagcagggaaccggcatggccaaagccgcggcgatcggcatcgacctgggcaccacctactcctgcgtgggggtgttccaacacggcaagggggagcgcaacgtgctcatctttgacctgggcgggggcaccttcgacgtgtccatcctgacgatcgacgacggcatcttcgaggtgaaggccacggccggggacacccacctgggtggggaggactttgacaacaggctggtgaaccacttcgtggaggagttcaagagaaaacacaagaaggacatcagccagaacaagcgagccgtgaggcggctgcgcaccgcctgcgagagggccaagaggaccctgtcgtccagcacccaggccagcctggagatcgactccctgtttgagggcatcgacttctacacgtccatcaccagggcgaggttcgaggagctgtgctccgacctgttccgaagcaccctggagcccgtggagaaggctctgcgcgacgccaagctggacaaggcccagattcacgacctggtcctggtcgggggctccacccgcatccccaaggtgcagaagctgctgcaggacttcttcaacgggcgcgacctgaacaagagcatcaaccccgacgaggctgtggcctacggggcggcggtgcaggcggccatcctgatgggggacaagtccgagaacgtgcaggacctgctgctgctggacgtggctcccctgtcgctggggctggagacggccggaggcgtgatgactgccctgatcaagcgcaactccaccatccccaccaagcagacgcagatcttcaccacctactccgacaaccaacccggggtgctgatccaggtgtacgagggcgagagggccatgacgaaagacaacaatctgttggggcgcttcgagctgagcggcatccctccggcccccaggggcgtgccccagatcgaggtgaccttcgacatcgatgccaacggcatcctgaacgtcacggccacggacaagagcaccggcaaggccaacaagatcaccatcaccaacgacaagggccgcctgagcaaggaggagatcgagcgcatggtgcaggaggcggagaagtacaaagcggaggacgaggtgcagcgcgagagggtgtcagccaagaacgccctggagtcctacgccttcaacatgaagagcgccgtggaggatgaggggctcaagggcaagatcagcgaggcggacaagaagaaggtgctggacaagtgtcaagaggtcatctcgtggctggacgccaacaccttggccgagaaggacgagtttgagcacaagaggaaggagctggagcaggtgtgtaaccccatcatcagcggactgtaccagggtgccggtggtcccgggcctgggggcttcggggctcagggtcccaagggagggtctgggtcaggccccaccattgaggaggtagattaggggcctttccaagattgctgtttttgttttggagcttcaagactttgcatttcctagtatttctgtttgtcagttctcaatttcctgtgtttgcaatgttgaaattttttggtgaagtactgaacttgctttttttccggtttctacatgcagagatgaatttatactgccatcttacgactatttcttctttttaatacacttaactcaggccattttttaagttggttacttcaaagtaaataaactttaaaattcaagtgatgccttttattcctttatttgggggtcagtagggtctgcataggttgt

SEQ ID NO: 14607 - protein, 476 aa, Homo sapiens; identical to SEQ ID NO: 14603

SEQ ID NO: 14608 - DNA, 2247 bp, Homo sapiens
actgcgcaggcccagcaagcccccacaattaaaagcccagcgccgacccttcctgtcaattaggcgctgaagcgcaggcggtcagcatcgccatggagaccaacacccttcccaccgccactcccccttcctctcagggtccctgtcccctccagtgaatcccagaagactctggagagttctgagcagggggcggcactctggcctctgattggtccaaggaaggctggggggcaggacgggaggcgaaaaccctggaatattcccgacctggcagcctcatcgagctcggtgattggctcagaagggaaaaggcgggtctccgtgacgacttataaaagcccaggggcaagcggtccggataacggctagcctgaggagctgctgcgacagtccactacctttttcgagagtgactcccgttgtcccaaggcttcccagagcgaacctgtgcggctgcaggcaccggcgcgtcgagtttccggcgtccggaaggaccgagctcttctcgcggatccagtgttccgtttccagcccccaatctcagagcggagccgacagagagcagggaaccggcatggccaaagccgcggcgatcggcatcgacctgggcaccacctactcctgcgtgggggtgttccaacacggcaaggtggagatcatcgccaacgaccagggcaaccgcaccacccccagctacgtggccttcacggacaccgagcggctcatcggggatgcggccaagaaccaggtggcgctgaacccgcagaacaccgtgtttgacgcgaagcggctgattggccgcaagttcggcgacccggtggtgcagtcggacatgaagcactggcctttccaggtgatcaacgacggagacaagcccaaggtgcaggtgagctacaagggggagaccaaggcattctaccccgaggagatctcgtccatggtgctgaccaagatgaaggagatcgccgaggcgtacctgggctacccggtgaccaacgcggtgatcaccgtgccggcctacttcaacgactcgcagcgccaggccaccaaggatgcgggtgtgatcgcggggtccacccgcatccccaaggtgcagaagctgctgcaggacttcttcaacgggcgcgacctgaacaagagcatcaaccccgacgaggctgtggcctacggggcggcggtgcaggcggccatcctgatgggggacaagtccgagaacgtgcaggacctgctgctgctggacgtggctcccctgtcgctggggctggagacggccggaggcgtgatgactgccctgatcaagcgcaactccaccatccccaccaagcagacgcagatcttcaccacctactccgacaaccaacccggggtgctgatccaggtgtacgagggcgagagggccatgacgaaagacaacaatctgttggggcgcttcgagctgagcggcatccctccggcccccaggggcgtgccccagatcgaggtgaccttcgacatcgatgccaacggcatcctgaacgtcacggccacggacaagagcaccggcaaggccaacaagatcaccatcaccaacgacaagggccgcctgagcaaggaggagatcgagcgcatggtgcaggaggcggagaagtacaaagcggaggacgaggtgcagcgcgagagggtgtcagccaagaacgccctggagtcctacgccttcaacatgaagagcgccgtggaggatgaggggctcaagggcaagatcagcgaggcggacaagaagaaggtgctggacaagtgtcaagaggtcatctcgtggctggacgccaacaccttggccgagaaggacgagtttgagcacaagaggaaggagctggagcaggtgtgtaaccccatcatcagcggactgtaccagggtgccggtggtcccgggcctgggggcttcggggctcagggtcccaagggagggtctgggtcaggccccaccattgaggaggtagattaggggcctttccaagattgctgtttttgttttggagcttcaagactttgcatttcctagtatttctgtttgtcagttctcaatttcctgtgtttgcaatgttgaaattttttggtgaagtactgaacttgctttttttccggtttctacatgcagagatgaatttatactgccatcttacgactatttcttctttttaatacacttaactcaggccattttttaagttggttacttcaaagtaaataaactttaaaattcaagtg

SEQ ID NO: 14609 - protein, 468 aa, Homo sapiens
MAKAAAIGIDLGTTYSCVGVFQHGKVEIIANDQGNRTTPSYVAFTDTERLIGDAAKNQVALNPQNTVFDAKRLIGRKFGDPVVQSDMKHWPFQVINDGDKPKVQVSYKGETKAFYPEEISSMVLTKMKEIAEAYLGYPVTNAVITVPAYFNDSQRQATKDAGVIAGSTRIPKVQKLLQDFFNGRDLNKSINPDEAVAYGAAVQAAILMGDKSENVQDLLLLDVAPLSLGLETAGGVMTALIKRNSTIPTKQTQIFTTYSDNQPGVLIQVYEGERAMTKDNNLLGRFELSGIPPAPRGVPQIEVTFDIDANGILNVTATDKSTGKANKITITNDKGRLSKEEIERMVQEAEKYKAEDEVQRERVSAKNALESYAFNMKSAVEDEGLKGKISEADKKKVLDKCQEVISWLDANTLAEKDEFEHKRKELEQVCNPIISGLYQGAGGPGPGGFGAQGPKGGSGSGPTIEEVD

SEQ ID NO: 14610 - DNA, 1942 bp, Homo sapiens
actgcgcaggcccagcaagcccccacaattaaaagcccagcgccgacccttcctgtcaattaggcgctgaagcgcaggcggtcagcatcgccatggagaccaacacccttcccaccgccactcccccttcctctcagggtccctgtcccctccagtgaatcccagaagactctggagagttctgagcagggggcggcactctggcctctgattggtccaaggaaggctggggggcaggacgggaggcgaaaaccctggaatattcccgacctggcagcctcatcgagctcggtgattggctcagaagggaaaaggcgggtctccgtgacgacttataaaagcccaggggcaagcggtccggataacggctagcctgaggagctgctgcgacagtccactacctttttcgagagtgactcccgttgtcccaaggcttcccagagcgaacctgtgcggctgcaggcaccggcgcgtcgagtttccggcgtccggaaggaccgagctcttctcgcggatccagtgttccgtttccagcccccaatctcagagcggagccgacagagagcagggaaccggcatggccaaagccgcggcgatcggcatcgacctgggcaccacctactcctgcgtgggggtgttccaacacggcaaggtggagatcatcgccaacgaccagggcaaccgcaccacccccagctacgtggccttcacggacaccgagcggctcatcggggatgcggccaagaaccaggtggcgctgaacccgcagaacaccgtgtttgacgcgaagcggctgattggccgcaagttcggcgacccggtggtgcagtcggacatgaagcactggcctttccaggtgatcaacgacggagacaagcccaaggtgcaggtgagctacaagggggagaccaaggcattctaccccgaggagatctcgtccatggtgctgaccaagatgaaggagatcgccgaggcgcgtgatgactgccctgatcaagcgcaactccaccatccccaccaagcagacgcagatcttcaccacctactccgacaaccaacccggggtgctgatccaggtgtacgagggcgagagggccatgacgaaagacaacaatctgttggggcgcttcgagctgagcggcatccctccggcccccaggggcgtgccccagatcgaggtgaccttcgacatcgatgccaacggcatcctgaacgtcacggccacggacaagagcaccggcaaggccaacaagatcaccatcaccaacgacaagggccgcctgagcaaggaggagatcgagcgcatggtgcaggaggcggagaagtacaaagcggaggacgaggtgcagcgcgagagggtgtcagccaagaacgccctggagtcctacgccttcaacatgaagagcgccgtggaggatgaggggctcaagggcaagatcagcgaggcggacaagaagaaggtgctggacaagtgtcaagaggtcatctcgtggctggacgccaacaccttggccgagaaggacgagtttgagcacaagaggaaggagctggagcaggtgtgtaaccccatcatcagcggactgtaccagggtgccggtggtcccgggcctgggggcttcggggctcagggtcccaagggagggtctgggtcaggccccaccattgaggaggtagattaggggcctttccaagattgctgtttttgttttggagcttcaagactttgcatttcctagtatttctgtttgtcagttctcaatttcctgtgtttgcaatgttgaaattttttggtgaagtactgaacttgctttttttccggtttctacatgcagagatgaatttatactgccatcttacgactatttcttctttttaatacacttaactcaggccattttttaagttggttacttcaaagtaaataaactttaaaattcaagtg

SEQ ID NO: 14611 - protein, 280 aa, Homo sapiens
MAKAAAIGIDLGTTYSCVGVFQHGKVEIIANDQGNRTTPSYVAFTDTERLIGDAAKNQVALNPQNTVFDAKRLIGRKFGDPVVQSDMKHWPFQVINDGDKPKVQVSYKGETKAFYPEEISSMVLTKMKEIAEARDDCPDQAQLHHPHQADADLHHLLRQPTRGADPGVRGREGHDERQQSVGALRAERHPSGPQGRAPDRGDLRHRCQRHPERHGHGQEHRQGQQDHHHQRQGPPEQGGDRAHGAGGGEVQSGGRGAAREGVSQERPGVLRLQHEERRGG

SEQ ID NO: 14612 - DNA, 2296 bp, Homo sapiens
actgcgcaggcccagcaagcccccacaattaaaagcccagcgccgacccttcctgtcaattaggcgctgaagcgcaggcggtcagcatcgccatggagaccaacacccttcccaccgccactcccccttcctctcagggtccctgtcccctccagtgaatcccagaagactctggagagttctgagcagggggcggcactctggcctctgattggtccaaggaaggctggggggcaggacgggaggcgaaaaccctggaatattcccgacctggcagcctcatcgagctcggtgattggctcagaagggaaaaggcgggtctccgtgacgacttataaaagcccaggggcaagcggtccggataacggctagcctgaggagctgctgcgacagtccactacctttttcgagagtgactcccgttgtcccaaggcttcccagagcgaacctgtgcggctgcaggcaccggcgcgtcgagtttccggcgtccggaaggaccgagctcttctcgcggatccagtgttccgtttccagcccccaatctcagagcggagccgacagagagcagggaaccggcatggccaaagccgcggcgatcggcatcgacctgggcaccacctactcctgcgtgggggtgttccaacacggcaaggtggagatcatcgccaacgaccagggcaaccgcaccacccccagctacgtggccttcacggacaccgagcggctcatcggggatgcggccaagaaccaggtggcgctgaacccgcagaacaccgtgtttgacgcgaagcggctgattggccgcaagttcggcgacccggtggtgcagtcggacatgaagcactggcctttccaggtgatcaacgacggagacaagcccaaggtgcaggtgagctacaagggggagaccaaggcattctaccccgaggagatctcgtccatggtgctgaccaagatgaaggagatcgccgaggcgtacctgggctacccggtgaccaacgcggtgatcaccgtgccggcctacttcaacgactcgcagcgccaggccaccaaggatgcgggtgtgatcgcggggtccacccgcatccccaaggtgcagaagctgctgcaggacttcttcaacgggcgcgacctgaacaagagcatcaaccccgacgaggctgtggcctacggggcggcggtgcaggcggccatcctgatgggggacaagtccgagaacgtgcaggacctgctgctgctggacgtggctcccctgtcgctggggctggagacggccggaggcgtgatgactgccctgatcaagcgcaactccaccatccccaccaagcagacgcagatcttcaccacctactccgacaaccaacccggggtgctgatccaggtgtacgagggcgagagggccatgacgaaagacaacaatctgttggggcgcttcgagctgagcggcatccctccggcccccaggggcgtgccccagatcgaggtgaccttcgacatcgatgccaacggcatcctgaacgtcacggccacggacaagagcaccggcaaggccaacaagatcaccatcaccaacgacaagggccgcctgagcaaggaggagatcgagcgcatggtgcaggaggcggagaagtacaaagcggaggacgaggtgcagcgcgagagggtgtcagccaagaacgccctggagtcctacgccttcaacatgaagagcgccgtggaggatgaggggctcaagggcaagatcagcgaggcggacaagaagaaggtgctggacaagtgtcaagaggtcatctcgtggctggacgccaacaccttggccgagaaggacgagtttgagcacaagaggaaggagctggagcaggtgtgtaaccccatcatcagcggactgtaccagggtgccggtggtcccgggcctgggggcttcggggctcagggtcccaagggagggtctgggtcaggccccaccattgaggaggtagattaggggcctttccaagattgctgtttttgttttggagcttcaagactttgcatttcctagtatttctgtttgtcagttctcaatttcctgtgtttgcaatgttgaaattttttggtgaagtactgaacttgctttttttccggtttctacatgcagagatgaatttatactgccatcttacgactatttcttctttttaatacacttaactcaggccattttttaagttggttacttcaaagtaaataaactttaaaattcaagtgatgccttttattcctttatttgggggtcagtagggtctgcataggttgt

SEQ ID NO: 14613 - protein, 468 aa, Homo sapiens; identical to SEQ ID NO: 14609

SEQ ID NO: 14614 - DNA, 1991 bp, Homo sapiens
actgcgcaggcccagcaagcccccacaattaaaagcccagcgccgacccttcctgtcaattaggcgctgaagcgcaggcggtcagcatcgccatggagaccaacacccttcccaccgccactcccccttcctctcagggtccctgtcccctccagtgaatcccagaagactctggagagttctgagcagggggcggcactctggcctctgattggtccaaggaaggctggggggcaggacgggaggcgaaaaccctggaatattcccgacctggcagcctcatcgagctcggtgattggctcagaagggaaaaggcgggtctccgtgacgacttataaaagcccaggggcaagcggtccggataacggctagcctgaggagctgctgcgacagtccactacctttttcgagagtgactcccgttgtcccaaggcttcccagagcgaacctgtgcggctgcaggcaccggcgcgtcgagtttccggcgtccggaaggaccgagctcttctcgcggatccagtgttccgtttccagcccccaatctcagagcggagccgacagagagcagggaaccggcatggccaaagccgcggcgatcggcatcgacctgggcaccacctactcctgcgtgggggtgttccaacacggcaaggtggagatcatcgccaacgaccagggcaaccgcaccacccccagctacgtggccttcacggacaccgagcggctcatcggggatgcggccaagaaccaggtggcgctgaacccgcagaacaccgtgtttgacgcgaagcggctgattggccgcaagttcggcgacccggtggtgcagtcggacatgaagcactggcctttccaggtgatcaacgacggagacaagcccaaggtgcaggtgagctacaagggggagaccaaggcattctaccccgaggagatctcgtccatggtgctgaccaagatgaaggagatcgccgaggcgcgtgatgactgccctgatcaagcgcaactccaccatccccaccaagcagacgcagatcttcaccacctactccgacaaccaacccggggtgctgatccaggtgtacgagggcgagagggccatgacgaaagacaacaatctgttggggcgcttcgagctgagcggcatccctccggcccccaggggcgtgccccagatcgaggtgaccttcgacatcgatgccaacggcatcctgaacgtcacggccacggacaagagcaccggcaaggccaacaagatcaccatcaccaacgacaagggccgcctgagcaaggaggagatcgagcgcatggtgcaggaggcggagaagtacaaagcggaggacgaggtgcagcgcgagagggtgtcagccaagaacgccctggagtcctacgccttcaacatgaagagcgccgtggaggatgaggggctcaagggcaagatcagcgaggcggacaagaagaaggtgctggacaagtgtcaagaggtcatctcgtggctggacgccaacaccttggccgagaaggacgagtttgagcacaagaggaaggagctggagcaggtgtgtaaccccatcatcagcggactgtaccagggtgccggtggtcccgggcctgggggcttcggggctcagggtcccaagggagggtctgggtcaggccccaccattgaggaggtagattaggggcctttccaagattgctgtttttgttttggagcttcaagactttgcatttcctagtatttctgtttgtcagttctcaatttcctgtgtttgcaatgttgaaattttttggtgaagtactgaacttgctttttttccggtttctacatgcagagatgaatttatactgccatcttacgactatttcttctttttaatacacttaactcaggccattttttaagttggttacttcaaagtaaataaactttaaaattcaagtgatgccttttattcctttatttgggggtcagtagggtctgcataggttgt

SEQ ID NO: 14615 - protein, 280 aa, Homo sapiens; identical to SEQ ID NO: 14611

SEQ ID NO: 14616 - DNA, 1957 bp, Homo sapiens
aagcggtccggataacggctagcctgaggagctgctgcgacagtccactacctttttcgagagtgactcccgttgtcccaaggcttcccagagcgaacctgtgcggctgcaggcaccggcgcgtcgagtttccggcgtccggaaggaccgagctcttctcgcggatccagtgttccgtttccagcccccaatctcagagcggagccgacagagagcagggaaccggcatggccaaagccgcggcgatcggcatcgacctgggcaccacctactcctgcgtgggggtgttccaacacggcaaggtggagatcatcgccaacgaccagggcaaccgcaccacccccagctacgtggccttcacggacaccgagcggctcatcggggatgcggccaagaaccaggtggcgctgaacccgcagaacaccgtgtttgacgcgaagcggctgattggccgcaagttcggcgacccggtggtgcagtcggacatgaagcactggcctttccaggtgatcaacgacggagacaagcccaaggtgcaggtgagctacaagggggagaccaaggcattctaccccgaggagatctcgtccatggtgctgaccaagatgaaggagatcgccgaggcgtacctgggctacccggtgaccaacgcggtgatcaccgtgccggcctacttcaacgactcgcagcgccaggccaccaaggatgcgggtgtgatcgcggggctcaacgtgctgcggatcatcaacgagcccacggccgccgccatcgcctacggcctggacagaacgggcaagggggagcgcaacgtgctcatctttgacctgggcgggggcaccttcgacgtgtccatcctgacgatcgacgacggcatcttcgaggtgaaggccacggccggggacacccacctgggtggggaggactttgacaacaggctggtgaaccacttcgtggaggagttcaagagaaaacacaagaaggacatcagccagaacaagcgagccgtgaggcggctgcgcaccgccatccccaccaagcagacgcagatcttcaccacctactccgacaaccaacccggggtgctgatccaggtgtacgagggcgagagggccatgacgaaagacaacaatctgttggggcgcttcgagctgagcggcatccctccggcccccaggggcgtgccccagatcgaggtgaccttcgacatcgatgccaacggcatcctgaacgtcacggccacggacaagagcaccggcaaggccaacaagatcaccatcaccaacgacaagggccgcctgagcaaggaggagatcgagcgcatggtgcaggaggcggagaagtacaaagcggaggacgaggtgcagcgcgagagggtgtcagccaagaacgccctggagtcctacgccttcaacatgaagagcgccgtggaggatgaggggctcaagggcaagatcagcgaggcggacaagaagaaggtgctggacaagtgtcaagaggtcatctcgtggctggacgccaacaccttggccgagaaggacgagtttgagcacaagaggaaggagctggagcaggtgtgtaaccccatcatcagcggactgtaccagggtgccggtggtcccgggcctgggggcttcggggctcagggtcccaagggagggtctgggtcaggccccaccattgaggaggtagattaggggcctttccaagattgctgtttttgttttggagcttcaagactttgcatttcctagtatttctgtttgtcagttctcaatttcctgtgtttgcaatgttgaaattttttggtgaagtactgaacttgctttttttccggtttctacatgcagagatgaatttatactgccatcttacgactatttcttctttttaatacacttaactcaggccattttttaagttggttacttcaaagtaaataaactttaaaattcaagtg

SEQ ID NO: 14617 - protein, 488 aa, Homo sapiens
MAKAAAIGIDLGTTYSCVGVFQHGKVEIIANDQGNRTTPSYVAFTDTERLIGDAAKNQVALNPQNTVFDAKRLIGRKFGDPVVQSDMKHWPFQVINDGDKPKVQVSYKGETKAFYPEEISSMVLTKMKEIAEAYLGYPVTNAVITVPAYFNDSQRQATKDAGVIAGLNVLRIINEPTAAAIAYGLDRTGKGERNVLIFDLGGGTFDVSILTIDDGIFEVKATAGDTHLGGEDFDNRLVNHFVEEFKRKHKKDISQNKRAVRRLRTAIPTKQTQIFTTYSDNQPGVLIQVYEGERAMTKDNNLLGRFELSGIPPAPRGVPQIEVTFDIDANGILNVTATDKSTGKANKITITNDKGRLSKEEIERMVQEAEKYKAEDEVQRERVSAKNALESYAFNMKSAVEDEGLKGKISEADKKKVLDKCQEVISWLDANTLAEKDEFEHKRKELEQVCNPIISGLYQGAGGPGPGGFGAQGPKGGSGSGPTIEEVD

SEQ ID NO: 14618 - DNA, 2006 bp, Homo sapiens
aagcggtccggataacggctagcctgaggagctgctgcgacagtccactacctttttcgagagtgactcccgttgtcccaaggcttcccagagcgaacctgtgcggctgcaggcaccggcgcgtcgagtttccggcgtccggaaggaccgagctcttctcgcggatccagtgttccgtttccagcccccaatctcagagcggagccgacagagagcagggaaccggcatggccaaagccgcggcgatcggcatcgacctgggcaccacctactcctgcgtgggggtgttccaacacggcaaggtggagatcatcgccaacgaccagggcaaccgcaccacccccagctacgtggccttcacggacaccgagcggctcatcggggatgcggccaagaaccaggtggcgctgaacccgcagaacaccgtgtttgacgcgaagcggctgattggccgcaagttcggcgacccggtggtgcagtcggacatgaagcactggcctttccaggtgatcaacgacggagacaagcccaaggtgcaggtgagctacaagggggagaccaaggcattctaccccgaggagatctcgtccatggtgctgaccaagatgaaggagatcgccgaggcgtacctgggctacccggtgaccaacgcggtgatcaccgtgccggcctacttcaacgactcgcagcgccaggccaccaaggatgcgggtgtgatcgcggggctcaacgtgctgcggatcatcaacgagcccacggccgccgccatcgcctacggcctggacagaacgggcaagggggagcgcaacgtgctcatctttgacctgggcgggggcaccttcgacgtgtccatcctgacgatcgacgacggcatcttcgaggtgaaggccacggccggggacacccacctgggtggggaggactttgacaacaggctggtgaaccacttcgtggaggagttcaagagaaaacacaagaaggacatcagccagaacaagcgagccgtgaggcggctgcgcaccgccatccccaccaagcagacgcagatcttcaccacctactccgacaaccaacccggggtgctgatccaggtgtacgagggcgagagggccatgacgaaagacaacaatctgttggggcgcttcgagctgagcggcatccctccggcccccaggggcgtgccccagatcgaggtgaccttcgacatcgatgccaacggcatcctgaacgtcacggccacggacaagagcaccggcaaggccaacaagatcaccatcaccaacgacaagggccgcctgagcaaggaggagatcgagcgcatggtgcaggaggcggagaagtacaaagcggaggacgaggtgcagcgcgagagggtgtcagccaagaacgccctggagtcctacgccttcaacatgaagagcgccgtggaggatgaggggctcaagggcaagatcagcgaggcggacaagaagaaggtgctggacaagtgtcaagaggtcatctcgtggctggacgccaacaccttggccgagaaggacgagtttgagcacaagaggaaggagctggagcaggtgtgtaaccccatcatcagcggactgtaccagggtgccggtggtcccgggcctgggggcttcggggctcagggtcccaagggagggtctgggtcaggccccaccattgaggaggtagattaggggcctttccaagattgctgtttttgttttggagcttcaagactttgcatttcctagtatttctgtttgtcagttctcaatttcctgtgtttgcaatgttgaaattttttggtgaagtactgaacttgctttttttccggtttctacatgcagagatgaatttatactgccatcttacgactatttcttctttttaatacacttaactcaggccattttttaagttggttacttcaaagtaaataaactttaaaattcaagtgatgccttttattcctttatttgggggtcagtagggtctgcataggttgt

SEQ ID NO: 14619 - protein, 488 aa, Homo sapiens; identical to SEQ ID NO: 14617

SEQ ID NO: 14620 - DNA, 2292 bp, Homo sapiens
cggtccggataacggctagcctgaggagctgctgcgacagtccactacctttttcgagagtgactcccgttgtcccaaggcttcccagagcgaacctgtgcggctgcaggcaccggcgcgtcgagtttccggcgtccggaaggaccgagctcttctcgcggatccagtgttccgtttccagcccccaatctcagagcggagccgacagagagcagggaaccggcatggccaaagccgcggcgatcggcatcgacctgggcaccacctactcctgcgtgggggtgttccaacacggcaaggtggagatcatcgccaacgaccagggcaaccgcaccacccccagctacgtggccttcacggacaccgagcggctcatcggggatgcggccaagaaccaggtggcgctgaacccgcagaacaccgtgtttgacgcgaagcggctgattggccgcaagttcggcgacccggtggtgcagtcggacatgaagcactggcctttccaggtgatcaacgacggagacaagcccaaggtgcaggtgagctacaagggggagaccaaggcattctaccccgaggagatctcgtccatggtgctgaccaagatgaaggagatcgccgaggcgtacctgggctacccggtgaccaacgcggtgatcaccgtgccggcctacttcaacgactcgcagcgccaggccaccaaggatgcgggtgtgatcgcggggctcaacgtgctgcggatcatcaacgagcccacggccgccgccatcgcctacggcctggacagaacgggcaagggggagcgcaacgtgctcatctttgacctgggcgggggcaccttcgacgtgtccatcctgacgatcgacgacggcatcttcgaggtgaaggccacggccggggacacccacctgggtggggaggactttgacaacaggctggtgaaccacttcgtggaggagttcaagagaaaacacaagaaggacatcagccagaacaagcgagccgtgaggcggctgcgcaccgcctgcgagagggccaagaggaccctgtcgtccagcacccaggccagcctggagatcgactccctgtttgagggcatcgacttctggtcctggtcgggggctccacccgcatccccaaggtgcagaagctgctgcaggacttcttcaacgggcgcgacctgaacaagagcatcaaccccgacgaggctgtggcctacggggcggcggtgcaggcggccatcctgatgggggacaagtccgagaacgtgcaggacctgctgctgctggacgtggctcccctgtcgctggggctggagacggccggaggcgtgatgactgccctgatcaagcgcaactccaccatccccaccaagcagacgcagatcttcaccacctactccgacaaccaacccggggtgctgatccaggtgtacgagggcgagagggccatgacgaaagacaacaatctgttggggcgcttcgagctgagcggcatccctccggcccccaggggcgtgccccagatcgaggtgaccttcgacatcgatgccaacggcatcctgaacgtcacggccacggacaagagcaccggcaaggccaacaagatcaccatcaccaacgacaagggccgcctgagcaaggaggagatcgagcgcatggtgcaggaggcggagaagtacaaagcggaggacgaggtgcagcgcgagagggtgtcagccaagaacgccctggagtcctacgccttcaacatgaagagcgccgtggaggatgaggggctcaagggcaagatcagcgaggcggacaagaagaaggtgctggacaagtgtcaagaggtcatctcgtggctggacgccaacaccttggccgagaaggacgagtttgagcacaagaggaaggagctggagcaggtgtgtaaccccatcatcagcggactgtaccagggtgccggtggtcccgggcctgggggcttcggggctcagggtcccaagggagggtctgggtcaggccccaccattgaggaggtagattaggggcctttccaagattgctgtttttgttttggagcttcaagactttgcatttcctagtatttctgtttgtcagttctcaatttcctgtgtttgcaatgttgaaattttttggtgaagtactgaacttgctttttttccggtttctacatgcagagatgaatttatactgccatcttacgactatttcttctttttaatacacttaactcaggccattttttaagttggttacttcaaagtaaataaactttaaaattcaagtg

SEQ ID NO: 14621 - protein, 318 aa, Homo sapiens
MAKAAAIGIDLGTTYSCVGVFQHGKVEIIANDQGNRTTPSYVAFTDTERLIGDAAKNQVALNPQNTVFDAKRLIGRKFGDPVVQSDMKHWPFQVINDGDKPKVQVSYKGETKAFYPEEISSMVLTKMKEIAEAYLGYPVTNAVITVPAYFNDSQRQATKDAGVIAGLNVLRIINEPTAAAIAYGLDRTGKGERNVLIFDLGGGTFDVSILTIDDGIFEVKATAGDTHLGGEDFDNRLVNHFVEEFKRKHKKDISQNKRAVRRLRTACERAKRTLSSSTQASLEIDSLFEGIDFWSWSGAPPASPRCRSCCRTSSTGAT

SEQ ID NO: 14622 - DNA, 2153 bp, Homo sapiens
cggtccggataacggctagcctgaggagctgctgcgacagtccactacctttttcgagagtgactcccgttgtcccaaggcttcccagagcgaacctgtgcggctgcaggcaccggcgcgtcgagtttccggcgtccggaaggaccgagctcttctcgcggatccagtgttccgtttccagcccccaatctcagagcggagccgacagagagcagggaaccggcatggccaaagccgcggcgatcggcatcgacctgggcaccacctactcctgcgtgggggtgttccaacacggcaaggtggagatcatcgccaacgaccagggcaaccgcaccacccccagctacgtggccttcacggacaccgagcggctcatcggggatgcggccaagaaccaggtggcgctgaacccgcagaacaccgtgtttgacgcgaagcggctgattggccgcaagttcggcgacccggtggtgcagtcggacatgaagcactggcctttccaggtgatcaacgacggagacaagcccaaggtgcaggtgagctacaagggggagaccaaggcattctaccccgaggagatctcgtccatggtgctgaccaagatgaaggagatcgccgaggcgtacctgggctacccggtgaccaacgcggtgatcaccgtgccggcctacttcaacgactcgcagcgccaggccaccaaggatgcgggtgtgatcgcggggctcaacgtgctgcggatcatcaacgagcccacggccgccgccatcgcctacggcctggacagaacgggcaagggggagcgcaacgtgctcatctttgacctgggcgggggcaccttcgacgtgtccatcctgacgatcgacgacggcatcttcgaggtgaaggccacggccggggacacccacctgggtggggaggactttgacaacaggctggtgaaccacttcgtggaggagttcaagagaaaacacaagaaggacatcagccagaacaagcgagccgtgaggcggctgcgcaccgcctgcgagagggccaagaggaccctgtcgtccagcacccaggccagcctggagatcgactccctgtttgagggcatcgacttctacacgtccatcaccagggcgaggttcgaggagctgtgctccgacctgttccgaagcaccctggagcccgtggagaaggctctgcgcgacgccaagctggacaaggcccagattcacgacctggtcctggtcgggggctccacccgcatccccaaggtgcagaagctgctgcaggacttcttcaacgggcgcgacctgaacaagagcatcaaccccgacgaggctgtggcctacggggcggcggtgcaggcggccatcctgatgggggacaagtccgagaacgtgcaggaccttcgacatcgatgccaacggcatcctgaacgtcacggccacggacaagagcaccggcaaggccaacaagatcaccatcaccaacgacaagggccgcctgagcaaggaggagatcgagcgcatggtgcaggaggcggagaagtacaaagcggaggacgaggtgcagcgcgagagggtgtcagccaagaacgccctggagtcctacgccttcaacatgaagagcgccgtggaggatgaggggctcaagggcaagatcagcgaggcggacaagaagaaggtgctggacaagtgtcaagaggtcatctcgtggctggacgccaacaccttggccgagaaggacgagtttgagcacaagaggaaggagctggagcaggtgtgtaaccccatcatcagcggactgtaccagggtgccggtggtcccgggcctgggggcttcggggctcagggtcccaagggagggtctgggtcaggccccaccattgaggaggtagattaggggcctttccaagattgctgtttttgttttggagcttcaagactttgcatttcctagtatttctgtttgtcagttctcaatttcctgtgtttgcaatgttgaaattttttggtgaagtactgaacttgctttttttccggtttctacatgcagagatgaatttatactgccatcttacgactatttcttctttttaatacacttaactcaggccattttttaagttggttacttcaaagtaaataaactttaaaattcaagtg

SEQ ID NO: 14623 - protein, 468 aa, Homo sapiens
MAKAAAIGIDLGTTYSCVGVFQHGKVEIIANDQGNRTTPSYVAFTDTERLIGDAAKNQVALNPQNTVFDAKRLIGRKFGDPVVQSDMKHWPFQVINDGDKPKVQVSYKGETKAFYPEEISSMVLTKMKEIAEAYLGYPVTNAVITVPAYFNDSQRQATKDAGVIAGLNVLRIINEPTAAAIAYGLDRTGKGERNVLIFDLGGGTFDVSILTIDDGIFEVKATAGDTHLGGEDFDNRLVNHFVEEFKRKHKKDISQNKRAVRRLRTACERAKRTLSSSTQASLEIDSLFEGIDFYTSITRARFEELCSDLFRSTLEPVEKALRDAKLDKAQIHDLVLVGGSTRIPKVQKLLQDFFNGRDLNKSINPDEAVAYGAAVQAAILMGDKSENVQDLRHRCQRHPERHGHGQEHRQGQQDHHHQRQGPPEQGGDRAHGAGGGEVQSGGRGAAREGVSQERPGVLRLQHEERRGG

SEQ ID NO: 14624 - DNA, 1648 bp, Homo sapiens
cggtccggataacggctagcctgaggagctgctgcgacagtccactacctttttcgagagtgactcccgttgtcccaaggcttcccagagcgaacctgtgcggctgcaggcaccggcgcgtcgagtttccggcgtccggaaggaccgagctcttctcgcggatccagtgttccgtttccagcccccaatctcagagcggagccgacagagagcagggaaccggcatggccaaagccgcggcgatcggcatcgacctgggcaccacctactcctgcgtgggggtgttccaacacggcaaggtggagatcatcgccaacgaccagggcaaccgcaccacccccagctacgtggccttcacggacaccgagcggctcatcggggatgcggccaagaaccaggtggcgctgaacccgcagaacaccgtgtttgacgcgaagcggctgattggccgcaagttcggcgacccggtggtgcagtcggacatgaagcactggcctttccaggtgatcaacgacggagacaagcccaaggtgcaggtgagctacaagggggagaccaaggcattctaccccgaggagatctcgtccatggtgctgaccaagatgaaggagatcgccgaggcgtacctgggctacccggtgaccaacgcggtgatcaccgtgccggcctacttcaacgactcgcagcgccaggccaccaaggatgcgggtgtgatcgcggggctcaacgtgctgcggatcatcaacgagcccacggccgccgccatcgcctacggcctggacagaacgggcaagggggagcgcaacgtgctcatctttgacctgggcgggggcaccttcgacgtgtccatcctgacgatcgacgacggcatcttcgaggtgaaggccacggccggggacacccacctgggtggggaggactttgacaacaggctggtgaaccacttcgtggaggagttcaagagaaaacacaagaaggacatcagccagaacaagcgagccgtgaggcggctgcgcaccgcctgcgagagggccaagaggaccctgtcgtccagcacccaggccagcctggagatcgactccctgtttgagggcatcgacttctacacgtccatcaccagggcgaggttcgaggagctgtgctccgacctgttccgaagcaccctggagcccgtggagaaggctctgcgcgacgccaagtggacgccaacaccttggccgagaaggacgagtttgagcacaagaggaaggagctggagcaggtgtgtaaccccatcatcagcggactgtaccagggtgccggtggtcccgggcctgggggcttcggggctcagggtcccaagggagggtctgggtcaggccccaccattgaggaggtagattaggggcctttccaagattgctgtttttgttttggagcttcaagactttgcatttcctagtatttctgtttgtcagttctcaatttcctgtgtttgcaatgttgaaattttttggtgaagtactgaacttgctttttttccggtttctacatgcagagatgaatttatactgccatcttacgactatttcttctttttaatacacttaactcaggccattttttaagttggttacttcaaagtaaataaactttaaaattcaagtga

SEQ ID NO: 14625 - protein, 384 aa, Homo sapiens
MAKAAAIGIDLGTTYSCVGVFQHGKVEIIANDQGNRTTPSYVAFTDTERLIGDAAKNQVALNPQNTVFDAKRLIGRKFGDPVVQSDMKHWPFQVINDGDKPKVQVSYKGETKAFYPEEISSMVLTKMKEIAEAYLGYPVTNAVITVPAYFNDSQRQATKDAGVIAGLNVLRIINEPTAAAIAYGLDRTGKGERNVLIFDLGGGTFDVSILTIDDGIFEVKATAGDTHLGGEDFDNRLVNHFVEEFKRKHKKDISQNKRAVRRLRTACERAKRTLSSSTQASLEIDSLFEGIDFYTSITRARFEELCSDLFRSTLEPVEKALRDAKWTPTPWPRRTSLSTRGRSWSRCVTPSSADCTRVPVVPGLGASGLRVPREGLGQAPPLRR

SEQ ID NO: 14626 - DNA, 2341 bp, Homo sapiens
cggtccggataacggctagcctgaggagctgctgcgacagtccactacctttttcgagagtgactcccgttgtcccaaggcttcccagagcgaacctgtgcggctgcaggcaccggcgcgtcgagtttccggcgtccggaaggaccgagctcttctcgcggatccagtgttccgtttccagcccccaatctcagagcggagccgacagagagcagggaaccggcatggccaaagccgcggcgatcggcatcgacctgggcaccacctactcctgcgtgggggtgttccaacacggcaaggtggagatcatcgccaacgaccagggcaaccgcaccacccccagctacgtggccttcacggacaccgagcggctcatcggggatgcggccaagaaccaggtggcgctgaacccgcagaacaccgtgtttgacgcgaagcggctgattggccgcaagttcggcgacccggtggtgcagtcggacatgaagcactggcctttccaggtgatcaacgacggagacaagcccaaggtgcaggtgagctacaagggggagaccaaggcattctaccccgaggagatctcgtccatggtgctgaccaagatgaaggagatcgccgaggcgtacctgggctacccggtgaccaacgcggtgatcaccgtgccggcctacttcaacgactcgcagcgccaggccaccaaggatgcgggtgtgatcgcggggctcaacgtgctgcggatcatcaacgagcccacggccgccgccatcgcctacggcctggacagaacgggcaagggggagcgcaacgtgctcatctttgacctgggcgggggcaccttcgacgtgtccatcctgacgatcgacgacggcatcttcgaggtgaaggccacggccggggacacccacctgggtggggaggactttgacaacaggctggtgaaccacttcgtggaggagttcaagagaaaacacaagaaggacatcagccagaacaagcgagccgtgaggcggctgcgcaccgcctgcgagagggccaagaggaccctgtcgtccagcacccaggccagcctggagatcgactccctgtttgagggcatcgacttctggtcctggtcgggggctccacccgcatccccaaggtgcagaagctgctgcaggacttcttcaacgggcgcgacctgaacaagagcatcaaccccgacgaggctgtggcctacggggcggcggtgcaggcggccatcctgatgggggacaagtccgagaacgtgcaggacctgctgctgctggacgtggctcccctgtcgctggggctggagacggccggaggcgtgatgactgccctgatcaagcgcaactccaccatccccaccaagcagacgcagatcttcaccacctactccgacaaccaacccggggtgctgatccaggtgtacgagggcgagagggccatgacgaaagacaacaatctgttggggcgcttcgagctgagcggcatccctccggcccccaggggcgtgccccagatcgaggtgaccttcgacatcgatgccaacggcatcctgaacgtcacggccacggacaagagcaccggcaaggccaacaagatcaccatcaccaacgacaagggccgcctgagcaaggaggagatcgagcgcatggtgcaggaggcggagaagtacaaagcggaggacgaggtgcagcgcgagagggtgtcagccaagaacgccctggagtcctacgccttcaacatgaagagcgccgtggaggatgaggggctcaagggcaagatcagcgaggcggacaagaagaaggtgctggacaagtgtcaagaggtcatctcgtggctggacgccaacaccttggccgagaaggacgagtttgagcacaagaggaaggagctggagcaggtgtgtaaccccatcatcagcggactgtaccagggtgccggtggtcccgggcctgggggcttcggggctcagggtcccaagggagggtctgggtcaggccccaccattgaggaggtagattaggggcctttccaagattgctgtttttgttttggagcttcaagactttgcatttcctagtatttctgtttgtcagttctcaatttcctgtgtttgcaatgttgaaattttttggtgaagtactgaacttgctttttttccggtttctacatgcagagatgaatttatactgccatcttacgactatttcttctttttaatacacttaactcaggccattttttaagttggttacttcaaagtaaataaactttaaaattcaagtgatgccttttattcctttatttgggggtcagtagggtctgcataggttgt

SEQ ID NO: 14627 - protein, 318 aa, Homo sapiens; identical to SEQ ID NO: 14621

SEQ ID NO: 14628 - DNA, 2202 bp, Homo sapiens
cggtccggataacggctagcctgaggagctgctgcgacagtccactacctttttcgagagtgactcccgttgtcccaaggcttcccagagcgaacctgtgcggctgcaggcaccggcgcgtcgagtttccggcgtccggaaggaccgagctcttctcgcggatccagtgttccgtttccagcccccaatctcagagcggagccgacagagagcagggaaccggcatggccaaagccgcggcgatcggcatcgacctgggcaccacctactcctgcgtgggggtgttccaacacggcaaggtggagatcatcgccaacgaccagggcaaccgcaccacccccagctacgtggccttcacggacaccgagcggctcatcggggatgcggccaagaaccaggtggcgctgaacccgcagaacaccgtgtttgacgcgaagcggctgattggccgcaagttcggcgacccggtggtgcagtcggacatgaagcactggcctttccaggtgatcaacgacggagacaagcccaaggtgcaggtgagctacaagggggagaccaaggcattctaccccgaggagatctcgtccatggtgctgaccaagatgaaggagatcgccgaggcgtacctgggctacccggtgaccaacgcggtgatcaccgtgccggcctacttcaacgactcgcagcgccaggccaccaaggatgcgggtgtgatcgcggggctcaacgtgctgcggatcatcaacgagcccacggccgccgccatcgcctacggcctggacagaacgggcaagggggagcgcaacgtgctcatctttgacctgggcgggggcaccttcgacgtgtccatcctgacgatcgacgacggcatcttcgaggtgaaggccacggccggggacacccacctgggtggggaggactttgacaacaggctggtgaaccacttcgtggaggagttcaagagaaaacacaagaaggacatcagccagaacaagcgagccgtgaggcggctgcgcaccgcctgcgagagggccaagaggaccctgtcgtccagcacccaggccagcctggagatcgactccctgtttgagggcatcgacttctacacgtccatcaccagggcgaggttcgaggagctgtgctccgacctgttccgaagcaccctggagcccgtggagaaggctctgcgcgacgccaagctggacaaggcccagattcacgacctggtcctggtcgggggctccacccgcatccccaaggtgcagaagctgctgcaggacttcttcaacgggcgcgacctgaacaagagcatcaaccccgacgaggctgtggcctacggggcggcggtgcaggcggccatcctgatgggggacaagtccgagaacgtgcaggaccttcgacatcgatgccaacggcatcctgaacgtcacggccacggacaagagcaccggcaaggccaacaagatcaccatcaccaacgacaagggccgcctgagcaaggaggagatcgagcgcatggtgcaggaggcggagaagtacaaagcggaggacgaggtgcagcgcgagagggtgtcagccaagaacgccctggagtcctacgccttcaacatgaagagcgccgtggaggatgaggggctcaagggcaagatcagcgaggcggacaagaagaaggtgctggacaagtgtcaagaggtcatctcgtggctggacgccaacaccttggccgagaaggacgagtttgagcacaagaggaaggagctggagcaggtgtgtaaccccatcatcagcggactgtaccagggtgccggtggtcccgggcctgggggcttcggggctcagggtcccaagggagggtctgggtcaggccccaccattgaggaggtagattaggggcctttccaagattgctgtttttgttttggagcttcaagactttgcatttcctagtatttctgtttgtcagttctcaatttcctgtgtttgcaatgttgaaattttttggtgaagtactgaacttgctttttttccggtttctacatgcagagatgaatttatactgccatcttacgactatttcttctttttaatacacttaactcaggccattttttaagttggttacttcaaagtaaataaactttaaaattcaagtgatgccttttattcctttatttgggggtcagtagggtctgcataggttgt

SEQ ID NO: 14629 - protein, 468 aa, Homo sapiens; identical to SEQ ID NO: 14623

SEQ ID NO: 14630 - DNA, 2383 bp, Homo sapiens
gctgctgcgacagtccactacctttttcgagagtgactcccgttgtcccaaggcttcccagagcgaacctgtgcggctgcaggcaccggcgcgtcgagtttccggcgtccggaaggaccgagctcttctcgcggatccagtgttccgtttccagcccccaatctcagagcggagccgacagagagcagggaaccggcatggccaaagccgcggcgatcggcatcgacctgggcaccacctactcctgcgtgggggtgttccaacacggcaaggtggagatcatcgccaacgaccagggcaaccgcaccacccccagctacgtggccttcacggacaccgagcggctcatcggggatgcggccaagaaccaggtggcgctgaacccgcagaacaccgtgtttgacgcgaagcggctgattggccgcaagttcggcgacccggtggtgcagtcggacatgaagcactggcctttccaggtgatcaacgacggagacaagcccaaggtgcaggtgagctacaagggggagaccaaggcattctaccccgaggagatctcgtccatggtgctgaccaagatgaaggagatcgccgaggcgtacctgggctacccggtgaccaacgcggtgatcaccgtgccggcctacttcaacgactcgcagcgccaggccaccaaggatgcgggtgtgatcgcggggctcaacgtgctgcggatcatcaacgagcccacggccgccgccatcgcctacggcctggacagaacgggcaagggggagcgcaacgtgctcatctttgacctgggcgggggcaccttcgacgtgtccatcctgacgatcgacgacggcatcttcgaggtgaaggccacggccggggacacccacctgggtggggaggactttgacaacaggctggtgaaccacttcgtggaggagttcaagagaaaacacaagaaggacatcagccagaacaagcgagccgtgaggcggctgcgcaccgcctgcgagagggccaagaggaccctgtcgtccagcacccaggccagcctggagatcgactccctgtttgagggcatcgacttctacacgtccatcaccagggcgaggttcgaggagctgtgctccgacctgttccgaagcaccctggagcccgtggagaaggctctgcgcgacgccaagctggacaaggcccagattcacgacctggtcctggtcgggggctccacccgcatccccaaggtgcagaagctgctgcaggacttcttcaacgggcgcgacctgaacaagagcatcaaccccgacgaggctgtggcctacggggcggcggtgcaggcggccatcctgatgggggacaagtccgagaacgtgcaggacctgctgctgctggacgtggctcccctgtcgctggggctggagacggccggaggcgtgatgactgccctgatcaagcgcaactccaccatccccaccaagcagacgcagatcttcaccacctactccgacaaccaacccggggtgctgatccaggtgtacgagggcgagagggccatgacgaaagacaacaatctgttggggcgcttcgagctgagcggcatccctccggcccccaggggcgtgccccagatcgaggtgaccttcgacatcgatgccaacggcatcctgaacgtcacggccacggacaagagcaccggcaaggccaacaagatcaccatcaccaacgacaagggccgcctgagcaaggaggagatcgagcgcatggtgcaggaggcggagaagtacaaagcggaggacgaggtgcagcgcgagagggtgtcagccaagaacgccctggagtcctacgccttcaacatgaagagcgccgtggaggatgaggggctcaagggcaagatcagcgaggcggacaagaagaaggtgctggacaagtgtcaagaggtcatctcgtggctggacgccaacaccttggccgagaaggacgagtttgagcacaagaggaaggagctggagcaggtgtgtaaccccatcatcagcggactgtaccagggtgccggtggtcccgggcctgggggcttcggggctcagggtcccaagggagggtctgggtcaggccccaccattgaggaggtagattaggggcctttccaagattgctgtttttgttttggagcttcaagactttgcatttcctagtatttctgtttgtcagttctcaatttcctgtgtttgcaatgttgaaattttttggtgaagtactgaacttgctttttttccggtttctacatgcagagatgaatttatactgccatcttacgactatttcttctttttaatacacttaactcaggccattttttaagttggttacttcaaagtaaataaactttaaaattcaa

SEQ ID NO: 14631 - protein, 641 aa, Homo sapiens
MAKAAAIGIDLGTTYSCVGVFQHGKVEIIANDQGNRTTPSYVAFTDTERLIGDAAKNQVALNPQNTVFDAKRLIGRKFGDPVVQSDMKHWPFQVINDGDKPKVQVSYKGETKAFYPEEISSMVLTKMKEIAEAYLGYPVTNAVITVPAYFNDSQRQATKDAGVIAGLNVLRIINEPTAAAIAYGLDRTGKGERNVLIFDLGGGTFDVSILTIDDGIFEVKATAGDTHLGGEDFDNRLVNHFVEEFKRKHKKDISQNKRAVRRLRTACERAKRTLSSSTQASLEIDSLFEGIDFYTSITRARFEELCSDLFRSTLEPVEKALRDAKLDKAQIHDLVLVGGSTRIPKVQKLLQDFFNGRDLNKSINPDEAVAYGAAVQAAILMGDKSENVQDLLLLDVAPLSLGLETAGGVMTALIKRNSTIPTKQTQIFTTYSDNQPGVLIQVYEGERAMTKDNNLLGRFELSGIPPAPRGVPQIEVTFDIDANGILNVTATDKSTGKANKITITNDKGRLSKEEIERMVQEAEKYKAEDEVQRERVSAKNALESYAFNMKSAVEDEGLKGKISEADKKKVLDKCQEVISWLDANTLAEKDEFEHKRKELEQVCNPIISGLYQGAGGPGPGGFGAQGPKGGSGSGPTIEEVD

SEQ ID NO: 14632 - DNA, 1285 bp, Homo sapiens
ccgcaagttcggcgacccggtggtgcagtcggacatgaagcactggcctttccaggtgatcaacgacggagacaagcccaaggtgcaggtgagctacaagggggagaccaaggcattctaccccgaggagatctcgtccatggtgctgaccaagatgaaggagatcgccgaggcgtacctgggctacccggtgaccaacgcggtgatcaccgtgccggcctacttcaacgactcgcagcgccaggccaccaaggatgcgggtgtgatcgcggggctcaacgtgctgcggatcatcaacgagcccacggccgccgccatcgcctacggcctggacagaacgggcaagggggagcgcaacgtgctcatctttgacctgggcgggggcaccttcgacgtgtccatcctgacgatcgacgacggcatcttcgaggtgaaggccacggccggggacacccacctgggtggggaggactttgacaacaggctggtgaaccacttcgtggaggagttcaagagaaaacacaagaaggacatcagccagaacaagcgagccgtgaggcggctgcgcaccgcctgcgagagggccaagaggaccctgtcgtccagcacccaggccagcctggagatcgactccctgtttgagggcatcgacttctacacgtccatcaccagggcgaggttcgaggagctgtgctccgacctgttccgaagcaccctggagcccgtggagaaggctctgcgcgacgccaagctggacaaggcccagattcacgacctggtcctggtcgggggctccacccgcatccccaaggtgcagaagctgctgcaggacttcttcaacgggcgcgacctgaacaagagcatcaaccccgacgaggctgtggcctacggggcggcggtgcaggcggcccatcatcagcggactgtaccagggtgccggtggtcccgggcctgggggcttcggggctcagggtcccaagggagggtctgggtcaggccccaccattgaggaggtagattaggggcctttccaagattgctgtttttgttttggagcttcaagactttgcatttcctagtatttctgtttgtcagttctcaatttcctgtgtttgcaatgttgaaattttttggtgaagtactgaacttgctttttttccggtttctacatgcagagatgaatttatactgccatcttacgactatttcttctttttaatacacttaactcaggccattttttaagttggttacttcaaagtaaataaactttaaaattcaagtg

SEQ ID NO: 14633 - protein, 324 aa, Homo sapiens
MKHWPFQVINDGDKPKVQVSYKGETKAFYPEEISSMVLTKMKEIAEAYLGYPVTNAVITVPAYFNDSQRQATKDAGVIAGLNVLRIINEPTAAAIAYGLDRTGKGERNVLIFDLGGGTFDVSILTIDDGIFEVKATAGDTHLGGEDFDNRLVNHFVEEFKRKHKKDISQNKRAVRRLRTACERAKRTLSSSTQASLEIDSLFEGIDFYTSITRARFEELCSDLFRSTLEPVEKALRDAKLDKAQIHDLVLVGGSTRIPKVQKLLQDFFNGRDLNKSINPDEAVAYGAAVQAAHHQRTVPGCRWSRAWGLRGSGSQGRVWVRPHH

SEQ ID NO: 14634 - DNA, 1353 bp, Homo sapiens
cggctgcgcaccgcctgcgagagggccaagaggaccctgtcgtccagcacccaggccagcctggagatcgactccctgtttgagggcatcgacttctacacgtccatcaccagggcgaggttcgaggagctgtgctccgacctgttccgaagcaccctggagcccgtggagaaggctctgcgcgacgccaagctggacaaggcccagattcacgacctggtcctggtcgggggctccacccgcatccccaaggtgcagaagctgctgcaggacttcttcaacgggcgcgacctgaacaagagcatcaaccccgacgaggctgtggcctacggggcggcggtgcaggcggccatcctgatgggggacaagtccgagaacgtgcaggacctgctgctgctggacgtggctcccctgtcgctggggctggagacggccggaggcgtgatgactgccctgatcaagcgcaactccaccatccccaccaagcagacgcagatcttcaccacctactccgacaaccaacccggggtgctgatccaggtgtacgagggcgagagggccatgacgaaagacaacaatctgttggggcgcttcgagctgagcggcatccctccggcccccaggggcgtgccccagatcgaggtgaccttcgacatcgatgccaacggcatcctgaacgtcacggccacggacaagagcaccggcaaggccaacaagatcaccatcaccaacgacaagggccgcctgagcaaggaggagatcgagcgcatggtgcaggaggcggagaagtacaaagcggaggacgaggtgcagcgcgagagggtgtcagccaagaacgccctggagtcctacgccttcaacatgaagagcgccgtggaggatgaggggctcaagggcaagatcagcgaggcggacaagaagaaggtgctggacaagtgtcaagaggtcatctcgtggctggacgccaacaccttggccgagaaggacgagtttgagcacaagaggaaggagctggagcaggtgtgtaaccccatcatcagcggactgtaccagggtgccggtggtcccgggcctgggggcttcggggctcagggggcctttccaagattgctgtttttgttttggagcttcaagactttgcatttcctagtatttctgtttgtcagttctcaatttcctgtgtttgcaatgttgaaattttttggtgaagtactgaacttgctttttttccggtttctacatgcagagatgaatttatactgccatcttacgactatttcttctttttaatacacttaactcaggccattttttaagttggttacttcaaagtaaataaactttaaaattcaa

SEQ ID NO: 14635 - protein, 310 aa, Homo sapiens
MGDKSENVQDLLLLDVAPLSLGLETAGGVMTALIKRNSTIPTKQTQIFTTYSDNQPGVLIQVYEGERAMTKDNNLLGRFELSGIPPAPRGVPQIEVTFDIDANGILNVTATDKSTGKANKITITNDKGRLSKEEIERMVQEAEKYKAEDEVQRERVSAKNALESYAFNMKSAVEDEGLKGKISEADKKKVLDKCQEVISWLDANTLAEKDEFEHKRKELEQVCNPIISGLYQGAGGPGPGGFGAQGAFPRLLFLFWSFKTLHFLVFLFVSSQFPVFAMLKFFGEVLNLLFFRFLHAEMNLYCHLTTISSF

SEQ ID NO: 14636 - DNA, 1382 bp, Homo sapiens
ccgcctccttcgagaaacaaggtaactttcgggttctggttgtctccaaagtcatccgaccaatctcgcaccgcccagagcgggcccttcctgtcaattacctactgaagggcaggcggccagcatcgccatggagaccaacacccttcccaccaccactccccctttctctcagggcccctgtcccctccagtgaatcccagaagactctggagagttctgagcagagggcggcaccctgccctctgattggtccaaggaaggctggggggcaggacgggaggcgaaacccctggaatattcccgacctggcagcctcatcgagcttggtgattggctcagaaggggaaaggcgggtctccacgacgacttataaaagccgaggggcgcgcggtccggaaaacggccagcctgaggagctgctgcgagggtccgcttcgtctttcgagagtgactcccgcggtcccaaggctttccagagcgaacctgtgcggctgcaggcaccggcgtgttgagtttccggcgttccgaaggactgagctcttgtcgcggatcccgtccgccgtttccagcccccagtctcagagcggagcccacagagcagggcaccggcatggccaaagccgcggcgatcggcatcgacctgggcaccacctactcctgcgtgggggtgttccaacacggcaaggtggagatcatcgccaacgaccagggcaaccgcaccacccccagctacgtggccttcacggacaccgagcggctcatcggggatgcggccaagaaccaggtggcgctgaacccgcagaacaccgtgtttgacgcgaagcggctgattggccgcaagttcggcgacccggtggtgcagtcggacatgaagcactggcctttccaggtgatcaacgacggagacaagcccaaggtgcaggtgagctacaagggggagaccaaggcattctaccccgaggagatctcgtccatggtgctgaccaagatgaaggagatcgccgaggcgtacctgggctacccggtgaccaacgcggtgatcaccgtgccggcctacttcaacgactcgcagcgccaggccaccaaggatgcgggtgtgatcgcggggctcaacgtgctgcggatcatcaacgagcccacggccgccgccatcgcctacggcctggacagaacgggcaagggggagcgcaacgtgctcatctttgacctgggcgggggcaccttcgacgtgtccatcctgacgatcgacgacggcatcttcgaggtgaaggccacggccggggacacccacctgggtggggaggactttgacaacaggctgggaatgtatgtttttataatttgtttatttaaatatgaaaaataaaatgttaaacttt

SEQ ID NO: 14637 - protein, 251 aa, Homo sapiens
MAKAAAIGIDLGTTYSCVGVFQHGKVEIIANDQGNRTTPSYVAFTDTERLIGDAAKNQVALNPQNTVFDAKRLIGRKFGDPVVQSDMKHWPFQVINDGDKPKVQVSYKGETKAFYPEEISSMVLTKMKEIAEAYLGYPVTNAVITVPAYFNDSQRQATKDAGVIAGLNVLRIINEPTAAAIAYGLDRTGKGERNVLIFDLGGGTFDVSILTIDDGIFEVKATAGDTHLGGEDFDNRLGMYVFIICLFKYEK

SEQ ID NO: 14638 - DNA, 2527 bp, Homo sapiens
cggtccggaaaacggccagcctgaggagctgctgcgagggtccgcttcgtctttcgagagtgactcccgcggtcccaaggctttccagagcgaacctgtgcggctgcaggcaccggcgtgttgagtttccggcgttccgaaggactgagctcttgtcgcggatcccgtccgccgtttccagcccccagtctcagagcggagcccacagagcagggcaccggcatggccaaagccgcggcgatcggcatcgacctgggcaccacctactcctgcgtgggggtgttccaacacggcaaggtggagatcatcgccaacgaccagggcaaccgcaccacccccagctacgtggccttcacggacaccgagcggctcatcggggatgcggccaagaaccaggtggcgctgaacccgcagaacaccgtgtttgacgcgaagcggctgattggccgcaagttcggcgacccggtggtgcagtcggacatgaagcactggcctttccaggtgatcaacgacggagacaagcccaaggtgcaggtgagctacaagggggagaccaaggcattctaccccgaggagatctcgtccatggtgctgaccaagatgaaggagatcgccgaggcgtacctgggctacccggtgaccaacgcggtgatcaccgtgccggcctacttcaacgactcgcagcgccaggccaccaaggatgcgggtgtgatcgcggggctcaacgtgctgcggatcatcaacgagcccacggccgccgccatcgcctacggcctggacagaacgggcaagggggagcgcaacgtgctcatctttgacctgggcgggggcaccttcgacgtgtccatcctgacgatcgacgacggcatcttcgaggtgaaggccacggccggggacacccacctgggtggggaggactttgacaacaggctggtgaaccacttcgtggaggagttcaagagaaaacacaagaaggacatcagccagaacaagcgagccgtgaggcggctgcgcaccgcctgcgagagggccaagaggaccctgtcgtccagcacccaggccagcctggagatcgactccctgtttgagggcatcgacttctacacgtccatcaccagggcgaggttcgaggagctgtgctccgacctgttccgaagcaccctggagcccgtggagaaggctctgcgcgacgccaagctggacaaggcccagattcacgacctggtcctggtcgggggctccacccgcatccccaaggtgcagaagctgctgcaggacttcttcaacgggcgcgacctgaacaagagcatcaaccccgacgaggctgtggcctacggggcggcggtgcaggcggccatcctgatgggggacaagtccgagaacgtgcaggacctgctgctgctggacgtggctcccctgtcgctggggctggagacggccggaggcgtgatgactgccctgatcaagcgcaactccaccatccccaccaagcagacgcagatcttcaccacctactccgacaaccaacccggggtgctgatccaggtgtacgagggcgagagggccatgacgaaagacaacaatctgttggggcgcttcgagctgagcggcatccctccggcccccaggggcgtgccccagatcgaggtgaccttcgacatcgatgccaacggcatcctgaacgtcacggccacggacaagagcaccggcaaggccaacaagatcaccatcaccaacgacaagggccgcctgagcaaggaggagatcgagcgcatggtgcaggaggcggagaagtacaaagcggaggacgaggtgcagcgcgagagggtgtcagccaagaacgccctggagtcctacgccttcaacatgaagagcgccgtggaggatgaggggctcaagggcaagatcagcgaggcggacaagaagaaggttctggacaagtgtcaagaggtcatctcgtggctggacgccaacaccttggccgagaaggacgagtttgagcacaagaggaaggagctggagcaggtgtgtaaccccatcatcagcggactgtaccagggtgccggtggtcccgggcctggcggcttcggggctcagggtcccaagggagggtctgggtcaggccctaccattgaggaggtggattaggggcctttgttctttagtatgtttgtctttgaggtggactgttgggactcaaggactttgctgctgttttcctatgtcatttctgcttcagctctttgctgcttcacttctttgtaaagttgtaacctgatggtaattagctggcttcattatttttgtagtacaaccgatatgttcattagaattctttgcatttaatgttgatactgtaagggtgtttcgttccctttaaatgaatcaacactgccaccttctgtacgagtttgtttgttttttttttttttttttttttttgcttggcgaaaacactacaaaggctgggaatgtatgtttttataatttgtttatttaaatatgaaaaataaaatgttaaactttt

SEQ ID NO: 14639 - protein, 641 aa, Homo sapiens; identical to SEQ ID NO: 14631

SEQ ID NO: 14640 - DNA, 2280 bp, Homo sapiens
cggtccggaaaacggccagcctgaggagctgctgcgagggtccgcttcgtctttcgagagtgactcccgcggtcccaaggctttccagagcgaacctgtgcggctgcaggcaccggcgtgttgagtttccggcgttccgaaggactgagctcttgtcgcggatcccgtccgccgtttccagcccccagtctcagagcggagcccacagagcagggcaccggcatggccaaagccgcggcgatcggcatcgacctgggcaccacctactcctgcgtgggggtgttccaacacggcaaggtggagatcatcgccaacgaccagggcaaccgcaccacccccagctacgtggccttcacggacaccgagcggctcatcggggatgcggccaagaaccaggtggcgctgaacccgcagaacaccgtgtttgacgcgaagcggctgattggccgcaagttcggcgacccggtggtgcagtcggacatgaagcactggcctttccaggtgatcaacgacggagacaagcccaaggtgcaggtgagctacaagggggagaccaaggcattctaccccgaggagatctcgtccatggtgctgaccaagatgaaggagatcgccgaggcgtacctgggctacccggtgaccaacgcggtgatcaccgtgccggcctacttcaacgactcgcagcgccaggccaccaaggatgcgggtgtgatcgcggggctcaacgtgctgcggatcatcaacgagcccacggccgccgccatcgcctacggcctggacagaacgggcaagggggagcgcaacgtgctcatctttgacctgggcgggggcaccttcgacgtgtccatcctgacgatcgacgacggcatcttcgaggtgaaggccacggccggggacacccacctgggtggggaggactttgacaacaggctggtgaaccacttcgtggaggagttcaagagaaaacacaagaaggacatcagccagaacaagcgagccgtgaggcggctgcgcaccgcctgcgagagggccaagaggaccctgtcgtccagcacccaggccagcctggagatcgactccctgtttgagggcatcgacttctacacgtccatcaccagggcgaggttcgaggagctgtgctccgacctgttccgaagcaccctggagcccgtggagaaggctctgcgcgacgccaagctggacaaggcccagattcacgacctggtcctggtcgggggctccacccgcatccccaaggtgcagaagctgctgcaggacttcttcaacgggcgcgacctgaacaagagcatcaaccccgacgaggctgtggcctacggggcggcggtgcaggcggccatcctgatgggggacaagtccgagaacgtgcaggaccttcgacatcgatgccaacggcatcctgaacgtcacggccacggacaagagcaccggcaaggccaacaagatcaccatcaccaacgacaagggccgcctgagcaaggaggagatcgagcgcatggtgcaggaggcggagaagtacaaagcggaggacgaggtgcagcgcgagagggtgtcagccaagaacgccctggagtcctacgccttcaacatgaagagcgccgtggaggatgaggggctcaagggcaagatcagcgaggcggacaagaagaaggttctggacaagtgtcaagaggtcatctcgtggctggacgccaacaccttggccgagaaggacgagtttgagcacaagaggaaggagctggagcaggtgtgtaaccccatcatcagcggactgtaccagggtgccggtggtcccgggcctggcggcttcggggctcagggtcccaagggagggtctgggtcaggccctaccattgaggaggtggattaggggcctttgttctttagtatgtttgtctttgaggtggactgttgggactcaaggactttgctgctgttttcctatgtcatttctgcttcagctctttgctgcttcacttctttgtaaagttgtaacctgatggtaattagctggcttcattatttttgtagtacaaccgatatgttcattagaattctttgcatttaatgttgatactgtaagggtgtttcgttccctttaaatgaatcaacactgccaccttctgtacgagtttgtttgttttttttttttttttttttttttgcttggcgaaaacactacaaaggctgggaatgtatgtttttataatttgtttatttaaatatgaaaaataaaatgttaaactttttcttgtctgttaa

SEQ ID NO: 14641 - protein, 468 aa, Homo sapiens; identical to SEQ ID NO: 14623

SEQ ID NO: 14642 - DNA, 1665 bp, Homo sapiens
aaaacggccagcctgaggagctgctgcgagggtccgcttcgtctttcgagagtgactcccgcggtcccaaggctttccagagcgaacctgtgcggctgcaggcaccggcgtgttgagtttccggcgttccgaaggactgagctcttgtcgcggatcccgtccgccgtttccagcccccagtctcagagcggagcccacagagcagggcaccggcatggccaaagccgcggcgatcggcatcgacctgggcaccacctactcctgcgtgggggtgttccaacacggcaaggtggagatcatcgccaacgaccagggcaaccgcaccacccccagctacattcacgacctggtcctggtcgggggctccacccgcatccccaaggtgcagaagctgctgcaggacttcttcaacgggcgcgacctgaacaagagcatcaaccccgacgaggctgtggcctacggggcggcggtgcaggcggccatcctgatgggggacaagtccgagaacgtgcaggacctgctgctgctggacgtggctcccctgtcgctggggctggagacggccggaggcgtgatgactgccctgatcaagcgcaactccaccatccccaccaagcagacgcagatcttcaccacctactccgacaaccaacccggggtgctgatccaggtgtacgagggcgagagggccatgacgaaagacaacaatctgttggggcgcttcgagctgagcggcatccctccggcccccaggggcgtgccccagatcgaggtgaccttcgacatcgatgccaacggcatcctgaacgtcacggccacggacaagagcaccggcaaggccaacaagatcaccatcaccaacgacaagggccgcctgagcaaggaggagatcgagcgcatggtgcaggaggcggagaagtacaaagcggaggacgaggtgcagcgcgagagggtgtcagccaagaacgccctggagtcctacgccttcaacatgaagagcgccgtggaggatgaggggctcaagggcaagatcagcgaggcggacaagaagaaggttctggacaagtgtcaagaggtcatctcgtggctggacgccaacaccttggccgagaaggacgagtttgagcacaagaggaaggagctggagcaggtgtgtaaccccatcatcagcggactgtaccagggtgccggtggtcccgggcctggcggcttcggggctcagggtcccaagggagggtctgggtcaggccctaccattgaggaggtggattaggggcctttgttctttagtatgtttgtctttgaggtggactgttgggactcaaggactttgctgctgttttcctatgtcatttctgcttcagctctttgctgcttcacttctttgtaaagttgtaacctgatggtaattagctggcttcattatttttgtagtacaaccgatatgttcattagaattctttgcatttaatgttgatactgtaagggtgtttcgttccctttaaatgaatcaacactgccaccttctgtacgagtttgtttgttttttttttttttttttttttttgcttggcgaaaacactacaaaggctgggaatgtatgtttttataatttgtttatttaaatatgaaaaataaaatgttaaactttttcttgtctgttaa

SEQ ID NO: 14643 - protein, 352 aa, Homo sapiens
MAKAAAIGIDLGTTYSCVGVFQHGKVEIIANDQGNRTTPSYIHDLVLVGGSTRIPKVQKLLQDFFNGRDLNKSINPDEAVAYGAAVQAAILMGDKSENVQDLLLLDVAPLSLGLETAGGVMTALIKRNSTIPTKQTQIFTTYSDNQPGVLIQVYEGERAMTKDNNLLGRFELSGIPPAPRGVPQIEVTFDIDANGILNVTATDKSTGKANKITITNDKGRLSKEEIERMVQEAEKYKAEDEVQRERVSAKNALESYAFNMKSAVEDEGLKGKISEADKKKVLDKCQEVISWLDANTLAEKDEFEHKRKELEQVCNPIISGLYQGAGGPGPGGFGAQGPKGGSGSGPTIEEVD

SEQ ID NO: 14644 - DNA, 1283 bp, Homo sapiens
attaacggaccatgggctgctgggaaacggcttaggagcagcacccggctggcgctggccggccggcgccggggactttcttccgcctggccagacagatccctgttttttgtttttcaaaattcagaaagcatctccgaatatttgcccagaggagtgtgaaacatactttcctggtctttctttcactttgttttatttctgtgtggacaaacaatggggaaaatgccgcgcgtctagccaggcagataagaaaacaactatacccgtcaggcccccaacccggcgccgccataaatggccccggcctcgccattttagttctttttgcgaagtgggctcgtgggttggcagtatgagagttgtaatggcccgactgttgagtgagggggagcaggggatcccaacggcttgcgctgcctttgcgcagcagccggcgggcggccacgtcgcggcctggctggggtaggagagggcggtccccagtgcagttgggtgaactaccgttgcacactggagtttctggtgtctttgcttggaactgacctagctcgtggcagggggaactcggctagcggccccacagcccctgctgactcaaaacaactgtgagtggggttgggcgagtgattgcaaaatgggggtggcggtcgcccggggataggaagggagtgatgatgaccccaggtaactcttgagtgtgtcgctgatgccatcaccgcagcgctctgaccgccccctcggtccagcatttctcaggctcaacgagttcatggccaagattcctaatcttttgttctgtttcatttccccgttaggagttgtaagacgttcatcgccgtgttatccttgagtaaagaatgaactctggaagcccagccagggacaatgcaccttcacagagattctgcactaatctgagtgaaggtctaaggtttggaatctccccctcatggagagaagctttgtatggctgtcatgcttagacagtgattcctgcaacttgaccttcaggctgggagaggtggagagccatgcctgttctccttccttgctatggaatttgctgacacaatatcttccgcctggtgctgggcatatcctaagaacttacaactttcctgtattatcctgtgtgagcagctgtcaccttattgggggaaaaatgcctgaaaattagggggcacttcaagtagatagcttctatttcctatatttgtcttatatacaagtatttgcttttatcaaaataattccaataaagcattttaaagtaaagaaga

SEQ ID NO: 14645 - protein, 75 aa, Homo sapiens; identical to SEQ ID NO: 1609

SEQ ID NO: 14646 - DNA, 1048 bp, Homo sapiens
gctgctgggaaacggcttaggagcagcacccggctggcgctggccggccggcgccggggactttcttccgcctggccagacagatccctgttttttgtttttcaaaattcagaaagcatctccgaatatttgcccagaggagtgtgaaacatactttcctggtctttctttcactttgttttatttctgtgtggacaaacaatggggaaaatgccgcgcgtctagccaggcagataagaaaacaactatacccgtcaggcccccaacccggcgccgccataaatggccccggcctcgccattttagttctttttgcgaagtgggctcgtgggttggcagtatgagagttgtaatggcccgactgttgagtgagggggagcaggggatcccaacggcttgcgctgcctttgcgcagcagccggcgggcggccacgtcgcggcctggctggggtaggagagggcggtccccagtgcagttgggtgaactaccgttgcacactggagtttctggtgtctttgcttggaactgacctagctcgtggcagggggaactcggctagcggccccacagcccctgctgactcaaaacaactgagttgtaagacgttcatcgccgtgttatccttgagtaaagaatgaactctggaagcccagccagggacaatgcaccttcacagagattctgcactaatctgagtgaaggtctaaggtttggaatctccccctcatggagagaagctttgtatggctgtcatgcttagacagtgattcctgcaacttgaccttcaggctgggagaggtggagagccatgcctgttctccttccttgctatggaatttgctgacacaatatcttccgcctggtgctgggcatatcctaagaacttacaactttcctgtattatcctgtgtgagcagctgtcaccttattgggggaaaaatgcctgaaaattagggggcacttcaagtagatagcttctatttcctatatttgtcttatatacaagtatttgcttttatcaaaataattccaataaagcattttaaa

SEQ ID NO: 14647 - protein, 75 aa, Homo sapiens; identical to SEQ ID NO: 1609

SEQ ID NO: 14648 - DNA, 1064 bp, Homo sapiens
gctgctgggaaacggcttaggagcagcacccggctggcgctggccggccggcgccggggactttcttccgcctggccagacagatccctgttttttgtttttcaaaattcagaaagcatctccgaatatttgcccagaggagtgtgaaacatactttcctggtctttctttcactttgttttatttctgtgtggacaaacaatggggaaaatgccgcgcgtctagccaggcagataagaaaacaactatacccgtcaggcccccaacccggcgccgccataaatggccccggcctcgccattttagttctttttgcgaagtgggctcgtgggttggcagtatgagagttgtaatggcccgactgttgagtgagggggagcaggggatcccaacggcttgcgctgcctttgcgcagcagccggcgggcggccacgtcgcggcctggctggggtaggagagggcggtccccagtgcagttgggtgaactaccgttgcacactggagtttctggtgtctttgcttggaactgacctagctcgtggcagggggaactcggctagcggccccacagcccctgctgactcaaaacaactgagttgtaagacgttcatcgccgtgttatccttgagtaaagaatgaactctggaagcccagccagggacaatgcaccttcacagagattctgcactaatctgagtgaaggtctaaggtttggaatctccccctcatggagagaagctttgtatggctgtcatgcttagacagtgattcctgcaacttgaccttcaggctgggagaggtggagagccatgcctgttctccttccttgctatggaatttgctgacacaatatcttccgcctggtgctgggcatatcctaagaacttacaactttcctgtattatcctgtgtgagcagctgtcaccttattgggggaaaaatgcctgaaaattagggggcacttcaagtagatagcttctatttcctatatttgtcttatatacaagtatttgcttttatcaaaataattccaataaagcattttaaataaaacaaaaaaagga

SEQ ID NO: 14649 - protein, 75 aa, Homo sapiens; identical to SEQ ID NO: 1609

SEQ ID NO: 14650 - DNA, 607 bp, Homo sapiens
ggagcagcacccggctggcgctggccggccggcgccggggactttcttccgcctggccagacagatccctgttttttgtttttcaaaattcagaaagcatctccgaatatttgcccagaggagtgtgaaacatactttcctggagttgtaagacgttcatcgccgtgttatccttgagtaaagaatgaactctggaagcccagccagggacaatgcaccttcacagagattctgcactaatctgagtgaaggtctaaggtttggaatctccccctcatggagagaagctttgtatggctgtcatgcttagacagtgattcctgcaacttgaccttcaggctgggagaggtggagagccatgcctgttctccttccttgctatggaatttgctgacacaatatcttccgcctggtgctgggcatatcctaagaacttacaactttcctgtattatcctgtgtgagcagctgtcaccttattgggggaaaaatgcctgaaaattagggggcacttcaagtagatagcttctatttcctatatttgtcttatatacaagtatttgcttttatcaaaataattccaataaagcattttaaagtaaagaaga

SEQ ID NO: 14651 - protein, 75 aa, Homo sapiens; identical to SEQ ID NO: 1609

SEQ ID NO: 14652 - DNA, 934 bp, Homo sapiens
ccggcgccggggactttcttccgcctggccagacagatccctgttttttgtttttcaaaattcagaaagcatctccgaatatttgcccagaggagtgtgaaacatactttcctggtctttctttcactttgttttatttctgtgtggacaaacaatggggaaaatgccgcgcgtctagccaggcagataagaaaacaactatacccgtcaggcccccaacccggcgccgccataaatggccccggcctcgccattttagttctttttgcgaagtgggctcgtgggttggcagtatgagagttgtaatggcccgactgttgagtgagggggagcaggggatcccaacggcttgcgctgcctttgcgcagcagccggcgggcggccacgtcgcggcctggctggggtaggagagggcggtccccagtgcagttgggtgaactaccgttgcacactggagtttctggtgtctttgcttggaactgacctagctcgtggcagggggaactcggctagcggccccacagcccctgctgactcaaaacaactgagttgtaagacgttcatcgccgtgttatccttgagtaaagaatgaactctggaagcccagccagggacaatgcaccttcacagagattctgcactaatctgagtgaaggtctaaggtttggaatctccccctcatggagaccatgcctgttctccttccttgctatggaatttgctgacacaatatcttccgcctggtgctgggcatatcctaagaacttacaactttcctgtattatcctgtgtgagcagctgtcaccttattgggggaaaaatgcctgaaaattagggggcacttcaagtagatagcttctatttcctatatttgtcttatatacaagtatttgcttttatcaaaataattccaataaagcattttaaagtaaag

SEQ ID NO: 14653 - protein, 79 aa, Homo sapiens
MNSGSPARDNAPSQRFCTNLSEGLRFGISPSWRPCLFSFLAMEFADTISSAWCWAYPKNLQLSCIILCEQLSPYWGKNA

SEQ ID NO: 14654 - DNA, 701 bp, Homo sapiens
ctttttgcgaagtgggctcgtgggttggcagtatgagagttgtaatggcccgactgttgagtgagggggagcaggggatcccaacggcttgcgctgcctttgcgcagcagccggcgggcggccacgtcgcggcctggctggggagttgtaagacgttcatcgccgtgttatccttgagtaaagaagcgggcttttgccatgttgtccaggctggtctctactcctgggctcaagcagtcctcctgcctcagtctcccaaagtgctggaattacagggaatgaactctggaagcccagccagggacaatgcaccttcacagagattctgcactaatctgagtgaaggtctaaggtttggaatctccccctcatggagagaagctttgtatggctgtcatgcttagacagtgattcctgcaacttgaccttcaggctgggagaggtggagagccatgcctgttctccttccttgctatggaatttgctgacacaatatcttccgcctggtgctgggcatatcctaagaacttacaactttcctgtattatcctgtgtgagcagctgtcaccttattgggggaaaaatgcctgaaaattagggggcacttcaagtagatagcttctatttcctatatttgtcttatatacaagtatttgcttttatcaaaataattccaataaagcattttaaagtaaagaaga

SEQ ID NO: 14655 - protein, 123 aa, Homo sapiens
MRVVMARLLSEGEQGIPTACAAFAQQPAGGHVAAWLGSCKTFIAVLSLSKEAGFCHVVQAGLYSWAQAVLLPQSPKVLELQGMNSGSPARDNAPSQRFCTNLSEGLRFGISPSWREALYGCHA

SEQ ID NO: 14656 - DNA, 845 bp, Homo sapiens
ctttttgcgaagtgggctcgtgggttggcagtatgagagttgtaatggcccgactgttgagtgagggggagcaggggatcccaacggcttgcgctgcctttgcgcagcagccggcgggcggccacgtcgcggcctggctggggtaggagagggcggtccccagtgcagttgggtgaactaccgttgcacactggagtttctggtgtctttgcttggaactgacctagctcgtggcagggggaactcggctagcggccccacagcccctgctgactcaaaacaactgagttgtaagacgttcatcgccgtgttatccttgagtaaagaagcgggcttttgccatgttgtccaggctggtctctactcctgggctcaagcagtcctcctgcctcagtctcccaaagtgctggaattacagggaatgaactctggaagcccagccagggacaatgcaccttcacagagattctgcactaatctgagtgaaggtctaaggtttggaatctccccctcatggagagaagctttgtatggctgtcatgcttagacagtgattcctgcaacttgaccttcaggctgggagaggtggagagccatgcctgttctccttccttgctatggaatttgctgacacaatatcttccgcctggtgctgggcatatcctaagaacttacaactttcctgtattatcctgtgtgagcagctgtcaccttattgggggaaaaatgcctgaaaattagggggcacttcaagtagatagcttctatttcctatatttgtcttatatacaagtatttgcttttatcaaaataattccaataaagcattttaaagtaaagaagac

SEQ ID NO: 14657 - protein, 75 aa, Homo sapiens; identical to SEQ ID NO: 1609

SEQ ID NO: 14658 - DNA, 516 bp, Homo sapiens
tttttgcgaagtgggctcgtgggttggcagtatgagagttgtaatggcccgactgttgagtgagggggagcaggggatcccaacggcttgcgctgcctttgcgcagcagccggcgggcggccacgtcgcggcctggctggggtaggagagggcggtccccagtgcagttgggtgaactaccgttgcacactggagtttctggtgtctttgcttggaactgacctagctcgtggcagggggaactcggctagcggccccacagcccctgctgactcaaaacaactgagttgtaagacgttcatcgccgtgttatccttgagtaaagaagcgggcttttgccatgttgtccaggctggtctctactcctgggctcaagcagtcctcctgcctcagtctcccaaagtgctggaattacagggaatgaactctggaagcccagccagggacaatgcaccttcacagagattctgcactaatctgagtgaaggtctaaggtttggaatctccccctcatgg

SEQ ID NO: 14659 - protein, 37 aa, Homo sapiens
MRVVMARLLSEGEQGIPTACAAFAQQPAGGHVAAWLG

SEQ ID NO: 14660 - DNA, 643 bp, Homo sapiens
tttttgcgaagtgggctcgtgggttggcagtatgagagttgtaatggcccgactgttgagtgagggggagcaggggatcccaacggcttgcgctgcctttgcgcagcagccggcgggcggccacgtcgcggcctggctggggtaggagagggcggtccccagtgcagttgggtgaactaccgttgcacactggagtttctggtgtctttgcttggaactgacctagctcgtggcagggggaactcggctagcggccccacagcccctgctgactcaaaacaactgagttgtaagacgttcatcgccgtgttatccttgagtaaagggcgcaatgccaggatctccctgcaacatccaccgtcagggctcaagtggtctttccacctcagcttcctgggactgcaggcacgtgctaccaccacgcctggctaatttttagtttttttacagaagcgggcttttgccatgttgtccaggctggtctctactcctgggctcaagcagtcctcctgcctcagtctcccaaagtgctggaattacagggaatgaactctggaagcccagccagggacaatgcaccttcacagagattctgcactaatctgagtgaaggtctaaggtttggaatctccccctcatggag

SEQ ID NO: 14661 - protein, 37 aa, Homo sapiens; identical to SEQ ID NO: 14659

SEQ ID NO: 14662 - DNA, 968 bp, Homo sapiens
tttttgcgaagtgggctcgtgggttggcagtatgagagttgtaatggcccgactgttgagtgagggggagcaggggatcccaacggcttgcgctgcctttgcgcagcagccggcgggcggccacgtcgcggcctggctggggtaggagagggcggtccccagtgcagttgggtgaactaccgttgcacactggagtttctggtgtctttgcttggaactgacctagctcgtggcagggggaactcggctagcggccccacagcccctgctgactcaaaacaactgagttgtaagacgttcatcgccgtgttatccttgagtaaagggcgcaatgccaggatctccctgcaacatccaccgtcagggctcaagtggtctttccacctcagcttcctgggactgcaggcacgtgctaccaccacgcctggctaatttttagtttttttacagaagcgggcttttgccatgttgtccaggctggtctctactcctgggctcaagcagtcctcctgcctcagtctcccaaagtgctggaattacagggaatgaactctggaagcccagccagggacaatgcaccttcacagagattctgcactaatctgagtgaaggtctaaggtttggaatctccccctcatggagagaagctttgtatggctgtcatgcttagacagtgattcctgcaacttgaccttcaggctgggagaggtggagagccatgcctgttctccttccttgctatggaatttgctgacacaatatcttccgcctggtgctgggcatatcctaagaacttacaactttcctgtattatcctgtgtgagcagctgtcaccttattgggggaaaaatgcctgaaaattagggggcacttcaagtagatagcttctatttcctatatttgtcttatatacaagtatttgcttttatcaaaataattccaataaagcattttaaagtaaagaaga

SEQ ID NO: 14663 - protein, 75 aa, Homo sapiens; identical to SEQ ID NO: 1609

SEQ ID NO: 14664 - DNA, 705 bp, Homo sapiens
ttgcgaagtgggctcgtgggttggcagtatgagagttgtaatggcccgactgttgagtgagggggagcaggggatcccaacggcttgcgctgcctttgcgcagcagccggcgggcggccacgtcgcggcctggctggggtaggagagggcggtccccagtgcagttgggtgaactaccgttgcacactggagtttctggtgtctttgcttggaactgacctagctcgtggcagggggaactcggctagcggccccacagcccctgctgactcaaaacaactaatgaactctggaagcccagccagggacaatgcaccttcacagagattctgcactaatctgagtgaaggtctaaggtttggaatctccccctcatggagagaagctttgtatggctgtcatgcttagacagtgattcctgcaacttgaccttcaggctgggagaggtggagagccatgcctgttctccttccttgctatggaatttgctgacacaatatcttccgcctggtgctgggcatatcctaagaacttacaactttcctgtattatcctgtgtgagcagctgtcaccttattgggggaaaaatgcctgaaaattagggggcacttcaagtagatagcttctatttcctatatttgtcttatatacaagtatttgcttttatcaaaataattccaataaagcattttaaagtaaagaaga

SEQ ID NO: 14665 - protein, 75 aa, Homo sapiens; identical to SEQ ID NO: 1609

SEQ ID NO: 14666 - DNA, 601 bp, Homo sapiens
gcgaagtgggctcgtgggttggcagtatgagagttgtaatggcccgactgttgagtgagggggagcaggggatcccaacggcttgcgctgcctttgcgcagcagccggcgggcggccacgtcgcggcctggctggggagttgtaagacgttcatcgccgtgttatccttgagtaaagaatgaactctggaagcccagccagggacaatgcaccttcacagagattctgcactaatctgagtgaaggtctaaggtttggaatctccccctcatggagagaagctttgtatggctgtcatgcttagacagtgattcctgcaacttgaccttcaggctgggagaggtggagagccatgcctgttctccttccttgctatggaatttgctgacacaatatcttccgcctggtgctgggcatatcctaagaacttacaactttcctgtattatcctgtgtgagcagctgtcaccttattgggggaaaaatgcctgaaaattagggggcacttcaagtagatagcttctatttcctatatttgtcttatatacaagtatttgcttttatcaaaataattccaataaagcattttaaagtaaagaaga

SEQ ID NO: 14667 - protein, 75 aa, Homo sapiens; identical to SEQ ID NO: 1609

SEQ ID NO: 14668 - DNA, 619 bp, Homo sapiens
gcgaagtgggctcgtgggttggcagtatgagagttgtaatggcccgactgttgagtgagggagttgtaagacgttcatcgccgtgttatccttgagtaaagaagcgggcttttgccatgttgtccaggctggtctctactcctgggctcaagcagtcctcctgcctcagtctcccaaagtgctggaattacagggaatgaactctggaagcccagccagggacaatgcaccttcacagagattctgcactaatctgagtgaaggtctaaggtttggaatctccccctcatggagagaagctttgtatggctgtcatgcttagacagtgattcctgcaacttgaccttcaggctgggagaggtggagagccatgcctgttctccttccttgctatggaatttgctgacacaatatcttccgcctggtgctgggcatatcctaagaacttacaactttcctgtattatcctgtgtgagcagctgtcaccttattgggggaaaaatgcctgaaaattagggggcacttcaagtagatagcttctatttcctatatttgtcttatatacaagtatttgcttttatcaaaataattccaataaagcattttaaagtaaagaaga

SEQ ID NO: 14669 - protein, 75 aa, Homo sapiens; identical to SEQ ID NO: 1609

SEQ ID NO: 14670 - DNA, 813 bp, Homo sapiens
taaaggctgggtaacctgactcctcccctcatttctactgcaaaataggagtacactggggcctcccagtggagctgttctctgctgttttaaattactttctactcctccctttctaacgtccactcctggactcatttgttagatcaatatatactgggactgttgtgttttctttgagtgtactagatctctttccagaagagcttcccttgatccagatctccctaattgggaatgatgatttcacagactagagtctccgatgctggtcatgatgtcaaaactaagttctgactcatttagggaactggatacttgggtctccagaagggccaatgggagggccataattctgtttattttcaaattgtcttgttttcaccttgttagaatgaactctggaagcccagccagggacaatgcaccttcacagagattctgcactaatctgagtgaaggtctaaggtttggaatctccccctcatggagagaagctttgtatggctgtcatgcttagacagtgattcctgcaacttgaccttcaggctgggagaggtggagagccatgcctgttctccttccttgctatggaatttgctgacacaatatcttccgcctggtgctgggcatatcctaagaacttacaactttcctgtattatcctgtgtgagcagctgtcaccttattgggggaaaaatgcctgaaaattagggggcacttcaagtagatagcttctatttcctatatttgtcttatatacaagtatttgcttttatcaaaataattccaataaagcattttaaagtaaag

SEQ ID NO: 14671 - protein, 75 aa, Homo sapiens; identical to SEQ ID NO: 1609

SEQ ID NO: 14672 - DNA, 531 bp, Homo sapiens
agggtcagaacttttaaacaagtgcaagtgtccagctaaaatgaattatatgtatgtcaaagttgcagaaatagttaaagaaccttttttttccagctttttttttttcttttaatacacagtgccgggattacaggtgtgagccaccccacccggccaaggaaatatttaaaaaataaaataaaataagttatttaaaaattggggcaagttggctgggcacggtggctcacgcctgtaatcctagcactttgggaggctgaggaagggggatcacttgaggtcaggagttcaagaccagtctggccaacatggtgaaacactgtctctactaaaaattcaaaaaattagccaggcattgtggcaggcacctacaatcccagctactcaggagactaaggcaggagaatcgcttgaacctgggagacggagattgcagtgagttgaaatcatgccactgcactccagcctgggctatggagcgagactctccctcaaaaaaaaaaaaatcggggtaagtgttatcaatct

SEQ ID NO: 14673 - protein, 36 aa, Homo sapiens
RTFFFQLFFFLLIHSAGITGVSHPTRPRKYLKNKIK

SEQ ID NO: 14674 - DNA, 813 bp, Homo sapiens
ctgaccctgcgatggagcttcagcaatggtacctcatggcggaaagagacagtccagctatggccaggccccagtggctattcatccctggcaaccctggagggcagcatggatggagaggagcaggccccccagctctacgtcctgtatgagaaaggccggaaccactacacagagagcatctccgtggccaaaatcagtgtctatgggacactctgagctgtgccactgccacaggggtattctgccttcaggactctgccttcaggaacacgggtctgtagagggtctgctggagacgcctgaaagacagttccatcttcctttagactccagccttggcaaaatcaccttccctttaccagggaaatcacttcctttaggactgaaagctaggcgtccctctctgccctcccgggacattgattggtcctgtcttgggcaggtctagtgagctgtagaattgaatcaatgtgaactcagggaactggggaaggctgagcctcctctttggtgttgcggtaagataaccgacagggctggtgaaagtccccagatggcaggatatttggtttcagagtaaggactaggtgcaccaccatgactgactatcaatcaaaatgtttgtaacttaaaatttttaatgaaggataatgaatatttgtagagtctctatggttctgtcaatgcacatcttcgtgtctgttttcctcatgtatccttgtgagcctgggtgagttctggggagagacctgatgtgcgtactgcctgtgaaaatctgactttggcaaatcaaatcctcttttccttttg

SEQ ID NO: 14675 - protein, 141 aa, Homo sapiens
MVPHGGKRQSSYGQAPVAIHPWQPWRAAWMERSRPPSSTSCMRKAGTTTQRASPWPKSVSMGHSELCHCHRGILPSGLCLQEHGSVEGLLETPERQFHLPLDSSLGKITFPLPGKSLPLGLKARRPSLPSRDIDWSCLGQV

SEQ ID NO: 14676 - DNA, 2054 bp, Homo sapiens
cgggaagcgcggcggggcctccagaccggggcgggcttaagggtgacatctgcgctttaaagggtccgggtcagctgactcccgactctgtggagtctagctgccagggtcgcggcagctgcggggagagatgactggggagcgacccagcacggcgctcccggacagacgctgggggccgcggattctgggcttctggggaggctgtagggtttgggtgtttgccgcgatcttcctgctgctgtctctggcagcctcctggtccaaggctgagaacgacttcggtctggtgcagccgctggtgaccatggagcaactgctgtgggtgagcgggagacagatcggctcagtggacaccttccgcatcccgctcatcacagccactccgcggggcactcttctcgcctttgctgaggcgaggaaaatgtcctcatccgatgagggggccaagttcatcgccctgcggaggtccatggaccagggcagcacatggtctcctacagcgttcattgtcaatgatggggatgtccccgatgggctgaaccttggggcagtagtgagcgatgttgagacaggagtagtatttcttttctactccctttgtgctcacaaggccggctgccaggtggcctctaccatgttggtatggagcaaggatgatggtgtttcctggagcacaccccggaatctctccctggatattggcactgaagtgtttgcccctggaccgggctctggtattcagaaacagcgggagccacggaagggccgcctcatcgtgtgtggccatgggacgctggagcgggacggagtcttctgtctcctcagcgatgatcatggtgcctcctggcgctacggaagtggggtcagcggcatcccctacggtcagcccaagcaggaaaatgatttcaatcctgatgaatgccagctatgatgcctgtgatacactaaggccccgtgatgtgaccttcgaccctgagctcgtggaccctgtggtagctgcaggagctgtagtcaccagctccggcattgtcttcttctccaacccagcacatccagagttccgtgagtgcctcatgggtggggtcagcagggagagccctgtgtctagacaaggcctgggcagagaccctctctccctgactctcctgctctccccaggagtgaacctgaccctgcgatggagcttcagcaatggtacctcatggcggaaagagacagtccagctatggccaggccccagtggctattcatccctggcaaccctggagggcagcatggatggagaggagcaggccccccagctctacgtcctgtatgagaaaggccggaaccactacacagagagcatctccgtggccaaaatcagtgtctatgggacactctgagctgtgccactgccacaggggtattctgccttcaggactctgccttcaggaacacgggtctgtagagggtctgctggagacgcctgaaagacagttccatcttcctttagactccagccttggcaaaatcaccttccctttaccagggaaatcacttcctttaggactgaaagctaggcgtcctctcccacaaaaaagtcctgccctcatctgagaatactgtctttccatatggctaagtgtggccccaccaccctctctgccctcccgggacattgattggtcctgtcttgggcaggtctagtgagctgtagaattgaatcaatgtgaactcagggaactggggaaggctgagcctcctctttggtgttgcggtaagataaccgacagggctggtgaaagtccccagatggcaggatatttggtttcagagtaaggactaggtgcaccaccatgactgactatcaatcaaaatgtttgtaacttaaaatttttaatgaaggataatgaatatttgtagagtctctatggttctgtcaatgcacatcttcgtgtctgttttcctcatgtatccttgtgagcctgggtgagttctggggagagacctgatgtgcgtactgcctgtgaaaatctgactttggcaaatcaaatcctcttttccttttg

SEQ ID NO: 14677 - protein, 267 aa, Homo sapiens
MTGERPSTALPDRRWGPRILGFWGGCRVWVFAAIFLLLSLAASWSKAENDFGLVQPLVTMEQLLWVSGRQIGSVDTFRIPLITATPRGTLLAFAEARKMSSSDEGAKFIALRRSMDQGSTWSPTAFIVNDGDVPDGLNLGAVVSDVETGVVFLFYSLCAHKAGCQVASTMLVWSKDDGVSWSTPRNLSLDIGTEVFAPGPGSGIQKQREPRKGRLIVCGHGTLERDGVFCLLSDDHGASWRYGSGVSGIPYGQPKQENDFNPDECQL

SEQ ID NO: 14678 - DNA, 2044 bp, Homo sapiens
cgggaagcgcggcggggcctccagaccggggcgggcttaagggtgacatctgcgctttaaagggtccgggtcagctgactcccgactctgtggagtctagctgccagggtcgcggcagctgcggggagagatgactggggagcgacccagcacggcgctcccggacagacgctgggggccgcggattctgggcttctggggaggctgtagggtttgggtgtttgccgcgatcttcctgctgctgtctctggcagcctcctggtccaaggctgagaacgacttcggtctggtgcagccgctggtgaccatggagcaactgctgtgggtgagcgggagacagatcggctcagtggacaccttccgcatcccgctcatcacagccactccgcggggcactcttctcgcctttgctgaggcgaggaaaatgtcctcatccgatgagggggccaagttcatcgccctgcggaggtccatggaccagggcagcacatggtctcctacagcgttcattgtcaatgatggggatgtccccgatgggctgaaccttggggcagtagtgagcgatgttgagacaggagtagtatttcttttctactccctttgtgctcacaaggccggctgccaggtggcctctaccatgttggtatggagcaaggatgatggtgtttcctggagcacaccccggaatctctccctggatattggcactgaagtgtttgcccctggaccgggctctggtattcagaaacagcgggagccacggaagggccgcctcatcgtgtgtggccatgggacgctggagcgggacggagtcttctgtctcctcagcgatgatcatggtgcctcctggcgctacggaagtggggtcagcggcatcccctacggtcagcccaagcaggaaaatgatttcaatcctgatgaatgccagccctatgagctcccagatggctcagtcgtcatcaatgcccgaaaccagaacaactaccactgccactgccgaattgtcctccgcagctatgatgcctgtgatacactaaggccccgtgatgtgaccttcgaccctgagctcgtggaccctgtggtagctgcaggagctgtagtcaccagctccggcattgtcttcttctccaacccagcacatccagagttccgagtgaacctgaccctgcgatggagcttcagcaatggtacctcatggcggaaagagacagtccagctatggccaggccccagtggctattcatccctggcaaccctggagggcagcatggatggagaggagcaggccccccagctctacgtcctgtatgagaaaggccggaaccactacacagagagcatctccgtggccaaaatcagtgtctatgggacactctgagctgtgccactgccacaggggtattctgccttcaggactctgccttcaggaacacgggtctgtagagggtctgctggagacgcctgaaagacagttccatcttcctttagactccagccttggcaaaatcaccttccctttaccagggaaatcacttcctttaggactgaaagctaggcgtcctctcccacaaaaaagtcctgccctcatctgagaatactgtctttccatatggctaagtgtggccccaccaccctctctgccctcccgggacattgattggtcctgtcttgggcaggtctagtgagctgtagaattgaatcaatgtgaactcagggaactggggaaggctgagcctcctctttggtgttgcggtaagataaccgacagggctggtgaaagtccccagatggcaggatatttggtttcagagtaaggactaggtgcaccaccatgactgactatcaatcaaaatgtttgtaacttaaaatttttaatgaaggataatgaatatttgtagagtctctatggttctgtcaatgcacatcttcgtgtctgttttcctcatgtatccttgtgagcctgggtgagttctggggagagacctgatgtgcgtactgcctgtgaaaatctgactttggcaaatcaaatcctcttttccttttg

SEQ ID NO: 14679 - protein, 415 aa, Homo sapiens; identical to SEQ ID NO: 1613

SEQ ID NO: 14680 - DNA, 1409 bp, Homo sapiens
aatcactccggagactgagccatggggggaaagcagcgggacgaggatgacgaggcctacgggaagccagtcaaatacgacccctcctttcgaggccccatcaagaacagaagctgcacagatgtcatctgctgcgtcctcttcctgctcttcattctaggttacatcgtggtggggattgtggcctggttgtatggagacccccggcaagtcctctaccccaggaactctactggggcctactgtggcatgggggagaacaaagataagccgtatctcctgtacttcaacatcttcagctgcatcctgtccagcaacatcatctcagttgctgagaacggcctacagtgccccacaccccaggtgtgtgtgtcctcctgcccggaggacccatggactgtgggaaaaaacgagttctcacagactgttggggaagtcttctatacaaaaaacaggaacttttgtctgccaggggtaccctggaatatgacggtgatcacaagcctgcaacaggaactctgccccagtttcctcctcccctctgctccagctctggggcgctgctttccatggaccaacgttactccaccggcgctcccagggatcaccaatgacaccaccatacagcaggggatcagcggtcttattgacagcctcaatgcccgagacatcagtgttaagatctttgaagattttgcccagtcctggtattggattcttgttgccctgggggtggctctggtcttgagcctactgtttatcttgcttctgcgcctggtggctgggcccctggtgctggtgctgatcctgggagtgctgggcgtgctggcatacggcatctactactgctgggaggagtaccgagtgctgcgggacaagggcgcctccatctcccagctgggtttcaccaccaacctcagtgcctaccagagcgtgcaggatcctgccctcatctgagaatactgtctttccatatggctaagtgtggccccaccaccctctctgccctcccgggacattgattggtcctgtcttgggcaggtctagtgagctgtagaattgaatcaatgtgaactcagggaactggggaaggctgagcctcctctttggtgttgcggtaagataaccgacagggctggtgaaagtccccagatggcaggatatttggtttcagagtaaggactaggtgcaccaccatgactgactatcaatcaaaatgtttgtaacttaaaatttttaatgaaggataatgaatatttgtagagtctctatggttctgtcaatgcacatcttcgtgtctgttttcctcatgtatccttgtgagcctgggtgagttctggggagagacctgatgtgcgtactgcctgtgaaaatctgactttggcaaatcaaatcctcttttccttttg

SEQ ID NO: 14681 - protein, 311 aa, Homo sapiens
MGGKQRDEDDEAYGKPVKYDPSFRGPIKNRSCTDVICCVLFLLFILGYIVVGIVAWLYGDPRQVLYPRNSTGAYCGMGENKDKPYLLYFNIFSCILSSNIISVAENGLQCPTPQVCVSSCPEDPWTVGKNEFSQTVGEVFYTKNRNFCLPGVPWNMTVITSLQQELCPSFLLPSAPALGRCFPWTNVTPPALPGITNDTTIQQGISGLIDSLNARDISVKIFEDFAQSWYWILVALGVALVLSLLFILLLRLVAGPLVLVLILGVLGVLAYGIYYCWEEYRVLRDKGASISQLGFTTNLSAYQSVQDPALI

SEQ ID NO: 14682 - DNA, 1931 bp, Homo sapiens
cgggaagcgcggcggggcctccagaccggggcgggcttaagggtgacatctgcgctttaaagggtccgggtcagctgactcccgactctgtggagtctagctgccagggtcgcggcagctgcggggagagatgactggggagcgacccagcacggcgctcccggacagacgctgggggccgcggattctgggcttctggggaggctgtagggtttgggtgtttgccgcgatcttcctgctgctgtctctggcagcctcctggtccaaggctgagaacgacttcggtctggtgcagccgctggtgaccatggagcaactgctgtgggtgagcgggagacagatcggctcagtggacaccttccgcatcccgctcatcacagccactccgcggggcactcttctcgcctttgctgaggcgaggaaaatgtcctcatccgatgagggggccaagttcatcgccctgcggaggtccatggaccagggcagcacatggtctcctacagcgttcattgtcaatgatggggatgtccccgatgggctgaaccttggggcagtagtgagcgatgttgagacaggagtagtatttcttttctactccctttgtgctcacaaggccggctgccaggtggcctctaccatgttggtatggagcaaggatgatggtgtttcctggagcacaccccggaatctctccctggatattggcactgaagtgtttgcccctggaccgggctctggtattcagaaacagcgggagccacggaagggccgcctcatcgtgtgtggccatgggacgctggagcgggacggagtcttctgtctcctcagcgatgatcatggtgcctcctggcgctacggaagtggggtcagcggcatcccctacggtcagcccaagcaggaaaatgatttcaatcctgatgaatgccagctatgatgcctgtgatacactaaggccccgtgatgtgaccttcgaccctgagctcgtggaccctgtggtagctgcaggagctgtagtcaccagctccggcattgtcttcttctccaacccagcacatccagagttccgtgagtgcctcatgggtggggtcagcagggagagccctgtgtctagacaaggcctgggcagagaccctctctccctgactctcctgctctccccaggagtgaacctgaccctgcgatggagcttcagcaatggtacctcatggcggaaagagacagtccagctatggccaggccccagtggctattcatccctggcaaccctggagggcagcatggatggagaggagcaggccccccagctctacgtcctgtatgagaaaggccggaaccactacacagagagcatctccgtggccaaaatcagtgtctatgggacactctgagctgtgccactgccacaggggtattctgccttcaggactctgccttcaggaacacgggtctgtagagggtctgctggagacgcctgaaagacagttccatcttcctttagactccagccttggcaaaatcaccttccctttaccagggaaatcacttcctttaggactgaaagctaggcgtcctctcccacaaaaaagtcctgccctcatctgagaatactgtctttccatatggctaagtgtggccccaccaccctctctgccctcccgggacattgattggtcctgtcttgggcaggtctagtgagctgtagaattgaatcaatgtgaactcagggaactggggaaggctgagcctcctctttggtgttgcggtaagataaccgacagggctggtgaaagtccccagatggcaggatatttggtttcagagtaaggactaggtgcaccaccatgactgactatcaatcaaaatgtttgtaacttaaaatttttaatgaaggataatgaatatttgtagagtctctatggttctgtcaatgc

SEQ ID NO: 14683 - protein, 267 aa, Homo sapiens; identical to SEQ ID NO: 14677

SEQ ID NO: 14684 - DNA, 1921 bp, Homo sapiens
cgggaagcgcggcggggcctccagaccggggcgggcttaagggtgacatctgcgctttaaagggtccgggtcagctgactcccgactctgtggagtctagctgccagggtcgcggcagctgcggggagagatgactggggagcgacccagcacggcgctcccggacagacgctgggggccgcggattctgggcttctggggaggctgtagggtttgggtgtttgccgcgatcttcctgctgctgtctctggcagcctcctggtccaaggctgagaacgacttcggtctggtgcagccgctggtgaccatggagcaactgctgtgggtgagcgggagacagatcggctcagtggacaccttccgcatcccgctcatcacagccactccgcggggcactcttctcgcctttgctgaggcgaggaaaatgtcctcatccgatgagggggccaagttcatcgccctgcggaggtccatggaccagggcagcacatggtctcctacagcgttcattgtcaatgatggggatgtccccgatgggctgaaccttggggcagtagtgagcgatgttgagacaggagtagtatttcttttctactccctttgtgctcacaaggccggctgccaggtggcctctaccatgttggtatggagcaaggatgatggtgtttcctggagcacaccccggaatctctccctggatattggcactgaagtgtttgcccctggaccgggctctggtattcagaaacagcgggagccacggaagggccgcctcatcgtgtgtggccatgggacgctggagcgggacggagtcttctgtctcctcagcgatgatcatggtgcctcctggcgctacggaagtggggtcagcggcatcccctacggtcagcccaagcaggaaaatgatttcaatcctgatgaatgccagccctatgagctcccagatggctcagtcgtcatcaatgcccgaaaccagaacaactaccactgccactgccgaattgtcctccgcagctatgatgcctgtgatacactaaggccccgtgatgtgaccttcgaccctgagctcgtggaccctgtggtagctgcaggagctgtagtcaccagctccggcattgtcttcttctccaacccagcacatccagagttccgagtgaacctgaccctgcgatggagcttcagcaatggtacctcatggcggaaagagacagtccagctatggccaggccccagtggctattcatccctggcaaccctggagggcagcatggatggagaggagcaggccccccagctctacgtcctgtatgagaaaggccggaaccactacacagagagcatctccgtggccaaaatcagtgtctatgggacactctgagctgtgccactgccacaggggtattctgccttcaggactctgccttcaggaacacgggtctgtagagggtctgctggagacgcctgaaagacagttccatcttcctttagactccagccttggcaaaatcaccttccctttaccagggaaatcacttcctttaggactgaaagctaggcgtcctctcccacaaaaaagtcctgccctcatctgagaatactgtctttccatatggctaagtgtggccccaccaccctctctgccctcccgggacattgattggtcctgtcttgggcaggtctagtgagctgtagaattgaatcaatgtgaactcagggaactggggaaggctgagcctcctctttggtgttgcggtaagataaccgacagggctggtgaaagtccccagatggcaggatatttggtttcagagtaaggactaggtgcaccaccatgactgactatcaatcaaaatgtttgtaacttaaaatttttaatgaaggataatgaatatttgtagagtctctatggttctgtcaatgc

SEQ ID NO: 14685 - protein, 415 aa, Homo sapiens; identical to SEQ ID NO: 1613

SEQ ID NO: 14686 - DNA, 663 bp, Homo sapiens
ctgaccctgcgatggagcttcagcaatggtacctcatggcggaaagagacagtccagctatggccaggccccagtggctattcatccctggcaaccctggagggcagcatggatggagaggagcaggccccccagctctacgtcctgtatgagaaaggccggaaccactacacagagagcatctccgtggccaaaatcagtgtctatgggacactctgagctgtgccactgccacaggggtattctgccttcaggactctgccttcaggaacacgggtctgtagagggtctgctggagacgcctgaaagacagttccatcttcctttagactccagccttggcaaaatcaccttccctttaccagggaaatcacttcctttaggactgaaagctaggcgtccctctctgccctcccgggacattgattggtcctgtcttgggcaggtctagtgagctgtagaattgaatcaatgtgaactcagggaactggggaaggctgagcctcctctttggtgttgcggtaagataaccgacagggctggtgaaagtccccagatggcaggatatttggtttcagagtaaggactaggtgcaccaccatgactgactatcaatcaaaatgtttgtaacttaaaatttttaatgaaggataatgaatattt

SEQ ID NO: 14687 - protein, 141 aa, Homo sapiens; identical to SEQ ID NO: 14675

SEQ ID NO: 14688 - DNA, 1259 bp, Homo sapiens
aatcactccggagactgagccatggggggaaagcagcgggacgaggatgacgaggcctacgggaagccagtcaaatacgacccctcctttcgaggccccatcaagaacagaagctgcacagatgtcatctgctgcgtcctcttcctgctcttcattctaggttacatcgtggtggggattgtggcctggttgtatggagacccccggcaagtcctctaccccaggaactctactggggcctactgtggcatgggggagaacaaagataagccgtatctcctgtacttcaacatcttcagctgcatcctgtccagcaacatcatctcagttgctgagaacggcctacagtgccccacaccccaggtgtgtgtgtcctcctgcccggaggacccatggactgtgggaaaaaacgagttctcacagactgttggggaagtcttctatacaaaaaacaggaacttttgtctgccaggggtaccctggaatatgacggtgatcacaagcctgcaacaggaactctgccccagtttcctcctcccctctgctccagctctggggcgctgctttccatggaccaacgttactccaccggcgctcccagggatcaccaatgacaccaccatacagcaggggatcagcggtcttattgacagcctcaatgcccgagacatcagtgttaagatctttgaagattttgcccagtcctggtattggattcttgttgccctgggggtggctctggtcttgagcctactgtttatcttgcttctgcgcctggtggctgggcccctggtgctggtgctgatcctgggagtgctgggcgtgctggcatacggcatctactactgctgggaggagtaccgagtgctgcgggacaagggcgcctccatctcccagctgggtttcaccaccaacctcagtgcctaccagagcgtgcaggatcctgccctcatctgagaatactgtctttccatatggctaagtgtggccccaccaccctctctgccctcccgggacattgattggtcctgtcttgggcaggtctagtgagctgtagaattgaatcaatgtgaactcagggaactggggaaggctgagcctcctctttggtgttgcggtaagataaccgacagggctggtgaaagtccccagatggcaggatatttggtttcagagtaaggactaggtgcaccaccatgactgactatcaatcaaaatgtttgtaacttaaaatttttaatgaaggataatgaatattt

SEQ ID NO: 14689 - protein, 311 aa, Homo sapiens; identical to SEQ ID NO: 14681

SEQ ID NO: 14690 - DNA, 1045 bp, Homo sapiens
cgggaagcgcggcggggcctccagaccggggcgggcttaagggtgacatctgcgctttaaagggtccgggtcagctgactcccgactctgtggagtctagctgccagggtcgcggcagctgcggggagagatgactggggagcgacccagcacggcgctcccggacagacgctgggggccgcggattctgggcttctggggaggctgtagggtttgggtgtttgccgcgatcttcctgctgctgtctctggcagcctcctggtccaaggctgagaacgacttcggtctggtgcagccgctggtgaccatggagcaactgctgtgggtgagcgggagacagatcggctcagtggacaccttccgcatcccgctcatcacagccactccgcggggcactcttctcgcctttgctgaggcgaggaaaatgtcctcatccgatgagggggccaagttcatcgccctgcggaggtccatggaccagggcagcacatggtctcctacagcgttcattgtcaatgatggggatgtccccgatgggctgaaccttggggcagtagtgagcgatgttgagacaggagtagtatttcttttctactccctttgtgctcacaaggccggctgccaggtggcctctaccatgttggtatggagcaaggatgatggtgtttcctggagcacaccccggaatctctccctggatattggcactgaagtgtttgcccctggaccgggctctggtattcagaaacagcgggagccacggaagggccgcctcatcgtgtgtggccatgggacgctggagcgggacggagtcttctgtctcctcagcgatgatcatggtgcctcctggcgctacggaagtggggtcagcggcatcccctacggtcagcccaagcaggaaaatgatttcaatcctgatgaatgccaggtcaggagtccatgagatgttccctacccatttgaccctccctgccctccagaacatcatttcacgcacagacccagggtctgactgctccactcagtgccacacacccttgctccc

SEQ ID NO: 14691 - protein, 270 aa, Homo sapiens
MTGERPSTALPDRRWGPRILGFWGGCRVWVFAAIFLLLSLAASWSKAENDFGLVQPLVTMEQLLWVSGRQIGSVDTFRIPLITATPRGTLLAFAEARKMSSSDEGAKFIALRRSMDQGSTWSPTAFIVNDGDVPDGLNLGAVVSDVETGVVFLFYSLCAHKAGCQVASTMLVWSKDDGVSWSTPRNLSLDIGTEVFAPGPGSGIQKQREPRKGRLIVCGHGTLERDGVFCLLSDDHGASWRYGSGVSGIPYGQPKQENDFNPDECQVRSP

SEQ ID NO: 14692 - DNA, 793 bp, Homo sapiens
aaaaaaaagagccattagagagacttcccagcaggtggctgtagcggcaggggattttcttactctacagcatgcatccattcagggtttgccagtctcctcctaagcgactgacatgcattttttccgctaattcttatcatcgctctatgcaacataatattcccgaccccacttcacagtccccgatttcctggccccagggtccgctctaaccggtctctgttgcggctcagtggaagacctggagcggaacaacggctccctggaccggccctactacatgtccaagagccttctaaagattctgggcaagaagaacgaggcgcccccggacaacaagaagaggaagaagtgacagctccggccctgatccaggactgcaccccacccccaccgtccagccatccaacctcacttcgccttacaggtctccattttgtggtaaaaaaaggttttaggccaggcgccgtggctcacgcctgtaatccaacactttgagaggctgaggcgggcggatcacctgagtcaggagttcgagaccagcctggccaacatggtgaaacctccgtctctattaaaaatacaaaaattagccgagagtggtggcatgcacctgtcatcccagctactcgggaggctgaggcaggagaatcgcttgaacccgggaggcagaggttgcagtgagccgagatcgcgccactgcactccaacctgggtgacagactctgtctccaaaacaaaacaaacaaacaaaaagattttattaaagatattttgttaactcagtaaa

SEQ ID NO: 14693 - protein, 47 aa, Homo sapiens
MHPFRVCQSPPKRLTCIFSANSYHRSMQHNIPDPTSQSPISWPQGPL

SEQ ID NO: 14694 - DNA, 777 bp, Homo sapiens
gtgtgtggacacgctcttcctctgcttccgtgagtgacacccccagccacctgtccccaaccttaaagtactgagccgttcaagcatttttttttttttttggagatttggtgcttctagaaacaatgcctttgtgagctaaacgaaccagagggagcttcttgtgacatcctgaggccaggcgtttagggaagaaggaagagagtgagcccccaggccgtggaagacctggagcggaacaacggctccctggaccggccctactacatgtccaagagccttctaaagattctgggcaagaagaacgaggcgcccccggacaacaagaagaggaagaagtgacagctccggccctgatccaggactgcaccccacccccaccgtccagccatccaacctcacttcgccttacaggtctccattttgtggtaaaaaaaggttttaggccaggcgccgtggctcacgcctgtaatccaacactttgagaggctgaggcgggcggatcacctgagtcaggagttcgagaccagcctggccaacatggtgaaacctccgtctctattaaaaatacaaaaattagccgagagtggtggcatgcacctgtcatcccagctactcgggaggctgaggcaggagaatcgcttgaacccgggaggcagaggttgcagtgagccgagatcgcgccactgcactccaacctgggtgacagactctgtctccaaaacaaaacaaacaaacaaaaagattttattaaagatattttgttaactcagtaaa

SEQ ID NO: 14695 - protein, 75 aa, Homo sapiens
MVKPPSLLKIQKLAESGGMHLSSQLLGRLRQENRLNPGGRGCSEPRSRHCTPTWVTDSVSKTKQTNKKILLKIFC

SEQ ID NO: 14696 - DNA, 2589 bp, Homo sapiens
aatcactccggagactgagccatggggggaaagcagcgggacgaggatgacgaggcctacgggaagccagtcaaatacgacccctcctttcgaggccccatcaagaacagaagctgcacagatgtcatctgctgcgtcctcttcctgctcttcattctaggttacatcgtggtggggattgtggcctggttgtatggagacccccggcaagtcctctaccccaggaactctactggggcctactgtggcatgggggagaacaaagataagccgtatctcctgtacttcaacatcttcagctgcatcctgtccagcaacatcatctcagttgctgagaacggcctacagtgccccacaccccaggtgtgtgtgtcctcctgcccggaggacccatggactgtgggaaaaaacgagttctcacagactgttggggaagtcttctatacaaaaaacaggaacttttgtctgccaggggtaccctggaatatgacggtgatcacaagcctgcaacaggaactctgccccagtttcctcctcccctctgctccagctctggggcgctgctttccatggaccaacgttactccaccggcgctcccagggatcaccaatgacaccaccatacagcaggggatcagcggtcttattgacagcctcaatgcccgagacatcagtgttaagatctttgaagattttgcccagtcctggtattggattcttgttgccctgggggtggctctggtcttgagcctactgtttatcttgcttctgcgcctggtggctgggcccctggtgctggtgctgatcctgggagtgctgggcgtgctggcatacggcatctactactgctgggaggagtaccgagtgctgcgggacaagggcgcctccatctcccagctgggtttcaccaccaacctcagtgcctaccagagcgtgcaggagacctggctggccgccctgatcgtgttggcggtgcttgaagccatcctgctgctgatgctcatcttcctgcggcagcggattcgtattgccatcgccctcctgaaggaggccagcaaggctgtgggacagatgatgtctaccatgttctacccactggtcacctttgtcctcctcctcatctgcattgcctactgggccatgactgctctgtacctggctacatcggggcaaccccagtatgtgctctgggcatccaacatcagctcccccggctgtgagaaagtgccaataaatacatcatgcaaccccacggcccaccttgtgaactcctcgtgcccagggctgatgtgcgtcttccagggctactcatccaaaggcctaatccaacgttctgtcttcaatctgcaaatctatggggtcctggggctcttctggacccttaactgggtactggccctgggccaatgcgtcctcgctggagcctttgcctccttctactgggccttccacaagccccaggacatccctaccttccccttaatctctgccttcatccgcacactccgttaccacactgggtcattggcatttggagccctcatcctgacccttgtgcagatagcccgggtcatcttggagtatattgaccacaagctcagaggagtgcagaaccctgtagcccgctgcatcatgtgctgtttcaagtgctgcctctggtgtctggaaaaatttatcaagttcctaaaccgcaatgcatacatcatgatcgccatctacgggaagaatttctgtgtctcagccaaaaatgcgttcatgctactcatgcgaaacattgtcagggtggtcgtcctggacaaagtcacagacctgctgctgttctttgggaagctgctggtggtcggaggcgtgggggtcctgtccttcttttttttctccggtcgcatcccggggctgggtaaagactttaagagcccccacctcaactattactggctgcccatcatgacctccatcctgggggcctatgtcatcgccagcggcttcttcagcgttttcggcatgtgtgtggacacgctcttcctctgcttcctggaagacctggagcggaacaacggctccctggaccggccctactacatgtccaagagccttctaaagattctgggcaagaagaacgaggcgcccccggacaacaagaagaggaagaagtgacagctccggccctgatccaggactgcaccccacccccaccgtccagccatccaacctcacttcgccttacaggtctccattttgtggtaaaaaaaggttttaggccaggcgccgtggctcacgcctgtaatccaacactttgagaggctgaggcgggcggatcacctgagtcaggagttcgagaccagcctggccaacatggtgaaacctccgtctctattaaaaatacaaaaattagccgagagtggtggcatgcacctgtcatcccagctactcgggaggctgaggcaggagaatcgcttgaacccgggaggcagaggttgcagtgagccgagatcgcgccactgcactccaacctgggtgacagactctgtctccaaaacaaaacaaacaaacaaaaagattttattaaagatattttgttaactcagtaaa

SEQ ID NO: 14697 - protein, 710 aa, Homo sapiens
MGGKQRDEDDEAYGKPVKYDPSFRGPIKNRSCTDVICCVLFLLFILGYIVVGIVAWLYGDPRQVLYPRNSTGAYCGMGENKDKPYLLYFNIFSCILSSNIISVAENGLQCPTPQVCVSSCPEDPWTVGKNEFSQTVGEVFYTKNRNFCLPGVPWNMTVITSLQQELCPSFLLPSAPALGRCFPWTNVTPPALPGITNDTTIQQGISGLIDSLNARDISVKIFEDFAQSWYWILVALGVALVLSLLFILLLRLVAGPLVLVLILGVLGVLAYGIYYCWEEYRVLRDKGASISQLGFTTNLSAYQSVQETWLAALIVLAVLEAILLLMLIFLRQRIRIAIALLKEASKAVGQMMSTMFYPLVTFVLLLICIAYWAMTALYLATSGQPQYVLWASNISSPGCEKVPINTSCNPTAHLVNSSCPGLMCVFQGYSSKGLIQRSVFNLQIYGVLGLFWTLNWVLALGQCVLAGAFASFYWAFHKPQDIPTFPLISAFIRTLRYHTGSLAFGALILTLVQIARVILEYIDHKLRGVQNPVARCIMCCFKCCLWCLEKFIKFLNRNAYIMIAIYGKNFCVSAKNAFMLLMRNIVRVVVLDKVTDLLLFFGKLLVVGGVGVLSFFFFSGRIPGLGKDFKSPHLNYYWLPIMTSILGAYVIASGFFSVFGMCVDTLFLCFLEDLERNNGSLDRPYYMSKSLLKILGKKNEAPPDNKKRKK

SEQ ID NO: 14698 - DNA, 2595 bp, Homo sapiens
aatcactccggagactgagccatggggggaaagcagcgggacgaggatgacgaggcctacgggaagccagtcaaatacgacccctcctttcgaggccccatcaagaacagaagctgcacagatgtcatctgctgcgtcctcttcctgctcttcattctaggttacatcgtggtggggattgtggcctggttgtatggagacccccggcaagtcctctaccccaggaactctactggggcctactgtggcatgggggagaacaaagataagccgtatctcctgtacttcaacatcttcagctgcatcctgtccagcaacatcatctcagttgctgagaacggcctacagtgccccacaccccaggtgtgtgtgtcctcctgcccggaggacccatggactgtgggaaaaaacgagttctcacagactgttggggaagtcttctatacaaaaaacaggaacttttgtctgccaggggtaccctggaatatgacggtgatcacaagcctgcaacaggaactctgccccagtttcctcctcccctctgctccagctctggggcgctgctttccatggaccaacgttactccaccggcgctcccagggatcaccaatgacaccaccatacagcaggggatcagcggtcttattgacagcctcaatgcccgagacatcagtgttaagatctttgaagattttgcccagtcctggtattggattcttgttgccctgggggtggctctggtcttgagcctactgtttatcttgcttctgcgcctggtggctgggcccctggtgctggtgctgatcctgggagtgctgggcgtgctggcatacggcatctactactgctgggaggagtaccgagtgctgcgggacaagggcgcctccatctcccagctgggtttcaccaccaacctcagtgcctaccagagcgtgcaggagacctggctggccgccctgatcgtgttggcggtgcttgaagccatcctgctgctgatgctcatcttcctgcggcagcggattcgtattgccatcgccctcctgaaggaggccagcaaggctgtgggacagatgatgtctaccatgttctacccactggtcacctttgtcctcctcctcatctgcattgcctactgggccatgactgctctgtatcctctgcccacgcagccagccactcttggatatgtgctctgggcatccaacatcagctcccccggctgtgagaaagtgccaataaatacatcatgcaaccccacggcccaccttgtgaactcctcgtgcccagggctgatgtgcgtcttccagggctactcatccaaaggcctaatccaacgttctgtcttcaatctgcaaatctatggggtcctggggctcttctggacccttaactgggtactggccctgggccaatgcgtcctcgctggagcctttgcctccttctactgggccttccacaagccccaggacatccctaccttccccttaatctctgccttcatccgcacactccgttaccacactgggtcattggcatttggagccctcatcctgacccttgtgcagatagcccgggtcatcttggagtatattgaccacaagctcagaggagtgcagaaccctgtagcccgctgcatcatgtgctgtttcaagtgctgcctctggtgtctggaaaaatttatcaagttcctaaaccgcaatgcatacatcatgatcgccatctacgggaagaatttctgtgtctcagccaaaaatgcgttcatgctactcatgcgaaacattgtcagggtggtcgtcctggacaaagtcacagacctgctgctgttctttgggaagctgctggtggtcggaggcgtgggggtcctgtccttcttttttttctccggtcgcatcccggggctgggtaaagactttaagagcccccacctcaactattactggctgcccatcatgacctccatcctgggggcctatgtcatcgccagcggcttcttcagcgttttcggcatgtgtgtggacacgctcttcctctgcttcctggaagacctggagcggaacaacggctccctggaccggccctactacatgtccaagagccttctaaagattctgggcaagaagaacgaggcgcccccggacaacaagaagaggaagaagtgacagctccggccctgatccaggactgcaccccacccccaccgtccagccatccaacctcacttcgccttacaggtctccattttgtggtaaaaaaaggttttaggccaggcgccgtggctcacgcctgtaatccaacactttgagaggctgaggcgggcggatcacctgagtcaggagttcgagaccagcctggccaacatggtgaaacctccgtctctattaaaaatacaaaaattagccgagagtggtggcatgcacctgtcatcccagctactcgggaggctgaggcaggagaatcgcttgaacccgggaggcagaggttgcagtgagccgagatcgcgccactgcactccaacctgggtgacagactctgtctccaaaacaaaacaaacaaacaaaaagattttattaaagatattttgttaactcagtaaa

SEQ ID NO: 14699 - protein, 712 aa, Homo sapiens
MGGKQRDEDDEAYGKPVKYDPSFRGPIKNRSCTDVICCVLFLLFILGYIVVGIVAWLYGDPRQVLYPRNSTGAYCGMGENKDKPYLLYFNIFSCILSSNIISVAENGLQCPTPQVCVSSCPEDPWTVGKNEFSQTVGEVFYTKNRNFCLPGVPWNMTVITSLQQELCPSFLLPSAPALGRCFPWTNVTPPALPGITNDTTIQQGISGLIDSLNARDISVKIFEDFAQSWYWILVALGVALVLSLLFILLLRLVAGPLVLVLILGVLGVLAYGIYYCWEEYRVLRDKGASISQLGFTTNLSAYQSVQETWLAALIVLAVLEAILLLMLIFLRQRIRIAIALLKEASKAVGQMMSTMFYPLVTFVLLLICIAYWAMTALYPLPTQPATLGYVLWASNISSPGCEKVPINTSCNPTAHLVNSSCPGLMCVFQGYSSKGLIQRSVFNLQIYGVLGLFWTLNWVLALGQCVLAGAFASFYWAFHKPQDIPTFPLISAFIRTLRYHTGSLAFGALILTLVQIARVILEYIDHKLRGVQNPVARCIMCCFKCCLWCLEKFIKFLNRNAYIMIAIYGKNFCVSAKNAFMLLMRNIVRVVVLDKVTDLLLFFGKLLVVGGVGVLSFFFFSGRIPGLGKDFKSPHLNYYWLPIMTSILGAYVIASGFFSVFGMCVDTLFLCFLEDLERNNGSLDRPYYMSKSLLKILGKKNEAPPDNKKRKK

SEQ ID NO: 14700 - DNA, 2569 bp, Homo sapiens
agggttccttgtgggcactgaggagggagagccgagggctgggcaggagtctgggaaggagcgggtggggtccactttccccaggtgcgctggactctgtccctccatggctcatggacaatgattgacctgaagccgctccaggaagtctactcgggagtcctcactgcctgctcccctatggccctaagggactcaagcctctcctcgagaaggtccctcataggggttccttccccttcagaccagaagaccaggggggcctccgcagaagcggtcgccatagtcaaacctgtcagaggaaaacaggagcttgtgggacctggacccagccaccaagagcccaccccgaagaccctgtggatcctgctccctgagagggacccgacacccaacctatcttctccagatgggatctgagccccttgtatgttctatggactttcagcatcagcattgcctggggactttttagaaatgcagaatcctgggccccatcccaagcctactgattcaaaatctctctgggaggcacaggactgtttccccaagtcctccaggaaatacttatgtacactgaaatctgagaagctctgcactactccatgcctggacaccaggtacatgccagccttcaggtcccaggtttgctgcatctcccaccccctggcagagcccctagagacccctagagtctcaccctagctcctccccagtccggatgtctcgggaactgaagaaggcgatgcgtggaaatcgcaggtcttggtgcagcatgaagacccggacgggaatgatgttggggtcacacagcctcagcatcagagatcagctccccgacatacctgtgggacaggaatccatggttctgaaggagccacccggcaggaatgggcgatatggaacaggagaggggccaggactgcaggaagagccagaggtacaggagtggcaaggaactcaaggcatgattcggggcaagagcacccacacatatctggacaccagagggaggagaggagccagctatctaaggagggtgttaaggtgctcccggtgacttactcgcagatgaaggtcccctgtgggatggtctgcagggcgcggaccccccagcccatcttggctgttcggtagagctgtagccgcaccctgggggtaggagagatggcgctgttgggtggaggccctggaaaagccccaggggcagggaggaaagggtgaggtggggagagggtgggctgtggagcagggcctcacttgatgccactctgtacgacccggttcttgcagtttctccagcatgagcacgcctggttacactcgaaaatcagcggaggctcaatcttgttaaattcctggagcaatcgcccatcctagggtgcggaggggaggatagtggtttctctgtggggcccacctcagctgcccacccaggaaccccaagactctacagagacagggaagttggggttggggaggtcacacaggctctgagatccgagagcacgaaatgcaggagcatcatccctggtttgcatagacctgggcacacgcccatcgctgtcccagccacatcccaggattcccaggccttgcccagtcctctcagtcacttcccccacagggtaggaggtgagggacatggtcccagggagctggtttattggaggctggctcctctgaaggaggggccgggtgtctgtggccaaggcaaggggcacgcaccttgtcataccagcaccggatgctgagctggccgcacaggcagttggagctagagcagtcgtccacacacgtgcagtgctggggcgaggaggcagaggtcagctcaaccccatgatcggtctgggcccctctactcttgatgccccctgaccccctaaccactgtcctttctttggggtccatgtgttacaacagtgggtggtgatggtcctagggtgacgggtaatcagtatggtggtgtccccagggctactgggagctcatatgataccttgctgtgacctaggaaaaggatccctcccctggtggggatgcgaccccacaccagggctccctttcagccaacccttccttggccaggtgcctttgctggtttgaagcttgtccaactgtacttggcagctctcggtgtccttttggggaggccccgggccccctactcacctgcaggtgggtgatgttgcgatcgatgttcatggtggacgtctcgcagttctctgagatgtacttgtaatcctcagggcagggctccccatccacaccgttgacacagggaatgggcacgttctcatagccccgagccacgtccctgcagaagacgggaagaaggggctgggaagctggaaaagggggtgaggagctactccaggtataaggaagagagttggggaggttcctggggctgggggcaggggagtaaggttgccaggtaagatgcaggacagcgagttaacatagaattttagataaacaagaaatagctttttagtatgtcccaaaaattacacaggacattctcacactaaaaaagtatgcatctgtgcatctgaaattccagttt

SEQ ID NO: 14701 - protein, 112 aa, Homo sapiens
MSRELKKAMRGNRRSWCSMKTRTGMMLGSHSLSIRDQLPDIPVGQESMVLKEPPGRNGRYGTGEGPGLQEEPEVQEWQGTQGMIRGKSTHTYLDTRGRRGASYLRRVLRCSR

SEQ ID NO: 14702 - DNA, 2899 bp, Homo sapiens
tttctcttcattcttttctttctcgtttctttctctttatcaagtttcagaataatcagttcctgtcttaatctctgaaagtgtccagtgaggctttttattaactcttgggttgtcatacattggatgtgttttagtcatttattggcattcttctcagtctttgaattattccatcattgtccagaagaagcccctttaagaggcctctgtggctgtgacatgacccagtggcccagtggcctttgagagcctcctgacctttcagcacatttcctgcccccaactcagaatccaccatttctctaagaaactctgcttcctttatgggaaacttttttttttttttttgagacggagtctcactctgttgcccaggctggagtgcaatggcgtgatcacagcttactgcaagctccgcctcccaggttcacgccattctcctgcctcagcctcccgagtagctgggattacaggcgcccaccaccatgcccggctaatttttgtatttttagtagagacggggtttcaccatattggccaggctgatcttgaactcctgacctcgtgagccacagcgcccggccagaagcattttttagagaatacaatctatgttcctaggagtgtttattgttattgggttgtcgctgcttctaggacttttgagtgggcagacttaggaaatttttgttcgttttttcttttaagagacagggtcttgctatgtcacccaggctgaagtacagtagcagttcacagacagtcatagctctctgcagcctcgaaatcctgggctcaagcaaccctcccatctcagtcacatgagtagctgggactacaggcatgcacctccatgaccagctcctggctgtattttttggaaagagaacaattactttattttctctctggcatcagatggtagacgctactagtcccatttttgtttgtttgttttttgagacggagtcttgctctgtcgcccaggctggagtgcagtggcacgatcttggctcactgcaagctccgcctcccgggttcacgccattctgcctcagcctccctatgctgggattacaggcatgagccaccgcgcccgaccctactagtcccattttttagatgaagaaactgcgacccagagacgttaagtgacttacccagggtcccacagcttgtgaatggtggagctgggattcacacacacagccaatcttgaccatttgctgctttggtgagcagggccagctgcccccaccctcactcccttcccacccacaggacagtggggggtggacgcccatcatctgggctgcagagcacaagcacatcgaggtgatccgcatgctactgacgcggggcgccgacgtcaccctcactgacaacgaggagaacatctgcctgcactgggcctccttcacgggcagcgccgccatcgccgaagtccttctgaatgcgcgctgtgacctccatgctgtcaactaccatggggacacccccctgcacatcgcagctcgggagagctaccatgactgcgtgctgttattcctgtcacgtggggccaaccctgagctgcggaacaaagagggggacacagcatgggacctgactcccgagcgctccgacgtgtggtttgcgcttcaactcaaccgcaagctccgacttggggtgggaaatcgggccatccgcacagagaagatcatctgccgggacgtggctcggggctatgagaacgtgcccattccctgtgtcaacggtgtggatggggagccctgccctgaggattacaagtacatctcagagaactgcgagacgtccaccatgaacatcgatcgcaacatcacccacctgcagcactgcacgtgtgtggacgactgctctagctccaactgcctgtgcggccagctcagcatccggtgctggtatgacaaggatgggcgattgctccaggaatttaacaagattgagcctccgctgattttcgagtgtaaccaggcgtgctcatgctggagaaactgcaagaaccgggtcgtacagagtggcatcaaggtgcggctacagctctaccgaacagccaagatgggctggggggtccgcgccctgcagaccatcccacaggggaccttcatctgcgagtatgtcggggagctgatctctgatgctgaggctgatgtgagagaggatgattcttacctcttcgacttagacaacaaggatggagaggtgtactgcatagatgcccgttactatggcaacatcagccgcttcatcaaccacctgtgtgaccccaacatcattcccgtccgggtcttcatgctgcaccaagacctgcgatttccacgcatcgccttcttcagttcccgagacatccggactggggaggagctagggtttgactatggcgaccgcttctgggacatcaaaagcaaatatttcacctgccaatgtggctctgagaagtgcaagcactcagccgaagccattgccctggagcagagccgtctggcccgcctggacccacaccctgagctgctgcccgagctcggctccctgccccctgtcaacacatgagaacggaccacaccctctctccccagcatggatggccacagctcagccgcctcctctgccaccagctgctcgcagcccatgcctgggggtgctgccatcttctctccccaccaccctttcacacattcctgaccagagatcccagccaggccctggaggtctgacagcccctccctcccagagctggttcctccctgggagggcaacttcagggctggccaccccccgtgttccccatcctcagttgaagtttgatgaattgaagtcgggcctctatgccaactggttccttttgttctcaataaatgttgggtttggtaataaa

SEQ ID NO: 14703 - protein, 408 aa, Homo sapiens [sequence omitted]

SEQ ID NO: 14704 - DNA, 3866 bp, Homo sapiens
gcaagcggcgatggcggcggcggcgggagctgcagcggcggcggccgccgagggggaggcccccgctgagatgggggcgctgctgctggagaaggaaaccagaggagccaccgagagagttcatggctctttgggggacacccctcgtagtgaagaaaccctgcccaaggccacccccgactccctggagcctgctggcccctcatctccagcctctgtcactgtcactgttggtgatgagggggctgacacccctgtaggggctacaccactcattggggatgaatctgagaatcttgagggagatggggacctccgtgggggccggatcctgctgggccatgccacaaagtcattcccctcttcccccagcaaggggggttcctgtcctagccgggccaagatgtcaatgacaggggcgggaaaatcacctccatctgtccagagtttggctatgaggctactgagtatgccaggagcccagggagctgcagcagcagggtctgaaccccctccagccaccacgagcccagagggacagcccaaggtccaccgagcccgcaaaaccatgtccaaaccaggaaatggacagcccccggtccctgagaagcggccccctgaaatacagcatttccgcatgagtgatgatgtccactcactgggaaaggtgacctcagatctggccaaaaggaggaagctgaactcaggaggtggcctgtcagaggagttaggttctgcccggcgttcaggagaagtgaccctgacgaaaggggaccccgggtccctggaggagtgggagacggtggtgggtgatgacttcagtctctactatgattcctactctgtggatgagcgcgtggactccgacagcaagtctgaagttgaagctctaactgaacaactaagtgaagaggaggaggaggaagaggaggaagaagaagaagaggaagaggaggaggaagaggaagaagaagaggaagatgaggagtcagggaatcagtcagataggagtggttccagtggccggcgcaaggccaagaagaaatggcgaaaagacagcccatgggtgaagccgtctcggaaacggcgcaagcgggagcctccgcgggccaaggagccacgaggggtgtccaatgacacatcttcgctggagacagagcgagggtttgaggagttgcccctgtgcagctgccgcatggaggcacccaagattgaccgcatcagcgagagggcggggcacaagtgcatggccactgagagtgtggacggagagctgtcaggctgcaatgccgccatcctcaagcgggagaccatgaggccatccagccgtgtggccctgatggtgctctgtgagacccaccgcgcccgcatggtcaaacaccactgctgcccgggctgcggctacttctgcacggcgggcaccttcctggagtgccaccctgacttccgtgtggcccaccgcttccacaaggcctgtgtgtctcagctgaatgggatggtcttctgtccccactgtggggaggatgcttctgaagctcaagaggtgaccatcccccggggtgacggggtgaccccaccggccggcactgcagctcctgcacccccacccctgtcccaggatgtccccgggagagcagacacttctcagcccagtgcccggatgcgagggcatggggaaccccggcgcccgccctgcgatcccctggctgacaccattgacagctcagggccctccctgaccctgcccaatgggggctgcctttcagccgtggggctgccactggggccaggccgggaggccctggaaaaggccctggtcatccaggagtcagagaggcggaagaagctccgtttccaccctcggcagttgtacctgtccgtgaagcagggcgagctgcagaaggtgatcctgatgctgttggacaacctggaccccaacttccagagcgaccagcagagcaagcgcacgcccctgcatgcagccgcccagaagggctccgtggagatctgccatgtgctgctgcaggctggagccaacataaatgcagtggacaaacagcagcggacgccactgatggaggccgtggtgaacaaccacctggaggtagcccgttacatggtgcagcgtggtggctgtgtctatagcaaggaggaggacggttccacctgcctccaccacgcagccaaaatcgggaacttggagatggtcagcctgctgctgagcacaggacaggtggacgtcaacgcccaggacagtggggggtggacgcccatcatctgggctgcagagcacaagcacatcgaggtgatccgcatgctactgacgcggggcgccgacgtcaccctcactgacaacgaggagaacatctgcctgcactgggcctccttcacgggcagcgccgccatcgccgaagtccttctgaatgcgcgctgtgacctccatgctgtcaactaccatggggacacccccctgcacatcgcagctcgggagagctaccatgactgcgtgctgttattcctgtcacgtggggccaaccctgagctgcggaacaaagagggggacacagcatgggacctgactcccgagcgctccgacgtgtggtttgcgcttcaactcaaccgcaagctccgacttggggtgggaaatcgggccatccgcacagagaagatcatctgccgggacgtggctcggggctatgagaacgtgcccattccctgtgtcaacggtgtggatggggagccctgccctgaggattacaagtacatctcagagaactgcgagacgtccaccatgaacatcgatcgcaacatcacccacctgcagcactgcacgtgtgtggacgactgctctagctccaactgcctgtgcggccagctcagcatccggtgctggtatgacaaggatgggcgattgctccaggaatttaacaagattgagcctccgctgattttcgagtgtaaccaggcgtgctcatgctggagaaactgcaagaaccgggtcgtacagagtggcatcaaggtgcggctacagctctaccgaacagccaagatgggctggggggtccgcgccctgcagaccatcccacaggggaccttcatctgcgagtatgtcggggagctgatctctgatgctgaggctgatgtgagagaggatgattcttacctcttcgacttagacaacaaggatggagaggtgtactgcatagatgcccgttactatggcaacatcagccgcttcatcaaccacctgtgtgaccccaacatcattcccgtccgggtcttcatgctgcaccaagacctgcgatttccacgcatcgccttcttcagttcccgagacatccggactggggaggagctagggtttgactatggcgaccgcttctgggacatcaaaagcaaatatttcacctgccaatgtggctctgagaagtgcaagcactcagccgaagccattgccctggagcagagccgtctggcccgcctggacccacaccctgagctgctgcccgagctcggctccctgccccctgtcaacacatgagaacggaccacaccctctctccccagcatggatggccacagctcagccgcctcctctgccaccagctgctcgcagcccatgcctgggggtgctgccatcttctctccccaccaccctttcacacattcctgaccagagatcccagccaggccctggaggtctgacagcccctccctcccagagctggttcctccctgggagggcaacttcagggctggccaccccccgtgttccccatcctcagttgaagtttgatgaattgaagtcgggcctctatgccaactggttccttttgttctcaataaatgttgggtttggtaataaa

SEQ ID NO: 14705 - protein, 1176 aa, Homo sapiens
MAAAAGAAAAAAAEGEAPAEMGALLLEKETRGATERVHGSLGDTPRSEETLPKATPDSLEPAGPSSPASVTVTVGDEGADTPVGATPLIGDESENLEGDGDLRGGRILLGHATKSFPSSPSKGGSCPSRAKMSMTGAGKSPPSVQSLAMRLLSMPGAQGAAAAGSEPPPATTSPEGQPKVHRARKTMSKPGNGQPPVPEKRPPEIQHFRMSDDVHSLGKVTSDLAKRRKLNSGGGLSEELGSARRSGEVTLTKGDPGSLEEWETVVGDDFSLYYDSYSVDERVDSDSKSEVEALTEQLSEEEEEEEEEEEEEEEEEEEEEEEEDEESGNQSDRSGSSGRRKAKKKWRKDSPWVKPSRKRRKREPPRAKEPRGVSNDTSSLETERGFEELPLCSCRMEAPKIDRISERAGHKCMATESVDGELSGCNAAILKRETMRPSSRVALMVLCETHRARMVKHHCCPGCGYFCTAGTFLECHPDFRVAHRFHKACVSQLNGMVFCPHCGEDASEAQEVTIPRGDGVTPPAGTAAPAPPPLSQDVPGRADTSQPSARMRGHGEPRRPPCDPLADTIDSSGPSLTLPNGGCLSAVGLPLGPGREALEKALVIQESERRKKLRFHPRQLYLSVKQGELQKVILMLLDNLDPNFQSDQQSKRTPLHAAAQKGSVEICHVLLQAGANINAVDKQQRTPLMEAVVNNHLEVARYMVQRGGCVYSKEEDGSTCLHHAAKIGNLEMVSLLLSTGQVDVNAQDSGGWTPIIWAAEHKHIEVIRMLLTRGADVTLTDNEENICLHWASFTGSAAIAEVLLNARCDLHAVNYHGDTPLHIAARESYHDCVLLFLSRGANPELRNKEGDTAWDLTPERSDVWFALQLNRKLRLGVGNRAIRTEKIICRDVARGYENVPIPCVNGVDGEPCPEDYKYISENCETSTMNIDRNITHLQHCTCVDDCSSSNCLCGQLSIRCWYDKDGRLLQEFNKIEPPLIFECNQACSCWRNCKNRVVQSGIKVRLQLYRTAKMGWGVRALQTIPQGTFICEYVGELISDAEADVREDDSYLFDLDNKDGEVYCIDARYYGNISRFINHLCDPNIIPVRVFMLHQDLRFPRIAFFSSRDIRTGEELGFDYGDRFWDIKSKYFTCQCGSEKCKHSAEAIALEQSRLARLDPHPELLPELGSLPPVNT

SEQ ID NO: 14706 - DNA, 3968 bp, Homo sapiens
gcaagcggcgatggcggcggcggcgggagctgcagcggcggcggccgccgagggggaggcccccgctgagatgggggcgctgctgctggagaaggaaaccagaggagccaccgagagagttcatggctctttgggggacacccctcgtagtgaagaaaccctgcccaaggccacccccgactccctggagcctgctggcccctcatctccagcctctgtcactgtcactgttggtgatgagggggctgacacccctgtaggggctacaccactcattggggatgaatctgagaatcttgagggagatggggacctccgtgggggccggatcctgctgggccatgccacaaagtcattcccctcttcccccagcaaggggggttcctgtcctagccgggccaagatgtcaatgacaggggcgggaaaatcacctccatctgtccagagtttggctatgaggctactgagtatgccaggagcccagggagctgcagcagcagggtctgaaccccctccagccaccacgagcccagagggacagcccaaggtccaccgagcccgcaaaaccatgtccaaaccaggaaatggacagcccccggtccctgagaagcggccccctgaaatacagcatttccgcatgagtgatgatgtccactcactgggaaaggtgacctcagatctggccaaaaggaggaagctgaactcaggaggtggcctgtcagaggagttaggttctgcccggcgttcaggagaagtgaccctgacgaaaggggaccccgggtccctggaggagtgggagacggtggtgggtgatgacttcagtctctactatgattcctactctgtggatgagcgcgtggactccgacagcaagtctgaagttgaagctctaactgaacaactaagtgaagaggaggaggaggaagaggaggaagaagaagaagaggaagaggaggaggaagaggaagaagaagaggaagatgaggagtcagggaatcagtcagataggagtggttccagtggccggcgcaaggccaagaagaaatggcgaaaagacagcccatgggtgaagccgtctcggaaacggcgcaagcgggagcctccgcgggccaaggagccacgaggagtgaatggtgtgggctcctcaggccccagtgagtacatggaggtccctctggggtccctggagctgcccagcgaggggaccctctcccccaaccacgctggggtgtccaatgacacatcttcgctggagacagagcgagggtttgaggagttgcccctgtgcagctgccgcatggaggcacccaagattgaccgcatcagcgagagggcggggcacaagtgcatggccactgagagtgtggacggagagctgtcaggctgcaatgccgccatcctcaagcgggagaccatgaggccatccagccgtgtggccctgatggtgctctgtgagacccaccgcgcccgcatggtcaaacaccactgctgcccgggctgcggctacttctgcacggcgggcaccttcctggagtgccaccctgacttccgtgtggcccaccgcttccacaaggcctgtgtgtctcagctgaatgggatggtcttctgtccccactgtggggaggatgcttctgaagctcaagaggtgaccatcccccggggtgacggggtgaccccaccggccggcactgcagctcctgcacccccacccctgtcccaggatgtccccgggagagcagacacttctcagcccagtgcccggatgcgagggcatggggaaccccggcgcccgccctgcgatcccctggctgacaccattgacagctcagggccctccctgaccctgcccaatgggggctgcctttcagccgtggggctgccactggggccaggccgggaggccctggaaaaggccctggtcatccaggagtcagagaggcggaagaagctccgtttccaccctcggcagttgtacctgtccgtgaagcagggcgagctgcagaaggtgatcctgatgctgttggacaacctggaccccaacttccagagcgaccagcagagcaagcgcacgcccctgcatgcagccgcccagaagggctccgtggagatctgccatgtgctgctgcaggctggagccaacataaatgcagtggacaaacagcagcggacgccactgatggaggccgtggtgaacaaccacctggaggtagcccgttacatggtgcagcgtggtggctgtgtctatagcaaggaggaggacggttccacctgcctccaccacgcagccaaaatcgggaacttggagatggtcagcctgctgctgagcacaggacaggtggacgtcaacgcccaggacagtggggggtggacgcccatcatctgggctgcagagcacaagcacatcgaggtgatccgcatgctactgacgcggggcgccgacgtcaccctcactgacaacgaggagaacatctgcctgcactgggcctccttcacgggcagcgccgccatcgccgaagtccttctgaatgcgcgctgtgacctccatgctgtcaactaccatggggacacccccctgcacatcgcagctcgggagagctaccatgactgcgtgctgttattcctgtcacgtggggccaaccctgagctgcggaacaaagagggggacacagcatgggacctgactcccgagcgctccgacgtgtggtttgcgcttcaactcaaccgcaagctccgacttggggtgggaaatcgggccatccgcacagagaagatcatctgccgggacgtggctcggggctatgagaacgtgcccattccctgtgtcaacggtgtggatggggagccctgccctgaggattacaagtacatctcagagaactgcgagacgtccaccatgaacatcgatcgcaacatcacccacctgcagcactgcacgtgtgtggacgactgctctagctccaactgcctgtgcggccagctcagcatccggtgctggtatgacaaggatgggcgattgctccaggaatttaacaagattgagcctccgctgattttcgagtgtaaccaggcgtgctcatgctggagaaactgcaagaaccgggtcgtacagagtggcatcaaggtgcggctacagctctaccgaacagccaagatgggctggggggtccgcgccctgcagaccatcccacaggggaccttcatctgcgagtatgtcggggagctgatctctgatgctgaggctgatgtgagagaggatgattcttacctcttcgacttagacaacaaggatggagaggtgtactgcatagatgcccgttactatggcaacatcagccgcttcatcaaccacctgtgtgaccccaacatcattcccgtccgggtcttcatgctgcaccaagacctgcgatttccacgcatcgccttcttcagttcccgagacatccggactggggaggagctagggtttgactatggcgaccgcttctgggacatcaaaagcaaatatttcacctgccaatgtggctctgagaagtgcaagcactcagccgaagccattgccctggagcagagccgtctggcccgcctggacccacaccctgagctgctgcccgagctcggctccctgccccctgtcaacacatgagaacggaccacaccctctctccccagcatggatggccacagctcagccgcctcctctgccaccagctgctcgcagcccatgcctgggggtgctgccatcttctctccccaccaccctttcacacattcctgaccagagatcccagccaggccctggaggtctgacagcccctccctcccagagctggttcctccctgggagggcaacttcagggctggccaccccccgtgttccccatcctcagttgaagtttgatgaattgaagtcgggcctctatgccaactggttccttttgttctcaataaatgttgggtttggtaataaa

SEQ ID NO: 14707 - protein, 1210 aa, Homo sapiens
MAAAAGAAAAAAAEGEAPAEMGALLLEKETRGATERVHGSLGDTPRSEETLPKATPDSLEPAGPSSPASVTVTVGDEGADTPVGATPLIGDESENLEGDGDLRGGRILLGHATKSFPSSPSKGGSCPSRAKMSMTGAGKSPPSVQSLAMRLLSMPGAQGAAAAGSEPPPATTSPEGQPKVHRARKTMSKPGNGQPPVPEKRPPEIQHFRMSDDVHSLGKVTSDLAKRRKLNSGGGLSEELGSARRSGEVTLTKGDPGSLEEWETVVGDDFSLYYDSYSVDERVDSDSKSEVEALTEQLSEEEEEEEEEEEEEEEEEEEEEEEEDEESGNQSDRSGSSGRRKAKKKWRKDSPWVKPSRKRRKREPPRAKEPRGVNGVGSSGPSEYMEVPLGSLELPSEGTLSPNHAGVSNDTSSLETERGFEELPLCSCRMEAPKIDRISERAGHKCMATESVDGELSGCNAAILKRETMRPSSRVALMVLCETHRARMVKHHCCPGCGYFCTAGTFLECHPDFRVAHRFHKACVSQLNGMVFCPHCGEDASEAQEVTIPRGDGVTPPAGTAAPAPPPLSQDVPGRADTSQPSARMRGHGEPRRPPCDPLADTIDSSGPSLTLPNGGCLSAVGLPLGPGREALEKALVIQESERRKKLRFHPRQLYLSVKQGELQKVILMLLDNLDPNFQSDQQSKRTPLHAAAQKGSVEICHVLLQAGANINAVDKQQRTPLMEAVVNNHLEVARYMVQRGGCVYSKEEDGSTCLHHAAKIGNLEMVSLLLSTGQVDVNAQDSGGWTPIIWAAEHKHIEVIRMLLTRGADVTLTDNEENICLHWASFTGSAAIAEVLLNARCDLHAVNYHGDTPLHIAARESYHDCVLLFLSRGANPELRNKEGDTAWDLTPERSDVWFALQLNRKLRLGVGNRAIRTEKIICRDVARGYENVPIPCVNGVDGEPCPEDYKYISENCETSTMNIDRNITHLQHCTCVDDCSSSNCLCGQLSIRCWYDKDGRLLQEFNKIEPPLIFECNQACSCWRNCKNRVVQSGIKVRLQLYRTAKMGWGVRALQTIPQGTFICEYVGELISDAEADVREDDSYLFDLDNKDGEVYCIDARYYGNISRFINHLCDPNIIPVRVFMLHQDLRFPRIAFFSSRDIRTGEELGFDYGDRFWDIKSKYFTCQCGSEKCKHSAEAIALEQSRLARLDPHPELLPELGSLPPVNT

SEQ ID NO: 14708 - DNA, 223 bp, Homo sapiens
cctgcccccagccccaggaacctccccaactctcttccttatacctggagtagctcctcacccccttttccagcttcccagccccttcttcccgtcttctgcagggacgtggctcggggctatgagaacgtgcccattccctgtgtcaacggtgtggatggggagccctgccctgcaggtgagtagggggcccggggcctccccaaaaggacaccgagagctg

SEQ ID NO: 14709 - protein, 33 aa, Homo sapiens
MRTCPFPVSTVWMGSPALQVSRGPGASPKGHRE

SEQ ID NO: 14710 - DNA, 1457 bp, Homo sapiens
gcaagcggcgatggcggcggcggcgggagctgcagcggcggcggccgccgagggggaggcccccgctgagatgggggcgctgctgctggagaaggaaaccagaggagccaccgagagagttcatggctctttgggggacacccctcgtagtgaagaaaccctgcccaaggccacccccgactccctggagcctgctggcccctcatctccagcctctgtcactgtcactgttggtgatgagggggctgacacccctgtaggggctacaccactcattggggatgaatctgagaatcttgagggagatggggacctccgtgggggccggatcctgctgggccatgccacaaagtcattcccctcttcccccagcaaggggggttcctgtcctagccgggccaagatgtcaatgacaggggcgggaaaatcacctccatctgtccagagtttggctatgaggctactgagtatgccaggagcccagggagctgcagcagcagggtctgaaccccctccagccaccacgagcccagagggacagcccaaggtccaccgagcccgcaaaaccatgtccaaaccaggaaatggacaggtgagtgggatgggagagatgggataatcaaccataaacctttggtgagctcttttacagtttcacttaaggcttctactccatttactcattcacatatttaagcaaggggctgctgtgtgtcaaatattaggctgtgcttgatctgtgaaccaacagacaggttcctctcttcctgcagtttacattcttgggtggtgaaagtttgatgttaaagagtcaattatatagttaatgtcttaattactcttatgataatgacaaggtaagggaatttcaaaccactcttcctttctacctcaaagcaagcccttggggaactcatctgtcactgctctatttgtaaagtttttcctgggaatcccagtgggaaaggagatgagggccacagaaataatagaggagggaagtgacaagggcaccagaagctttatgaccaagttctagggttcttgggtcatacctattgttgacctaaaggaaaaaactgaggcaaacttaacattaagtaaagtatatttggtcaggttttgaggacagcctttaggagcaaagattcaagttgccgtgaaaatacactctgattagcagcagttataagtaggggtttttttgtttgttttgttttgtttttgaagacagtttcactatgttgcccaggctggtctcaaactgctgggcttcagcaatcttcctgccttgacctcgcaaagtgctgggattacaggtgcaagccaccacaaccagcccacaagtaggtttttaaaggaaaagaagattggatgacgtgaagatattgaaaaaaaacaggctgactctgggcacactgcgtaggagttagccctgctctggaaggagccgcaaa

SEQ ID NO: 14711 - protein, 202 aa, Homo sapiens
MAAAAGAAAAAAAEGEAPAEMGALLLEKETRGATERVHGSLGDTPRSEETLPKATPDSLEPAGPSSPASVTVTVGDEGADTPVGATPLIGDESENLEGDGDLRGGRILLGHATKSFPSSPSKGGSCPSRAKMSMTGAGKSPPSVQSLAMRLLSMPGAQGAAAAGSEPPPATTSPEGQPKVHRARKTMSKPGNGQVSGMGEMG

SEQ ID NO: 14712 - DNA, 2150 bp, Homo sapiens
cccctgagagcggcctcggagatggctgtgactgtcctaagctgggagctgcaagggagaattcctgtcattcctggcctcagttctgcagggaccgagggcgagacacgcctgggcccaggtgtggcgtctctgtccccatctggttttagctggccactgccccaacccaggcatttcactgggcgcagtgcggacaggcttccgctttggtcatggggacaaggtccgctatcgctgctcctcgaatcttgtgctcacggggtcttcggagcgggagtgccagggcaacggggtctggagtggaacggagcccatctgccgccaaccctactcttatgacttccctgaggacgtggcccctgccctgggcacttccttctcccacatgcttggggccaccaatcccacccagaagacaaaggatcttcagctttgagatcaatgtgagcgttgccattatcacctttgcctcagagcccaaagtcctcatgtctgtcctgaacgacaactcccgggatatgactgaggtgatcagcagcctggaaaatgccaactataaagatcatgaaaatggaactgggactaacacctatgcggccttaaacagtgtctatctcatgatgaacaaccaaatgcgactcctcggcatggaaacgatggcctggcaggaaatccgacatgccatcatccttctgacagatggaaagtccaatatgggtggctctcccaagacagctgttgaccatatcagagagatcctgaacatcaaccagaagaggaatgactatctggacatctatgccatcggggtgggcaagctggatgtggactggagagaactgaatgagctagggtccaagaaggatggtgagaggcatgccttcattctgcaggacacaaaggctctgcaccaggtctttgaacatatgctggatgtctccaagctcacagacaccatctgcggggtggggaacatgtcagcaaacgcctctgaccaggagaggacaccctggcatgtcactattaagcccaagagccaagagacctgccggggggccctcatctccgaccaatgggtcctgacagcagctcattgcttccgcgatggcaacgaccactccctgtggagggtcaatgtgggagaccccaaatcccagtggggcaaagaattccttattgagaaggcggtgatctccccagggtttgatgtctttgccaaaaagaaccagggaatcctggagttctatggtgatgacatagctctgctgaagctggcccagaaagtaaagatgtccacccatgccaggcccatctgccttccctgcacgatggaggccaatctggctctgcggagacctcaaggcagcacctgtagggaccatgagaatgaactgctgaacaaacagagtgttcctgctcattttgtcgccttgaatgggagcaaactgaacattaaccttaagatgggagtggagtggacaagctgtgccgaggttgtctcccaagaaaaaaccatgttccccaacttgacagatgtcagggaggtggtgacagaccagttcctatgcagtgggacccaggaggatgagagtccctgcaagggagaatctgggggagcagttttccttgagcggagattcaggttttttcaggtgggtctggtgagctggggtctttacaacccctgccttggctctgctgacaaaaactcccgcaaaagggcccctcgtagcaaggtcccgccgccacgagactttcacatcaatctcttccgcatgcagccctggctgaggcagcacctgggggatgtcctgaattttttacccctctagccatggccactgagccctctgctgccctgccagaatctgccgcccctccatcttctacctctgaatggccacccttagaccctgtgatccatcctctctcctagctgagtaaatccgggtctctaggatgccagaggcagcgcacacaagctgggaaatcctcagggctcctaccagcaggactgcctcgctgccccacctcccgctccttggcctgtccccagattccttccctggttgacttgactcatgcttgtttcactttcacatggaatttcccagttatgaaattaataaaaatcaatggtttccaca

SEQ ID NO: 14713 - protein, 539 aa, Homo sapiens
MGTRSAIAAPRILCSRGLRSGSARATGSGVERSPSAANPTLMTSLRTWPLPWALPSPTCLGPPIPPRRQRIFSFEINVSVAIITFASEPKVLMSVLNDNSRDMTEVISSLENANYKDHENGTGTNTYAALNSVYLMMNNQMRLLGMETMAWQEIRHAIILLTDGKSNMGGSPKTAVDHIREILNINQKRNDYLDIYAIGVGKLDVDWRELNELGSKKDGERHAFILQDTKALHQVFEHMLDVSKLTDTICGVGNMSANASDQERTPWHVTIKPKSQETCRGALISDQWVLTAAHCFRDGNDHSLWRVNVGDPKSQWGKEFLIEKAVISPGFDVFAKKNQGILEFYGDDIALLKLAQKVKMSTHARPICLPCTMEANLALRRPQGSTCRDHENELLNKQSVPAHFVALNGSKLNINLKMGVEWTSCAEVVSQEKTMFPNLTDVREVVTDQFLCSGTQEDESPCKGESGGAVFLERRFRFFQVGLVSWGLYNPCLGSADKNSRKRAPRSKVPPPRDFHINLFRMQPWLRQHLGDVLNFLPL

SEQ ID NO: 14714 - DNA, 441 bp, Homo sapiens
atccgctagccgcgcaggcgtggaggccaggaggctggggcccctgggctgcgtggaaaaagggctctttggcccaggagaattggggggtggggggtctggggcagaaaggtaagagtgggaggctgagcagatgcacacatcctgagagagggaagatgattccttggagagacttgctcttgagagtgcaagaatctggagctgggaaaagggttcttggaggccaggggaatacggggtcccagagaaagatttccttctcttagaagtgcatgtatatgtgggggggatagggcacttagaaaagaaagaacacaagaagggctgttgggagggagggagaggagtagagacatacagtattttttaagaaaaaacatattttttaggattttttctggagtttggggttttagtttttctgcttttgttttccac

SEQ ID NO: 14715 - protein, 36 aa, Homo sapiens
MIPWRDLLLRVQESGAGKRVLGGQGNTGSQRKISFS

SEQ ID NO: 14716 - DNA, 1866 bp, Homo sapiens
cgcccacgcggagccggccccgcgcgcgcgcgcgtcccgtgcatccccgcgcctgcgcgctgcccaggccctgcccgtgtgtgggggtcgctgccggccccgggggggggtggggaaaataagggattaaaaaaacagcgcgcggaaccgggccagggttgcccacccccgccacaatggcctctggggtggaagtcctgcgcttccagctgcccggccacgaggccgcaacgctacggaacatgaaccagctccgggcagaggagcggttctgcgacgtgaccattgtggccgacagcctcaagtttcgaggccacaaggtcatcttggccgcctgctcacccttcctgcgggaccagttcctgctgaaccccagctcggagctgcaggtctccctgatgcacagtgcacgcatcgtggccgacttgctcctctcctgctacacgggcgccttggaattcgctgttagggacatcgtcaactaccttacagccgcctcctacctgcagatggagcacgtggtggagaaatgccggaatgccctcagccagttcattgagcccaaaataggcctcaaagaggatggggtcagtgaggctagccttgtgagcagcatcagcgccaccaagtccctcctccctccagccaggaccccaaagccagccccgaagcccccacccccacctcctctaccccctccactcctgcggccagtgaagctggagttcccactggatgaagacttggagctgaaagccgaggaagaggatgaggatgaggatgaggacgtgtctgacatctgcatcgtcaaggtggagtcggccctggaggtggcacaccggctcaaaccccctggaggcctgggagggggtctgggcattggaggctccgtgggtggccaccttggggagctggcccagagcagcgttccccccagcactgtagccccaccgcagggtgtggtgaaggcctgctatagcctgtcggaagatgcagaaggggagggcctgctgttgattcccggaggccgggccagcgtgggggccacctcgggcctggtggaagcagcagcggtggccatggctgcccggggggcggggggcagcctgggggcggggggcagccggggacccctgcctgggggcttctcaggtggaaaccccttaaagaacatcaagtgcaccaagtgcccggaagtgttccagggcgtggagaagctggtcttccacatgcgggcgcagcacttcatcttcatgtgccctcgctgtggcaagcagttcaaccacagcagcaacctcaaccgccacatgaacgtgcatcgtggtgtcaagtcacactcgtgcggcatctgcggcaagtgcttcacacagaagtccacccttcacgaccacctcaacctgcactcgggagcgcggccctaccgctgctcctactgcgacgtgcgcttcgcccacaagcctgccattaggcggcacctcaaggagcaacacggcaagaccacggccgagaacgtgctggaggccagtgtggccgagattaacgtcctcatccgctagccgcgcaggcgtggaggccaggaggctggggcccctgggctgcgtggaaaaagggctctttggcccaggagaattggggggtggggggtctggggcagaaaggtaagagtgggaggctgagcagatgcacacatcctgagagagggaagatgattccttggagagacttgctcttgagagtgcaagaatctggagctgggaaaagggttcttggaggccaggggaatacggggtcccagagaaagatttccttctcttagaagtgcatgtatatgtggagggagggaaaagggtcctatagaatgaggga

SEQ ID NO: 14717 - protein, 459 aa, Homo sapiens; identical to SEQ ID NO: 1623

SEQ ID NO: 14718 - DNA, 1834 bp, Homo sapiens
atagatatattagcatcagggagacagggcaaaggtttcacccttcagttcagtccccaatccctgcttattatttccctaacagaagaccatcccccttgccactccctggtttttcttctctggcagcaatgaagcagctgctgacccagctctagttttcgggaagtcagatgaccttttccctcccgcggctctctacctctcgccgcccctagggaggacaccatgggcccactgatggttcttttttgcctgctgttcctgtacccaggtctggcagactcggctccctcctgccctcagaacgtgaatatctcgggtggcaccttcaccctcagccatggctgggctcctgggagccttctcacctactcctgcccccagggcctgtacccatccccagcatcacggctgtgcaagagcagcggacagtggcagaccccaggagccacccggtctctgtctaaggcggtctgcaaacctgtgcgctgtccagcccctgtctcctttgagaatggcatttataccccacggctggggtcctatcccgtgggtggcaatgtgagcttcgagtgtgaggatggcttcatattgcggggctcgcctgtgcgtcagtgtcgccccaacggcatgtgggatggagaaacagctgtgtgtgataatggggctggccactgccccaacccaggcatttcactgggcgcagtgcggacaggcttccgctttggtcatggggacaaggtccgctatcgctgctcctcgaatcttgtgctcacggggtcttcggagcgggagtgccagggcaacggggtctggagtggaacggagcccatctgccgccaaccctactcttatgacttccctgaggacgtggcccctgccctgggcacttccttctcccacatgcttggggccaccaatcccacccagaagacaaaggaaagcctgggccgtaaaatccaaatccagcgctctggtcatctgaacctctacctgctcctggactgttcgcagagtgtgtcggaaaatgactttctcatcttcaaggagagcgcctccctcatggtggacagggtcaggaatcaggagtctgcctgcagcagaggccttcctgtgctcactatctctctctgtctccttcccctcctcagaaccccactcacagcccacctcctccaagaagtcttctcagattatactcatgccatgtaggaatcatgaattcaatttatacaatcataatttttattccacaagcactgttgggacactgtgctggggctgggcgacagcaaagatggaaaggctgaggtcttactttccaggaattcatcatctagaacagtggtctccacagaaaggtagtgagataacccacaggagtgaagcagaaaaatactggtgcccctgtggaataatttaaatcagattaataatttaatatttaataatttccttttaaaacttcaacattttgtgcaggctttaaaatgtgtgtgatagactgggcatggtggctagtgcctgtaatcccaacactttgggaggccgaggcaggtggatcacttgaggtcaggagtttgagaccagcctgaccaacatgatgaaaccctgtctatactaaaaatacaaaattagccacatgtgatggcgcacgcctgtaacccagctacttgggaggatgaggcaggagaatcgcttggatccgggaggtggaggttgcagtgggctgagatcacgccattgcactccagcctgggcaactagagcaaaactctgtctcaaaaaaataaataaaataaaataaaataaaataaaatatgtgtgatag

SEQ ID NO: 14719 - protein, 328 aa, Homo sapiens
MGPLMVLFCLLFLYPGLADSAPSCPQNVNISGGTFTLSHGWAPGSLLTYSCPQGLYPSPASRLCKSSGQWQTPGATRSLSKAVCKPVRCPAPVSFENGIYTPRLGSYPVGGNVSFECEDGFILRGSPVRQCRPNGMWDGETAVCDNGAGHCPNPGISLGAVRTGFRFGHGDKVRYRCSSNLVLTGSSERECQGNGVWSGTEPICRQPYSYDFPEDVAPALGTSFSHMLGATNPTQKTKESLGRKIQIQRSGHLNLYLLLDCSQSVSENDFLIFKESASLMVDRVRNQESACSRGLPVLTISLCLLPLLRTPLTAHLLQEVFSDYTHAM

SEQ ID NO: 14720 - DNA, 2802 bp, Homo sapiens
atagatatattagcatcagggagacagggcaaaggtttcacccttcagttcagtccccaatccctgcttattatttccctaacagaagaccatcccccttgccactccctggtttttcttctctggcagcaatgaagcagctgctgacccagctctagttttcgggaagtcagatgaccttttccctcccgcggctctctacctctcgccgcccctagggaggacaccatgggcccactgatggttcttttttgcctgctgttcctgtacccaggtctggcagactcggctccctcctgccctcagaacgtgaatatctcgggtggcaccttcaccctcagccatggctgggctcctgggagccttctcacctactcctgcccccagggcctgtacccatccccagcatcacggctgtgcaagagcagcggacagtggcagaccccaggagccacccggtctctgtctaaggcggtctgcaaacctgtgcgctgtccagcccctgtctcctttgagaatggcatttataccccacggctggggtcctatcccgtgggtggcaatgtgagcttcgagtgtgaggatggcttcatattgcggggctcgcctgtgcgtcagtgtcgccccaacggcatgtgggatggagaaacagctgtgtgtgataatggggctggccactgccccaacccaggcatttcactgggcgcagtgcggacaggcttccgctttggtcatggggacaaggtccgctatcgctgctcctcgaatcttgtgctcacggggtcttcggagcgggagtgccagggcaacggggtctggagtggaacggagcccatctgccgccaaccctactcttatgacttccctgaggacgtggcccctgccctgggcacttccttctcccacatgcttggggccaccaatcccacccagaagacaaaggaaagcctgggccgtaaaatccaaatccagcgctctggtcatctgaacctctacctgctcctggactgttcgcagagtgtgtcggaaaatgactttctcatcttcaaggagagcgcctccctcatggtggacaggatcttcagctttgagatcaatgtgagcgttgccattatcacctttgcctcagagcccaaagtcctcatgtctgtcctgaacgacaactcccgggatatgactgaggtgatcagcagcctggaaaatgccaactataaagatcatgaaaatggaactgggactaacacctatgcggccttaaacagtgtctatctcatgatgaacaaccaaatgcgactcctcggcatggaaacgatggcctggcaggaaatccgacatgccatcatccttctgacagatggaaagtccaatatgggtggctctcccaagacagctgttgaccatatcagagagatcctgaacatcaaccagaagaggaatgactatctggacatctatgccatcggggtgggcaagctggatgtggactggagagaactgaatgagctagggtccaagaaggatggtgagaggcatgccttcattctgcaggacacaaaggctctgcaccaggtctttgaacatatgctggatgtctccaagctcacagacaccatctgcggggtggggaacatgtcagcaaacgcctctgaccaggagaggacaccctggcatgtcactattaagcccaagagccaagagacctgccggggggccctcatctccgaccaatgggtcctgacagcagctcattgcttccgcgatggcaacgaccactccctgtggagggtcaatgtgggagaccccaaatcccagtggggcaaagaattccttattgagaaggcggtgatctccccagggtttgatgtctttgccaaaaagaaccagggaatcctggagttctatggtgatgacatagctctgctgaagctggcccagaaagtaaagatgtccacccatgccaggcccatctgccttccctgcacgatggaggccaatctggctctgcggagacctcaaggcagcacctgtagggaccatgagaatgaactgctgaacaaacagagtgttcctgctcattttgtcgccttgaatgggagcaaactgaacattaaccttaagatgggagtggagtggacaagctgtgccgaggttgtctcccaagaaaaaaccatgttccccaacttgacagatgtcagggaggtggtgacagaccagttcctatgcagtgggacccaggaggatgagagtccctgcaagggagaatctgggggagcagttttccttgagcggagattcaggttttttcaggtgggtctggtgagctggggtctttacaacccctgccttggctctgctgacaaaaactcccgcaaaagggcccctcgtagcaaggtcccgccgccacgagactttcacatcaatctcttccgcatgcagccctggctgaggcagcacctgggggatgtcctgaattttttacccctctagccatggccactgagccctctgctgccctgccagaatctgccgcccctccatcttctacctctgaatggccacccttagaccctgtgatccatcctctctcctagctgagtaaatccgggtctctaggatgccagaggcagcgcacacaagctgggaaatcctcagggctcctaccagcaggactgcctcgctgccccacctcccgctccttggcctgtccccagattccttccctggttgacttgactcatgcttgtttcactttcacatggaatttcccagttatgaaattaataaaaatcaatggtttccaca

SEQ ID NO: 14721 - protein, 752 aa, Homo sapiens; identical to SEQ ID NO: 1625

SEQ ID NO: 14722 - DNA, 787 bp, Homo sapiens
tttaagaccagcctagccaacatggcgagaccatgtctctactaaaaatacaaaaatttgccgggcatggtggcacatgcctgtaatcccagcttcttgggagactgaggcacgagaatcacctgaacccaggaggcagaggttacagtgagccgggatcccgccactgcactgcagcctgggcttctgggtgacagagcgagactctgtctcaaacaaatgaacagaaaaagaagaaaggaatttggacacaaagacacaggtagtgggtctcctatctatataagagaacagcatgtaatgacacagaggcacacacagaaaagaaggcgagttgaagacagaggcagagaatgggtttatgctgccgcaagccaaggttggagctgccggcagccggaaaaggcaggaaagaattcttcccaagagccttctgaggaagcacggccctgccaacaccttgatttcagacttctaacctccagaactgtaagaaaaagaaattctgtgttctaagccacccaggtttgtggtagtttgactctcttcactccaccctgtgaggggcatgatgacccctattttatggataaggaaactgaggggcaccagtatttttctgcttcactcctgtgggttatctcactacctttctgtggagaccactgttctagatgatgaattcctggaaagtaagacctcagcctttccatctttgctgtcgcccagccccagcacagtgtcccaacagtgcttgtggaataaaaattatgattgtataaattga

SEQ ID NO: 14723 - protein, 72 aa, Homo sapiens
MMTPILWIRKLRGTSIFLLHSCGLSHYLSVETTVLDDEFLESKTSAFPSLLSPSPSTVSQQCLWNKNYDCIN

SEQ ID NO: 14724 - DNA, 2545 bp, Homo sapiens
tataaaggtacgggtgtcatcacgtgatggtgatgagagaggagaagatggaccctctcagggcctgcaaacaaattctggatgagttaaaaagagagtgaggcctcttggtggcacctgagtcccacgagtctggggtagtttcaacgtccagggttatggtgggggagtccagctgcccccagctcatagctcattctgagatgctgcaggtccaaagacactgtgcaggtcttcaattccttccagttgccaaaaccacactgtctggtttgcatggctgcacactgccatctccccatgtcattagccacccatacaccatgtaaagtgcctggttggcacttagcaaatggctgaagccactcaaggttttggaaacctcatctttgaatcttgggactttagtgtggtcttggattggggttatgcaatgaacatttcttttttcttcttcttttttttttttttgaggtggagtctcgcactgtcacccaggcttgagtgcagtggcacgatcttggctcactgcaacctctgcctccagggttcaggcaattctcctgcctcagcttcccgagtagctgagatttcgggcacctgccaccatgcctggctaattttttatatttttagttgagatggggtttcactatcactttgggaggctgagatgggcggatcacttgaggtcaggaaaccagcttggccaacatggtgaaaccccatctctactaaaaatacaaaaaattagctgggcatggtggctggcacctgtaatcccagctacttgggagactgaggcatgagaatcacttgaactggggaggtggaggttgcagtcagccaagatcacgccactatactctagcctgggtggcagagcgagactctctcaaaaaaaaaaaaaaaattgcatttccaataattgggggaatagagtgattccctacccctaggtggtaggtgggaagtttctaagagagtccttccttttggcatattccagatcatgaaaatggaactgggactaacacctatgcggccttaaacagtgtctatctcatgatgaacaaccaaatgcgactcctcggcatggaaacgatggcctggcaggaaatccgacatgccatcatccttctgacagatggaaagtccaatatgggtggctctcccaagacagctgttgaccatatcagagagatcctgaacatcaaccagaagaggaatgactatctggacatctatgccatcggggtgggcaagctggatgtggactggagagaactgaatgagctagggtccaagaaggatggtgagaggcatgccttcattctgcaggacacaaaggctctgcaccaggtctttgaacatatgctggatgtctccaagctcacagacaccatctgcggggtggggaacatgtcagcaaacgcctctgaccaggagaggacaccctggcatgtcactattaagcccaagagccaagagacctgccggggggccctcatctccgaccaatgggtcctgacagcagctcattgcttccgcgatggcaacgaccactccctgtggagggtcaatgtgggagaccccaaatcccagtggggcaaagaattccttattgagaaggcggtgatctccccagggtttgatgtctttgccaaaaagaaccagggaatcctggagttctatggtgatgacatagctctgctgaagctggcccagaaagtaaagatgtccacccatgccaggcccatctgccttccctgcacgatggaggccaatctggctctgcggagacctcaaggcagcacctgtagggaccatgagaatgaactgctgaacaaacagagtgttcctgctcattttgtcgccttgaatgggagcaaactgaacattaaccttaagatgggagtggagtggacaagctgtgccgaggttgtctcccaagaaaaaaccatgttccccaacttgacagatgtcagggaggtggtgacagaccagttcctatgcagtgggacccaggaggatgagagtccctgcaagggtgggtctggtgagctggggtctttacaacccctgccttggctctgctgacaaaaactcccgcaaaagggcccctcgtagcaaggtcccgccgccacgagactttcacatcaatctcttccgcatgcagccctggctgaggcagcacctgggggatgtcctgaattttttacccctctagccatggccactgagccctctgctgccctgccagaatctgccgcccctccatcttctacctctgaatggccacccttagaccctgtgatccatcctctctcctagctgagtaaatccgggtctctaggatgccagaggcagcgcacacaagctgggaaatcctcagggctcctaccagcaggactgcctcgctgccccacctcccgctccttggcctgtccccagattccttccctggttgacttgactcatgcttgtttcactttcacatggaatttcccagttatgaaattaataaaaatcaatggtttccaca

SEQ ID NO: 14725 - protein, 344 aa, Homo sapiens
MMNNQMRLLGMETMAWQEIRHAIILLTDGKSNMGGSPKTAVDHIREILNINQKRNDYLDIYAIGVGKLDVDWRELNELGSKKDGERHAFILQDTKALHQVFEHMLDVSKLTDTICGVGNMSANASDQERTPWHVTIKPKSQETCRGALISDQWVLTAAHCFRDGNDHSLWRVNVGDPKSQWGKEFLIEKAVISPGFDVFAKKNQGILEFYGDDIALLKLAQKVKMSTHARPICLPCTMEANLALRRPQGSTCRDHENELLNKQSVPAHFVALNGSKLNINLKMGVEWTSCAEVVSQEKTMFPNLTDVREVVTDQFLCSGTQEDESPCKGGSGELGSLQPLPWLC

SEQ ID NO: 14726 - DNA, 707 bp, Homo sapiens
gcaaactgaacattaaccttaagatgggagtggagtggacaagctgtgccgaggttgtctcccaagaaaaaaccatgttccccaacttgacagatgtcagggaggtggtgacagaccagttcctatgcagtgggacccaggaggatgagagtccctgcaagggagaatctgggggagcagttttccttgagcggagattcaggttttttcaggtgggtctggtgagctggggtctttacaacccctgccttggctctgctgacaaaaactcccgcaaaagggcccctcgtagcaaggtcccgccgccacgagactttcacatcaatctcttccgcatgcagccctggctgaggcagcacctgggggatgtcctgaattttttacccctctagccatggccactgagccctctgctgccctgccagaatctgccgcccctccatcttctacctctgaatggccacccttagaccctgtgatccatcctctctcctagctgagtaaatccgggtctctaggatgccagaggcagcgcacacaagctgggaaatcctcagggctcctaccagcaggactgcctcgctgccccacctcccgctccttggcctgtccccagattccttccctggttgacttgactcatgcttgtttcactttcacatggaatttcccagttatgaaattaataaaaatcaatggtttccaca

SEQ ID NO: 14727 - protein, 122 aa, Homo sapiens
MGVEWTSCAEVVSQEKTMFPNLTDVREVVTDQFLCSGTQEDESPCKGESGGAVFLERRFRFFQVGLVSWGLYNPCLGSADKNSRKRAPRSKVPPPRDFHINLFRMQPWLRQHLGDVLNFLPL

SEQ ID NO: 14728 - DNA, 2476 bp, Homo sapiens
ggccttgggggagggggaggccagaatgactccaagagctacaggaaggcaggtcagagaccccactggacaaacagtggctggactctgcaccataacacacaatcaacaggggagtgagctggatccttatttctggtccctaagtgggtggtttgggcttactggggaggagctaaggccggagaggaggtactgaaggggagagtcctggacctttggcagcaaagggtgggacttctgcagtttctgtttccttgactggcagctcagcggggccctcccgcttggatgttccgggaaagtgatgtgggtaggacaggcggggcgagccgcaggtgccagaacacagattgtataaaaggctgggggctggtggggagcaggggaagggaatgtgaccaggtctaggtctggagtttcagcttggacactgagccaagcagacaagcaaagcaagccaggacacaccatcctgccccaggcccagcttctctcctgccttccaacgccatggggagcaatctcagcccccaactctgcctgatgccctttatcttgggcctcttgtctggaggtgtgaccaccactccatggtctttggcccggccccagggatcctgctctctggagggggtagagatcaaaggcggctccttccgacttctccaagagggccaggcactggagtacgtgtgtccttctggcttctacccgtaccctgtgcagacacgtacctgcagatctacggggtcctggagcaccctgaagactcaagaccaaaagactgtcaggaaggcagagtgcagagcaatccactgtccaagaccacacgacttcgagaacggggaatactggccccggtctccctactacaatgtgagtgatgagatctctttccactgctatgacggttacactctccggggctctgccaatcgcacctgccaagtgaatggccgatggagtgggcagacagcgatctgtgacaacggagcggggtactgctccaacccgggcatccccattggcacaaggaaggtgggcagccagtaccgccttgaagacagcgtcacctaccactgcagccgggggcttaccctgcgtggctcccagcggcgaacgtgtcaggaaggtggctcttggagcgggacggagccttcctgccaagactccttcatgtacgacacccctcaagaggtggccgaagctttcctgtcttccctgacagagaccatagaaggagtcgatgctgaggatgggcacggcccaggggaacaacagaagcggaagatcgtcctggacccttcaggctccatgaacatctacctggtgctagatggatcagacagcattggggccagcaacttcacaggagccaaaaagtgtctagtcaacttaattgagaaggtggcaagttatggtgtgaagccaagatatggtctagtgacatatgccacataccccaaaatttgggtcaaagtgtctgaagcagacagcagtaatgcagactgggtcacgaagcagctcaatgaaatcaattatgaagaccacaagttgaagtcagggactaacaccaagaaggccctccaggcagtgtacagcatgatgagctggccagatgacgtccctcctgaaggctggaaccgcacccgccatgtcatcatcctcatgactgatggattgcacaacatgggcggggacccaattactgtcattgatgagatccgggacttgctatacattggcaaggatcgcaaaaacccaagggaggattatctggatgtctatgtgtttggggtcgggcctttggtgaaccaagtgaacatcaatgctttggcttccaagaaagacaatgagcaacatgtgttcaaagtcaaggatatggaaaacctggaagatgttttctaccaaatgatcgatgaaagccagtctctgagtctctgtggcatggtttgggaacacaggaagggtaccgattaccacaagcaaccatggcaggccaagatctcagtcattcgcccttcaaagggacacgagagctgtatgggggctgtggtgtctgagtactttgtgctgacagcagcacattgtttcactgtggatgacaaggaacactcaatcaaggtcagcgtaggtaaggatgcaactgaaggtcctgggctgcacctatgctctccaggcaacacctcccactttctacagatcctacactccacccatcctcaatgcagccccattccttgcaccccagaccagtcagggatgggggaagacgtgaagttaggaatgacacggggccagaggcaggaagctgcccacaaagaggtggtacctactctcctacttcaggaggggagaagcgggacctggagatagaagtagtcctatttcaccccaactacaacattaatgggaaaaaagaagcaggaattcctgaattttatgactatgacgttgccctgatcaagctcaa

SEQ ID NO: 14729 - protein, 621 aa, Homo sapiens
MGSNLSPQLCLMPFILGLLSGGVTTTPWSLARPQGSCSLEGVEIKGGSFRLLQEGQALEYVCPSGFYPYPVQTRTCRSTGSWSTLKTQDQKTVRKAECRAIHCPRPHDFENGEYWPRSPYYNVSDEISFHCYDGYTLRGSANRTCQVNGRWSGQTAICDNGAGYCSNPGIPIGTRKVGSQYRLEDSVTYHCSRGLTLRGSQRRTCQEGGSWSGTEPSCQDSFMYDTPQEVAEAFLSSLTETIEGVDAEDGHGPGEQQKRKIVLDPSGSMNIYLVLDGSDSIGASNFTGAKKCLVNLIEKVASYGVKPRYGLVTYATYPKIWVKVSEADSSNADWVTKQLNEINYEDHKLKSGTNTKKALQAVYSMMSWPDDVPPEGWNRTRHVIILMTDGLHNMGGDPITVIDEIRDLLYIGKDRKNPREDYLDVYVFGVGPLVNQVNINALASKKDNEQHVFKVKDMENLEDVFYQMIDESQSLSLCGMVWEHRKGTDYHKQPWQAKISVIRPSKGHESCMGAVVSEYFVLTAAHCFTVDDKEHSIKVSVGKDATEGPGLHLCSPGNTSHFLQILHSTHPQCSPIPCTPDQSGMGEDVKLGMTRGQRQEAAHKEVVPTLLLQEGRSGTWR

SEQ ID NO: 14730 - DNA, 2864 bp, Homo sapiens
ggccttgggggagggggaggccagaatgactccaagagctacaggaaggcaggtcagagaccccactggacaaacagtggctggactctgcaccataacacacaatcaacaggggagtgagctggatccttatttctggtccctaagtgggtggtttgggcttactggggaggagctaaggccggagaggaggtactgaaggggagagtcctggacctttggcagcaaagggtgggacttctgcagtttctgtttccttgactggcagctcagcggggccctcccgcttggatgttccgggaaagtgatgtgggtaggacaggcggggcgagccgcaggtgccagaacacagattgtataaaaggctgggggctggtggggagcaggggaagggaatgtgaccaggtctaggtctggagtttcagcttggacactgagccaagcagacaagcaaagcaagccaggacacaccatcctgccccaggcccagcttctctcctgccttccaacgccatggggagcaatctcagcccccaactctgcctgatgccctttatcttgggcctcttgtctggaggtgtgaccaccactccatggtctttggcccggccccagggatcctgctctctggagggggtagagatcaaaggcggctccttccgacttctccaagagggccaggcactggagtacgtgtgtccttctggcttctacccgtaccctgtgcagacacgtacctgcagatctacggggtcctggagcaccctgaagactcaagaccaaaagactgtcaggaaggcagagtgcagagcaatccactgtccaagaccacacgacttcgagaacggggaatactggccccggtctccctactacaatgtgagtgatgagatctctttccactgctatgacggttacactctccggggctctgccaatcgcacctgccaagtgaatggccgatggagtgggcagacagcgatctgtgacaacggagcggggtactgctccaacccgggcatccccattggcacaaggaaggtgggcagccagtaccgccttgaagacagcgtcacctaccactgcagccgggggcttaccctgcgtggctcccagcggcgaacgtgtcaggaaggtggctcttggagcgggacggagccttcctgccaagactccttcatgtacgacacccctcaagaggtggccgaagctttcctgtcttccctgacagagaccatagaaggagtcgatgctgaggatgggcacggcccaggggaacaacagaagcggaagatcgtcctggacccttcaggctccatgaacatctacctggtgctagatggatcagacagcattggggccagcaacttcacaggagccaaaaagtgtctagtcaacttaattgagaaggtggcaagttatggtgtgaagccaagatatggtctagtgacatatgccacataccccaaaatttgggtcaaagtgtctgaagcagacagcagtaatgcagactgggtcacgaagcagctcaatgaaatcaattatgaagaccacaagttgaagtcagggactaacaccaagaaggccctccaggcagtgtacagcatgatgagctggccagatgacgtccctcctgaaggctggaaccgcacccgccatgtcatcatcctcatgactgatggattgcacaacatgggcggggacccaattactgtcattgatgagatccgggacttgctatacattggcaaggatcgcaaaaacccaagggaggattatctggatgtctatgtgtttggggtcgggcctttggtgaaccaagtgaacatcaatgctttggcttccaagaaagacaatgagcaacatgtgttcaaagtcaaggatatggaaaacctggaagatgttttctaccaaatgatcgatgaaagccagtctctgagtctctgtggcatggtttgggaacacaggaagggtaccgattaccacaagcaaccatggcaggccaagatctcagtcattcgcccttcaaagggacacgagagctgtatgggggctgtggtgtctgagtactttgtgctgacagcagcacattgtttcactgtggatgacaaggaacactcaatcaaggtcagcgtaggaggggagaagcgggacctggagatagaagtagtcctatttcaccccaactacaacattaatgggaaaaaagaagcaggaattcctgaattttatgactatgacgttgccctgatcaagctcaagaataagctgaaatatggccagactatcaggcccatttgtctcccctgcaccgagggaacaactcgagctttgaggcttcctccaactaccacttgccagcaacaaaaggaagagctgctccctgcacaggatatcaaagctctgtttgtgtctgaggaggagaaaaagctgactcggaaggaggtctacatcaagaatggggataagaaaggcagctgtgagagagatgctcaatatgccccaggctatgacaaagtcaaggacatctcagaggtggtcacccctcggttcctttgtactggaggagtgagtccctatgctgaccccaatacttgcagaggtgattctggcggccccttgatagttcacaagagaagtcgtttcattcaagttggtgtaatcagctggggagtagtggatgtctgcaaaaaccagaagcggcaaaagcaggtacctgctcacgcccgagactttcacatcaacctctttcaagtgctgccctggctgaaggagaaactccaagatgaggatttgggttttctataaggggtttcctgctggacaggggcgtgggattgaattaaaacagctgcgacaacacc

SEQ ID NO: 14731 - protein, 764 aa, Homo sapiens; identical to SEQ ID NO: 1627

SEQ ID NO: 14732 - DNA, 777 bp, Homo sapiens
ccgggaaagtgatgtgggtaggacaggcggggcgagccgcaggtgccagaacacagattgtataaaaggctgggggctggtggggagcaggggaagggaatgtgaccaggtctaggtctggagtttcagcttggacactgagccaagcagacaagcaaagcaagccaggacacaccatcctgccccaggcccagcttctctcctgccttccaacgccatggggagcaatctcagcccccaactctgcctgatgccctttatcttgggcctcttgtctggaggtgtgaccaccactccatggtctttggcccggccccagggatcctgctctctggagggggtagagatcaaaggcggctccttccgacttctccaagagggccaggcactggagtacgtgtgtccttctggcttctacccgtaccctgtgcagacacgtacctgcagatctacggggtcctggagcaccctgaagactcaagaccaaaagactgtcaggaaggcagagtgcagaggtttgagggcaatgagtgtgggcagtggcctaaggcagaaacagggcaggcggcagcaaggtcaggactaggatgagactaggcagggtgacaaggtgggctgaccgggagtaggagcagttttagggtggcaggcggaaagggggcaagaaaaagcggagttaacccttactaagcatttaccctgggcttccaggcagccctggaagtcaagagaacactcagaaatggggagggagaagcagtggaaatccatatgggt

SEQ ID NO: 14733 - protein, 122 aa, Homo sapiens
MGSNLSPQLCLMPFILGLLSGGVTTTPWSLARPQGSCSLEGVEIKGGSFRLLQEGQALEYVCPSGFYPYPVQTRTCRSTGSWSTLKTQDQKTVRKAECRGLRAMSVGSGLRQKQGRRQQGQD

SEQ ID NO: 14734 - DNA, 315 bp, Homo sapiens
caggcactggagtacgtgtgtccttctggcttctacccgtaccctgtgcagacacgtgattctggcggccccttgatagttcacaagagaagtcgtttcattcaagttggtgtaatcagctggggagtagtggatgtctgcaaaaaccagaagcggcaaaagcaggtacctgctcacgcccgagactttcacatcaacctctttcaagtgctgccctggctgaaggagaaactccaagatgaggatttgggttttctataaggggtttcctgctggacaggggcgtgggattgaattaaaacagctgcgacaaca

SEQ ID NO: 14735 - protein, 86 aa, Homo sapiens
QALEYVCPSGFYPYPVQTRDSGGPLIVHKRSRFIQVGVISWGVVDVCKNQKRQKQVPAHARDFHINLFQVLPWLKEKLQDEDLGFL

SEQ ID NO: 14736 - DNA, 520 bp, Homo sapiens
ccttctcagaccagcatgtggcccttaagtccacttgtaacactatacccatggttggggccctgaatgtgactcatagctggctgttcatctctcctgtgacccttcataaggaattcttcctaagccctgtgatcaactatctctaacccttcctcaacttgctcaccctgccatgtgtatccctgcctttagccagtttatcttccttatctcctaccctcatggtcctgtctcttctgcaggattgcacaacatgggcggggacccaattactgtcattgatgagatccgggacttgctatacattggcaaggatcgcaaaaacccaagggaggattatctggatgtctatgtgtttggggtcgggcctttggtgaaccaagtgaacatcaatgctttggcttccaagaaagacaatgagcaacatgtgttcaaagtcaaggatatggaaaacctggaagatgttttctaccaaatgatcggtagggagatacaagggaataaagaacacaactct

SEQ ID NO: 14737 - protein, 114 aa, Homo sapiens
MCIPAFSQFIFLISYPHGPVSSAGLHNMGGDPITVIDEIRDLLYIGKDRKNPREDYLDVYVFGVGPLVNQVNINALASKKDNEQHVFKVKDMENLEDVFYQMIGREIQGNKEHN

SEQ ID NO: 14738 - DNA, 871 bp, Homo sapiens
tatcaggtgagagcgtccagatccctgaggaaaggctgggaaaggctggaggactggggtgaggagcaggcctggtttgctgttctccttgtcctttataggcccatttgtctcccctgcaccgagggaacaactcgagctttgaggcttcctccaactaccacttgccagcaacaaagtaagacatacttggcaagaggataaggatgagatcccaagagacaagtggggcatgagagggaggtgcaataggaagagatgatgcctggcccagaacctagctctagaagggcttaggggacatctactgagtgacaaaggcaatggggagatgacagtggtgggagcagctgaagtgacgcagtctattcgtccagaggaagagctgctccctgcacaggatatcaaagctctgtttgtgtctgaggaggagaaaaagctgactcggaaggaggtctacatcaagaatggggataagaaaggcagctgtgagagagatgctcaatatgccccaggctatgacaaagtcaaggacatctcagaggtggtcacccctcggttcctttgtactggaggagtgagtccctatgctgaccccaatacttgcagaggtgattctggcggccccttgatagttcacaagagaagtcgtttcattcaagttggtgtaatcagctggggagtagtggatgtctgcaaaaaccagaagcggcaaaagcaggtacctgctcacgcccgagactttcacatcaacctctttcaagtgctgccctggctgaaggagaaactccaagatgaggatttgggttttctataaggggtttcctgctggacaggggcgtgggattgaattaaaacagctgcgacaaca

SEQ ID NO: 14739 - protein, 161 aa, Homo sapiens [sequence omitted]

SEQ ID NO: 14740 - DNA, 654 bp, Homo sapiens
tgtgagagagatgctcaatatgccccaggctatgacaaagtcaaggacatctcagaggtggtcacccctcggttcctttgtactggaggagtgagtccctatgctgaccccaatacttgcagaggtgattctggcggccccttgatagttcacaagagaagtcgtttcattcaagtgagtcctccctttcctatctggggagatgccaagtggtcagcatgggccccaaagcaggaaagctcaatgcatgtggctagtaattcgaggtaggcagagcctgcctcaccttaggaccgcatgtcttgcctgcgtgtgtcaagaacgaggctgagctgggtccctagtctgattcctttaggtcagctaagacacaagcaggaacagccatgcttccaggattaggaattctactgaatgatccatggcaccccactgcctctgcaggttggtgtaatcagctggggagtagtggatgtctgcaaaaaccagaagcggcaaaagcaggtacctgctcacgcccgagactttcacatcaacctctttcaagtgctgccctggctgaaggagaaactccaagatgaggatttgggttttctataaggggtttcctgctggacaggggcgtgggattgaattaaaacagctgcgacaaca

SEQ ID NO: 14741 - protein, 64 aa, Homo sapiens [sequence omitted]

SEQ ID NO: 14742 - DNA, 545 bp, Homo sapiens
gaagaggcagagggcccaggggctggtgatggtccccctcgaagctttgaacctctccatggacccacccagaaactgtgccttcgtcacctatgaaaagatggagtcagcagatcaggccgttgctgagctcaacgggacccaggtggagtctgtacagctcaaagtcaacatagcccgaaaacagcccatgctggatgccgctactggcaagtctgtctggggctccctcgctgtccagaacagccctaagggttgccaccgggacaagaggacccagattgtctacagtgatgacgtctacaaggaaaaccttgtggatggcttctagggaacagagctggattccttgtgcctcatatgccccaatgctggtctcagtaaaacactgaggtggaagcttacacatctccctcagcctctggtttttcagcacttgggattggggttaaacctttaaaaacggctgtcaggtttgatctcagtgtaacaacatggccagtgcctgttccccactcccttgccccaaaaggatctggaacaca

SEQ ID NO: 14743 - protein, 100 aa, Homo sapiens
MVPLEALNLSMDPPRNCAFVTYEKMESADQAVAELNGTQVESVQLKVNIARKQPMLDAATGKSVWGSLAVQNSPKGCHRDKRTQIVYSDDVYKENLVDGF

SEQ ID NO: 14744 - DNA, 1066 bp, Homo sapiens
ccttgggaggtttgggctgtaggagctgggctatagagggaatattgagtctccacagggtctgaggggagaaggtaaaacccccctttgatcttcagtctgcatctccccagctttgtgtcttctagtgatcgacttcgagaactaggaccagatggagaagaggcagagggcccaggggctggtgatggtccccctcgaagctttgactggggctatgaagaacgcagtggtgcccactcctcagcctcccctccccgaagccgcagccgggaccgcagccatgagaggaaccgggacagagaccgagatcgggagcgggatcgagaccgggatcgagacagagacagagagcgggacagggatcgggatcgggatcgagatcgagaccgggaacgggacagggatcgggagcgggatcgagaccgagaccgagagggtcctttccgcaggtcggattcattccctgaacggcgagcccctaggaaagggaatactctctatgtatatggagaagacatgacacccacccttctccgtggggccttctctccttttggaaacatcattgacctctccatggacccacccagaaactgtgccttcgtcacctatgaaaagatggagtcagcagatcaggccgttgctgagctcaacgggacccaggtggagtctgtacagctcaaagtcaacatagcccgaaaacagcccatgctggatgccgctactggcaagtctgtctggggctccctcgctgtccagaacagccctaagggttgccaccgggacaagaggacccagattgtctacagtgatgacgtctacaaggaaaaccttgtggatggcttctagggaacagagctggattccttgtgcctcatatgccccaatgctggtctcagtaaaacactgaggtggaagcttacacatctccctcagcctctggtttttcagcacttgggattggggttaaacctttaaaaacggctgtcaggtttgatctcagtgtaacaacatggccagtgcctgttccccactcccttgccccaaaaggatctggaacaca

SEQ ID NO: 14745 - protein, 122 aa, Homo sapiens [sequence omitted]

SEQ ID NO: 14746 - DNA, 1498 bp, Homo sapiens
ggaagtgcgcgcctggggccgccttggttaccgcgttttccgctcctcgctacgtcatcgttgtgagcccgctatcagcggccagcgcgggcgcggccggagaccgtggggcccccggttgccgccccctcgggagccaccatgttggtgataccccccggactgagcgaggaagaggaggctctgcagaagaaattcaacaagctcaagaaaaagaaaaaggcattgctggctctgaagaagcaaagtagcagcagcacaaccagccaaggtggtgtcaaacgctcactatcagagcagcctgtcatggacacagccacagcaacagagcaggcaaagcagctggtgaagtcaggagccatcagtgccatcaaggctgagaccaagaactcaggcttcaagcgttctcgaacccttgaggggaagttaaaggaccccgagaagggaccagtccccactttccagccgttccagaggagcatatctgctgatgatgacctgcaagagtcatccagacgtccccagaggaaatctctgtatgagagctttgtgtcttctagtgatcgacttcgagaactaggaccagatggagaagaggcagagggcccaggggctggtgatggtccccctcgaagctttgactggggctatgaagaacgcagtggtgcccactcctcagcctcccctccccgaagccgcagccgggaccgcagccatgagaggaaccgggacagagaccgagatcgggagcgggatcgagaccgggatcgagacagagacagagagcgggacagggatcgggatcgggatcgagatcgagaccgggaacgggacagggatcgggagcgggatcgagaccgagaccgagagggtcctttccgcaggtcggattcattccctgaacggcgagcccctaggaaagggaatactctctatgtatatggagaagacatgacacccacccttctccgtggggccttctctccttttggaaacatcattgacctctccatggacccacccagaaactgtgccttcgtcacctatgaaaagatggagtcagcagatcaggccgttgctgagctcaacgggacccaggtggagtctgtacagctcaaagtcaacatagcccgaaaacagcccatgctggatgccgctactggcaagtctgtctggggctccctcgctgtccagaacagccctaagggttgccaccgggacaagaggacccagattgtctacagtgatgacgtctacaaggaaaaccttgtggatggcttctagggaacagagctggattccttgtgcctcatatgccccaatgctggtctcagtaaaacactgaggtggaagcttacacatctccctcagcctctggtttttcagcacttgggattggggttaaacctttaaaaacggctgtcaggtttgatctcagtgtaacaacatggccagtgcctgttccccactcccttgccccaaaaggatctggaacaca

SEQ ID NO: 14747 - protein, 380 aa, Homo sapiens; identical to SEQ ID NO: 1629

SEQ ID NO: 14748 - DNA, 926 bp, Homo sapiens
ccttgggaggtttgggctgtaggagctgggctatagagggaatattgagtctccacagggtctgaggggagaaggtaaaacccccctttgatcttcagtctgcatctccccagctttgtgtcttctagtgatcgacttcgagaactaggaccagatggagaagaggcagagggcccaggggctggtgatggtccccctcgaagctttgactggggctatgaagaacgcagtggtgcccactcctcagcctcccctccccgaagccgcagccgggaccgcagccatgagaggaaccgggacagagaccgagatcgggagcgggatcgagaccgggatcgagacagagacagagagcgggacagggatcgggatcgggatcgagatcgagaccgggaacgggacagggatcgggagcgggatcgagaccgagaccgagagggtcctttccgcaggtcggattcattccctgaacggcgagcccctaggaaagggaatactctctatgtatatggagaagacatgacacccacccttctccgtggggccttctctccttttggaaacatcattgacctctccatggacccacccagaaactgtgccttcgtcacctatgaaaagatggagtcagcagatcaggccgttgctgagctcaacgggacccaggtggagtctgtacagctcaaagtcaacatagcccgaaaacagcccatgctggatgccgctactggcaagtctgtctggggctccctcgctgtccagaacagccctaagggttgccaccgggacaagaggacccagattgtctacagtgatgacgtctacaaggaaaaccttgtggatggcttctagggaacagagctggattccttgtgcctcatatgccccaatgctggtctcagtaaaacactgaggtggaagcttac

SEQ ID NO: 14749 - protein, 122 aa, Homo sapiens [sequence omitted]

SEQ ID NO: 14750 - DNA, 1358 bp, Homo sapiens
ggaagtgcgcgcctggggccgccttggttaccgcgttttccgctcctcgctacgtcatcgttgtgagcccgctatcagcggccagcgcgggcgcggccggagaccgtggggcccccggttgccgccccctcgggagccaccatgttggtgataccccccggactgagcgaggaagaggaggctctgcagaagaaattcaacaagctcaagaaaaagaaaaaggcattgctggctctgaagaagcaaagtagcagcagcacaaccagccaaggtggtgtcaaacgctcactatcagagcagcctgtcatggacacagccacagcaacagagcaggcaaagcagctggtgaagtcaggagccatcagtgccatcaaggctgagaccaagaactcaggcttcaagcgttctcgaacccttgaggggaagttaaaggaccccgagaagggaccagtccccactttccagccgttccagaggagcatatctgctgatgatgacctgcaagagtcatccagacgtccccagaggaaatctctgtatgagagctttgtgtcttctagtgatcgacttcgagaactaggaccagatggagaagaggcagagggcccaggggctggtgatggtccccctcgaagctttgactggggctatgaagaacgcagtggtgcccactcctcagcctcccctccccgaagccgcagccgggaccgcagccatgagaggaaccgggacagagaccgagatcgggagcgggatcgagaccgggatcgagacagagacagagagcgggacagggatcgggatcgggatcgagatcgagaccgggaacgggacagggatcgggagcgggatcgagaccgagaccgagagggtcctttccgcaggtcggattcattccctgaacggcgagcccctaggaaagggaatactctctatgtatatggagaagacatgacacccacccttctccgtggggccttctctccttttggaaacatcattgacctctccatggacccacccagaaactgtgccttcgtcacctatgaaaagatggagtcagcagatcaggccgttgctgagctcaacgggacccaggtggagtctgtacagctcaaagtcaacatagcccgaaaacagcccatgctggatgccgctactggcaagtctgtctggggctccctcgctgtccagaacagccctaagggttgccaccgggacaagaggacccagattgtctacagtgatgacgtctacaaggaaaaccttgtggatggcttctagggaacagagctggattccttgtgcctcatatgccccaatgctggtctcagtaaaacactgaggtggaagcttac

SEQ ID NO: 14751 - protein, 380 aa, Homo sapiens; identical to SEQ ID NO: 1629

SEQ ID NO: 14752 - DNA, 404 bp, Homo sapiens
gaagaggcagagggcccaggggctggtgatggtccccctcgaagctttgaacctctccatggacccacccagaaactgtgccttcgtcacctatgaaaagatggagtcagcagatcaggccgttgctgagctcaacgggacccaggtggagtctgtacagctcaaagtcaacatagcccgaaaacagcccatgctggatgccgctactggcaagtctgtctggggctccctcgctgtccagaacagccctaagggttgccaccgggacaagaggacccagattgtctacagtgatgacgtctacaaggaaaaccttgtggatggcttctagggaacagagctggattccttgtgcctcatatgccccaatgctggtctcagtaaaacactgaggtggaagctta

SEQ ID NO: 14753 - protein, 100 aa, Homo sapiens; identical to SEQ ID NO: 14743

SEQ ID NO: 14754 - DNA, 1391 bp, Homo sapiens
gtggaaggccgggcggaagtgcgcgcctggggccgccttggttaccgcgttttccgctcctcgctacgtcatcgttgtgagcccgctatcagcggccagcgcgggcgcggccggagaccgtggggcccccggttgccgccccctcgggagccaccatgttggtgataccccccggactgagcgaggaagaggaggctctgcagaagaaattcaacaagctcaagaaaaagaaaaaggcattgctggctctgaagaagcaaagtagcagcagcacaaccagccaaggtggtgtcaaacgctcactatcagagcagcctgtcatggacacagccacagcaacagagcaggcaaagcagctggtgaagtcaggagccatcagtgccatcaaggctgagaccaagaactcaggcttcaagcgttctcgaacccttgaggggaagttaaaggaccccgagaagggaccagtccccactttccagccgttccagaggagcatatctgctgatgatgacctgcaagagtcatccagacgtccccagaggaaatctctgtatgagaggttagagagtagagataaggctgggcccatttggtggagttgattgcctgagtccttgggaggtttgggctgtaggagctgggctatagagggaatattgagtctccacagggtctgaggggagaaggtaaaacccccctttgatcttcagtctgcatctccccagctttgtgtcttctagtgatcgacttcgagaactaggaccagatggagaagaggcagagggcccaggggctggtgatggtccccctcgaagctttgactggggctatgaagaacgcagtggtgcccactcctcagcctcccctccccgaagccgcagccgggaccgcagccatgagaggaaccgggacagagaccgagatcgggagcgggatcgagaccgggatcgagacagagacagagagcgggacagggatcgggatcgggatcgagatcgagaccgggaacgggacagggatcgggagcgggatcgagaccgagaccgagagggtcctttccgcagtgagtgattttggctggaggtcaaggtgaccttaactgaggtttatgtgggtcctactaagtgaaatgtggcatggtctatgtcttgtgactatgatttgtgctcccaaagggtcggattcattccctgaacggcgagcccctaggaaagggaatactctctatgtatatggagaagacatgacacccacccttctccgtggggccttctctccttttggaaacatcattgacctctccatggacccacccagaaagtaaggatgacaacagggcatgatgagaagtcctgggagaatcctggggtgtgagacctgagggaagaagc

SEQ ID NO: 14755 - protein, 148 aa, Homo sapiens
MLVIPPGLSEEEEALQKKFNKLKKKKKALLALKKQSSSSTTSQGGVKRSLSEQPVMDTATATEQAKQLVKSGAISAIKAETKNSGFKRSRTLEGKLKDPEKGPVPTFQPFQRSISADDDLQESSRRPQRKSLYERLESRDKAGPIWWS

SEQ ID NO: 14756 - DNA, 1019 bp, Homo sapiens
gtggggcccccggttgccgccccctcgggtaaggccctctgcttctcactcttcggccctttttctcatagccgtttctctgttcttcctctttgcgttgctctgcgggcgctacgctggctccaccgccttctctgccgttcaaaccccgcggttgtccttaccctagcgagggtaggggggtcgggtgccatcgtctttccgacggagtggatatttgtccctccttgaaccacatggtacctaaaggtgctggtgtctgtgatccctggagacaggagggaatgctggatgatcccgaccagcgggagcttggacagcagcctggtttaagcaaggggtagggaaagccaaagacaagagtaggcagacctgaaggggtggggttgggtacagtgtggacggcgtgtgaaccccgggtggtaacagtggagaaagatgtcttgggccctgcccctgaactaggagccaccatgttggtgataccccccggactgagcgaggaagaggaggctctgcagaagaaattcaacaagctcaagaaaaagaaaaaggcattgctggctctgaagaagcaaagtagcagcagcacaaccagccaaggtggtgtcaaacgctcactatcagagcagcctgtcatggacacagccacagcaacagagcaggcaaagcagctggtgaagtcaggagccatcagtgccatcaaggctgagaccaagaactcaggcttcaagcgttctcgaacccttgaggggaagttaaaggaccccgagaagggaccagtccccactttccagccgttccagaggagcatatctgctgatgatgacctgcaagagtcatccagacgtccccagaggaaatctctgtatgagaggttagagagtagagataaggctgggcccatttggtggagttgattgcctgagtccttgggaggtttgggctgtaggagctgggctatagagggaatattgagtctccacagggtctgaggggagaaggtaaaaccccccttt

SEQ ID NO: 14757 - protein, 148 aa, Homo sapiens; identical to SEQ ID NO: 14755

SEQ ID NO: 14758 - DNA, 4170 bp, Homo sapiens
cgtagcgcccgcagagcaacgcaaagaggaagaacagagaaacggctatgagaaaaagggccgaagagtgagaagcagagggccttacccgagggggcggcaaccgggggccccacggtctccggccgcgcccgcgctggccgctgatagcgggctcacaacgatgacgtagcgaggagcggaaaacgcggtaaccaaggcggccccaggcgcgcacttccgcccggccttccaccggtccaggtctgcccctccgcagcgatagttcacgctctcggcggggctgtaccggaagttgcctctacttccgcccgttccggggcggggcttacttcgcagcgactacttgccgcacttccgggctgccaggcagctgctgtggctccaggatgatggagacagagcgacttgtgctaccccctccagatcccctggacctaccccttcgggccgtggagctcggatgcacggggcactgggagctgctgaacttgcctggagctccagagagtagccttccccatggcctccctccttgtgccccagatctgcagcaagaagcagaacagttgtttctgtcatccccagcctggctgcctctgcatggtgtggagcactcagcccgaaaatggcagaggaagacggatccctggtctcttttggctgtcctgggagccccagtcccatccgacctacaggcccaaagacacccaaccacaggccagatactgggttacaaagaggtcttgctggagaacacaaatctctcggctacaacctccttgtctcttcgccggcctccagggccagcctcccagtccttatggggaaatccaactcagtatcccttctggccaggggggatggatgaacccaccataacagatctgaacacacgggaggaggctgaggaggagatagactttgagaaagatcttcttactattccacctggtttcaagaaaggcatggactttgcaccaaaagattgtccaactccagctcctggactactaagccttagctgtatgttggagcctctggatttgggtgggggtgacgaggatgagaatgaggcagtgggacagccaggaggtcccagaggggacactgtttcagcctctccctgcagtgctcccctggcccgagcaagcagcttggaagacctagtgttgaaggaagcgtccacagctgtatccaccccagaggccccagagcctccatctcaggagcagtgggccatccctgtggacgccacctcccctgttggtgatttctatcgcctcattccccagccagccttccagtgggcatttgagccagatgtgtttcagaaacaggccatcctgcacttggaacggcatgactctgtctttgtcgcagctcacacatctgcaggaaaaacagttgtggctgaatatgccattgccctggcccagaaacacatgacacgcaccatctacacttcgcccatcaaggccctgagcaaccagaagttccgggacttccgaaacacattcggggatgtggggctgctcaccggggatgtacagctgcatccggaggcctcctgcctcatcatgaccacagagatccttcgctccatgctgtacagtggctcagatgttattcgggacctggagtgggtcatctttgatgaggttcactatatcaacgatgtcgagcgtggggtcgtgtgggaggaggtgcttatcatgctacctgaccacgtttctatcatccttctgagtgccaccgtccccaacgcccttgagtttgctgactggattgggcggctgaagcgtcgtcagatctatgtgattagcactgtaacccgccccgtgcccctggagcactatcttttcacagggaacagctccaagacccagggggagctctttttgttgctggactcccgaggagccttccatacaaaagggtactatgcagctgtggaggccaagaaggagagaatgagcaaacacgcccagacctttggggccaagcagcccacacatcaggggggccctgcacaggaccgcggagtgtacctgtccctcctggcctccctccgcacacgtgcccagttgcccgtggtggtgttcaccttctcccggggccgctgtgatgagcaggcctcaggcctcacctcccttgacctcaccaccagttcggagaagagcgagatccacctcttcctgcagcgctgccttgctcgcctccgtggctctgaccgccagctgccccaggtcctgcacatgtcagagctcctgaatcgcggcctgggtgtgcaccatagcggcatcctgcccatcctcaaggagatcgtggagatgctcttcagccgtggcctggtcaaggtcttgtttgccacagagacctttgccatgggagtaaacatgcctgctcgtacagtagtgtttgactccatgcgcaaacacgatggctccaccttccgggacctgctccctggggagtatgtgcagatggcaggccgggcagggcggaggggcctggaccccacaggcaccgttatcctgctctgcaagggccgagtgcccgagatggcagacctgcaccgcatgatgatggggaagccgtcccagctgcagtcccagttccgcctcacgtacactatgatcctcaacttgctgcgagtggatgccctcagggtggaggacatgatgaagaggagcttctctgagtttccctcccgcaaagacagcaaggcccatgaacaggccctggctgaactgaccaagaggctgggagctttggaggagcctgacatgactggccaactggtcgacctgcctgaatattacagctggggggaggaactgacagagacccagcacatgatccagcgacgcatcatggagtctgtgaacgggctgaagtctctctcagcaggaagggtggtggttgtgaagaatcaggagcatcacaacgcattgggagtgatcctacaggtctcctcgaactccaccagcagagtattcacaaccctggtcttgtgtgataagcccttgtcccaggacccacaggacagggggccagccactgcagaggtgccctatccagatgacctcgtgggattcaagctgttcctgcctgaagggccttgtgaccacaccgtggtcaagctccagccaggagatatggctgccatcaccaccaaggtgctccgggtgaatggggagaagatcttggaggacttcagcaagaggcagcagccaaaattcaagaaggatcctccccttgcagccgtgaccactgctgtccaggaactgctgcgtctggctcaggcccacccagccggacctcccaccctcgaccctgtcaatgacctgcagctcaaagatatgtcagttgtagagggtgggctccgggcccggaagctggaggagctgatccagggggctcagtgtgtacacagcccccgttttcctgcccagtacctgaagctgcgggagcgaatgcagatacagaaggagatggagcggctgcgcttcctactgtcggatcagtcattgctgctgcttcctgagtaccatcagcgagtagaggtgctccgaaccctgggttatgtggacgaggcgggcactgtgaagctggcagggcgggtggcttgtgccatgagcagccatgagttgctcctcactgagctcatgtttgacaatgcactgagcaccctgcggcctgaggagattgctgccttgctctctggcctggtctgccagagccctggggacgctggggatcagctcccaaacaccctcaagcagggaatagaacgtgtccgggctgtggccaagcggattggtgaggtccaggtggcttgtggcctgaaccagacggtggaggaatttgtgggggagctgaattttgggctggttgaggttgtatatgagtgggcccggggcatgcccttctccgagttggcagggctctcagggacccctgagggcctggtggtccgctgcattcagcgcctggctgagatgtgtcgctcactgcggggggcagcccgcctggtaggagagcctgtgctgggtgccaagatggagacagcggctaccttgctacggcgggacatcgtatttgcggccagcctctacacccagtgaatgccccatgtaaaaacatgatgataaaacagcaaagcac

SEQ ID NO: 14759 - protein, 1246 aa, Homo sapiens; identical to SEQ ID NO: 1631

SEQ ID NO: 14760 - DNA, 682 bp, Homo sapiens
ggatgatggagacagagcgacttgtgctaccccctccagatcccctggacctaccccttcgggccgtggagctcggatgcacggggcactgggagctgctgaacttgcctggagctccagagagtagcgtgagtgacttttgaccctaacctttgacccgcattgagtccaaacctccttcaccctcctcacagtaggatctagcttaaccttgttcatctgtgcctgtactcctgtccatcccagcctgaaggggtgctggacagattacagcccagtgtacctgcagtacatgtgaggacagagcagaaagggctggggatatttttgctttgagagctgctctttcaaatgtggcatttctccgtggagctcccttctgtatccaagcaccagggcacttggtgactgagatgataggctttgagcctccaacctttcatccttaggtctgggacccctttttctaaaatcagtgagtctccaatttcagtgtgcttcatgattagccagggagctttttaaaaatgcacattcctaggtccagcctccatgtttctgaaatccaaaatctgccccaggtaattcagtagcaggtagtttttggccaagcctgattgtcctagtctgtttgacacatctgccatttctgatctgaacacaagtcccatcatctcttttg

SEQ ID NO: 14761 - protein, 46 aa, Homo sapiens
MMETERLVLPPPDPLDLPLRAVELGCTGHWELLNLPGAPESSVSDF

SEQ ID NO: 14762 - DNA, 467 bp, Homo sapiens
cggggactcgttggcggcgtggaggggcgccggtggccacgttggtgtcaacctccttcgtgaagctcacacctcccccgccccgggaggggtttgcccgccactgtcgctgaatgattgcatcatcgaaagcagaaaaccacttttgcatccttcggcctctggcgtgcctgccatgacgtcatagctctgcggaggtggaagttggggagctttgagtgtttcaacatctgtccatgttcctgtggccacatctaacccactgcttccaactgctgcagaacactctatgggtgcatcccccacactaaccttccctctctcccagtgaagggcaccctggtactaccaacaccatgccaccacaaacaaaggatgggtgtacatgttctctcacagaccagggtgagaatttctttgtgatatatacccaggaatgaaatataagctcagagtatgatatagtt

SEQ ID NO: 14763 - protein, 46 aa, Homo sapiens
LHHRKQKTTFASFGLWRACHDVIALRRWKLGSFECFNICPCSCGHI

SEQ ID NO: 14764 - DNA, 744 bp, Homo sapiens
cccacaggacagggggccagccactgcagaggtgccctatccagatgacctcgtgggattcaagctggaatagaacgtgtccgggctgtggccaagcggattggtgaggtccaggtggcttgtggcctgaaccagacggtggaggaatttgtgggggagctgaattttgggctggttgaggttgtatatgagtgggcccggggcatgcccttctccgagttggcagggctctcagggacccctgagggcctggtggtccgctgcattcagcgcctggctgagatgtgtcgctcactgcggggggcagcccgcctggtaggagagcctgtgctgggtgccaagatggagacagcggctaccttgctacggcgggacatcgtatttgcggccagcctctacacccagtgaatgccccatgtaaaaacatgatgataaaacagcaaagcactgttgtgtgcttgagttgctggacagggatgactcagctaagaagacagcgagagaacctcttagaaatatgcttttattatctgcacacagagatatgactgcctccctctaaagcattactatttgggagagggagtcttggggggtgatgggaggtcctgagtcatagcttccacataccatatgggcaggaaggcgtaaggtgcatcttggtgtacagacacggtgactgggccgccaggctcccaagagaagagatgaacgagcctggggggcagatggaggcatcagttg

SEQ ID NO: 14765 - protein, 67 aa, Homo sapiens
MPFSELAGLSGTPEGLVVRCIQRLAEMCRSLRGAARLVGEPVLGAKMETAATLLRRDIVFAASLYTQ

SEQ ID NO: 14766 - DNA, 947 bp, Homo sapiens
agagatgctagggaggcccttctcctccagaggggcacgtagaggcagggaggggcagtggtctgggagtttcctccagcctgagggagaccatgaagtggtggggttgtagtgagggggctcccccagcctaagggagactgtgaagtggaggttgtagtaagagggcttccacagcctgagggaggcttctgggggagagaagatcttaccccagatcttaagatctgctccctcttcaggaaggatcctccccttgcagccgtgaccactgctgtccaggaactgctgcgtctggctcaggcccacccagccggacctcccaccctcgaccctgtcaatgacctgcagctcaaagatatgtcagttgtagagggcgggcactgtgaagctggcagggcgggtggcttgtgccatgagcagccatgagttgctcctcactgagctcatgtttgacaatgcactgagcaccctgcggcctgaggagattgctgccttgctctctggcctggtctgccagagccctggggacgctggggatcagctcccaaacaccctcaagcagggaatagaacgtgtccgggctgtggccaagcggattggtgaggtccaggtggcttgtggcctgaaccagacggtggaggaatttgtgggggagctgaattttgggctggttgaggttgtatatgagtgggcccggggcatgcccttctccgagttggcagggctctcagggacccctgagggcctggtggtccgctgcattcagcgcctggctgagatgtgtcgctcactgcggggggcagcccgcctggtaggagagcctgtgctgggtgccaagatggagacagcggctaccttgctacggcgggacatcgtatttgcggccagcctctacacccagtgaatgccccatgtaaaaacatgatgataaaacagcaaagcac

SEQ ID NO: 14767 - protein, 163 aa, Homo sapiens
MSSHELLLTELMFDNALSTLRPEEIAALLSGLVCQSPGDAGDQLPNTLKQGIERVRAVAKRIGEVQVACGLNQTVEEFVGELNFGLVEVVYEWARGMPFSELAGLSGTPEGLVVRCIQRLAEMCRSLRGAARLVGEPVLGAKMETAATLLRRDIVFAASLYTQ

SEQ ID NO: 14768 - DNA, 1243 bp, Homo sapiens
agagatgctagggaggcccttctcctccagaggggcacgtagaggcagggaggggcagtggtctgggagtttcctccagcctgagggagaccatgaagtggtggggttgtagtgagggggctcccccagcctaagggagactgtgaagtggaggttgtagtaagagggcttccacagcctgagggaggcttctgggggagagaagatcttaccccagatcttaagatctgctccctcttcaggaaggatcctccccttgcagccgtgaccactgctgtccaggaactgctgcgtctggctcaggcccacccagccggacctcccaccctcgaccctgtcaatgacctgcagctcaaagatatgtcagttgtagagggcgggcactgtgaagctggcagggcgggtggcttgtgccatgagcagccatgagttgctcctcactgagctcatgtttgacaatgcactgagcaccctgcggcctgaggagattgctgccttgctctctggcctggtctgccagagccctggggacgctggggatcagctcccaaacaccctcaagcagggaatagaacgtgtccgggctgtggccaagcggattggtgaggtccaggtggcttgtggcctgaaccagacggtggaggaatttgtgggggagctgaattttgggctggttgaggttgtatatgagtgggcccggggcatgcccttctccgagttggcagggctctcagggacccctgagggcctggtggtccgctgcattcagcgcctggctgagatgtgtcgctcactgcggggggcagcccgcctggtaggagagcctgtgctgggtgccaagatggagacagcggctaccttgctacggcgggacatcgtatttgcggccagcctctacacccagtgaatgccccatgtaaaaacatgatgataaaacagcaaagcactgttgtgtgcttgagttgctggacagggatgactcagctaagaagacagcgagagaacctcttagaaatatgcttttattatctgcacacagagatatgactgcctccctctaaagcattactatttgggagagggagtcttggggggtgatgggaggtcctgagtcatagcttccacataccatatgggcaggaaggcgtaaggtgcatcttggtgtacagacacggtgactgggccgccaggctcccaagagaagagatgaacgagcctggggggcagatggaggcatcagttg

SEQ ID NO: 14769 - protein, 163 aa, Homo sapiens; identical to SEQ ID NO: 14767

SEQ ID NO: 14770 - DNA, 640 bp, Homo sapiens
gcagggcgggtggcttgtgccatgagcagccatgagttgctcctcactgagctcatgtttgacaatgcactgagcaccctgcggcctgaggagattgctgccttgctctctggcctggtctgccagagccctggggacgctggggatcagctcccaaacaccctcaagcagggaatagaacgtgtccgggctgtggccaagcggattggtgaggtccaggtggcttgtggcctgaaccagacggtggaggaatttgtgggggagctgaattttgggctggttgaggttgtatatgagtgggcccggggcatggtgagtacctgaggtttgggattttgcagacggctggctggggagaacctgcccaggctgagtgcatccagtcctcaccctactttccccacagcccttctccgagttggcagggctctcagggacccctgagggcctggtggtccgctgcattcagcgcctggctgagatgtgtcgctcactgcggggggcagcccgcctggtaggagagcctgtgctgggtgccaagatggagacagcggctaccttgctacggcgggacatcgtatttgcggccagcctctacacccagtgaatgccccatgtaaaaacatgatgataaaacagc

SEQ ID NO: 14771 - protein, 100 aa, Homo sapiens
MSSHELLLTELMFDNALSTLRPEEIAALLSGLVCQSPGDAGDQLPNTLKQGIERVRAVAKRIGEVQVACGLNQTVEEFVGELNFGLVEVVYEWARGMVST

SEQ ID NO: 14772 - DNA, 943 bp, Homo sapiens
gcagggcgggtggcttgtgccatgagcagccatgagttgctcctcactgagctcatgtttgacaatgcactgagcaccctgcggcctgaggagattgctgccttgctctctggcctggtctgccagagccctggggacgctggggatcagctcccaaacaccctcaagcagggaatagaacgtgtccgggctgtggccaagcggattggtgaggtccaggtggcttgtggcctgaaccagacggtggaggaatttgtgggggagctgaattttgggctggttgaggttgtatatgagtgggcccggggcatggtgagtacctgaggtttgggattttgcagacggctggctggggagaacctgcccaggctgagtgcatccagtcctcaccctactttccccacagcccttctccgagttggcagggctctcagggacccctgagggcctggtggtccgctgcattcagcgcctggctgagatgtgtcgctcactgcggggggcagcccgcctggtaggagagcctgtgctgggtgccaagatggagacagcggctaccttgctacggcgggacatcgtatttgcggccagcctctacacccagtgaatgccccatgtaaaaacatgatgataaaacagcaaagcactgttgtgtgcttgagttgctggacagggatgactcagctaagaagacagcgagagaacctcttagaaatatgcttttattatctgcacacagagatatgactgcctccctctaaagcattactatttgggagagggagtcttggggggtgatgggaggtcctgagtcatagcttccacataccatatgggcaggaaggcgtaaggtgcatcttggtgtacagacacggtgactgggccgccaggctcccaagagaagagatgaacgagcctggggggcagatggaggcatcagttg

SEQ ID NO: 14773 - protein, 100 aa, Homo sapiens; identical to SEQ ID NO: 14771

SEQ ID NO: 14774 - DNA, 2209 bp, Homo sapiens
accacttttgcatccttcggcctctggcgtgcctgccatgacgtcatagctctgcggaggtggaagttggggagctttgaggcctcctctgtagaatggaaactctgtacccctgcttgtcttaggacctcatggatcccagggggaccaagagaggagctgagaagacagaggtagctgagcctcggaacaaactacctcgtccagcaccttctctgcccacagaccctgccctctactctgggccctttcctttctaccggcgcccttcggaactgggctgcttctccctggatgctcaacgccagtaccatggagatgcccgagccctgcgctactatagcccaccccccactaacggtccaggccccaactttgacctcagagacggatacccggatcgataccagccccgggacgaggaggtccaggaaaggctggaccacctgctgtgctggctcctggaacaccgaggccggttggaggggggtccaggctggctggcagaggccatagtgacgtggcgggggcacctgacaaaactgctgacgacaccgtatgagcggcaggagggctggcagctggcagcctcccggttccagggaacactatacctgagtgaagtggagacaccgaacgctcgggcccagaggcttgctcggccaccgctcctccgggagcttatgtacatgggatacaaatttgagcagtacatgtgtgcaggtgagttgcccctgcttcatagcccccttccccttcccagaggttgagagccccccacgcctgctgctgcttctctccttgtgcagacaaacctggaagctccccagacccctctggggaggttaacaccaacgtggccttctgctctgtgctacgcagccgcctgggaagccaccctctgctcttctcaggggaggtagactgcacagacccccaagccccatccacacagcccccaacctgctatgtggagctcaagacctccaaggagatgcacagccctggccaatggaggagtttctacaggttcaggatcggggtgggcagggcgagagcttaggcttgaaggctgggaaagggacttggggaggagggtgaaggcagaatggagggtgcacgaggggtcccactgatcccttgcttttcctgtcagacacaagctcctgaaatggtgggctcagtcattcctcccaggggtcccgaatgttgttgctggcttccgtaacccagacggttttgtctcttccctcaagacctttcctaccatgaagatgtttgaatatgtcagggtaagggaacgatgttgcagctcccacccgtatccccaaacaccaagaccacaggtctagcatccagggcaacagcctgccttctctcctcccaccacccccactgcccatcttctgcctcctcctctgcctgctccagaatgaccgtgacggctggaatccctctgtgtgcatgaacttctgtgccgccttccttagctttgcccagagcacggttgtccaggatgaccccaggtgaggcattcagctctgtccctcccctctggatcccaggatccagcctctggccctcaactgatgcctccatctgccccccaggctcgttcatctcttctcttgggagcctggcggcccagtcaccgtgtctgtacaccaagatgcaccttacgccttcctgcccatatggtatgtggaagctatgactcaggacctcccatcaccccccaagactccctctcccaaatagtaatgctttagagggaggcagtcatatctctgtgtgcagataataaaagcatatttctaagaggttctctcgctgtcttcttagctgagtcatccctgtccagcaactcaagcacacaacagtgctttgctgttttatcatcatgtttttacatggggcattcactgggtgtagaggctggccgcaaatacgatgtcccgccgtagcaaggtagccgctgtctccatcttggcacccagcacaggctctcctaccaggcgggctgccccccgcagtgagcgacacatctcagccaggcgctgaatgcagcggaccaccaggccctcaggggtccctgagagccctgccaactcggagaagggctgtggggaaagtagggtgaggactggatgcactcagcctgggcaggttctccccagccagccgtctgcaaaatcccaaacctcaggta

SEQ ID NO: 14775 - protein, 212 aa, Homo sapiens
MDPRGTKRGAEKTEVAEPRNKLPRPAPSLPTDPALYSGPFPFYRRPSELGCFSLDAQRQYHGDARALRYYSPPPTNGPGPNFDLRDGYPDRYQPRDEEVQERLDHLLCWLLEHRGRLEGGPGWLAEAIVTWRGHLTKLLTTPYERQEGWQLAASRFQGTLYLSEVETPNARAQRLARPPLLRELMYMGYKFEQYMCAGELPLLHSPLPLPRG

SEQ ID NO: 14776 - DNA, 2362 bp, Homo sapiens
gtgatgacgaaaggagcgtcaacttgtcgtccctcaggcccgtcagtgctgggaggggcggtggcgacgcacataccagcatcacctccgccaggccgggccccacgccggccgcggattggctccctccaagggcacgcacgcccggggactcgttggcggcgtggaggggcgccggtggccacgttggtgtcaacctccttcgtgaagctcacacctcccccgccccgggaggggtttgcccgccactgtcgctgaatgattgcatcatcgaaagcagaaaaccacttttgcatccttcggcctctggcgtgcctgccatgacgtcatagctctgcggaggtggaagttggggagctttgaggacctcatggatcccagggggaccaagagaggagctgagaagacagaggtagctgagcctcggaacaaactacctcgtccagcaccttctctgcccacagaccctgccctctactctgggccctttcctttctaccggcgcccttcggaactgggctgcttctccctggatgctcaacgccagtaccatggagatgcccgagccctgcgctactatagcccaccccccactaacggtccaggccccaactttgacctcagagacggatacccggatcgataccagccccgggacgaggaggtccaggaaaggctggaccacctgctgtgctggctcctggaacaccgaggccggttggaggggggtccaggctggctggcagaggccatagtgacgtggcgggggcacctgacaaaactgctgacgacaccgtatgagcggcaggagggctggcagctggcagcctcccggttccagggaacactatacctgagtgaagtggagacaccgaacgctcgggcccagaggcttgctcggccaccgctcctccgggagcttatgtacatgggatacaaatttgagcagtacatgtgtgcagacaaacctggaagctccccagacccctctggggaggttaacaccaacgtggccttctgctctgtgctacgcagccgcctgggaagccaccctctgctcttctcaggggaggtagactgcacagacccccaagccccatccacacagcccccaacctgctatgtggagctcaagacctccaaggagatgcacagccctggccaatggaggagtttctacaggttcaggatcggggtgggcagggcgagagcttaggcttgaaggctgggaaagggacttggggaggagggtgaaggcagaatggagggtgcacgaggggtcccactgatcccttgcttttcctgtcagacacaagctcctgaaatggtgggctcagtcattcctcccaggggtcccgaatgttgttgctggcttccgtaacccagacggttttgtctcttccctcaagacctttcctaccatgaagatgtttgaatatgtcagggtaagggaacgatgttgcagctcccacccgtatccccaaacaccaagaccacaggtctagcatccagggcaacagcctgccttctctcctcccaccacccccactgcccatcttctgcctcctcctctgcctgctccagaatgaccgtgacggctggaatccctctgtgtgcatgaacttctgtgccgccttccttagctttgcccagagcacggttgtccaggatgaccccaggtgaggcattcagctctgtccctcccctctggatcccaggatccagcctctggccctcaactgatgcctccatctgccccccaggctcgttcatctcttctcttgggagcctggcggcccagtcaccgtgtctgtacaccaagatgcaccttacgccttcctgcccatatggtatgtggaagctatgactcaggacctcccatcaccccccaagactccctctcccaaatagtaatgctttagagggaggcagtcatatctctgtgtgcagataataaaagcatatttctaagaggttctctcgctgtcttcttagctgagtcatccctgtccagcaactcaagcacacaacagtgctttgctgttttatcatcatgtttttacatggggcattcactgggtgtagaggctggccgcaaatacgatgtcccgccgtagcaaggtagccgctgtctccatcttggcacccagcacaggctctcctaccaggcgggctgccccccgcagtgagcgacacatctcagccaggcgctgaatgcagcggaccaccaggccctcaggggtccctgagagccctgccaactcggagaagggctgtggggaaagtagggtgaggactggatgcactcagcctgggcaggttctccccagccagccgtctgcaaaatcccaaacctcaggta

SEQ ID NO: 14777 - protein, 281 aa, Homo sapiens [sequence omitted]

SEQ ID NO: 14778 - DNA, 586 bp, Homo sapiens
tgtgcagacaaacctggaagctccccagacccctctggggaggttaacaccaacgtggccttctgctctgtgctacgcagccgcctgggaagccaccctctgctcttctcaggggaggtagactgcacagacccccaagccccatccacacagcccccaacctgctatgtggagctcaagacctccaaggagatgcacagccctggccaatggaggagtttctacaggttcaggatcgggacctttcctaccatgaagatgtttgaatatgtcaggaatgaccgtgacggctggaatccctctgtgtgcatgaacttctgtgccgccttccttagctttgcccagagcacggttgtccaggatgaccccaggctcgttcatctcttctcttgggagcctggcggcccagtcaccgtgtctgtacaccaagatgcaccttacgccttcctgcccatatggtatgtggaagctatgactcaggacctcccatcaccccccaagactccctctcccaaatagtaatgctttagagggaggcagtcatatctctgtgtgcagataataaaagcatatttctaagaggttc

SEQ ID NO: 14779 - protein, 108 aa, Homo sapiens
MHSPGQWRSFYRFRIGTFPTMKMFEYVRNDRDGWNPSVCMNFCAAFLSFAQSTVVQDDPRLVHLFSWEPGGPVTVSVHQDAPYAFLPIWYVEAMTQDLPSPPKTPSPK

SEQ ID NO: 14780 - DNA, 1203 bp, Homo sapiens
aaaactgctgacgacaccgtatgagcggcaggagggctggcagctggcagcctcccggttccagggaacactatacctgagtgaagtggagacaccgaacgctcgggcccagaggcttgctcggccaccgctcctccgggagcttatgtacatgggatacaaatttgagcagtacatgtgtgcaggtgagttgcccctgcttcatagcccccttccccttcccagaggttgagagccccccacgcctgctgctgcttctctccttgtgcagacaaacctggaagctccccagacccctctggggaggttaacaccaacgtggccttctgctctgtgctacgcagccgcctgggaagccaccctctgctcttctcaggggaggtagactgcacagacccccaagccccatccacacagcccccaacctgctatgtggagctcaagacctccaaggagatgcacagccctggccaatggaggagtttctacaggttcaggatcggggtgggcagggcgagagcttaggcttgaaggctgggaaagggacttggggaggagggtgaaggcagaatggagggtgcacgaggggtcccactgatcccttgcttttcctgtcagacacaagctcctgaaatggtgggctcagtcattcctcccaggggtcccgaatgttgttgctggcttccgtaacccagacggttttgtctcttccctcaagacctttcctaccatgaagatgtttgaatatgtcagggtaagggaacgatgttgcagctcccacccgtatccccaaacaccaagaccacaggtctagcatccagggcaacagcctgccttctctcctcccaccacccccactgcccatcttctgcctcctcctctgcctgctccagaatgaccgtgacggctggaatccctctgtgtgcatgaacttctgtgccgccttccttagctttgcccagagcacggttgtccaggatgaccccaggctcgttcatctcttctcttgggagcctggcggcccagtcaccgtgtctgtacaccaagatgcaccttacgccttcctgcccatatggtatgtggaagctatgactcaggacctcccatcaccccccaagactccctctcccaaatagtaatgctttagagggaggcagtcatatctctgtgtgcagataataaaagcatatttctaagaggttc

SEQ ID NO: 14781 - protein, 69 aa, Homo sapiens [sequence omitted]

SEQ ID NO: 14782 - DNA, 1825 bp, Homo sapiens
accacttttgcatccttcggcctctggcgtgcctgccatgacgtcatagctctgcggaggtggaagttggggagctttgaggcctcctctgtagaatggaaactctgtacccctgcttgtcttaggacctcatggatcccagggggaccaagagaggagctgagaagacagaggtagctgagcctcggaacaaactacctcgtccagcaccttctctgcccacagaccctgccctctactctgggccctttcctttctaccggcgcccttcggaactgggctgcttctccctggatgctcaacgccagtaccatggagatgcccgagccctgcgctactatagcccaccccccactaacggtccaggccccaactttgacctcagagacggatacccggatcgataccagccccgggacgaggaggtccaggaaaggctggaccacctgctgtgctggctcctggaacaccgaggccggttggaggggggtccaggctggctggcagaggccatagtgacgtggcgggggcacctgacaaaactgctgacgacaccgtatgagcggcaggagggctggcagctggcagcctcccggttccagggaacactatacctgagtgaagtggagacaccgaacgctcgggcccagaggcttgctcggccaccgctcctccgggagcttatgtacatgggatacaaatttgagcagtacatgtgtgcaggtgagttgcccctgcttcatagcccccttccccttcccagaggttgagagccccccacgcctgctgctgcttctctccttgtgcagacaaacctggaagctccccagacccctctggggaggttaacaccaacgtggccttctgctctgtgctacgcagccgcctgggaagccaccctctgctcttctcaggggaggtagactgcacagacccccaagccccatccacacagcccccaacctgctatgtggagctcaagacctccaaggagatgcacagccctggccaatggaggagtttctacaggttcaggatcggggtgggcagggcgagagcttaggcttgaaggctgggaaagggacttggggaggagggtgaaggcagaatggagggtgcacgaggggtcccactgatcccttgcttttcctgtcagacacaagctcctgaaatggtgggctcagtcattcctcccaggggtcccgaatgttgttgctggcttccgtaacccagacggttttgtctcttccctcaagacctttcctaccatgaagatgtttgaatatgtcagggtaagggaacgatgttgcagctcccacccgtatccccaaacaccaagaccacaggtctagcatccagggcaacagcctgccttctctcctcccaccacccccactgcccatcttctgcctcctcctctgcctgctccagaatgaccgtgacggctggaatccctctgtgtgcatgaacttctgtgccgccttccttagctttgcccagagcacggttgtccaggatgaccccaggtgaggcattcagctctgtccctcccctctggatcccaggatccagcctctggccctcaactgatgcctccatctgccccccaggctcgttcatctcttctcttgggagcctggcggcccagtcaccgtgtctgtacaccaagatgcaccttacgccttcctgcccatatggtatgtggaagctatgactcaggacctcccatcaccccccaagactccctctcccaaatagtaatgctttagagggaggcagtcatatctctgtgtgcagataataaaagcatatttctaagaggttc

SEQ ID NO: 14783 - protein, 212 aa, Homo sapiens; identical to SEQ ID NO: 14775

SEQ ID NO: 14784 - DNA, 1139 bp, Homo sapiens
ggggcggtggcgacgcacataccagcatcacctccgccaggccgggccccacgccggccgcggattggctccctccaagggcacgcacgcccggggactcgttggcggcgtggaggggcgccggtggccacgttggtgtcaacctccttcgtgaagctcacacctcccccgccccgggaggggtttgcccgccactgtcgctgaatgattgcatcatcgaaagcagaaaaccacttttgcatccttcggcctctggcgtgcctgccatgacgtcatagctctgcggaggtggaagttggggagctttgaggggtccaggctggctggcagaggccatagtgacgtggcgggggcacctgacaaaactgctgacgacaccgtatgagcggcaggagggctggcagctggcagcctcccggttccagggaacactatacctgagtgaagtggagacaccgaacgctcgggcccagaggcttgctcggccaccgctcctccgggagcttatgtacatgggatacaaatttgagcagtacatgtgtgcagccgcctgggaagccaccctctgctcttctcaggggaggtagactgcacagacccccaagccccatccacacagcccccaacctgctatgtggagctcaagacctccaaggagatgcacagccctggccaatggaggagtttctacagacacaagctcctgaaatggtgggctcagtcattcctcccaggggtcccgaatgttgttgctggcttccgtaacccagacggttttgtctcttccctcaagacctttcctaccatgaagatgtttgaatatgtcaggaatgaccgtgacggctggaatccctctgtgtgcatgaacttctgtgccgccttccttagctttgcccagagcacggttgtccaggatgaccccaggctcgttcatctcttctcttgggagcctggcggcccagtcaccgtgtctgtacaccaagatgcaccttacgccttcctgcccatatggtatgtggaagctatgactcaggacctcccatcaccccccaagactccctctcccaaatagtaatgctttagagggaggcagtcatatctctgtgtgcagataataaaagcatatttctaagaggttc

SEQ ID NO: 14785 - protein, 137 aa, Homo sapiens
MHSPGQWRSFYRHKLLKWWAQSFLPGVPNVVAGFRNPDGFVSSLKTFPTMKMFEYVRNDRDGWNPSVCMNFCAAFLSFAQSTVVQDDPRLVHLFSWEPGGPVTVSVHQDAPYAFLPIWYVEAMTQDLPSPPKTPSPK

SEQ ID NO: 14786 - DNA, 1410 bp, Homo sapiens
gaaaggagcgtcaacttgtcgtccctcaggcccgtcagtgctgggaggggcggtggcgacgcacataccagcatcacctccgccaggccgggccccacgccggccgcggattggctccctccaagggcacgcacgcccggggactcgttggcggcgtggaggggcgccggtggccacgttggtgtcaacctccttcgtgaagctcacacctcccccgccccgggaggggtttgcccgccactgtcgctgaatgattgcatcatcgaaagcagaaaaccacttttgcatccttcggcctctggcgtgcctgccatgacgtcatagctctgcggaggtggaagttggggagctttgaggacctcatggatcccagggggaccaagagaggagctgagaagacagaggtagctgagcctcggaacaaactacctcgtccagcaccttctctgcccacagaccctgccctctactctgggccctttcctttctaccggcgcccttcggaactgggctgcttctccctggatgctcaacgccagtaccatggagatgcccgagccctgcgctactatagcccaccccccactaacggtccaggccccaactttgacctcagagacggatacccggatcgataccagccccgggacgaggaggtccaggaaaggctggaccacctgctgtgctggctcctggaacaccgaggccggttggaggggggtccaggctggctggcagaggccatagtgacgtggcgggggcacctgacaaaactgctgacgacaccgtatgagcggcaggagggctggcagctggcagcctcccggttccagggaacactatacctgagtgaagtggagacaccgaacgctcgggcccagaggcttgctcggccaccgctcctccgggagcttatgtacatgggatacaaatttgagcagtacatgtgtgcagacaaacctggaagctccccagacccctctggggaggttaacaccaacgtggccttctgctctgtgctacgcagccgcctgggaagccaccctctgctcttctcaggggagacctttcctaccatgaagatgtttgaatatgtcaggaatgaccgtgacggctggaatccctctgtgtgcatgaacttctgtgccgccttccttagctttgcccagagcacggttgtccaggatgaccccaggctcgttcatctcttctcttgggagcctggcggcccagtcaccgtgtctgtacaccaagatgcaccttacgccttcctgcccatatggtatgtggaagctatgactcaggacctcccatcaccccccaagactccctctcccaaatagtaatgctttagagggaggcagtcatatctctgtgtgcagataataaaagcatatttctaagaggttc

SEQ ID NO: 14787 - protein, 326 aa, Homo sapiens
MDPRGTKRGAEKTEVAEPRNKLPRPAPSLPTDPALYSGPFPFYRRPSELGCFSLDAQRQYHGDARALRYYSPPPTNGPGPNFDLRDGYPDRYQPRDEEVQERLDHLLCWLLEHRGRLEGGPGWLAEAIVTWRGHLTKLLTTPYERQEGWQLAASRFQGTLYLSEVETPNARAQRLARPPLLRELMYMGYKFEQYMCADKPGSSPDPSGEVNTNVAFCSVLRSRLGSHPLLFSGETFPTMKMFEYVRNDRDGWNPSVCMNFCAAFLSFAQSTVVQDDPRLVHLFSWEPGGPVTVSVHQDAPYAFLPIWYVEAMTQDLPSPPKTPSPK

SEQ ID NO: 14788 - DNA, 1978 bp, Homo sapiens
gtgatgacgaaaggagcgtcaacttgtcgtccctcaggcccgtcagtgctgggaggggcggtggcgacgcacataccagcatcacctccgccaggccgggccccacgccggccgcggattggctccctccaagggcacgcacgcccggggactcgttggcggcgtggaggggcgccggtggccacgttggtgtcaacctccttcgtgaagctcacacctcccccgccccgggaggggtttgcccgccactgtcgctgaatgattgcatcatcgaaagcagaaaaccacttttgcatccttcggcctctggcgtgcctgccatgacgtcatagctctgcggaggtggaagttggggagctttgaggacctcatggatcccagggggaccaagagaggagctgagaagacagaggtagctgagcctcggaacaaactacctcgtccagcaccttctctgcccacagaccctgccctctactctgggccctttcctttctaccggcgcccttcggaactgggctgcttctccctggatgctcaacgccagtaccatggagatgcccgagccctgcgctactatagcccaccccccactaacggtccaggccccaactttgacctcagagacggatacccggatcgataccagccccgggacgaggaggtccaggaaaggctggaccacctgctgtgctggctcctggaacaccgaggccggttggaggggggtccaggctggctggcagaggccatagtgacgtggcgggggcacctgacaaaactgctgacgacaccgtatgagcggcaggagggctggcagctggcagcctcccggttccagggaacactatacctgagtgaagtggagacaccgaacgctcgggcccagaggcttgctcggccaccgctcctccgggagcttatgtacatgggatacaaatttgagcagtacatgtgtgcagacaaacctggaagctccccagacccctctggggaggttaacaccaacgtggccttctgctctgtgctacgcagccgcctgggaagccaccctctgctcttctcaggggaggtagactgcacagacccccaagccccatccacacagcccccaacctgctatgtggagctcaagacctccaaggagatgcacagccctggccaatggaggagtttctacaggttcaggatcggggtgggcagggcgagagcttaggcttgaaggctgggaaagggacttggggaggagggtgaaggcagaatggagggtgcacgaggggtcccactgatcccttgcttttcctgtcagacacaagctcctgaaatggtgggctcagtcattcctcccaggggtcccgaatgttgttgctggcttccgtaacccagacggttttgtctcttccctcaagacctttcctaccatgaagatgtttgaatatgtcagggtaagggaacgatgttgcagctcccacccgtatccccaaacaccaagaccacaggtctagcatccagggcaacagcctgccttctctcctcccaccacccccactgcccatcttctgcctcctcctctgcctgctccagaatgaccgtgacggctggaatccctctgtgtgcatgaacttctgtgccgccttccttagctttgcccagagcacggttgtccaggatgaccccaggtgaggcattcagctctgtccctcccctctggatcccaggatccagcctctggccctcaactgatgcctccatctgccccccaggctcgttcatctcttctcttgggagcctggcggcccagtcaccgtgtctgtacaccaagatgcaccttacgccttcctgcccatatggtatgtggaagctatgactcaggacctcccatcaccccccaagactccctctcccaaatagtaatgctttagagggaggcagtcatatctctgtgtgcagataataaaagcatatttctaagaggttc

SEQ ID NO: 14789 - protein, 281 aa, Homo sapiens [sequence omitted]

SEQ ID NO: 14790 - DNA, 1887 bp, Homo sapiens
ctcctagaccaggtgatgacgaaaggagcgtcaacttgtcgtccctcaggcccgtcagtgctgggaggggcggtggcgacgcacataccagcatcacctccgccaggccgggccccacgccggccgcggattggctccctccaagggcacgcacgcccggggactcgttggcggcgtggaggggcgccggtggccacgttggtgtcaacctccttcgtgaagctcacacctcccccgccccgggaggggtttgcccgccactgtcgctgaatgattgcatcatcgaaagcagaaaaccacttttgcatccttcggcctctggcgtgcctgccatgacgtcatagctctgcggaggtggaagttggggagctttgaggtaactggattcttgatctgagcgcagacgtccttcctaacctcactgcatttggaggacctggagggagggtgggtgaagggcaaggaaagaggcaggatgagagcttggccgcggtggcgtctgaggggcctgaatgtttcaaggccagagcctggcgatcaggtggctcgcttagtcctaaaccagtcatccttctccaggcctcctctgtagaatggaaactctgtacccctgcttgtcttaggacctcatggatcccagggggaccaagagaggagctgagaagacagaggtagctgagcctcggaacaaactacctcgtccagcaccttctctgcccacagaccctgccctctactctgggccctttcctttctaccggcgcccttcggaactgggctgcttctccctggatgctcaacgccagtaccatggagatgcccgagccctgcgctactatagcccaccccccactaacggtccaggccccaactttgacctcagagacggatacccggatcgataccagccccgggacgaggaggtccaggaaaggctggaccacctgctgtgctggctcctggaacaccgaggccggttggaggggggtccaggctggctggcagaggccatagtgacgtggcgggggcacctgacaaaactgctgacgacaccgtatgagcggcaggagggctggcagctggcagcctcccggttccagggaacactatacctgagtgaagtggagacaccgaacgctcgggcccagaggcttgctcggccaccgctcctccgggagcttatgtacatgggatacaaatttgagcagtacatgtgtgcagacaaacctggaagctccccagacccctctggggaggttaacaccaacgtggccttctgctctgtgctacgcagccgcctgggaagccaccctctgctcttctcaggggaggtagactgcacagacccccaagccccatccacacagcccccaacctgctatgtggagctcaagacctccaaggagatgcacagccctggccaatggaggagtttctacagacacaagctcctgaaatggtgggctcagtcattcctcccaggggtcccgaatgttgttgctggcttccgtaacccagacggttttgtctcttccctcaagacctttcctaccatgaagatgtttgaatatgtcaggaatgaccgtgacggctggaatccctctgtgtgcatgaacttctgtgccgccttccttagctttgcccagagcacggttgtccaggatgaccccaggctcgttcatctcttctcttgggagcctggcggcccagtcaccgtgtctgtacaccaagatgcaccttacgccttcctgcccatatggtatgtggaagctatgactcaggacctcccatcaccccccaagactccctctcccaaatagtaatgctttagagggaggcagtcatatctctgtgtgcagataataaaagcatatttctaagaggttc

SEQ ID NO: 14791 - protein, 396 aa, Homo sapiens; identical to SEQ ID NO: 1633

SEQ ID NO: 14792 - DNA, 1973 bp, Homo sapiens
ctcctagaccaggtgatgacgaaaggagcgtcaacttgtcgtccctcaggcccgtcagtgctgggaggggcggtggcgacgcacataccagcatcacctccgccaggccgggccccacgccggccgcggattggctccctccaagggcacgcacgcccggggactcgttggcggcgtggaggggcgccggtggccacgttggtgtcaacctccttcgtgaagctcacacctcccccgccccgggaggggtttgcccgccactgtcgctgaatgattgcatcatcgaaagcagaaaaccacttttgcatccttcggcctctggcgtgcctgccatgacgtcatagctctgcggaggtggaagttggggagctttgaggtaactggattcttgatctgagcgcagacgtccttcctaacctcactgcatttggaggacctggagggagggtgggtgaagggcaaggaaagaggcaggatgagagcttggccgcggtggcgtctgaggggcctgaatgtttcaaggccagagcctggcgatcaggtggctcgcttagtcctaaaccagtcatccttctccaggcctcctctgtagaatggaaactctgtacccctgcttgtcttaggacctcatggatcccagggggaccaagagaggagctgagaagacagaggtagctgagcctcggaacaaactacctcgtccagcaccttctctgcccacagaccctgccctctactctgggccctttcctttctaccggcgcccttcggaactgggctgcttctccctggatgctcaacgccagtaccatggagatgcccgagccctgcgctactatagcccaccccccactaacggtccaggccccaactttgacctcagagacggatacccggatcgataccagccccgggacgaggaggtccaggaaaggctggaccacctgctgtgctggctcctggaacaccgaggccggttggaggggggtccaggctggctggcagaggccatagtgacgtggcgggggcacctgacaaaactgctgacgacaccgtatgagcggcaggagggctggcagctggcagcctcccggttccagggaacactatacctgagtgaagtggagacaccgaacgctcgggcccagaggcttgctcggccaccgctcctccgggagcttatgtacatgggatacaaatttgagcagtacatgtgtgcaggtgagttgcccctgcttcatagcccccttccccttcccagaggttgagagccccccacgcctgctgctgcttctctccttgtgcagacaaacctggaagctccccagacccctctggggaggttaacaccaacgtggccttctgctctgtgctacgcagccgcctgggaagccaccctctgctcttctcaggggaggtagactgcacagacccccaagccccatccacacagcccccaacctgctatgtggagctcaagacctccaaggagatgcacagccctggccaatggaggagtttctacagacacaagctcctgaaatggtgggctcagtcattcctcccaggggtcccgaatgttgttgctggcttccgtaacccagacggttttgtctcttccctcaagacctttcctaccatgaagatgtttgaatatgtcaggaatgaccgtgacggctggaatccctctgtgtgcatgaacttctgtgccgccttccttagctttgcccagagcacggttgtccaggatgaccccaggctcgttcatctcttctcttgggagcctggcggcccagtcaccgtgtctgtacaccaagatgcaccttacgccttcctgcccatatggtatgtggaagctatgactcaggacctcccatcaccccccaagactccctctcccaaatagtaatgctttagagggaggcagtcatatctctgtgtgcagataataaaagcatatttctaagaggttc

SEQ ID NO: 14793 - protein, 212 aa, Homo sapiens; identical to SEQ ID NO: 14775

SEQ ID NO: 14794 - DNA, 2145 bp, Homo sapiens
ctcctagaccaggtgatgacgaaaggagcgtcaacttgtcgtccctcaggcccgtcagtgctgggaggggcggtggcgacgcacataccagcatcacctccgccaggccgggccccacgccggccgcggattggctccctccaagggcacgcacgcccggggactcgttggcggcgtggaggggcgccggtggccacgttggtgtcaacctccttcgtgaagctcacacctcccccgccccgggaggggtttgcccgccactgtcgctgaatgattgcatcatcgaaagcagaaaaccacttttgcatccttcggcctctggcgtgcctgccatgacgtcatagctctgcggaggtggaagttggggagctttgaggtaactggattcttgatctgagcgcagacgtccttcctaacctcactgcatttggaggacctggagggagggtgggtgaagggcaaggaaagaggcaggatgagagcttggccgcggtggcgtctgaggggcctgaatgtttcaaggccagagcctggcgatcaggtggctcgcttagtcctaaaccagtcatccttctccaggcctcctctgtagaatggaaactctgtacccctgcttgtcttaggacctcatggatcccagggggaccaagagaggagctgagaagacagaggtagctgagcctcggaacaaactacctcgtccagcaccttctctgcccacagaccctgccctctactctgggccctttcctttctaccggcgcccttcggaactgggctgcttctccctggatgctcaacgccagtaccatggagatgcccgagccctgcgctactatagcccaccccccactaacggtccaggccccaactttgacctcagagacggatacccggatcgataccagccccgggacgaggaggtccaggaaaggctggaccacctgctgtgctggctcctggaacaccgaggccggttggaggggtgagcaaagcgtggtaggcagtatatctggagacccgtacctaccctctaaaattaggagagccaaagccggggtgagaatcagtccttagaagaaacaagactattcttcgaggggagcatctcactaatgcttgtgtcagaccttcagcctgtaactcctgcctctcaggggtccaggctggctggcagaggccatagtgacgtggcgggggcacctgacaaaactgctgacgacaccgtatgagcggcaggagggctggcagctggcagcctcccggttccagggaacactatacctgagtgaagtggagacaccgaacgctcgggcccagaggcttgctcggccaccgctcctccgggagcttatgtacatgggatacaaatttgagcagtacatgtgtgcaggtgagttgcccctgcttcatagcccccttccccttcccagaggttgagagccccccacgcctgctgctgcttctctccttgtgcagacaaacctggaagctccccagacccctctggggaggttaacaccaacgtggccttctgctctgtgctacgcagccgcctgggaagccaccctctgctcttctcaggggaggtagactgcacagacccccaagccccatccacacagcccccaacctgctatgtggagctcaagacctccaaggagatgcacagccctggccaatggaggagtttctacagacacaagctcctgaaatggtgggctcagtcattcctcccaggggtcccgaatgttgttgctggcttccgtaacccagacggttttgtctcttccctcaagacctttcctaccatgaagatgtttgaatatgtcaggaatgaccgtgacggctggaatccctctgtgtgcatgaacttctgtgccgccttccttagctttgcccagagcacggttgtccaggatgaccccaggctcgttcatctcttctcttgggagcctggcggcccagtcaccgtgtctgtacaccaagatgcaccttacgccttcctgcccatatggtatgtggaagctatgactcaggacctcccatcaccccccaagactccctctcccaaatagtaatgctttagagggaggcagtcatatctctgtgtgcagataataaaagcatatttctaagaggttc

SEQ ID NO: 14795 - protein, 137 aa, Homo sapiens; identical to SEQ ID NO: 14785

SEQ ID NO: 14796 - DNA, 1603 bp, Homo sapiens
ctccgggatcaggcccgtcagtgctgggaggggcggtggcgacgcacataccagcatcacctccgccaggccgggccccacgccggccgcggattggctccctccaagggcacgcacgcccggggactcgttggcggcgtggaggggcgccggtggccacgttggtgtcaacctccttcgtgaagctcacacctcccccgccccgggaggggtttgcccgccactgtcgctgaatgattgcatcatcgaaagcagaaaaccacttttgcatccttcggcctctggcgtgcctgccatgacgtcatagctctgcggaggtggaagttggggagctttgaggacctcatggatcccagggggaccaagagaggagctgagaagacagaggtagctgagcctcggaacaaactacctcgtccagcaccttctctgcccacagaccctgccctctactctgggccctttcctttctaccggcgcccttcggaactgggctgcttctccctggatgctcaacgccagtaccatggagatgcccgagccctgcgctactatagcccaccccccactaacggtccaggccccaactttgacctcagagacggatacccggatcgataccagccccgggacgaggaggtccaggaaaggctggaccacctgctgtgctggctcctggaacaccgaggccggttggaggggggtccaggctggctggcagaggccatagtgacgtggcgggggcacctgacaaaactgctgacgacaccgtatgagcggcaggagggctggcagctggcagcctcccggttccagggaacactatacctgagtgaagtggagacaccgaacgctcgggcccagaggcttgctcggccaccgctcctccgggagcttatgtacatgggatacaaatttgagcagtacatgtgtgcagacaaacctggaagctccccagacccctctggggaggttaacaccaacgtggccttctgctctgtgctacgcagccgcctgggaagccaccctctgctcttctcaggggaggtagactgcacagacccccaagccccatccacacagcccccaacctgctatgtggagctcaagacctccaaggagatgcacagccctggccaatggaggagtttctacagacacaagctcctgaaatggtgggctcagtcattcctcccaggggtcccgaatgttgttgctggcttccgtaacccagacggttttgtctcttccctcaagacctttcctaccatgaagatgtttgaatatgtcaggaatgaccgtgacggctggaatccctctgtgtgcatgaacttctgtgccgccttccttagctttgcccagagcacggttgtccaggatgaccccaggctcgttcatctcttctcttgggagcctggcggcccagtcaccgtgtctgtacaccaagatgcaccttacgccttcctgcccatatggtatgtggaagctatgactcaggacctcccatcaccccccaagactccctctcccaaatagtaatgctttagagggaggcagtcatatctctgtgtgcagataataaaagcatatttctaagaggttc

SEQ ID NO: 14797 - protein, 396 aa, Homo sapiens; identical to SEQ ID NO: 1633

SEQ ID NO: 14798 - DNA, 2448 bp, Homo sapiens
gctgccagctgccagccctcctgccgctcatacggtgtcgtcagcagttttgtcaggtgcccccgccacgtcactatggcctctgccagccagcctggacccctgagaggcaggagttacaggctgaaggtctgacacaagcattagtgagatgctcccctcgaagaatagtcttgtttcttctaaggactgattctcaccccggctttggctctcctaattttagagggtaggtacgggtctccagatatactgcctaccacgctttgctcacccctccaaccggcctcggtgttccaggagccagcacagcaggtggtccagcctttcctggacctcctcgtcccggggctggtatcgatccgggtatccgtctctgaggtcaaagttggggcctggaccgttagtggggggtgggctatagtagcgcagggctcgggcatctccatggtactggcgttgagcatccagggagaagcagcccagttccgaagggcgccggtagaaaggaaagggcccagagtagagggcagggtctgtgggcagagaaggtgctggacgaggtagtttgttccgaggctcagctacctctgtcttctcagctcctctcttggtccccctgggatccatgaggtcctaagacaagcaggggtacagagtttccattctacagaggaggcctggagaaggatgactggtttaggactaagcgagccacctgatcgccaggctctggccttgaaacattcaggcccctcagacgccaccgcggccaagctctcatcctgcctctttccttgcccttcacccaccctccctccaggtcctccaaatgcagtgaggttaggaaggacgtctgcgctcagatcaagaatccagttacctcaaagctccccaacttccacctccgcagagctatgacgtcatggcaggcacgccagaggccgaaggatgcaaaagtggttttctgctttcgatgatgcaatcattcagcgacagtggcgggcaaacccctcccggggcgggggaggtgtgagcttcacgaaggaggttgacaccaacgtggccaccggcgcccctccacgccgccaacgagtccccgggcgtgcgtgcccttggagggagccaatccgcggccggcgtggggcccggcctggcggaggtgatgctggagggacgcccggggagaccgtacgtcactgctctgcgccggaagaccctattttcaggttctcttccctccattcctaccccttccccggtaccataaaatcccgggatatgagctggaagaggcatcacctgatcccggagacctttggagttaagaggcggcggaagcgagggcctgtggagtcggatcctcttcggggtgagccagggtcggcgcgcgcggctgtctcagaactcatgcagctgttcccgcgaggcctgtttgaggacgcgctgccgcccatcgtgctgaggagccaggtgtacagccttgtgcctgacaggaccgtggccgaccggcagctgaaggagcttcaagagcagggggagatcagaatcgtccagctgggcttcgacttggatgcccatggaattatcttcactgaggactacaggaccagagtcctcaaggcctgtgatggccgaccgtatgctggggcagtgcagaaatttctagcttcagtacttccagcctgtggggaccttagtttccagcaggaccaaatgacacagacctttggcttcagggactcagaaatcacgcatctggtgaatgctggagtcctcaccgtccgagatgctgggagctggtggctagctgtgcctggagctgggagattcatcaagtactttgttaaagggcgccaggctgtccttagcatggtccggaaggcaaagtaccgggaactgctcctatcagagctcctgggccggcgggcgcctgtcgtggtgcggcttggcctcacctaccatgtgcacgacctcattggggcccagctagtggactgcatctctaccacttcaggaaccctcctccgcctgccagagacatgaagattctgctcatcattgctcagctcctcagagtgggccgggaggggactagaagagctgcatgatggtggctgagacagggtcaccttgggaaggcttgggagccaggatgagtgtcgggctctcgtgtgtgcaaaaggtcagatgtgactgctgctgtttgcctggtttctgacccagtggtggggtttgagcaatgcttctctgcccttccatggaaagtggaaccagaaatggtgccaaggctgtggctgttccctttcgtgtaaaatggtgctgttattactctgtcttgaaataggaaggtgggatttctggggaggctggtgaaggagggcagggttcttttctctacgtgtcatgttaaaattgccaaataaagtacctctgcctgtgatattt

SEQ ID NO: 14799 - protein, 364 aa, Homo sapiens; identical to SEQ ID NO: 1635

SEQ ID NO: 14800 - DNA, 742 bp, Homo sapiens
gtctgacacaagcattagtgagatgctcccctcgaagaatagtcttgtttcttctaaggactgattctcaccccggctttggctctcctaattttagagggtcctccaaatgcagtgaggttaggaaggacgtctgcgctcagatcaagaatccagttacctcaaagctccccaacttccacctccgcagagctatgacgtcatggcaggcacgccagaggccgaaggatgcaaaagtggttttctgctttcgatgatgcaatcattcagcgacagtggcgggcaaacccctcccggggcgggggaggtgtgagcttcacgaaggaggttgacaccaacgtggccaccggcgcccctccacgccgccaacgagtccccgggcgtgcgtgcccttggagggagccaatccgcggccggcgtggggcccggcctggcggaggtgatgctggtatgtgcgtcgccaccgcccctcccagcactgacgggcctgagggacgacaagttgacgctcctttcgtcatcacctggtctaggagggacgcccggggagaccgtacgtcactgctctgcgccggaagaccctattttcaggttctcttccctccattcctaccccttccccggtaccataaaatcccgggatatgagctggaagaggcatcacctgatcccggagacctttggagttaagaggcggcggaagcgagggcctgtggagtcggatcctcttcggggtgagcca

SEQ ID NO: 14801 - protein, 153 aa, Homo sapiens
MQKWFSAFDDAIIQRQWRANPSRGGGGVSFTKEVDTNVATGAPPRRQRVPGRACPWREPIRGRRGARPGGGDAGMCVATAPPSTDGPEGRQVDAPFVITWSRRDARGDRTSLLCAGRPYFQVLFPPFLPLPRYHKIPGYELEEASPDPGDLWS

SEQ ID NO: 14802 - DNA, 1073 bp, Homo sapiens
gacaccaacgtggccaccggcgcccctccacgccgccaacgagtccccgggcgtgcgtgcccttggagggagccaatccgcggccggcgtggggcccggcctggcggaggtgatgctggtatgtgcgtcgccaccgcccctcccagcactgacgggcctgagggacgacaagttgacgctcctttcgtcatcacctggtctaggagggacgcccggggagaccgtacgtcactgctctgcgccggaagaccctattttcaggttctcttccctccattcctaccccttccccggtaccataaaatcccgggatatgagctggaagaggcatcacctgatcccggagacctttggagttaagaggcggcggaagcgagggcctgtggagtcggatcctcttcggggtgagccagggtcggcgcgcgcggctgtctcagaactcatgcagctgttcccgcgaggcctgtttgaggacgcgctgccgcccatcgtgctgaggagccaggtgtacagccttgtgcctgacaggaccgtggccgaccggcagctggtgaggggcgtcggtgcgaccgccggaagcccctttcctaactcctggaattccctgtcactcagtcactccgccagccgttcagcaagcattaggcctttcaggcgagggcactgtgccaggcactggggtgccacagagaccctgttaaaagtcccgcaggtagtacagggcatttcaaatcatggaggtagaagaacgaggcttttggggaaaccgagtcatggggcatggttcgaacatacagcgctgggagtgcagtcagacgtcagatcatgacaggccttgtacatcagtgttgtttccatcttacactgaggcgatgggctggtagagaatatcatagagagagggaatggtgtattggagatagtggatgaggcagggaggtcagctaagaagatactgcatctgagaagtggtgaaggcctaaattaggtcagtgcagtagggagggagaggagagtgaggaagagggaggagtccaggacaactcagactttccagatgactgcgtggctgg

SEQ ID NO: 14803 - protein, 238 aa, Homo sapiens [sequence omitted]

SEQ ID NO: 14804 - DNA, 2681 bp, Homo sapiens
gacaccaacgtggccaccggcgcccctccacgccgccaacgagtccccgggcgtgcgtgcccttggagggagccaatccgcggccggcgtggggcccggcctggcggaggtgatgctggtatgtgcgtcgccaccgcccctcccagcactgacgggcctgagggacgacaagttgacgctcctttcgtcatcacctggtctaggagggacgcccggggagaccgtacgtcactgctctgcgccggaagaccctattttcaggttctcttccctccattcctaccccttccccggtaccataaaatcccgggatatgagctggaagaggcatcacctgatcccggagacctttggagttaagaggcggcggaagcgagggcctgtggagtcggatcctcttcggggtgagccagggtcggcgcgcgcggctgtctcagaactcatgcagctgttcccgcgaggcctgtttgaggacgcgctgccgcccatcgtgctgaggagccaggtgtacagccttgtgcctgacaggaccgtggccgaccggcagctgaaggagcttcaagagcagggggagatcagaatcgtccagctgggcttcgacttggatgcccatggaattatcttcactgaggactacaggaccagagtcctcaaggcctgtgatggccgaccgtatgctggggcagtgcagaaatttctagcttcagtacttccagcctgtggggaccttagtttccagcaggaccaaatgacacagacctttggcttcagggactcagaaatcacgtgagacttgtggaaccaaccaaagtcaggcatctggtgcttccctgcctccctccagttccatccagcctgtcctcctgtttttttggtgaacctgccagaaaagctgccaaaaagctgactcttcttgttaataaaatgacccaagtttgtattcctccccacaagagaggaggcctatcttacctgggccttagaaagagccctgaaatagaattcagttcttggtggcttatcaaaagcacacaggggcctggcaggaagtgtaaaagcttgatgttaatcatactgggactaagaggatagagaatggtaggagctgggatacccctaaacattcacattaaaacaaaaaaaacccaaagctaaaaaacaactgggcaggagctaaataaaaatctaattttgagaggctgtatctggctcaggcctcctactttgtaacccatggaatatgtgaaagcatttgaaaaactatagcactgatctcacatgggcagacacactctcagagagatgtggtgggagccatggcgcagtctgcctaggcagtggcaggagcgcagaagactctgattcctctcctcggtcctaagaccgaatgtgtgtcaggacatgtggtcagggaagagaagctatttaactgaaccagtaatagtagcaggaaaagaaaaagtggagggagggcagtccaggtagggggcctggaacaagcaactgcaccaacagaggcagttggtgcgagcacagaaccaccccaggctgggattttgttatccagtctctcttgcatggttgcccgtgtttctggagacttgtgtaaacattaatggatgaggaggagagatggttctcagagcccagccctcatctctgctggcttcccactgccctcaggcatctggtgaatgctggagtcctcaccgtccgagatgctgggagctggtggctagctgtgcctggagctgggagattcatcaagtactttgttaaaggtatcccatctgcagctcaagcctgcagcccctcaccttttggtggctcctcaggcctctaggccttattcacctttcccctttcctgtgccacttctcctctagggcgccaggctgtccttagcatggtccggaaggcaaagtaccgggaactgctcctatcagagctcctgggccggcgggcgcctgtcgtggtgcggcttggcctcacctaccatgtgcacgacctcattggggcccagctagtggactggtgagtctttccctggcctctggcagattatggagcaatgacccaaagtgggatttcctcccagctcatgcttagtttcctagtgaaggccagtggctctcattcttctctggaacccgggagcaccccttcccaagttctaagttctcctcacagcttgagcctaggcgtctggctccagccttgtctttctcctgcacagcatctctaccacttcaggaaccctcctccgcctgccagagacatgaagattctgctcatcattgctcagctcctcagagtgggccgggaggggactagaagagctgcatgatggtggctgagacagggtcaccttgggaaggcttgggagccaggatgagtgtcgggctctcgtgtgtgcaaaaggtcagatgtgactgctgctgtttgcctggtttctgacccagtggtggggtttgagcaatgcttctctgcccttccatggaaagtggaaccagaaatggtgccaaggctgtggctgttccctttcgtgtaaaatggtgctgttattactctgtcttgaaataggaaggtgggatttctggggaggctggtgaaggagggcagggttcttttctctacgtgtcatgttaaaattgccaaataaagtacctctgcctgtgata

SEQ ID NO: 14805 - protein, 225 aa, Homo sapiens
MLVCASPPPLPALTGLRDDKLTLLSSSPGLGGTPGETVRHCSAPEDPIFRFSSLHSYPFPGTIKSRDMSWKRHHLIPETFGVKRRRKRGPVESDPLRGEPGSARAAVSELMQLFPRGLFEDALPPIVLRSQVYSLVPDRTVADRQLKELQEQGEIRIVQLGFDLDAHGIIFTEDYRTRVLKACDGRPYAGAVQKFLASVLPACGDLSFQQDQMTQTFGFRDSEIT

SEQ ID NO: 14806 - DNA, 1340 bp, Homo sapiens
gacaccaacgtggccaccggcgcccctccacgccgccaacgagtccccgggcgtgcgtgcccttggagggagccaatccgcggccggcgtggggcccggcctggcggaggtgatgctggtatgtgcgtcgccaccgcccctcccagcactgacgggcctgagggacgacaagttgacgctcctttcgtcatcacctggtctaggagggacgcccggggagaccgtacgtcactgctctgcgccggaagaccctattttcaggttctcttccctccattcctaccccttccccggtaccataaaatcccgggatatgagctggaagaggcatcacctgatcccggagacctttggagttaagaggcggcggaagcgagggcctgtggagtcggatcctcttcggggtgagccagaaggagcttcaagagcagggggagatcagaatcgtccagctgggcttcgacttggatgcccatggaattatcttcactgaggactacaggaccagagtcctcaaggcctgtgatggccgaccgtatgctggggcagtgcagaaatttctagcttcagtacttccagcctgtggggaccttagtttccagcaggaccaaatgacacagacctttggcttcagggactcagaaatcacgcatctggtgaatgctggagtcctcaccgtccgagatgctgggagctggtggctagctgtgcctggagctgggagattcatcaagtactttgttaaagggcgccaggctgtccttggcatggtccggaaggcaaagtaccgggagctgctcctatcagagctcctgggccggcgggtgcctgtcgtggtgcggcttggcctcacctaccatgtgcacgacctcattggggcccagctagtggactgcatctctaccacttcaggaaccctcctccgcctgccagagacatgaagattctgctcatcattgctcagctcctcagagtgggccgggaggggactagaagagctgcatgatggtggctgagacagggtcaccttgggaaggcttgggagccaggatgagtgtcgggctctcgtgtgtgcaaaaggtcagatgtgactgctgctgtttgcctggtttctgacccagtggtggggtttgagcaatgcttctctgcccttccatggaaagtggaaccagaaatggtgccaaggctgtggctgttccctttcgtgtaaaatggtgctgttattactctgtcttgaaataggaaggtgggatttctggggaggctggtgaaggagggcagggttcttttctctacgtgtcatgttaaaattgccaaataaagtacctctgcctgtgata

SEQ ID NO: 14807 - protein, 126 aa, Homo sapiens
MLVCASPPPLPALTGLRDDKLTLLSSSPGLGGTPGETVRHCSAPEDPIFRFSSLHSYPFPGTIKSRDMSWKRHHLIPETFGVKRRRKRGPVESDPLRGEPEGASRAGGDQNRPAGLRLGCPWNYLH

SEQ ID NO: 14808 - DNA, 1133 bp, Homo sapiens
cgagagttttgttagaaccgcgtccccgccccagttccctgtccgtgagccgatttatctgcccagggtcggcgcgcgcggctgtctcagaactcatgcagctgttcccgcgaggcctgtttgaggacgcgctgccgcccatcgtgctgaggagccaggtgtacagccttgtgcctgacaggaccgtggccgaccggcagctgaaggagcttcaagagcagggggagatcagaatcgtccagctgggcttcgacttggatgcccatggaattatcttcactgaggactacaggaccagagtcctcaaggcctgtgatggccgaccgtatgctggggcagtgcagaaatttctagcttcagtacttccagcctgtggggaccttagtttccagcaggaccaaatgacacagacctttggcttcagggactcagaaatcacgcatctggtgaatgctggagtcctcaccgtccgagatgctgggagctggtggctagctgtgcctggagctgggagattcatcaagtactttgttaaagggcgccaggctgtccttagcatggtccggaaggcaaagtaccgggaactgctcctatcagagctcctgggccggcgggcgcctgtcgtggtgcggcttggcctcacctaccatgtgcacgacctcattggggcccagctagtggactgcatctctaccacttcaggaaccctcctccgcctgccagagacatgaagattctgctcatcattgctcagctcctcagagtgggccgggaggggactagaagagctgcatgatggtggctgagacagggtcaccttgggaaggcttgggagccaggatgagtgtcgggctctcgtgtgtgcaaaaggtcagatgtgactgctgctgtttgcctggtttctgacccagtggtggggtttgagcaatgcttctctgcccttccatggaaagtggaaccagaaatggtgccaaggctgtggctgttccctttcgtgtaaaatggtgctgttattactctgtcttgaaataggaaggtgggatttctggggaggctggtgaaggagggcagggttcttttctctacgtgtcatgttaaaattgccaaataaagtacctctgcctgtgatattt

SEQ ID NO: 14809 - protein, 211 aa, Homo sapiens
MQLFPRGLFEDALPPIVLRSQVYSLVPDRTVADRQLKELQEQGEIRIVQLGFDLDAHGIIFTEDYRTRVLKACDGRPYAGAVQKFLASVLPACGDLSFQQDQMTQTFGFRDSEITHLVNAGVLTVRDAGSWWLAVPGAGRFIKYFVKGRQAVLSMVRKAKYRELLLSELLGRRAPVVVRLGLTYHVHDLIGAQLVDCISTTSGTLLRLPET

SEQ ID NO: 14810 - DNA, 2311 bp, Homo sapiens
ccccgccccagttccctgtccgtgagccgatttatctgcccagggtcggcgcgcgcggctgtctcagaactcatgcagctgttcccgcgaggcctgtttgaggacgcgctgccgcccatcgtgctgaggagccaggtgtacagccttgtgcctgacaggaccgtggccgaccggcagctgaaggagcttcaagagcagggggagatcagaatcgtccagctgggcttcgacttggatgcccatggaattatcttcactgaggactacaggaccagagtcctcaaggcctgtgatggccgaccgtatgctggggcagtgcagaaatttctagcttcagtacttccagcctgtggggaccttagtttccagcaggaccaaatgacacagacctttggcttcagggactcagaaatcacgtgagacttgtggaaccaaccaaagtcaggcatctggtgcttccctgcctccctccagttccatccagcctgtcctcctgtttttttggtgaacctgccagaaaagctgccaaaaagctgactcttcttgttaataaaatgacccaagtttgtattcctccccacaagagaggaggcctatcttacctgggccttagaaagagccctgaaatagaattcagttcttggtggcttatcaaaagcacacaggggcctggcaggaagtgtaaaagcttgatgttaatcatactgggactaagaggatagagaatggtaggagctgggatacccctaaacattcacattaaaacaaaaaaaacccaaagctaaaaaacaactgggcaggagctaaataaaaatctaattttgagaggctgtatctggctcaggcctcctactttgtaacccatggaatatgtgaaagcatttgaaaaactatagcactgatctcacatgggcagacacactctcagagagatgtggtgggagccatggcgcagtctgcctaggcagtggcaggagcgcagaagactctgattcctctcctcggtcctaagaccgaatgtgtgtcaggacatgtggtcagggaagagaagctatttaactgaaccagtaatagtagcaggaaaagaaaaagtggagggagggcagtccaggtagggggcctggaacaagcaactgcaccaacagaggcagttggtgcgagcacagaaccaccccaggctgggattttgttatccagtctctcttgcatggttgcccgtgtttctggagacttgtgtaaacattaatggatgaggaggagagatggttctcagagcccagccctcatctctgctggcttcccactgccctcaggcatctggtgaatgctggagtcctcaccgtccgagatgctgggagctggtggctagctgtgcctggagctgggagattcatcaagtactttgttaaaggtatcccatctgcagctcaagcctgcagcccctcaccttttggtggctcctcaggcctctaggccttattcacctttcccctttcctgtgccacttctcctctagggcgccaggctgtccttagcatggtccggaaggcaaagtaccgggaactgctcctatcagagctcctgggccggcgggcgcctgtcgtggtgcggcttggcctcacctaccatgtgcacgacctcattggggcccagctagtggactggtgagtctttccctggcctctggcagattatggagcaatgacccaaagtgggatttcctcccagctcatgcttagtttcctagtgaaggccagtggctctcattcttctctggaacccgggagcaccccttcccaagttctaagttctcctcacagcttgagcctaggcgtctggctccagccttgtctttctcctgcacagcatctctaccacttcaggaaccctcctccgcctgccagagacatgaagattctgctcatcattgctcagctcctcagagtgggccgggaggggactagaagagctgcatgatggtggctgagacagggtcaccttgggaaggcttgggagccaggatgagtgtcgggctctcgtgtgtgcaaaaggtcagatgtgactgctgctgtttgcctggtttctgacccagtggtggggtttgagcaatgcttctctgcccttccatggaaagtggaaccagaaatggtgccaaggctgtggctgttccctttcgtgtaaaatggtgctgttattactctgtcttgaaataggaaggtgggatttctggggaggctggtgaaggagggcagggttcttttctctacgtgtcatgttaaaattgccaaataaagtacctctgcctgtgata

SEQ ID NO: 14811 - protein, 115 aa, Homo sapiens [sequence omitted]

SEQ ID NO: 14812 - DNA, 1617 bp, Homo sapiens
acctttggcttcagggactcagaaatcacgtgagacttgtggaaccaaccaaagtcaggcatctggtgcttccctgcctccctccagttccatccagcctgtcctcctgtttttttggtgaacctgccagaaaagctgccaaaaagctgactcttcttgttaataaaatgacccaagtttgtattcctccccacaagagaggaggcctatcttacctgggccttagaaagagccctgaaatagaattcagttcttggtggcttatcaaaagcacacaggggcctggcaggaagtgtaaaagcttgatgttaatcatactgggactaagaggatagagaatggtaggagctgggatacccctaaacattcacattaaaacaaaaaaaacccaaagctaaaaaacaactgggcaggagctaaataaaaatctaattttgagaggctgtatctggctcaggcctcctactttgtaacccatggaatatgtgaaagcatttgaaaaactatagcactgatctcacatgggcagacacactctcagagagatgtggtgggagccatggcgcagtctgcctaggcagtggcaggagcgcagaagactctgattcctctcctcggtcctaagaccgaatgtgtgtcaggacatgtggtcagggaagagaagctatttaactgaaccagtaatagtagcaggaaaagaaaaagtggagggagggcagtccaggtagggggcctggaacaagcaactgcaccaacagaggcagttggtgcgagcacagaaccaccccaggctgggattttgttatccagtctctcttgcatggttgcccgtgtttctggagacttgtgtaaacattaatggatgaggaggagagatggttctcagagcccagccctcatctctgctggcttcccactgccctcaggcatctggtgaatgctggagtcctcaccgtccgagatgctgggagctggtggctagctgtgcctggagctgggagattcatcaagtactttgttaaagggcgccaggctgtccttagcatggtccggaaggcaaagtaccgggaactgctcctatcagagctcctgggccggcgggcgcctgtcgtggtgcggcttggcctcacctaccatgtgcacgacctcattggggcccagctagtggactgcatctctaccacttcaggaaccctcctccgcctgccagagacatgaagattctgctcatcattgctcagctcctcagagtgggccgggaggggactagaagagctgcatgatggtggctgagacagggtcaccttgggaaggcttgggagccaggatgagtgtcgggctctcgtgtgtgcaaaaggtcagatgtgactgctgctgtttgcctggtttctgacccagtggtggggtttgagcaatgcttctctgcccttccatggaaagtggaaccagaaatggtgccaaggctgtggctgttccctttcgtgtaaaatggtgctgttattactctgtcttgaaataggaaggtgggatttctggggaggctggtgaaggagggcagggttcttttctctacgtgtcatgttaaaattgccaaataaagtacctctgcctgtgata

SEQ ID NO: 14813 - protein, 119 aa, Homo sapiens [sequence omitted]

SEQ ID NO: 14814 - DNA, 1722 bp, Homo sapiens
acctttggcttcagggactcagaaatcacgtgagacttgtggaaccaaccaaagtcaggcatctggtgcttccctgcctccctccagttccatccagcctgtcctcctgtttttttggtgaacctgccagaaaagctgccaaaaagctgactcttcttgttaataaaatgacccaagtttgtattcctccccacaagagaggaggcctatcttacctgggccttagaaagagccctgaaatagaattcagttcttggtggcttatcaaaagcacacaggggcctggcaggaagtgtaaaagcttgatgttaatcatactgggactaagaggatagagaatggtaggagctgggatacccctaaacattcacattaaaacaaaaaaaacccaaagctaaaaaacaactgggcaggagctaaataaaaatctaattttgagaggctgtatctggctcaggcctcctactttgtaacccatggaatatgtgaaagcatttgaaaaactatagcactgatctcacatgggcagacacactctcagagagatgtggtgggagccatggcgcagtctgcctaggcagtggcaggagcgcagaagactctgattcctctcctcggtcctaagaccgaatgtgtgtcaggacatgtggtcagggaagagaagctatttaactgaaccagtaatagtagcaggaaaagaaaaagtggagggagggcagtccaggtagggggcctggaacaagcaactgcaccaacagaggcagttggtgcgagcacagaaccaccccaggctgggattttgttatccagtctctcttgcatggttgcccgtgtttctggagacttgtgtaaacattaatggatgaggaggagagatggttctcagagcccagccctcatctctgctggcttcccactgccctcaggcatctggtgaatgctggagtcctcaccgtccgagatgctgggagctggtggctagctgtgcctggagctgggagattcatcaagtactttgttaaaggtatcccatctgcagctcaagcctgcagcccctcaccttttggtggctcctcaggcctctaggccttattcacctttcccctttcctgtgccacttctcctctagggcgccaggctgtccttagcatggtccggaaggcaaagtaccgggaactgctcctatcagagctcctgggccggcgggcgcctgtcgtggtgcggcttggcctcacctaccatgtgcacgacctcattggggcccagctagtggactgcatctctaccacttcaggaaccctcctccgcctgccagagacatgaagattctgctcatcattgctcagctcctcagagtgggccgggaggggactagaagagctgcatgatggtggctgagacagggtcaccttgggaaggcttgggagccaggatgagtgtcgggctctcgtgtgtgcaaaaggtcagatgtgactgctgctgtttgcctggtttctgacccagtggtggggtttgagcaatgcttctctgcccttccatggaaagtggaaccagaaatggtgccaaggctgtggctgttccctttcgtgtaaaatggtgctgttattactctgtcttgaaataggaaggtgggatttctggggaggctggtgaaggagggcagggttcttttctctacgtgtcatgttaaaattgccaaataaagtacctctgcctgtgata

SEQ ID NO: 14815 - protein, 57 aa, Homo sapiens [sequence omitted]

SEQ ID NO: 14816 - DNA, 5459 bp, Homo sapiens
agagtcaactctgccccgaggcctagcttggccagaaggtagcagacagacagacggatctaacctctcttggatcctccagccatgaggctgctctgggggctgatctgggcatccagcttcttcaccttatctctgcagaagcccaggttgctcttgttctctccttctgtggttcatctgggggtccccctatcggtgggggtgcagctccaggatgtgccccgaggacaggtagtgaaaggatcagtgttcctgagaaacccatctcgtaataatgtcccctgctccccaaaggtggacttcacccttagctcagaaagagacttcgcactcctcagtctccaggtgcccttgaaagatgcgaagagctgtggcctccatcaactcctcagaggccctgaggtccagctggtggcccattcgccatggctaaaggactctctgtccagaacgacaaacatccagggtatcaacctgctcttctcctctcgccgggggcacctctttttgcagacggaccagcccatttacaaccctggccagcgggttcggtaccgggtctttgctctggatcagaagatgcgcccgagcactgacaccatcacagtcatggtggagaactctcacggcctccgcgtgcggaagaaggaggtgtacatgccctcgtccatcttccaggatgactttgtgatcccagacatctcagagccagggacctggaagatctcagcccgattctcagatggcctggaatccaacagcagcacccagtttgaggtgaagaaatatgtccttcccaactttgaggtgaagatcacccctggaaagccctacatcctgacggtgccaggccatcttgatgaaatgcagttagacatccaggccaggtacatctatgggaagccagtgcagggggtggcatatgtgcgctttgggctcctagatgaggatggtaagaagactttctttcgggggctggagagtcagaccaagctggtgaatggacagagccacatttccctctcaaaggcagagttccaggacgccctggagaagctgaatatgggcattactgacctccaggggctgcgcctctacgttgctgcagccatcattgagtctccaggtggggagatggaggaggcagagctcacatcctggtattttgtgtcatctcccttctccttggatcttagcaagaccaagcgacaccttgtgcctggggcccccttcctgctgcaggccttggtccgtgagatgtcaggctccccagcttctggcattcctgtcaaagtttctgccacggtgtcttctcctgggtctgttcctgaagtccaggacattcagcaaaacacagacgggagcggccaagtcagcattccaataattatccctcagaccatctcagagctgcagctctcagtatctgcaggctccccacatccagcgatagccaggctcactgtggcagccccaccttcaggaggccccgggtttctgtctattgagcggccggattctcgacctcctcgtgttggggacactctgaacctgaacttgcgagccgtgggcagtggggccaccttttctcattactactacatgatcctatcccgagggcagatcgtgttcatgaatcgagagcccaagaggaccctgacctcggtctcggtgtttgtggaccatcacctggcaccctccttctactttgtggccttctactaccatggagaccacccagtggccaactccctgcgagtggatgtccaggctggggcctgcgagggcaagctggagctcagcgtggacggtgccaagcagtaccggaacggggagtccgtgaagctccacttagaaaccgactccctagccctggtggcgctgggagccttggacacagctctgtatgctgcaggcagcaagtcccacaagcccctcaacatgggcaaggtctttgaagctatgaacagctatgacctcggctgtggtcctgggggtggggacagtgcccttcaggtgttccaggcagcgggcctggccttttctgatggagaccagtggaccttatccagaaagagactaagctgtcccaaggagaagacaacccggaaaaagagaaacgtgaacttccaaaaggcgattaatgagaaattgggtcagtatgcttccccgacagccaagcgctgctgccaggatggggtgacacgtctgcccatgatgcgttcctgcgagcagcgggcagcccgcgtgcagcagccggactgccgggagcccttcctgtcctgctgccaatttgctgagagtctgcgcaagaagagcagggacaagggccaggcgggcctccaacgagccctggagatcctgcaggaggaggacctgattgatgaggatgacattcccgtgcgcagcttcttcccagagaactggctctggagagtggaaacagtggaccgctttcaaatattgacactgtggctccccgactctctgaccacgtgggagatccatggcctgagcctgtccaaaaccaaaggcctatgtgtggccaccccagtccagctccgggtgttccgcgagttccacctgcacctccgcctgcccatgtctgtccgccgctttgagcagctggagctgcggcctgtcctctataactacctggataaaaacctgactgtgagcgtccacgtgtccccagtggaggggctgtgcctggctgggggcggagggctggcccagcaggtgctggtgcctgcgggctctgcccggcctgttgccttctctgtggtgcccacggcagccaccgctgtgtctctgaaggtggtggctcgagggtccttcgaattccctgtgggagatgcggtgtccaaggttctgcagattgagaaggaaggggccatccatagagaggagctggtctatgaactcaaccccttggaccaccgaggccggaccttggaaatacctggcaactctgatcccaatatgatccctgatggggactttaacagctacgtcagggttacagcctcagatccattggacactttaggctctgagggggccttgtcaccaggaggcgtggcctccctcttgaggcttcctcgaggctgtggggagcaaaccatgatctacttggctccgacactggctgcttcccgctacctggacaagacagagcagtggagcacactgcctcccgagaccaaggaccacgccgtggatctgatccagaaaggctacatgcggatccagcagtttcggaaggcggatggttcctatgcggcttggttgtcacggggcagcagcacctggctcacagcctttgtgttgaaggtcctgagtttggcccaggagcaggtaggaggctcgcctgagaaactgcaggagacatctaactggcttctgtcccagcagcaggctgacggctcgttccaggacctctctccagtgatacataggagcatgcaggggggtttggtgggcaatgatgagactgtggcactcacagcctttgtgaccatcgcccttcatcatgggctggccgtcttccaggatgagggtgcagagccattgaagcagagagtggaagcctccatctcaaaggcaagctcatttttgggggagaaagcaagtgctgggctcctgggtgcccacgcagctgccatcacggcctatgccctgacactgaccaaggcccctgcggacctgcggggtgttgcccacaacaacctcatggcaatggcccaggagactggagataacctgtactggggctcagtcactggttctcagagcaatgccgtgtcgcccaccccggctcctcgcaacccatccgaccccatgccccaggccccagccctgtggattgaaaccacagcctacgccctgctgcacctcctgcttcacgagggcaaagcagagatggcagaccaggctgcggcctggctcacccgtcagggcagcttccaagggggattccgcagtacccaagacacggtgattgccctggatgccctgtctgcctactggattgcctcccacaccactgaggagaggggtctcaatgtgactctcagctccacaggccggaatgggttcaagtcccacgcgctgcagctgaacaaccgccagattcgcggcctggaggaggagctgcagttttccttgggcagcaagatcaatgtgaaggtgggaggaaacagcaaaggaaccctgaaggtccttcgtacctacaatgtcctggacatgaagaacacgacctgccaggacctacagatagaagtgacagtcaaaggccacgtcgagtacacgatggaagcaaacgaggactatgaggactatgagtacgatgagcttccagccaaggatgacccagatgcccctctgcagcccgtgacacccctgcagctgtttgagggtcggaggaaccgccgcaggagggaggcgcccaaggtggtggaggagcaggagtccagggtgcactacaccgtgtgcatctggcggaacggcaaggtggggctgtctggcatggccatcgcggacgtcaccctcctgagtggattccacgccctgcgtgctgacctggagaagctgacctccctctctgaccgttacgtgagtcactttgagaccgaggggccccacgtcctgctgtattttgactcggtccccacctcccgggagtgcgtgggctttgaggctgtgcaggaagtgccggtggggctggtgcagccggccagcgcaaccctgtacgactactacaaccccgagcgcagatgttctgtgttttacggggcaccaagtaagagcagactcttggccaccttgtgttctgctgaagtctgccagtgtgctgaggggaagtgccctcgccagcgtcgcgccctggagcggggtctgcaggacgaggatggctacaggatgaagtttgcctgctactacccccgtgtggagtacggcttccaggttaaggttctccgagaagacagcagagctgctttccgcctctttgagaccaagatcacccaagtcctgcacttcaccaaggatgtcaaggccgctgctaatcagatgcgcaacttcctggttcgagcctcctgccgccttcgcttggaacctgggaaagaatatttgatcatgggtctggatggggccacctatgacctcgagggacacccccagtacctgctggactcgaatagctggatcgaggagatgccctctgaacgcctgtgccggagcacccgccagcgggcagcctgtgcccagctcaacgacttcctccaggagtatggcactcaggggtgccaggtgtgagggctgccctcccacctccgctgggaggaacctgaacctgggaaccatgaagctggaagcactgctgtgtccgctttcatgaacacagcctgggaccagggcatattaaaggcttttggcagcaaagtgtcagtgttggc

SEQ ID NO: 14817 - protein, 1744 aa, Homo sapiens; identical to SEQ ID NO: 1640

SEQ ID NO: 14818 - DNA, 440 bp, Homo sapiens
ccgaggccggaccttggaaatacctggcaactctgatcccaatatgatccctgatggggactttaacagctacgtcagggttacagcctcagatccattggacactttaggctctgagggggccttgtcaccaggaggcgtggcctccctcttgaggcttcctcgaggctgtggggagcaaaccatgatctacttggctccgacactggctgcttcccgctacctggacaagacagagcagtggagcacactgcctcccgagaccaaggaccacgccgtggatctgatccagaaaggttctgggtgcaagggcaagcaggaggggggccaggaaaggacagttactggaagatggacagcccaggaggctacagagggaaagaaagggggcccctgatgaggatggggagcatggccttgggctcaaacagcagaagggt

SEQ ID NO: 14819 - protein, 117 aa, Homo sapiens
MIPDGDFNSYVRVTASDPLDTLGSEGALSPGGVASLLRLPRGCGEQTMIYLAPTLAASRYLDKTEQWSTLPPETKDHAVDLIQKGSGCKGKQEGGQERTVTGRWTAQEATEGKKGGP

SEQ ID NO: 14820 - DNA, 2095 bp, Homo sapiens
agcgatgagccctggagtgagcagctgtatctctggcacctggcacagggcatggcatgaagtgaaagattcccgaatttctgtcgaatgactggatggcaggctgctgaactgtcatgacctctacggaaactgatctcaccaaacttctttggacagacgcggagtcatctctgaagaccccaggtgtgccactaaatgggggaaagttaggcaggtccggtgggaaggggagaccccaggagaacagcggcttcctcagaggattcacaaacacaccaaagtcagacttttggcttgtttgaaaccagtaactggaagaagacactgccggacctgaggattgcacaactccgggaaagtcacctcattccactgataacagaaccaagcgtcagcaggctttcaacagcccggaactcagctaaaatctgcagacctcagaaccgccagcagcacgaggacagagtcggggaggtgtagctggacaacagctcatgaggcaaacttcatcctgtagccatcctcgtcctgcagaccccgctccagggcgcgacgctggcgagggcacttccctgaagttggggaacccatcagacagtgtggggggggccccggccatcccgcctccactgccccgccccaggccctcagtctcaccctcagcacactggcagacttcagcagaacacaaggtggccaagagtctgctcttacttggtgccccgtaaaacacagaacatctgcgctctggagaacagagaggagttagggcacaggcccctccattctgcctcctcagtcccagggagccccagggctctctgccccctcactaccccggtgtccattgtcccataggagggcacctatgccaaagttctcctgaatttcagggtgtcctgcagtgctcaccggggttgtagtagtcgtacagggttgcgctggccggctgcaccagccccaccggcacttcctgcacagcctcaaagcccacgcactcccgggaggtggggacctggccaagcgtggggaggagagatgagggacccactccctgggccctgcagccccctgtactgggtttccttggcctgtttttgtttgcttcctattggccttctctccagtgtccttcacattctgttaccttcctactcagagaactctcaaagctgctccgcaaggtctctggtgacttcacttcccagagggtgaccttgccccagtcttcactgctccaggccctcagcagagtcttgcatcatggacgtgttctctgtgaaactgtccctaagctaagggttagcttctggaccacccttggttctgacctggtcatttcttacgttccctccttcggaacttccttcctcagagctcccctgtgggggtctcaaccactccctggcttccaccaaaccaatccaggctgatgattcccaaactgaacttgcagctccatccttgcattaggattgtggcaggacctgtaagttctccaaggcactctgcctgcccccaaacccactcgccctcctcgcggcctcatctttgtcatggatacaactgggtcctcctttatttgccacaacctaactgcaggttctgtcatcctgcctgaccccccgactcaggtcccaggcctgacccctcctcgtgcccacgcgggcccagtccacacggtgccgtgccagtgtccctcctgagctaggctgctgcaccgtcagctccctatccgggaatcttgttggctctgtgttttctattgtgttcaacccagatgtgtcagccaggcttccccagctgatgggggctggcccctctgcacacactgggtaggggtctccctgacctacaaacagctggctaatgacagccaccacacctttctcacattttctcccagaggttacagtaaatgttccaaaactttttttgaaggccgggcatggtggctctggcctgtaaatccggtactttgaaaggcctaggccagaggatcgcttgaggccgggagttcaagaccagcctgggcaacagagcgagaccctgtctttactaaataaataaataaaaatgttttgagagccgt

SEQ ID NO: 14821 - protein, 77 aa, Homo sapiens
MRQTSSCSHPRPADPAPGRDAGEGTSLKLGNPSDSVGGAPAIPPPLPRPRPSVSPSAHWQTSAEHKVAKSLLLLGAP

SEQ ID NO: 14822 - DNA, 920 bp, Homo sapiens
gcaagactctgctgagggcctggagcagtgaagactggggcaaggtcaccctctgggaagtgaagtcaccagagaccttgcggagcagctttgagagttctctgagtaggaaggtaacagaatgtgaaggacactggagagaaggccaataggaagcaaacaaaaacaggccaaggaaacccagtacagggggctgcagggcccagggagtgggtccctcatctctcctccccacgcttggccaggtccccacctcccgggagtgcgtgggctttgaggctgtgcaggaagtgccggtggggctggtgcagccggccagcgcaaccctgtacgactactacaaccccggtgagcactgcaggacaccctgaaattcaggagaactttggcataggtgccctcctatgggacaatggacaccggggtagtgagggggcagagagccctggggctccctgggactgaggaggcagaatggaggggcctgtgccctaactcctctctgttctccagagcgcagatgttctgtgttttacggggcaccaagtaagagcagactcttggccaccttgtgttctgctgaagtctgccagtgtgctgaggggaagtgccctcgccagcgtcgcgccctggagcggggtctgcaggacgaggatggctacaggatgaagtttgcctgctactacccccgtgtggagtacggtcagtcttcccaccgaggccctggcctgaccctccctcggggaccggccgttttggtctctctgggtgtagcctgctcctcttacaggtcatgcacgcagcctgtttgctctgacaccaacttcctaccctctcagcctcaaagtaactcacctttcccccttctcctcaccccctcttaggcttccaggttaaggttctccgagaagacagcagag

SEQ ID NO: 14823 - protein, 72 aa, Homo sapiens
MKFACYYPRVEYGQSSHRGPGLTLPRGPAVLVSLGVACSSYRSCTQPVCSDTNFLPSQPQSNSPFPLLLTPS

SEQ ID NO: 14824 - DNA, 846 bp, Homo sapiens
gggctgcagggcccagggagtgggtccctcatctctcctccccacgcttggccaggtccccacctcccgggagtgcgtgggctttgaggctgtgcaggaagtgccggtggggctggtgcagccggccagcgcaaccctgtacgactactacaaccccgagcgcagatgttctgtgttttacggggcaccaagtaagagcagactcttggccaccttgtgttctgctgaagtctgccagtgtgctgaggggaagtgccctcgccagcgtcgcgccctggagcggggtctgcaggacgaggatggctacaggatgaagtttgcctgctactacccccgtgtggagtacggcttccaggttaaggttctccgagaagacagcagagctgctttccgcctctttgagaccaagatcacccaagtcctgcacttcaccaaggatgtcaaggccgctgctaatcagatgcgcaacttcctggttcgagcctcctgccgccttcgcttggaacctgggaaagaatatttgatcatgggtctggatggggccacctatgacctcgagggacacccccagtacctgctggactcgaatagctggatcgaggagatgccctctgaacgcctgtgccggagcacccgccagcgggcagcctgtgcccagctcaacgacttcctccaggagtatggcactcaggggtgccaggtgtgagggctgccctcccacctccgctgggaggaacctgaacctgggaaccatgaagctggaagcactgctgtgtccgctttcatgaacacagcctgggaccagggcatattaaaggcttttggcagcaaagtgtcagtgttggc

SEQ ID NO: 14825 - protein, 131 aa, Homo sapiens
MKFACYYPRVEYGFQVKVLREDSRAAFRLFETKITQVLHFTKDVKAAANQMRNFLVRASCRLRLEPGKEYLIMGLDGATYDLEGHPQYLLDSNSWIEEMPSERLCRSTRQRAACAQLNDFLQEYGTQGCQV

SEQ ID NO: 14826 - DNA, 601 bp, Homo sapiens
ctggaagtgtgaaaatccccttgggctgtcagaagccttgggcttggccataaatagggaggcagtggcacctctccatgggggtggcgaaggtggaatgagaggatctacacagagtccccagcctgggctcaccctgcaccttctcttcccctctgaccacttttgcgcacgtcatccccgcagccaaggatgtcaaggccgctgctaatcagatgcgcaacttcctggttcgagcctcctgccgccttcgcttggaacctgggaaagaatatttgatcatgggtctggatggggccacctatgacctcgagggacacccccagtacctgctggactcgaatagctggatcgaggagatgccctctgaacgcctgtgccggagcacccgccagcgggcagcctgtgcccagctcaacgacttcctccaggagtatggcactcaggggtgccaggtgtgagggctgccctcccacctccgctgggaggaacctgaacctgggaaccatgaagctggaagcactgctgtgtccgctttcatgaacacagcctgggaccagggcatattaaaggcttttggcagcaaagtgtcagtgttggc

SEQ ID NO: 14827 - protein, 83 aa, Homo sapiens
MGPPMTSRDTPSTCWTRIAGSRRCPLNACAGAPASGQPVPSSTTSSRSMALRGARCEGCPPTSAGRNLNLGTMKLEALLCPLS

SEQ ID NO: 14828 - DNA, 2376 bp, Homo sapiens
gaaagctgactctggatgcaggaaaaaggtcagggttgcatttcccttccttgcttctcgatgggtgattaattttttttgaaatacggacgtcccaaggccaatgagactggtgtcattccagaaaagggccactctgtgggtgggtcggtgggaaggcacctgagggtggggtcaagggaggccccaaaacagtctacacagcaggagggatggctggggctcttgagctataagtggcacctcagggccctgacgggcgtcttgccatgctgctcctgggcctgctgctgctgctgcccctgctggctggcgcccgcctgctgtggaactggtggaagctccggagcctccacctcctgcctcttgccccgggcttcttgcacctgctgcagcccgacctccccatctatctgcttggcctgactcagaaattcgggcccatctacaggctccaccttgggctgcaaggtgagaggctgatctcgctctggccctcaccataggagggggcggaggtgacggagagggtcctctctccgctgacgctgctttggctgtctcccagatgtggtggtgctgaactccaagaggaccattgaggaagccatggtcaaaaagtgggcagactttgctggcagacctgagccacttacctcccccagctcctcctgcagacaagctggtgtctaagaactacccggacctgtcgttggtctctgctctggaaagcccacaagaagctcacccgctcagccctgctgctgggcatccgtgactccatggagccagtggtggagcagctgacccaggagttctgtgagcgcatgagagcccagcccggcacccctgtggccattgaggaggaattctctctcctcacctgcagcatcaactgttacctcaccttcggagacaagatcaaggaggacaacttaatgcctgcctattacaaatgtatccaggaggtgttaaaaacctggagccactggtccatccaaattgtggacgtgattccctttctcaggttcttccccaatccaggtctccggaggctgaagcaggccatagagaagagggaccacaacgaggagaagcagctgaggcagcacaaggagagcctggtggcaggccagtggagggacatgatggactacatgctccaaggggtggcgcagccgagcatggaagagggctctggacagctcctggaagggcacttgcacatggctgcagtggacctcctgatcggtggcactgagaccacagcaaacaccctctcctgggccgtggttttttttgcttcaccaccctgagattcagcagcgactgtaggaggagctagaccacgaactgggccctggtgcctccagctcccgggtcccctacaaggaccgtgcacggctgcccttgctcaatgccaccatcgccgaggtgctgcgcctgtggcccgttgtgcccttagccttgccccaccgcaccacacggcccagcagcatctccggctacgacatccctgagggcacagtcatcattccgaacctccaaggcgcccacctggatgagacggtctgggagaggccacatgagttctggcctgatcgcttcctggagccaggcaagaactccagagctctggccttcggctgcggtgcccgcgtgtgcctgggcgagccgctggcgcgcctggagctcttcgtggtgctgacccgactgctgcaggccttcacgctgctgccctccggggacgccctgccctccctgcagcccctgccccactgcagtgtcatcctcaagatgcagcctttccaagtgcggctgcagccccgggggatgggggcccacagcccaggccagaaccagtgatggggcaggaccgatgccagccgggtacctcagtttctcctttattgctcccgtacgaacccctcccctcccccctgtaaacacagtgctgcgagatcgctggcagagaaggcttcctccagcggctgggtggtgaaggaccctggctcttctctcggggcgacccctcagtgctcggcagtcatactggggtgcgagagaggtgggcagcagctcagcctccccccgctggggagcgaaagtttcttggtctcagcttcatttccgtgaagggcaccgagaactcgaagcccttccagtggtaccagctcactccctgggaaaggggttgtcaagagagagtcaaagccggatgtcccatctgctcctcccgttccccttaaggaggtggctcccagcactcaaccaacctccccgcagagctcccttcctgaccctctgccgcagaggattgaggcttaatcctgagctggtcctttccagccaataaatcaactccagctccctctg

SEQ ID NO: 14829 - protein, 177 aa, Homo sapiens [sequence omitted]

SEQ ID NO: 14830 - DNA, 2645 bp, Homo sapiens
gaaagctgactctggatgcaggaaaaaggtcagggttgcatttcccttccttgcttctcgatgggtgattaattttttttgaaatacggacgtcccaaggccaatgagactggtgtcattccagaaaagggccactctgtgggtgggtcggtgggaaggcacctgagggtggggtcaagggaggccccaaaacagtctacacagcaggagggatggctggggctcttgagctataagtggcacctcagggccctgacgggcgtcttgccatgctgctcctgggcctgctgctgctgctgcccctgctggctggcgcccgcctgctgtggaactggtggaagctccggagcctccacctcctgcctcttgccccgggcttcttgcacctgctgcagcccgacctccccatctatctgcttggcctgactcagaaattcgggcccatctacaggctccaccttgggctgcaaggtgagaggctgatctcgctctggccctcaccataggagggggcggaggtgacggagagggtcctctctccgctgacgctgctttggctgtctcccagatgtggtggtgctgaactccaagaggaccattgaggaagccatggtcaaaaagtgggcagactttgctggcagacctgagccacttacctgtaagggccgggggcattttttctttcttaaacaaattttttttttgttagagatggggtcttgctatgttgcccaggctggtcttgaattcctggtctcaagtgatcctcccacctcggcctcaagtgggagccaccttcgggggcttccccaatcctccaggtcactggaagctcttggggggcatatcttcaggagaagaagcaggtgttgaggaggcagaagaaggtcaggccctcggcttccttggtcagttcccaccctccagcccccagctcctcctgcagacaagctggtgtctaagaactacccggacctgtcgttggtctctgctctggaaagcccacaagaagctcacccgctcagccctgctgctgggcatccgtgactccatggagccagtggtggagcagctgacccaggagttctgtgagcgcatgagagcccagcccggcacccctgtggccattgaggaggaattctctctcctcacctgcagcatcaactgttacctcaccttcggagacaagatcaaggaggacaacttaatgcctgcctattacaaatgtatccaggaggtgttaaaaacctggagccactggtccatccaaattgtggacgtgattccctttctcaggttcttccccaatccaggtctccggaggctgaagcaggccatagagaagagggaccacaacgaggagaagcagctgaggcagcacaaggagagcctggtggcaggccagtggagggacatgatggactacatgctccaaggggtggcgcagccgagcatggaagagggctctggacagctcctggaagggcacttgcacatggctgcagtggacctcctgatcggtggcactgagaccacagcaaacaccctctcctgggccgtggttttttttgcttcaccaccctgagattcagcagcgactgtaggaggagctagaccacgaactgggccctggtgcctccagctcccgggtcccctacaaggaccgtgcacggctgcccttgctcaatgccaccatcgccgaggtgctgcgcctgtggcccgttgtgcccttagccttgccccaccgcaccacacggcccagcagcatctccggctacgacatccctgagggcacagtcatcattccgaacctccaaggcgcccacctggatgagacggtctgggagaggccacatgagttctggcctgatcgcttcctggagccaggcaagaactccagagctctggccttcggctgcggtgcccgcgtgtgcctgggcgagccgctggcgcgcctggagctcttcgtggtgctgacccgactgctgcaggccttcacgctgctgccctccggggacgccctgccctccctgcagcccctgccccactgcagtgtcatcctcaagatgcagcctttccaagtgcggctgcagccccgggggatgggggcccacagcccaggccagaaccagtgatggggcaggaccgatgccagccgggtacctcagtttctcctttattgctcccgtacgaacccctcccctcccccctgtaaacacagtgctgcgagatcgctggcagagaaggcttcctccagcggctgggtggtgaaggaccctggctcttctctcggggcgacccctcagtgctcggcagtcatactggggtgcgagagaggtgggcagcagctcagcctccccccgctggggagcgaaagtttcttggtctcagcttcatttccgtgaagggcaccgagaactcgaagcccttccagtggtaccagctcactccctgggaaaggggttgtcaagagagagtcaaagccggatgtcccatctgctcctcccgttccccttaaggaggtggctcccagcactcaaccaacctccccgcagagctcccttcctgaccctctgccgcagaggattgaggcttaatcctgagctggtcctttccagccaataaatcaactccagctccctctg

SEQ ID NO: 14831 - protein, 286 aa, Homo sapiens
MLPRLVLNSWSQVILPPRPQVGATFGGFPNPPGHWKLLGGISSGEEAGVEEAEEGQALGFLGQFPPSSPQLLLQTSWCLRTTRTCRWSLLWKAHKKLTRSALLLGIRDSMEPVVEQLTQEFCERMRAQPGTPVAIEEEFSLLTCSINCYLTFGDKIKEDNLMPAYYKCIQEVLKTWSHWSIQIVDVIPFLRFFPNPGLRRLKQAIEKRDHNEEKQLRQHKESLVAGQWRDMMDYMLQGVAQPSMEEGSGQLLEGHLHMAAVDLLIGGTETTANTLSWAVVFFASPP

SEQ ID NO: 14832 - DNA, 1128 bp, Homo sapiens
gtaggaggagctagaccacgaactgggccctggtgcctccagctcccgggtcccctacaaggaccgtgcacggctgcccttgctcaatgccaccatcgccgaggtgctgcgcctgtggcccgttgtgcccttagccttgccccaccgcaccacacggcccagcaggtgactcccgagggttggggatgagtgaggaaagcccgagcccagggaggtcctggccagcctctaactccagcccccttcagcatctccggctacgacatccctgagggcacagtcatcattccgaacctccaaggcgcccacctggatgagacggtctgggagaggccacatgagttctggcctgatcgcttcctggagccaggcaagaactccagagctctggccttcggctgcggtgcccgcgtgtgcctgggcgagccgctggcgcgcctggagctcttcgtggtgctgacccgactgctgcaggccttcacgctgctgccctccggggacgccctgccctccctgcagcccctgccccactgcagtgtcatcctcaagatgcagcctttccaagtgcggctgcagccccgggggatgggggcccacagcccaggccagaaccagtgatggggcaggaccgatgccagccgggtacctcagtttctcctttattgctcccgtacgaacccctcccctcccccctgtaaacacagtgctgcgagatcgctggcagagaaggcttcctccagcggctgggtggtgaaggaccctggctcttctctcggggcgacccctcagtgctcggcagtcatactggggtgcgagagaggtgggcagcagctcagcctccccccgctggggagcgaaagtttcttggtctcagcttcatttccgtgaagggcaccgagaactcgaagcccttccagtggtaccagctcactccctgggaaaggggttgtcaagagagagtcaaagccggatgtcccatctgctcctcccgttccccttaaggaggtggctcccagcactcaaccaacctccccgcagagctcccttcctgaccctctgccgcagaggattgaggcttaatcctgagctggtcctttccagccaataaatcaactccagctccctctg

SEQ ID NO: 14833 - protein, 48 aa, Homo sapiens
MRRSGRGHMSSGLIASWSQARTPELWPSAAVPACAWASRWRAWSSSWC

SEQ ID NO: 14834 - DNA, 710 bp, Homo sapiens
catggatggacagacagacttctggagggactgggaggactatgcccatggttttgggaacatctctggagagttctggctgggcaatgaggccctgcacagcctgacacaggcaggtgactactccatgcgcgtggacctgcgggctggggacgaggctgtgttcgcccagtacgactccttccacgtagactcggctgcggagtactaccgcctccacttggagggctaccacggcaccgcaggggactccatgagctaccacagcggcagtgtcttctctgcccgtgatcgggaccccaacagcttgctcatctcctgcgctgtctcctaccgaggggcctggtggtacaggaactgccactacgccaacctcaacgggctctacgggagcacagtggaccatcagggagtgagctggtaccactggaagggcttcgagttctcggtgcccttcacggaaatgaagctgagaccaagaaactttcgctccccagcggggggaggctgagctgctgcccacctctctcgcaccccagtatgactgccgagcactgaggggtcgccccgagagaagagccagggtccttcaccacccagccgctggaggaagccttctctgccagcgatctcgcagcactgtgtttacaggggggaggggaggggttcgtacgggagcaataaaggagaaactgaggtacccggctggc

SEQ ID NO: 14835 - protein, 169 aa, Homo sapiens
MDGQTDFWRDWEDYAHGFGNISGEFWLGNEALHSLTQAGDYSMRVDLRAGDEAVFAQYDSFHVDSAAEYYRLHLEGYHGTAGDSMSYHSGSVFSARDRDPNSLLISCAVSYRGAWWYRNCHYANLNGLYGSTVDHQGVSWYHWKGFEFSVPFTEMKLRPRNFRSPAGGG

SEQ ID NO: 14836 - DNA, 626 bp, Homo sapiens
gtgcactgaacttgaccgagggattcgccgtgctgcactggaagcccccccagaatcctgtggacacctatgacgtccaggtcacagcccctggggccccgcctctgcaggcggagaccccaggcagcgcggtggactaccccctgcatgaccttgtcctccacaccaactacaccgccacagtgcgtggcctgcggggccccaacctcacttccccagccagcatcaccttcaccacagggctagaggcccctcgggacttggaggccaaggaagtgaccccccgcaccgccctgctcacttggactgagcccccagtccggcccgcaggctacctgctcagcttccacacccctggtggacagaaccaggagatcctgctcccaggagggatcacatctcaccagctccttggcctctttccctccacctcctacaatgcacggctccaggccatgtggggccagagcctcctgccgcccgtgtccacctctttcaccacgggtgggctgcggatccccttccccagggactgcggggaggagatgcagaacggagccggtgcctccaggaccagcaccatcttcctcaacggcaaccgggagcggcccctgaacgtgttttgg

SEQ ID NO: 14837 - protein, 58 aa, Homo sapiens
MTSRSQPLGPRLCRRRPQAARWTTPCMTLSSTPTTPPQCVACGAPTSLPQPASPSPQG

SEQ ID NO: 14838 - DNA, 1294 bp, Homo sapiens
aaaatgagcggggacacagaaaccaacagcagtggctgcatttgtggtacaggctcctcttccagagctcgctgatgcccacctcagacaggcctgaccacggcacggctggtgggatttgccagtcacctcaaccagccagttccaccctcagcttctctcagaagggagcaccacactcctcaagctcagtgaatgtatcccggcatgggtggggccagagcctgtgatatctcgaggtgggctcggcaggacaccggggtgtggaagggggaagcgagcacctgactcagacagcgcgggagctcgcaggagtcacgaggccacagcgacttcattgtctgactgggcctggacctataaacttcccacctcagccttgggccaagcctggaagataaaaatggagcaccccatggcgcccctcactcagattctcccctgggcttctcccacgcagccccagaagaggacacaccagccccagagttagccccagaggcccctgagcctcctgaagagccccgcctaggagtgctgaccgtgaccgacacaaccccagactccatgcgcctctcgtggagcgtggcccagggcccctttgattccttcgtggtccagtatgaggacacgaatgggcagccccaggccttgctcgtggacggcgaccagagcaagatcctcatctcaggcctggagcccagcacccgctacaggttcctcctctatggcctccatgaagggaagcgcctggggcccctctcagctgagggcaccacagggctggctcctgctggtcagacctcagaggagtcaaggccccgcctgtcccagctgtctgtgactgacgtgaccaccagttcactgaggctcaactgggaggccccaccgggggccttcgactccttcctgctccgctttggggttccatcaccaagcactctggagccgcatccgcgtccactgctgcagcgcgagctgatggtgccggggacgcggcactcggccgtgctccgggacctgcgttccgggactctgtacagcctgacactgtatgggctgcgaggaccccacaaggccgacagcatccagggaaccgcccgcaccctcagcccagttctggagagcccccgtgacctccaattcagtgaaatcagggagacctcagccaaggtcaactggatgcccccaccatcccgggcggacagcttcaaagtctcctaccagctggcggacggaggggagcctcagagtgtgcaggtggacggccgggcccggacccagaaactccagg

SEQ ID NO: 14839 - protein, 241 aa, Homo sapiens
MRLSWSVAQGPFDSFVVQYEDTNGQPQALLVDGDQSKILISGLEPSTRYRFLLYGLHEGKRLGPLSAEGTTGLAPAGQTSEESRPRLSQLSVTDVTTSSLRLNWEAPPGAFDSFLLRFGVPSPSTLEPHPRPLLQRELMVPGTRHSAVLRDLRSGTLYSLTLYGLRGPHKADSIQGTARTLSPVLESPRDLQFSEIRETSAKVNWMPPPSRADSFKVSYQLADGGEPQSVQVDGRARTQKL

SEQ ID NO: 14840 - DNA, 867 bp, Homo sapiens
gcgggagcaggcctgtgtgtctcctcaaggagctgtccctggggctacactggagggaccatttcccagaacctcacacctccgggaggctgccagggcttaggcaaaggcagcatgtgactaagagctttccctcctccctctgcacagctcccctggagaaggagctacctccccacctgggggaactgaccgtggctgaggagacctccagctctctgcgcctgtcctggacggtagcccagggcccctttgactccttcgtggtccagtacagggacacggacgggcagcccagggcagtgcctgtggccgcagaccagcgcacagtcaccgtagaggacctggagcctggcaagaaatacaagtttctgctctacgggctccttgggggaaagcgcctgggcccggtctctgccctgggaatgacagccccagaagaggacacaccagccccagagttagccccagaggcccctgagcctcctgaagagccccgcctaggagtgctgaccgtgaccgacacaaccccagactccatgcgcctctcgtggagcgtggcccagggcccctttgattccttcgtggtccagtatgaggacacgaacgggcagccccaggccttgctcgtggacggcgaccagagcaagatcctcatctcaggcctggagcccagcaccccctacaggttcctcctctatggcctccatgaagggaagcgcctggggcccctctcagctgagggcaccacagggctggctcctgctggtcagacctcagaggagtcaaggccccgcctgtcccagctgtctgtgactgacgtgaccaccagttcactgaggctcaactgggaggccccaccggggg

SEQ ID NO: 14841 - protein, 146 aa, Homo sapiens
MTAPEEDTPAPELAPEAPEPPEEPRLGVLTVTDTTPDSMRLSWSVAQGPFDSFVVQYEDTNGQPQALLVDGDQSKILISGLEPSTPYRFLLYGLHEGKRLGPLSAEGTTGLAPAGQTSEESRPRLSQLSVTDVTTSSLRLNWEAPP

SEQ ID NO: 14842 - DNA, 1501 bp, Homo sapiens
gtgtcggtcacggtcagcactcctaggcggggctcttcaggaggctcaggggcctctggggctaactctggggctggtgtgtcctcttctggggctgcgtgggagaagcccaggggagaatctgagtgaggggcgccatggggtgctccatttttatcttccaggcttggcccaaggctgaggtgggaagtttataggtccaggcccagtcagacaatgaagtcgctgtggcctcgtgactcctgcgagctcccgcgctgtctgagtcaggtgctcgcttcccccttccacaccccggtgtcctgccgagcccacctcgagatatcacaggctctggccccacccatgccgggatacattcactgagcttgaggagtgtggtgctcccttctgagagaagctgagggtggaactggctggttgaggtgactggcaaatcccaccagccgtgccgtggtcaggcctgtctgaggtgggcatcagcgagctctggaagaggagcctgtaccacaaatgcagccactgctgttggtttctgtgtccccgctcattttgttttccagtgatgttcctcttaagaaaatgctcctgactcatccacggcagggaggtttgccactatctggacaaggccacccttcggggaggcgacagcagccccagcgagtaatgaggagcagcggcagtgacggggcagagtcggggctgggagattagagagcccctcccagggcctttccctcccgcctggcctggctcctgctctggactccttgatggatgttgaagcccacagggctgcagactcctcctccttcctgggcacaggccaggtcaccccactccggcctgcccactcctgcagtcatctttgtcttcagaccaaatgcacaagtactttgttaaagggcgccaggctgtccttggcatggtccggaaggcaaagtaccgggagctgctcctatcagagctcctgggccggcgggtgcctgtcgtggtgcggcttggcctcacctaccatgtgcacgacctcattggggcccagctagtggactgcatctctaccacttcaggaaccctcctccgcctgccagagacatgaagattctgctcatcattgctcagctcctcagagtgggccgggaggggactagaagagctgcatgatggtggctgagacagggtcaccttgggaaggcttgggagccaggatgagtgtcgggctctcgtgtgtgcaaaaggtcagatgtgactgctgctgtttgcctggtttctgacccagtggtggggtttgagcaatgcttctctgcccttccatggaaagtggaaccagaaatggtgccaaggctgtggctgttccctttcgtgtaaaatggtgctgttattactctgtcttgaaataggaaggtgggatttctggggaggctggtgaaggagggcagggttcttttctctacgtgtcatgttaaaattgccaaataaagtacctctgcctgtgata

SEQ ID NO: 14843 - protein, 90 aa, Homo sapiens
MDVEAHRAADSSSFLGTGQVTPLRPAHSCSHLCLQTKCTSTLLKGARLSLAWSGRQSTGSCSYQSSWAGGCLSWCGLASPTMCTTSLGPS

SEQ ID NO: 14844 - DNA, 715 bp, Homo sapiens
caagtactttgttaaaggtatcccatctgcagctcaagcctgcagcccctcaccttttggtggctcctcaggcctctaggccttattcacctttcccctttcctgtgccacttctcctctagggcgccaggctgtccttggcatggtccggaaggcaaagtaccgggagctgctcctatcagagctcctgggccggcgggtgcctgtcgtggtgcggcttggcctcacctaccatgtgcacgacctcattggggcccagctagtggactgcatctctaccacttcaggaaccctcctccgcctgccagagacatgaagattctgctcatcattgctcagctcctcagagtgggccgggaggggactagaagagctgcatgatggtggctgagacagggtcaccttgggaaggcttgggagccaggatgagtgtcgggctctcgtgtgtgcaaaaggtcagatgtgactgctgctgtttgcctggtttctgacccagtggtggggtttgagcaatgcttctctgcccttccatggaaagtggaaccagaaatggtgccaaggctgtggctgttccctttcgtgtaaaatggtgctgttattactctgtcttgaaataggaaggtgggatttctggggaggctggtgaaggagggcagggttcttttctctacgtgtcatgttaaaattgccaaataaagtacctctgcctgtgata

SEQ ID NO: 14845 - protein, 57 aa, Homo sapiens
MVRKAKYRELLLSELLGRRVPVVVRLGLTYHVHDLIGAQLVDCISTTSGTLLRLPET

SEQ ID NO: 14846 - DNA, 5459 bp, Homo sapiens
agagtcaactctgccccgaggcctagcttggccagaaggtagcagacagacagacggatctaacctctcttggatcctccagccatgaggctgctctgggggctgatctgggcatccagcttcttcaccttatctctgcagaagcccaggttgctcttgttctctccttctgtggttcatctgggggtccccctatcggtgggggtgcagctccaggatgtgccccgaggacaggtagtgaaaggatcagtgttcctgagaaacccatctcgtaataatgtcccctgctccccaaaggtggacttcacccttagctcagaaagagacttcgcactcctcagtctccaggtgcccttgaaagatgcgaagagctgtggcctccatcaactcctcagaggccctgaggtccagctggtggcccattcgccatggctaaaggactctctgtccagaacgacaaacatccagggtatcaacctgctcttctcctctcgccgggggcacctctttttgcagacggaccagcccatttacaaccctggccagcgggttcggtaccgggtctttgctctggatcagaagatgcgcccgagcactgacaccatcacagtcatggtggagaactctcacggcctccgcgtgcggaagaaggaggtgtacatgccctcgtccatcttccaggatgactttgtgatcccagacatctcagagccagggacctggaagatctcagcccgattctcagatggcctggaatccaacagcagcacccagtttgaggtgaagaaatatgtccttcccaactttgaggtgaagatcacccctggaaagccctacatcctgacggtgccaggccatcttgatgaaatgcagttagacatccaggccaggtacatctatgggaagccagtgcagggggtggcatatgtgcgctttgggctcctagatgaggatggtaagaagactttctttcgggggctggagagtcagaccaagctggtgaatggacagagccacatttccctctcaaaggcagagttccaggacgccctggagaagctgaatatgggcattactgacctccaggggctgcgcctctacgttgctgcagccatcattgagtctccaggtggggagatggaggaggcagagctcacatcctggtattttgtgtcatctcccttctccttggatcttagcaagaccaagcgacaccttgtgcctggggcccccttcctgctgcaggccttggtccgtgagatgtcaggctccccagcttctggcattcctgtcaaagtttctgccacggtgtcttctcctgggtctgttcctgaagtccaggacattcagcaaaacacagacgggagcggccaagtcagcattccaataattatccctcagaccatctcagagctgcagctctcagtatctgcaggctccccacatccagcgatagccaggctcactgtggcagccccaccttcaggaggccccgggtttctgtctattgagcggccggattctcgacctcctcgtgttggggacactctgaacctgaacttgcgagccgtgggcagtggggccaccttttctcattactactacatgatcctatcccgagggcagatcgtgttcatgaatcgagagcccaagaggaccctgacctcggtctcggtgtttgtggaccatcacctggcaccctccttctactttgtggccttctactaccatggagaccacccagtggccaactccctgcgagtggatgtccaggctggggcctgcgagggcaagctggagctcagcgtggacggtgccaagcagtaccggaacggggagtccgtgaagctccacttagaaaccgactccctagccctggtggcgctgggagccttggacacagctctgtatgctgcaggcagcaagtcccacaagcccctcaacatgggcaaggtctttgaagctatgaacagctatgacctcggctgtggtcctgggggtggggacagtgcccttcaggtgttccaggcagcgggcctggccttttctgatggagaccagtggaccttatccagaaagagactaagctgtcccaaggagaagacaacccggaaaaagagaaacgtgaacttccaaaaggcgattaatgagaaattgggtcagtatgcttccccgacagccaagcgctgctgccaggatggggtgacacgtctgcccatgatgcgttcctgcgagcagcgggcagcccgcgtgcagcagccggactgccgggagcccttcctgtcctgctgccaatttgctgagagtctgcgcaagaagagcagggacaagggccaggcgggcctccaacgagccctggagatcctgcaggaggaggacctgattgatgaggatgacattcccgtgcgcagcttcttcccagagaactggctctggagagtggaaacagtggaccgctttcaaatattgacactgtggctccccgactctctgaccacgtgggagatccatggcctgagcctgtccaaaaccaaaggcctatgtgtggccaccccagtccagctccgggtgttccgcgagttccacctgcacctccgcctgcccatgtctgtccgccgctttgagcagctggagctgcggcctgtcctctataactacctggataaaaacctgactgtgagcgtccacgtgtccccagtggaggggctgtgcctggctgggggcggagggctggcccagcaggtgctggtgcctgcgggctctgcccggcctgttgccttctctgtggtgcccacggcagccgccgctgtgtctctgaaggtggtggctcgagggtccttcgaattccctgtgggagatgcggtgtccaaggttctgcagattgagaaggaaggggccatccatagagaggagctggtctatgaactcaaccccttggaccaccgaggccggaccttggaaatacctggcaactctgatcccaatatgatccctgatggggactttaacagctacgtcagggttacagcctcagatccattggacactttaggctctgagggggccttgtcaccaggaggcgtggcctccctcttgaggcttcctcgaggctgtggggagcaaaccatgatctacttggctccgacactggctgcttcccgctacctggacaagacagagcagtggagcacactgcctcccgagaccaaggaccacgccgtggatctgatccagaaaggctacatgcggatccagcagtttcggaaggcggatggttcctatgcggcttggttgtcacgggacagcagcacctggctcacagcctttgtgttgaaggtcctgagtttggcccaggagcaggtaggaggctcgcctgagaaactgcaggagacatctaactggcttctgtcccagcagcaggctgacggctcgttccaggacccctgtccagtgttagacaggagcatgcaggggggtttggtgggcaatgatgagactgtggcactcacagcctttgtgaccatcgcccttcatcatgggctggccgtcttccaggatgagggtgcagagccattgaagcagagagtggaagcctccatctcaaaggcaaactcatttttgggggagaaagcaagtgctgggctcctgggtgcccacgcagctgccatcacggcctatgccctgacactgaccaaggcgcctgtggacctgctcggtgttgcccacaacaacctcatggcaatggcccaggagactggagataacctgtactggggctcagtcactggttctcagagcaatgccgtgtcgcccaccccggctcctcgcaacccatccgaccccatgccccaggccccagccctgtggattgaaaccacagcctacgccctgctgcacctcctgcttcacgagggcaaagcagagatggcagaccaggcttcggcctggctcacccgtcagggcagcttccaagggggattccgcagtacccaagacacggtgattgccctggatgccctgtctgcctactggattgcctcccacaccactgaggagaggggtctcaatgtgactctcagctccacaggccggaatgggttcaagtcccacgcgctgcagctgaacaaccgccagattcgcggcctggaggaggagctgcagttttccttgggcagcaagatcaatgtgaaggtgggaggaaacagcaaaggaaccctgaaggtccttcgtacctacaatgtcctggacatgaagaacacgacctgccaggacctacagatagaagtgacagtcaaaggccacgtcgagtacacgatggaagcaaacgaggactatgaggactatgagtacgatgagcttccagccaaggatgacccagatgcccctctgcagcccgtgacacccctgcagctgtttgagggtcggaggaaccgccgcaggagggaggcgcccaaggtggtggaggagcaggagtccagggtgcactacaccgtgtgcatctggcggaacggcaaggtggggctgtctggcatggccatcgcggacgtcaccctcctgagtggattccacgccctgcgtgctgacctggagaagctgacctccctctctgaccgttacgtgagtcactttgagaccgaggggccccacgtcctgctgtattttgactcggtccccacctcccgggagtgcgtgggctttgaggctgtgcaggaagtgccggtggggctggtgcagccggccagcgcaaccctgtacgactactacaaccccgagcgcagatgttctgtgttttacggggcaccaagtaagagcagactcttggccaccttgtgttctgctgaagtctgccagtgtgctgaggggaagtgccctcgccagcgtcgcgccctggagcggggtctgcaggacgaggatggctacaggatgaagtttgcctgctactacccccgtgtggagtacggcttccaggttaaggttctccgagaagacagcagagctgctttccgcctctttgagaccaagatcacccaagtcctgcacttcaccaaggatgtcaaggccgctgctaatcagatgcgcaacttcctggttcgagcctcctgccgccttcgcttggaacctgggaaagaatatttgatcatgggtctggatggggccacctatgacctcgagggacacccccagtacctgctggactcgaatagctggatcgaggagatgccctctgaacgcctgtgccggagcacccgccagcgggcagcctgtgcccagctcaacgacttcctccaggagtatggcactcaggggtgccaggtgtgagggctgccctcccacctccgctgggaggaacctgaacctgggaaccatgaagctggaagcactgctgtgtccgctttcatgaacacagcctgggaccagggcatattaaaggcttttggcagcaaagtgtcagtgttggc

SEQ ID NO: 14847 - protein, 1744 aa, Homo sapiens; identical to SEQ ID NO: 4739

SEQ ID NO: 14848 - DNA, 508 bp, Homo sapiens
caacctgctcttctcctctcgccgggggcacctctttttgcagacggaccagcccatttacaaccctggccagcgggttcggtaccgggtctttgctctggatcagaagatgcgcccgagcactgacaccatcacagtcatggtggaggtgagtccccgacctctggccttcctgatcctggccactgatgtgacctcctgcctgtgagcacttctccccttgcagaactctcacggcctccgcgtgcggaagaaggaggtgtacatgccctcgtccatcttccaggatgactttgtgatcccagacatctcagagtgagcgctcccaatgtgggggctgcccccaagctacaccaccccaattcctgttaggctctccacctcccacacagaggcacgtccccagatgccctgaccctcagcctcctgagcctctggttaacccccacagtcctcttcccagggaagcaggctgctggctctccgtgccccactgtacagatgggct

SEQ ID NO: 14849 - protein, 32 aa, Homo sapiens
MRPSTDTITVMVEVSPRPLAFLILATDVTSCL

SEQ ID NO: 14850 - DNA, 920 bp, Homo sapiens; identical to SEQ ID NO: 14822

SEQ ID NO: 14851 - protein, 72 aa, Homo sapiens; identical to SEQ ID NO: 14823

SEQ ID NO: 14852 - DNA, 846 bp, Homo sapiens; identical to SEQ ID NO: 14824

SEQ ID NO: 14853 - protein, 131 aa, Homo sapiens; identical to SEQ ID NO: 14825

SEQ ID NO: 14854 - DNA, 601 bp, Homo sapiens; identical to SEQ ID NO: 14826

SEQ ID NO: 14855 - protein, 83 aa, Homo sapiens; identical to SEQ ID NO: 14827

SEQ ID NO: 14856 - DNA, 2114 bp, Homo sapiens; identical to SEQ ID NO: 1641

SEQ ID NO: 14857 - protein, 495 aa, Homo sapiens; identical to SEQ ID NO: 1642

SEQ ID NO: 14858 - DNA, 2142 bp, Homo sapiens
tgggagggtacctgaaggtggggtcaagggaggccccaaaacagtctacacagcaggagggatggctggggctcttgagctataagtggcacctcagggccctgacgggcgtctcgccatgctgctcctgggcctgctgctgctgctgcccctgctggctggcgcccgcctgctgtggaactggtggaagctccggagcctccacctcccgcctcttgccccgggcttcttgcacctgctgcagcccgacctccccatctatctgcttggcctgactcagaaattcgggcccatctacaggctccaccttgggctgcaagatgtggtggtgctgaactccaagaggaccattgaggaagccatggtcaaaaagtgggcagactttgctggcagacctgagccacttacctacaagctggtgtctaggaactacccggacctgtccttgggagactactccctgctctggaaagcccacaagaagctcacccgctcagccctgctgctgggcatccgtgactccatggagccagtggtggagcagctgacccaggagttctgtgagcgcatgagagcccagcccggcacccctgtggccattgaggaggaattctctctcctcacctgcagcatcatctgttacctcaccttcggagacaagatcaaggacgacaacttaatgcctgcctattacaaatgtatccaggaggtgttaaaaacctggagccactggtccatccaaattgtggacgtgattccctttctcaggttcttccccaatccaggtctccggaggctgaagcaggccatagagaagagggatcacatcgtggagatgcagctgaggcagcacaaggagagcctcgtggcaggccagtggagggacatgatggactacatgctccaaggggtggcgcagccgagcatggaagagggctctggacagctcctggaagggcacgtgcacatggctgcagtggacctcctgatcggtggcactgagaccacagcaaacaccctctcctgggccgtggtttttttgcttcaccaccctgagattcagcagcgactgcaggaggagctagaccacgaactgggccctggtgcctccagctcccgggtcccctacaaggaccgtgcacggctgcccttgctcaatgccaccatcgccgaggtgctgcgcctgcggcccgttgtgcccttagccttgccccaccgcaccacacggcccagcagcatctccggctacgacatccctgagggcacagtcatcattccgaacctccaaggcgcccacctggatgagacggtctgggagaggccacatgagttctggcctgatcgcttcctggagccaggcaagaactccagagctctggccttcggctgcggtgcccgcgtgtgcctgggcgagccgctggcgcgcctggagctcttcgtggtgctgacccgactgctgcaggccttcacgctgctgccctccggggacgccctgccctccctgcagcccctgccccactgcagtgtcatcctcaagatgcagcctttccaagtgcggctgcagccccgggggatgggggcccacagcccgggccagagccagtgatggggcaggaccgatgccagccgggtacctcagtttctcctttattgctcccgtacgaacccctcccctcccccctgtaaacacagtgctgcgagatcgctggcagagaaggcttcctccagcggctgggtggtgaaggaccctggctcttctctcggggcgacccctcagtgctcggcagtcatactggggtgcgagagaggtgggcagcagctcagcctccccccgctggggagcgaaagtttcttggtctcagcttcatttccgtgaagggcaccgagaactcgaagcccttccagtggtaccagctcactccctgggaaaggggttgtcaagagagagtcaaagccggatgtcccatctgctcttcccgttccccttaaggaggtagctcccagcactcaaccaacctccccgcagagctcccttcctgaccctccgctgcagaggattgaggcttaattctgagctggccctttccagccaataaatcaactccagctccctctgcgaggctggcatgattgttccatttc

SEQ ID NO: 14859 - protein, 495 aa, Homo sapiens; identical to SEQ ID NO: 1642

SEQ ID NO: 14860 - DNA, 588 bp, Homo sapiens
ctgaaggtggggtcaagggaggccccaaaacagtctacacagcaggagggatggctggggctcttgagctataagtggcacctcagggccctgacgggcgtctcgccatgctgctcctgggcctgctgctgctgctgcccctgctggctggcgcccgcctgctgtggaactggtggaagctccggagcctccacctcccgcctcttgccccgggcttcttgcacctgctgcagcccgacctccccatctatctgcttggcctgactcagaaattcgggcccatctacaggctccaccttgggctgcaagatgtggtggtgctgaactccaagaggaccattgaggaagccatggtcaaaaagaactacccggacctgtccttgggagactactccctgctctggaaagcccacaagaagctcacccgctcagccctgctgctgggcatccgtgactccatggagccagtggtggagcagctgacccaggagttctgtgagcgcatgagagcccagcccggcacccctgtggccattgaggaggaattctctctcctcacctgcagcatcatctgttacctcaccttcg

SEQ ID NO: 14861 - protein, 159 aa, Homo sapiens
MLLLGLLLLLPLLAGARLLWNWWKLRSLHLPPLAPGFLHLLQPDLPIYLLGLTQKFGPIYRLHLGLQDVVVLNSKRTIEEAMVKKNYPDLSLGDYSLLWKAHKKLTRSALLLGIRDSMEPVVEQLTQEFCERMRAQPGTPVAIEEEFSLLTCSIICYLT

SEQ ID NO: 14862 - DNA, 2137 bp, Homo sapiens
gatggctggggctcttgagctataagtggcacctcagggccctgacgggcgtctcgccatgctgctcctgggcctgctgctgctgctgcccctgctggctggcgcccgcctgctgtggaactggtggaagctccggagcctccacctcccgcctcttgccccgggcttcttgcacctgctgcagcccgacctccccatctatctgcttggcctgactcagaaattcgggcccatctacaggctccaccttgggctgcaagatgtggtggtgctgaactccaagaggaccattgaggaagccatggtcaaaaagtgggcagactttgctggcagacctgagccacttacctacaagctggtgtctaggaactacccggacctgtccttgggagactactccctgctctggaaagcccacaagaagctcacccgctcagccctgctgctgggcatccgtgactccatggagccagtggtggagcagctgacccaggagttctgtgagcgcatgagagcccagcccggcacccctgtggccattgaggaggaattctctctcctcacctgcagcatcatctgttacctcaccttcggagacaagatcaaggacgacaacttaatgcctgcctattacaaatgtatccaggaggtgttaaaaacctggagccactggtccatccaaattgtggacgtgattccctttctcaggttcttccccaatccaggtctccggaggctgaagcaggccatagagaagagggatcacatcgtggagatgcagctgaggcagcacaaggagagcctcgtggcaggccagtggagggacatgatggactacatgctccaaggggtggcgcagccgagcatggaagagggctctggacagctcctggaagggcacgtgcacatggctgcagtggacctcctgatcggtggcactgagaccacagcaaacaccctctcctgggccgtggtttttttgcttcaccaccctgagattcagcagcgactgcaggaggagctagaccacgaactgggccctggtgcctccagctcccgggtcccctacaaggaccgtgcacggctgcccttgctcaatgccaccatcgccgaggtgctgcgcctgcggcccgttgtgcccttagccttgccccaccgcaccacacggcccagcaggtgactcccgagggttggggatgagtgaggaaagcccgagcccagggaggtcctggccagcctctaactccagcccccttcagcatctccggctacgacatccctgagggcacagtcatcattccgaacctccaaggcgcccacctggatgagacggtctgggagaggccacatgagttctggcctgatcgcttcctggagccaggcaagaactccagagctctggccttcggctgcggtgcccgcgtgtgcctgggcgagccgctggcgcgcctggagctcttcgtggtgctgacccgactgctgcaggccttcacgctgctgccctccggggacgccctgccctccctgcagcccctgccccactgcagtgtcatcctcaagatgcagcctttccaagtgcggctgcagccccgggggatgggggcccacagcccgggccagagccagtgatggggcaggaccgatgccagccgggtacctcagtttctcctttattgctcccgtacgaacccctcccctcccccctgtaaacacagtgctgcgagatcgctggcagagaaggcttcctccagcggctgggtggtgaaggaccctggctcttctctcggggcgacccctcagtgctcggcagtcatactggggtgcgagagaggtgggcagcagctcagcctccccccgctggggagcgaaagtttcttggtctcagcttcatttccgtgaagggcaccgagaactcgaagcccttccagtggtaccagctcactccctgggaaaggggttgtcaagagagagtcaaagccggatgtcccatctgctcttcccgttccccttaaggaggtagctcccagcactcaaccaacctccccgcagagctcccttcctgaccctccgctgcagaggattgaggcttaattctgagctggccctttccagccaataaatcaactccagctccctc

SEQ ID NO: 14863 - protein, 373 aa, Homo sapiens
MLLLGLLLLLPLLAGARLLWNWWKLRSLHLPPLAPGFLHLLQPDLPIYLLGLTQKFGPIYRLHLGLQDVVVLNSKRTIEEAMVKKWADFAGRPEPLTYKLVSRNYPDLSLGDYSLLWKAHKKLTRSALLLGIRDSMEPVVEQLTQEFCERMRAQPGTPVAIEEEFSLLTCSIICYLTFGDKIKDDNLMPAYYKCIQEVLKTWSHWSIQIVDVIPFLRFFPNPGLRRLKQAIEKRDHIVEMQLRQHKESLVAGQWRDMMDYMLQGVAQPSMEEGSGQLLEGHVHMAAVDLLIGGTETTANTLSWAVVFLLHHPEIQQRLQEELDHELGPGASSSRVPYKDRARLPLLNATIAEVLRLRPVVPLALPHRTTRPSR

SEQ ID NO: 14864 - DNA, 1950 bp, Homo sapiens
gatggctggggctcttgagctataagtggcacctcagggccctgacgggcgtctcgccatgctgctcctgggcctgctgctgctgctgcccctgctggctggcgcccgcctgctgtggaactggtggaagctccggagcctccacctcccgcctcttgccccgggcttcttgcacctgctgcagcccgacctccccatctatctgcttggcctgactcagaaattcgggcccatctacaggctccaccttgggctgcaaggtgagaggctgatctcgctctggccctcaccataggagggggcggaggtgacggagagggtcctctctccgctgacgctgctttggctgtctcccagatgtggtggtgctgaactccaagaggaccattgaggaagccatggtcaaaaagtgggcagactttgctggcagacctgagccacttacctacaagctggtgtctaggaactacccggacctgtccttgggagactactccctgctctggaaagcccacaagaagctcacccgctcagccctgctgctgggcatccgtgactccatggagccagtggtggagcagctgacccaggagttctgtgagcgcatgagagcccagcccggcacccctgtggccattgaggaggaattctctctcctcacctgcagcatcatctgttacctcaccttcggagacaagatcaaggacgacaacttaatgcctgcctattacaaatgtatccaggaggtgttaaaaacctggagccactggtccatccaaattgtggacgtgattccctttctcaggttcttccccaatccaggtctccggaggctgaagcaggccatagagaagagggatcacatcgtggagatgcagctgaggcagcacaagattcagcagcgactgcaggaggagctagaccacgaactgggccctggtgcctccagctcccgggtcccctacaaggaccgtgcacggctgcccttgctcaatgccaccatcgccgaggtgctgcgcctgcggcccgttgtgcccttagccttgccccaccgcaccacacggcccagcagcatctccggctacgacatccctgagggcacagtcatcattccgaacctccaaggcgcccacctggatgagacggtctgggagaggccacatgagttctggcctgatcgcttcctggagccaggcaagaactccagagctctggccttcggctgcggtgcccgcgtgtgcctgggcgagccgctggcgcgcctggagctcttcgtggtgctgacccgactgctgcaggccttcacgctgctgccctccggggacgccctgccctccctgcagcccctgccccactgcagtgtcatcctcaagatgcagcctttccaagtgcggctgcagccccgggggatgggggcccacagcccgggccagagccagtgatggggcaggaccgatgccagccgggtacctcagtttctcctttattgctcccgtacgaacccctcccctcccccctgtaaacacagtgctgcgagatcgctggcagagaaggcttcctccagcggctgggtggtgaaggaccctggctcttctctcggggcgacccctcagtgctcggcagtcatactggggtgcgagagaggtgggcagcagctcagcctccccccgctggggagcgaaagtttcttggtctcagcttcatttccgtgaagggcaccgagaactcgaagcccttccagtggtaccagctcactccctgggaaaggggttgtcaagagagagtcaaagccggatgtcccatctgctcttcccgttccccttaaggaggtagctcccagcactcaaccaacctccccgcagagctcccttcctgaccctccgctgcagaggattgaggcttaattctgagctggccctttccagccaataaatcaactccagctccctc

SEQ ID NO: 14865 - protein, 347 aa, Homo sapiens
MVKKWADFAGRPEPLTYKLVSRNYPDLSLGDYSLLWKAHKKLTRSALLLGIRDSMEPVVEQLTQEFCERMRAQPGTPVAIEEEFSLLTCSIICYLTFGDKIKDDNLMPAYYKCIQEVLKTWSHWSIQIVDVIPFLRFFPNPGLRRLKQAIEKRDHIVEMQLRQHKIQQRLQEELDHELGPGASSSRVPYKDRARLPLLNATIAEVLRLRPVVPLALPHRTTRPSSISGYDIPEGTVIIPNLQGAHLDETVWERPHEFWPDRFLEPGKNSRALAFGCGARVCLGEPLARLELFVVLTRLLQAFTLLPSGDALPSLQPLPHCSVILKMQPFQVRLQPRGMGAHSPGQSQ

SEQ ID NO: 14866 - DNA, 2112 bp, Homo sapiens
gatggctggggctcttgagctataagtggcacctcagggccctgacgggcgtctcgccatgctgctcctgggcctgctgctgctgctgcccctgctggctggcgcccgcctgctgtggaactggtggaagctccggagcctccacctcccgcctcttgccccgggcttcttgcacctgctgcagcccgacctccccatctatctgcttggcctgactcagaaattcgggcccatctacaggctccaccttgggctgcaaggtgagaggctgatctcgctctggccctcaccataggagggggcggaggtgacggagagggtcctctctccgctgacgctgctttggctgtctcccagatgtggtggtgctgaactccaagaggaccattgaggaagccatggtcaaaaagtgggcagactttgctggcagacctgagccacttacctacaagctggtgtctaggaactacccggacctgtccttgggagactactccctgctctggaaagcccacaagaagctcacccgctcagccctgctgctgggcatccgtgactccatggagccagtggtggagcagctgacccaggagttctgtgagcgcatgagagcccagcccggcacccctgtggccattgaggaggaattctctctcctcacctgcagcatcatctgttacctcaccttcggagacaagatcaaggaggtgttaaaaacctggagccactggtccatccaaattgtggacgtgattccctttctcaggttcttccccaatccaggtctccggaggctgaagcaggccatagagaagagggatcacatcgtggagatgcagctgaggcagcacaaggagagcctcgtggcaggccagtggagggacatgatggactacatgctccaaggggtggcgcagccgagcatggaagagggctctggacagctcctggaagggcacgtgcacatggctgcagtggacctcctgatcggtggcactgagaccacagcaaacaccctctcctgggccgtggtttttttgcttcaccaccctgagattcagcagcgactgcaggaggagctagaccacgaactgggccctggtgcctccagctcccgggtcccctacaaggaccgtgcacggctgcccttgctcaatgccaccatcgccgaggtgctgcgcctgcggcccgttgtgcccttagccttgccccaccgcaccacacggcccagcagcatctccggctacgacatccctgagggcacagtcatcattccgaacctccaaggcgcccacctggatgagacggtctgggagaggccacatgagttctggcctgatcgcttcctggagccaggcaagaactccagagctctggccttcggctgcggtgcccgcgtgtgcctgggcgagccgctggcgcgcctggagctcttcgtggtgctgacccgactgctgcaggccttcacgctgctgccctccggggacgccctgccctccctgcagcccctgccccactgcagtgtcatcctcaagatgcagcctttccaagtgcggctgcagccccgggggatgggggcccacagcccgggccagagccagtgatggggcaggaccgatgccagccgggtacctcagtttctcctttattgctcccgtacgaacccctcccctcccccctgtaaacacagtgctgcgagatcgctggcagagaaggcttcctccagcggctgggtggtgaaggaccctggctcttctctcggggcgacccctcagtgctcggcagtcatactggggtgcgagagaggtgggcagcagctcagcctccccccgctggggagcgaaagtttcttggtctcagcttcatttccgtgaagggcaccgagaactcgaagcccttccagtggtaccagctcactccctgggaaaggggttgtcaagagagagtcaaagccggatgtcccatctgctcttcccgttccccttaaggaggtagctcccagcactcaaccaacctccccgcagagctcccttcctgaccctccgctgcagaggattgaggcttaattctgagctggccctttccagccaataaatcaactccagctccctc

SEQ ID NO: 14867 - protein, 401 aa, Homo sapiens
MVKKWADFAGRPEPLTYKLVSRNYPDLSLGDYSLLWKAHKKLTRSALLLGIRDSMEPVVEQLTQEFCERMRAQPGTPVAIEEEFSLLTCSIICYLTFGDKIKEVLKTWSHWSIQIVDVIPFLRFFPNPGLRRLKQAIEKRDHIVEMQLRQHKESLVAGQWRDMMDYMLQGVAQPSMEEGSGQLLEGHVHMAAVDLLIGGTETTANTLSWAVVFLLHHPEIQQRLQEELDHELGPGASSSRVPYKDRARLPLLNATIAEVLRLRPVVPLALPHRTTRPSSISGYDIPEGTVIIPNLQGAHLDETVWERPHEFWPDRFLEPGKNSRALAFGCGARVCLGEPLARLELFVVLTRLLQAFTLLPSGDALPSLQPLPHCSVILKMQPFQVRLQPRGMGAHSPGQSQ

SEQ ID NO: 14868 - DNA, 1914 bp, Homo sapiens
gtctcgccatgctgctcctgggcctgctgctgctgctgcccctgctggctggcgcccgcctgctgtggaactggtggaagctccggagcctccacctcccgcctcttgccccgggcttcttgcacctgctgcagcccgacctccccatctatctgcttggcctgactcagaaattcgggcccatctacaggctccaccttgggctgcaagacaagctggtgtctaggaactacccggacctgtccttgggagactactccctgctctggaaagcccacaagaagctcacccgctcagccctgctgctgggcatccgtgactccatggagccagtggtggagcagctgacccaggagttctgtgagcgcatgagagcccagcccggcacccctgtggccattgaggaggaattctctctcctcacctgcagcatcatctgttacctcaccttcggagacaagatcaaggacgacaacttaatgcctgcctattacaaatgtatccaggaggtgttaaaaacctggagccactggtccatccaaattgtggacgtgattccctttctcaggttcttccccaatccaggtctccggaggctgaagcaggccatagagaagagggatcacatcgtggagatgcagctgaggcagcacaaggagagcctcgtggcaggccagtggagggacatgatggactacatgctccaaggggtggcgcagccgagcatggaagagggctctggacagctcctggaagggcacgtgcacatggctgcagtggacctcctgatcggtggcactgagaccacagcaaacaccctctcctgggccgtggtttttttgcttcaccaccctgagattcagcagcgactgcaggaggagctagaccacgaactgggccctggtgcctccagctcccgggtcccctacaaggaccgtgcacggctgcccttgctcaatgccaccatcgccgaggtgctgcgcctgcggcccgttgtgcccttagccttgccccaccgcaccacacggcccagcagcatctccggctacgacatccctgagggcacagtcatcattccgaacctccaaggcgcccacctggatgagacggtctgggagaggccacatgagttctggcctgatcgcttcctggagccaggcaagaactccagagctctggccttcggctgcggtgcccgcgtgtgcctgggcgagccgctggcgcgcctggagctcttcgtggtgctgacccgactgctgcaggccttcacgctgctgccctccggggacgccctgccctccctgcagcccctgccccactgcagtgtcatcctcaagatgcagcctttccaagtgcggctgcagccccgggggatgggggcccacagcccgggccagagccagtgatggggcaggaccgatgccagccgggtacctcagtttctcctttattgctcccgtacgaacccctcccctcccccctgtaaacacagtgctgcgagatcgctggcagagaaggcttcctccagcggctgggtggtgaaggaccctggctcttctctcggggcgacccctcagtgctcggcagtcatactggggtgcgagagaggtgggcagcagctcagcctccccccgctggggagcgaaagtttcttggtctcagcttcatttccgtgaagggcaccgagaactcgaagcccttccagtggtaccagctcactccctgggaaaggggttgtcaagagagagtcaaagccggatgtcccatctgctcttcccgttccccttaaggaggtagctcccagcactcaaccaacctccccgcagagctcccttcctgaccctccgctgcagaggattgaggcttaattctgagctggccctttccagccaataaatcaactccagctccctc

SEQ ID NO: 14869 - protein, 465 aa, Homo sapiens
MLLLGLLLLLPLLAGARLLWNWWKLRSLHLPPLAPGFLHLLQPDLPIYLLGLTQKFGPIYRLHLGLQDKLVSRNYPDLSLGDYSLLWKAHKKLTRSALLLGIRDSMEPVVEQLTQEFCERMRAQPGTPVAIEEEFSLLTCSIICYLTFGDKIKDDNLMPAYYKCIQEVLKTWSHWSIQIVDVIPFLRFFPNPGLRRLKQAIEKRDHIVEMQLRQHKESLVAGQWRDMMDYMLQGVAQPSMEEGSGQLLEGHVHMAAVDLLIGGTETTANTLSWAVVFLLHHPEIQQRLQEELDHELGPGASSSRVPYKDRARLPLLNATIAEVLRLRPVVPLALPHRTTRPSSISGYDIPEGTVIIPNLQGAHLDETVWERPHEFWPDRFLEPGKNSRALAFGCGARVCLGEPLARLELFVVLTRLLQAFTLLPSGDALPSLQPLPHCSVILKMQPFQVRLQPRGMGAHSPGQSQ

SEQ ID NO: 14870 - DNA, 1942 bp, Homo sapiens
gtctcgccatgctgctcctgggcctgctgctgctgctgcccctgctggctggcgcccgcctgctgtggaactggtggaagctccggagcctccacctcccgcctcttgccccgggcttcttgcacctgctgcagcccgacctccccatctatctgcttggcctgactcagaaattcgggcccatctacaggctccaccttgggctgcaagacaagctggtgtctaggaactacccggacctgtccttgggagactactccctgctctggaaagcccacaagaagctcacccgctcagccctgctgctgggcatccgtgactccatggagccagtggtggagcagctgacccaggagttctgtgagcgcatgagagcccagcccggcacccctgtggccattgaggaggaattctctctcctcacctgcagcatcatctgttacctcaccttcggagacaagatcaaggacgacaacttaatgcctgcctattacaaatgtatccaggaggtgttaaaaacctggagccactggtccatccaaattgtggacgtgattccctttctcaggttcttccccaatccaggtctccggaggctgaagcaggccatagagaagagggatcacatcgtggagatgcagctgaggcagcacaaggagagcctcgtggcaggccagtggagggacatgatggactacatgctccaaggggtggcgcagccgagcatggaagagggctctggacagctcctggaagggcacgtgcacatggctgcagtggacctcctgatcggtggcactgagaccacagcaaacaccctctcctgggccgtggtttttttgcttcaccaccctgagattcagcagcgactgcaggaggagctagaccacgaactgggccctggtgcctccagctcccgggtcccctacaaggaccgtgcacggctgcccttgctcaatgccaccatcgccgaggtgctgcgcctgcggcccgttgtgcccttagccttgccccaccgcaccacacggcccagcagcatctccggctacgacatccctgagggcacagtcatcattccgaacctccaaggcgcccacctggatgagacggtctgggagaggccacatgagttctggcctgatcgcttcctggagccaggcaagaactccagagctctggccttcggctgcggtgcccgcgtgtgcctgggcgagccgctggcgcgcctggagctcttcgtggtgctgacccgactgctgcaggccttcacgctgctgccctccggggacgccctgccctccctgcagcccctgccccactgcagtgtcatcctcaagatgcagcctttccaagtgcggctgcagccccgggggatgggggcccacagcccgggccagagccagtgatggggcaggaccgatgccagccgggtacctcagtttctcctttattgctcccgtacgaacccctcccctcccccctgtaaacacagtgctgcgagatcgctggcagagaaggcttcctccagcggctgggtggtgaaggaccctggctcttctctcggggcgacccctcagtgctcggcagtcatactggggtgcgagagaggtgggcagcagctcagcctccccccgctggggagcgaaagtttcttggtctcagcttcatttccgtgaagggcaccgagaactcgaagcccttccagtggtaccagctcactccctgggaaaggggttgtcaagagagagtcaaagccggatgtcccatctgctcttcccgttccccttaaggaggtagctcccagcactcaaccaacctccccgcagagctcccttcctgaccctccgctgcagaggattgaggcttaattctgagctggccctttccagccaataaatcaactccagctccctctgcgaggctggcatgattgttccatttc

SEQ ID NO: 14871 - protein, 465 aa, Homo sapiens; identical to SEQ ID NO: 14869

SEQ ID NO: 14872 - DNA, 1416 bp, Homo sapiens
ccactggtccatccaaattgtggacgtgattccctttctcaggttcttccccaatccaggtctccggaggctgaagcaggccatagagaagagggatcacatcgtggagatgcagctgaggcagcacaaggagagcctcgtggcaggccagtggagggacatgatggactacatgctccaaggggtggcgcagccgagcatggaagagggctctggacagctcctggaagggcacgtgcacatggctgcagtggacctcctgatcggtggcactgagaccacagcaaacaccctctcctgggccgtggtttttttgcttcaccaccctgagattcagcagcgactgcaggaggagctagaccacgaactgggccctggtgcctccagctcccgggtcccctacaaggaccgtgcacggctgcccttgctcaatgccaccatcgccgaggtgctgcgcctgcggcccgttgtgcccttagccttgccccaccgcaccacacggcccagcagcatctccggctacgacatccctgagggcacagtcatcattccgaacctccaaggcgcccacctggatgagacggtctgggagaggccacatgagttctggcctgatcgcttcctggagccaggcaagaactccagagctctggccttcggctgcggtgcccgcgtgtgcctgggcgagccgctggcgcgcctggagctcttcgtggtgctgacccgactgctgcaggccttcacgctgctgccctccggggacgccctgccctccctgcagcccctgccccactgcagtgtcatcctcaagatgcagcctttccaagtgcggctgcagccccgggggatgggggcccacagcccgggccagagccagtgatggggcaggaccgatgccagccgggtacctcagtttctcctttattgctcccgtacgaacccctcccctcccccctgtaaacacagtgctgcgagatcgctggcagagaaggcttcctccagcggctgggtggtgaaggaccctggctcttctctcggggcgacccctcagtgctcggcagtcatactggggtgcgagagaggtgggcagcagctcagcctccccccgctggggagcgaaagtttcttggtctcagcttcatttccgtgaagggcaccgagaactcgaagcccttccagtggtaccagctcactccctgggaaaggggttgtcaagagagagtcaaagccggatgtcccatctgctcttcccgttccccttaaggaggtagctcccagcactcaaccaacctccccgcagagctcccttcctgaccctccgctgcagaggattgaggcttaattctgagctggccctttccagccaataaatcaactccagctccctctgcgaggctggcatgattgttccatttc

SEQ ID NO: 14873 - protein, 256 aa, Homo sapiens
MQLRQHKESLVAGQWRDMMDYMLQGVAQPSMEEGSGQLLEGHVHMAAVDLLIGGTETTANTLSWAVVFLLHHPEIQQRLQEELDHELGPGASSSRVPYKDRARLPLLNATIAEVLRLRPVVPLALPHRTTRPSSISGYDIPEGTVIIPNLQGAHLDETVWERPHEFWPDRFLEPGKNSRALAFGCGARVCLGEPLARLELFVVLTRLLQAFTLLPSGDALPSLQPLPHCSVILKMQPFQVRLQPRGMGAHSPGQSQ

SEQ ID NO: 14874 - DNA, 3130 bp, Homo sapiens
ccttgtgcatttgggctgaagacaaagatgactgcaggagtgggcaggccggagtggggcgccctggcctgtccccaggaaggaggaggagtctgcagccctgtgggcttcaacatccatcaaggagtccagagcaggagccaggccaggcgggagggaaaggccctgggaggggctctctaatctcccagccccgactctgccccgtcactgccactgctcctcattactcgctggggctgctgtcgcctccccgaagggtggccttgtccagatagcggcaaacctccctgccgtggatgagtcaggagcattttcttaagaggaacatcactggaaaacaaaatgagcggggacacagaaaccaacagcagtggctgcatttgtggtacaggctcctcttccagagctcgctgatgcccacctcagacaggcctgaccacggcacggctggtgggatttgccagtcacctcaaccagccagttccaccctcagcttctctcagaagggagcaccacactcctcaagctcagtgaatgtatcccggcatgggtggggccagagcctgtgatatctcgaggtgggctcggcaggacaccggggtgtggaagggggaagcgagcacctgactcagacagcgcgggagctcgcaggagtcacgaggccacagcgacttcattgtctgactgggcctggacctataaacttcccacctcagccttgggccaagcctggaagataaaaatggagcaccccatggcgcccctcactcagattctcccctgggcttctcccacgcagccccagaagaggacacaccagccccagagttagccccagaggcccctgagcctcctgaagagccccgcctaggagtgctgaccgtgaccgacacaaccccagactccatgcgcctctcgtggagcgtggcccagggcccctttgattccttcgtggtccagtatgaggacacgaacgggcagccccaggccttgctcgtggacggcgaccagagcaagatcctcatctcaggcctggagcccagcaccccctacaggttcctcctctatggcctccatgaagggaagcgcctggggcccctctcagctgagggcaccacagggctggctcctgctggtcagacctcagaggagtcaaggccccgcctgtcccagctgtctgtgactgacgtgaccaccagttcactgaggctcaactgggaggccccaccgggggccttcgactccttcctgctccgctttggggttccatcaccaagcactctggagccgcatccgcgtccactgctgcagcgcgagctgatggtgccggggacgcggcactcggccgtgctccgggacctgcgttccgggactctgtacagcctgacactgtatgggctgcgaggaccccacaaggccgacagcatccagggaaccgcccgcaccctcagcccagttctggagagcccccgtgacctccaattcagtgaaatcagggagacctcagccaaggtcaactggatgcccccaccatcccgggcggacagcttcaaagtctcctaccagctggcggacggaggggagcctcagagtgtgcaggtggatggccaggcccggacccagaaactccaggggctgatcccaggcgctcgctatgaggtgaccgtggtctcggtccgaggctttgaggagagtgagcctctcacaggcttcctcaccacggttcctgacggtcccacacagttgcgtgcactgaacttgaccgagggattcgccgtgctgcactggaagcccccccagaatcctgtggacacctatgacgtccaggtcacagcccctggggccccgcctctgcaggcggagaccccaggcagcgcggtggactaccccctgcatgaccttgtcctccacaccaactacaccgccacagtgcgtggcctgcggggccccaacctcacttccccagccagcatcaccttcaccacagggctagaggcccctcgggacttggaggccaaggaagtgaccccccgcaccgccctgctcacttggactgagcccccagtccggcccgcaggctacctgctcagcttccacacccctggtggacagaaccaggagatcctgctcccaggagggatcacatctcaccagctccttggcctctttccctccacctcctacaatgcacggctccaggccatgtggggccagagcctcctgccgcccgtgtccacctctttcaccacgggtgggctgcggatccccttccccagggactgcggggaggagatgcagaacggagccggtgcctccaggaccagcaccatcttcctcaacggcaaccgcgagcggcccctgaacgtgttttgcgacatggagactgatgggggcggctggctggtgttccagcgccgcatggatggacagacagacttctggagggactgggaggactatgcccatggttttgggaacatctctggagagttctggctgggcaatgaggccctgcacagcctgacacaggcaggtgactactccatgcgcgtggacctgcgggctggggacgaggctgtgttcgcccagtacgactccttccacgtagactcggctgcggagtactaccgcctccacttggagggctaccacggcaccgcaggggactccatgagctaccacagcggcagtgtcttctctgcccgtgatcgggaccccaacagcttgctcatctcctgcgctgtctcctaccgaggggcctggtggtacaggaactgccactacgccaacctcaacgggctctacgggagcacagtggaccatcagggagtgagctggtaccactggaagggcttcgagttctcggtgcccttcacggaaatgaagctgagaccaagaaactttcgctccccagcggggggaggctgagctgctgcccacctctctcgcaccccagtatgactgccgagcactgaggggtcgccccgagagaagagccagggtccttcaccacccagccgctggaggaagccttctctgccagcgatctcgcagcactgtgtttacaggggggaggggaggggttcgtacgggagcaataaaggagaaactgaggtacccggctggc

SEQ ID NO: 14875 - protein, 673 aa, Homo sapiens; identical to SEQ ID NO: 1646

SEQ ID NO: 14876 - DNA, 2904 bp, Homo sapiens
gacagggacgggcagccccagacaccaaaccgtctccccgcctgggggagctgactgtgacagatgcgacccctgactccgtgggcctctcgtggacggtccctgagggcgaattcgactccttcgtggtccagtacaaggataaggatggtcggctccaggtggtgccggtggcagccaaccagcgggaggtcacagtccagggcctggagcccagtaggaaatacaggttcctgctctatggtctgtcaggcaggaaacgactgggccccatctctgctgacagcaccacagctcccctggagaaggagctacctccccacctgggggaactgaccgtggctgaggagacctccagctctctgcgcctgtcctggacggtagcccagggcccctttgactccttcgtggtccagtacagggacacggacgggcagcccagggcagtgcctgtggccgcagaccagcgcacagtcaccgtagaggacctggagcctggcaagaaatacaagtttctgctctacgggctccttgggggaaagcgcctgggcccggtctctgccctgggaatgacagccccagaagaggacacaccagccccagagttagccccagaggcccctgagcctcctgaagagccccgcctaggagtgctgaccgtgaccgacacaaccccagactccatgcgcctctcgtggagcgtggcccagggcccctttgattccttcgtggtccagtatgaggacacgaacgggcagccccaggccttgctcgtggacggcgaccagagcaagatcctcatctcaggcctggagcccagcaccccctacaggttcctcctctatggcctccatgaagggaagcgcctggggcccctctcagctgagggcaccacagggctggctcctgctggtcagacctcagaggagtcaaggccccgcctgtcccagctgtctgtgactgacgtgaccaccagttcactgaggctcaactgggaggccccaccgggggccttcgactccttcctgctccgctttggggttccatcaccaagcactctggagccgcatccgcgtccactgctgcagcgcgagctgatggtgccggggacgcggcactcggccgtgctccgggacctgcgttccgggactctgtacagcctgacactgtatgggctgcgaggaccccacaaggccgacagcatccagggaaccgcccgcaccctcagcccagttctggagagcccccgtgacctccaattcagtgaaatcagggagacctcagccaaggtcaactggatgcccccaccatcccgggcggacagcttcaaagtctcctaccagctggcggacggaggggagcctcagagtgtgcaggtggatggccaggcccggacccagaaactccaggggctgatcccaggcgctcgctatgaggtgaccgtggtctcggtccgaggctttgaggagagtgagcctctcacaggcttcctcaccacggttcctgacggtcccacacagttgcgtgcactgaacttgaccgagggattcgccgtgctgcactggaagcccccccagaatcctgtggacacctatgacgtccaggtcacagcccctggggccccgcctctgcaggcggagaccccaggcagcgcggtggactaccccctgcatgaccttgtcctccacaccaactacaccgccacagtgcgtggcctgcggggccccaacctcacttccccagccagcatcaccttcaccacagggctagaggcccctcgggacttggaggccaaggaagtgaccccccgcaccgccctgctcacttggactgagcccccagtccggcccgcaggctacctgctcagcttccacacccctggtggacagaaccaggagatcctgctcccaggagggatcacatctcaccagctccttggcctctttccctccacctcctacaatgcacggctccaggccatgtggggccagagcctcctgccgcccgtgtccacctctttcaccacgggtgggctgcggatccccttccccagggactgcggggaggagatgcagaacggagccggtgcctccaggaccagcaccatcttcctcaacggcaaccgcgagcggcccctgaacgtgttttgcgacatggagactgatgggggcggctggctggtgttccagcgccgcatggatggacagacagacttctggagggactgggaggactatgcccatggttttgggaacatctctggagagttctggctgggcaatgaggccctgcacagcctgacacaggcaggtgactactccatgcgcgtggacctgcgggctggggacgaggctgtgttcgcccagtacgactccttccacgtagactcggctgcggagtactaccgcctccacttggagggctaccacggcaccgcaggggactccatgagctaccacagcggcagtgtcttctctgcccgtgatcgggaccccaacagcttgctcatctcctgcgctgtctcctaccgaggggcctggtggtacaggaactgccactacgccaacctcaacgggctctacgggagcacagtggaccatcagggagtgagctggtaccactggaagggcttcgagttctcggtgcccttcacggaaatgaagctgagaccaagaaactttcgctccccagcggggggaggctgagctgctgcccacctctctcgcaccccagtatgactgccgagcactgaggggtcgccccgagagaagagccagggtccttcaccacccagccgctggaggaagccttctctgccagcgatctcgcagcactgtgtttacaggggggaggggaggggttcgtacgggagcaataaaggagaaactgaggtacccggctggc

SEQ ID NO: 14877 - protein, 711 aa, Homo sapiens
MTAPEEDTPAPELAPEAPEPPEEPRLGVLTVTDTTPDSMRLSWSVAQGPFDSFVVQYEDTNGQPQALLVDGDQSKILISGLEPSTPYRFLLYGLHEGKRLGPLSAEGTTGLAPAGQTSEESRPRLSQLSVTDVTTSSLRLNWEAPPGAFDSFLLRFGVPSPSTLEPHPRPLLQRELMVPGTRHSAVLRDLRSGTLYSLTLYGLRGPHKADSIQGTARTLSPVLESPRDLQFSEIRETSAKVNWMPPPSRADSFKVSYQLADGGEPQSVQVDGQARTQKLQGLIPGARYEVTVVSVRGFEESEPLTGFLTTVPDGPTQLRALNLTEGFAVLHWKPPQNPVDTYDVQVTAPGAPPLQAETPGSAVDYPLHDLVLHTNYTATVRGLRGPNLTSPASITFTTGLEAPRDLEAKEVTPRTALLTWTEPPVRPAGYLLSFHTPGGQNQEILLPGGITSHQLLGLFPSTSYNARLQAMWGQSLLPPVSTSFTTGGLRIPFPRDCGEEMQNGAGASRTSTIFLNGNRERPLNVFCDMETDGGGWLVFQRRMDGQTDFWRDWEDYAHGFGNISGEFWLGNEALHSLTQAGDYSMRVDLRAGDEAVFAQYDSFHVDSAAEYYRLHLEGYHGTAGDSMSYHSGSVFSARDRDPNSLLISCAVSYRGAWWYRNCHYANLNGLYGSTVDHQGVSWYHWKGFEFSVPFTEMKLRPRNFRSPAGGG

SEQ ID NO: 14878 - DNA, 8192 bp, Homo sapiens
ggtcctccccttctcctcccctgctcgctgcagactccctcctcactgtcgctgccgagatccacagtcggttgtggctcagcccctgttgcaggggacaagtgagggagacttccctgtcctgccctgagacgccgccctcccggggttggggacagagcaggtgcagaggcactgcagctgctcggttgcccagcctcctgaatgatgccagcccagtatgctctaacctccagcctggttctcctggtgctgctgagcacagccagagcaggccccttctcttcacggtccaatgtgacactgccagccccccggccccctccccagccagggggccacacagtgggggctggagtgggaagcccctcttctcagctttacgagcacacagtggaaggaggggagaagcaggtggtattcacccaccgcattaacctgcccccttccactggctgtggctgtcccccaggcaccgagcccccagtccttgcttcagaggtacaggccctgagggtccgtctagagatcctggaggagttggtgaaggggctcaaggaacagtgcactgggggatgttgtcctgcctctgcccaagctggcacaggtcagacagatgtgcggaccctctgcagtctccatggtgtgtttgatctgagccgctgcacctgttcctgtgagccaggctggggtgggcccacctgctcagaccccacagatgctgagatccctccctcttccccaccctcagcctcggggtcctgcccagatgactgcaatgatcagggtcgctgtgtccgtggtcgttgcgtgtgctttcccggctacactggccccagctgtggctggccatcctgtcccggggactgccaaggccgtgggcgctgcgtgcagggcgtgtgtgtgtgccgggcaggcttctcaggccccgactgcagccagcgctcctgccctcgaggttgcagccagaggggacgctgtgagggtgggcgctgcgtgtgtgacccaggctacactggtgacgactgtggcatgaggagctgccctcgcggttgcagtcagagggggcgctgtgagaatgggcgctgcgtgtgtaaccccggctacactggcgaggactgtggggtgaggagctgccctcggggctgcagccagcggggacgctgcaaggacgggcgctgcgtgtgtgaccccggctacactggcgaggactgtggtacgcggagctgcccctgggactgtggcgagggcgggcgctgcgtggacggccgctgcgtgtgctggcccgggtacacaggcgaggactgcagcacgcggacatgtccgagggactgccggggccgcgggcgctgcgaggacggcgaatgcatttgcgacacgggctacagcggggacgactgcggcgtgcgcagctgccctggcgactgcaaccaaaggggccgctgcgaggacggccgctgcgtgtgctggccggggtacactggaaccgattgcggctcgcgcgcctgcccacgcgactgtagaggtcgcgggcgctgcgagaacggcgtgtgtgtttgcaatgcgggctacagcggcgaggactgcggtgtgcgcagctgtcctggggactgtcgtggccggggccgctgtgagagtggccgctgcatgtgttggccggggtacacaggccgggactgcggcacgcgcgcctgtcctggcgactgtcgcgggcgcgggcgctgcgtggatggccgctgcgtgtgcaacccgggcttcaccggtgaggactgtgggagccgtcgctgtcccggggactgccgtgggcacggcctttgcgaggatggcgtgtgcgtgtgtgacgcaggctactcaggggaagactgcagcacgcgcagctgccccgggggctgccgaggccgcggccagtgcctagatgggcggtgtgtgtgcgaggacggctactctggcgaggattgcggtgtgaggcagtgcccgaatgactgcagccagcacggcgtgtgccaggacggtgtgtgcatctgttgggaaggctacgtgagtgaggactgcagcatccgcacctgcccctccaactgccacgggaggggccgctgtgaggaagggcgctgcctgtgcgacccaggctacaccggccctacctgtgccacccgcatgtgcccggctgactgccggggacgtgggcggtgtgtgcaaggagtgtgcctgtgccacgtgggctatggcggtgaggactgcgggcaggaagagcctccagccagcgcctgccctggaggctgcgggccccgggaactgtgccgggcaggccagtgtgtgtgtgtagagggcttccgaggccctgactgtgccatccagacatgcccaggggactgccgtggccgaggagagtgtcacgatggcagctgtgtctgcaaagatgggtatgctggcgaagactgcggagaagcacgggttccaagctctgcctcagcctatgaccagagaggactggcccctggacaggagtaccaggtcactgtccgagcccttcgagggaccagctggggccttcctgcctccaagaccatcaccaccatgatcgatgggccccaggacctccgagtggtggctgtgacaccgacaacactggagcttggctggctgcgtccccaggctgaggtggaccgatttgtggtgtcctacgtcagtgccggcaaccagagggtgaggctggaagtgccccctgaagcagacgggacgctgctgactgacctgatgccaggcgtagaatatgtggtgactgtcacagcggagcggggccgggcagtcagctacccagcttctgtcagggccaacacagaggaaagggaggaggagtccccgcccaggccaagcctgtcccagcccccacggcggccttggggcaacctgacggccgagctgagccgtttccgcggcacggtgcaggacctggagcgccacctgcgggctcacggctacccactgcgggccaaccagacttacacgtcggtggcgcgccacatccatgaatacttgcagcggcaggtgctgggcagttccgccgatggcgcgcttctcgtgtctctcgacgggctccgcggccagttcgagcgcgtggtgctgcgctggcggcctcagccgcctgcagagggccccggcggtgagctgactgtgccgggcaccacgcgcaccgtcagcctgcccgacctcaggcccggcaccacctaccacgtggaggtccacggggtgcgggcggggcagacctccaagtcctacgccttcatcaccaccacaggcccctcgacgacgcaaggggcccaggctcctctcctgcagcagcgcccccaggagctgggagagttgagggtgctgggcagagatgagacagggcgcctccgtgtggtctggaccgcccagcctgacacctttgcctacttccaactgcgcatgcgggtgcccgaggggccgggggcacatgaggaagtgctgccaggggacgtccgccaggctctggtgcctccaccccctcctggaaccccgtatgagctgtcacttcatggggtccctcctgggggcaagccctctgaccccatcatctaccaaggcattatggacaaggatgaggagaagcctgggaagtcctcaggcccaccacgcctgggtgagctgacggtgacagacaggacctccgactccttgctcctgcgctggacggtccccgagggcgagtttgactccttcgtgatccagtacaaagacagggacgggcagccccaggtggtgcccgtggaaggaccccagcgctcggccgtcatcacctccctggatcctggccgcaagtacaaatttgtcctgtatgggtttgttggcaagaagaggcatggtccgctggtggctgaagccaagatcttgcctcagagtgacccaagtccagggactccaccccacctgggaaacctgtgggtgacagaccctaccccagattcactgcacctctcctggactgtccctgagggccagtttgacaccttcatggtccagtacagggacagggatggacggccccaggtggtacctgtggaagggcccgagcgttcatttgttgtctcctcactggaccctgaccacaagtacagattcactctgtttggaattgcgaacaagaagcggtatggccccctcacggccgatggcaccactgctccagagaggaaagaggagcccccccgccctgagttcctggagcagcccctcctgggggaactgacagtgaccggcgtgaccccagactccttgcgtctctcatggacagtggcccagggccccttcgactcattcatggtccagtacaaggatgcacaggggcagccccaggcagtgcctgttgcgggggatgagaatgaggttactgtccccggcctggatcccgaccggaagtataagatgaacctctacgggcttcgtggcaggcagcgtgtggggcccgagtctgtggtggccaagactgctcctcaggaggatgtggacgagacccccagccccacagaactgggcacggaggccccggagtcccccgaggagccgctcctgggggagctgacagtgacaggatcctcccctgattcgctgagcctcttctggaccgtcccccagggcagcttcgactctttcaccgtgcagtacaaggacagggatgggcggccccgggcggtgcgtgttgggggcaaggagagtgaggtcaccgtgggaggcctagagcccgggcacaagtacaagatgcacctgtacggcctccacgaggggcagcgcgtgggcccggtgtccgccgtgggcgtgacagccccacaacaagaagagacccctccagccactgagtccccgctggagccacgcctaggagagctgacagtgacagatgtgacccccaactctgtgggcctctcctggacagtccccgagggccagtttgactccttcatagtccagtacaaggacaaggacgggcagccccaggtggtgccggtggcggcagaccagcgagaggtcacagtctacaacctggagcctgagagaaaatataagatgaacatgtatggactacatgatgggcaacgcatgggccccctgtctgtggtcatcgtgacggctcccctcccaccagccccagccacagaggcctccaagcctcccctggagccacgcctaggggagctgacagtgacggatataacccctgactctgtgggcctctcatggacagtccctgagggtgaattcgactcctttgtggttcagtacaaggacagggacgggcagccccaggtggtgcccgtggctgcagatcagcgggaggtcactatccctgacctggaaccctcccgcaagtacaagttcctgctctttgggatccaggatgggaaacgacgcagcccagtctctgtggaggcaaagacggttgcccgaggtgacgccagcccaggggccccaccccgccttggggagctgtgggtgacagaccccaccccagactcactgcgcctctcctggacggttcctgagggccagttcgactcttttgtggtccagttcaaggacaaagacgggccccaggtggtgcccgtggagggccatgagcgctctgtcactgtcacccctctggatgccggccgcaagtacagattcctcctctatggcctcctgggcaagaagcgccatggccctctcactgccgacggcaccacggaagcccggagtgctatggatgatactggaacaaagcgtcccccaaaaccccgtctgggggaggagctgcaggtgaccaccgtgacccagaactccgtgggcctctcctggacagtccctgagggccagtttgactcctttgtggtccagtacaaagacagggacgggcagccccaggtggtgcccgtggagggcagcctcagggaggtcagcgtgccgggcctggaccctgcccacaggtacaagctgctgctctacgggctgcaccacggcaagcgtgtgggccccatctcggccgtcgccattactgccggcagggaagaaacggaaactgagaccacggccccgacccctccagcgcctgagccccacctcggggagttgacagtggaggaggccacgtcacacaccctgcatctctcctggatggtgactgagggagaatttgactccttcgaaatccagtacacagatagagacgggcaactccaaatggtccgcataggaggtgaccggaatgacatcaccctctctggcctggaatccgaccacagatacctggtgaccctgtatggtttcagtgatgggaagcatgtaggtcctgtccatgtcgaggccctgacagtcccggaggaggagaagccttcagaacctcccaccgcaacccccgagccccccatcaagcctcgcctgggggagctgaccgtgacagatgccacccctgactccctcagcctgtcctggacagttcccgagggacagtttgaccacttcctggtccagtacaggaatggagatgggcagcccaaggcagtgagggtgccagggcacgaggaaggggtcaccatctcgggcctggagccagaccataaatacaagatgaacctgtacggcttccacggtggccagcgcatgggccctgtgtctgtcgtcggggtgacagctgcagaggaagagacccccagccccacagaacccagcatggaggccccggagcccgctgaggagccgctcctgggggagctaacagtgacaggatcctcccctgactcgctgagcctctcctggaccgtcccccagggccgcttcgactccttcaccgtgcagtacaaggacagggacgggcggccccaggtggtgcgtgttgggggcgaggagagtgaagtcaccgtggggggcctggagcctgggcgcaagtacaagatgcacctgtacggcctccacgaggggcggcgcgtgggcccagtgtctgctgtgggcgtcacggcccccgaagaggagtcccctgatgctcctcttgcaaagctgcgcctagggcagatgacagtgagagacatcacctccgactccctcagcctctcctggacagtccccgagggccagtttgaccatttcttggtccagtttaagaatggggacgggcagcccaaggcggtgcgggtgccgggacacgaggatggggtcaccatctcgggcctggagccagaccacaagtacaagatgaacctgtacggcttccacggtggccagcgcgtgggccccgtgtctgctgttggtttaactgccccaggaaaggatgaagaaatggccccagcctcgacagaacctcccacccctgaaccccccatcaagcctcgcctggaggagctgaccgtgacagatgcgacccctgactccctcagcctgtcctggacggttcccgagggacagtttgaccacttcctggtccagtacaagaatggggatgggcagcccaaggcaacacgggtgccaggacatgaggacagggtcaccatctccggcctggagccagacaacaagtacaagatgaacctgtacggcttccacggtggccagcgtgtgggccccgtgtctgccatcggggtgacagctgcagaggaagagacccccagccccacagaacccagcatggaggccccggagccccctgaggagccgctcctgggggagctaacagtgacaggatcctcccctgactcgctgagcctctcctggaccgtcccccagggccgcttcgactccttcaccgtgcagtacaaggacagggacgggcggccccaggtggtgcgtgttgggggcgaggagagcgaggtcaccgtggggggcctggagcctgggcgcaaatacaagatgcacctgtatggcctccacgaggggcggcgcgtgggcccggtgtccaccgtgggcgtgactgccccacaagaggatgtggacgagacccccagccctacagaaccaggcacagaggccccagggccccccgaggagcctctcctgggggagctgacagtgacaggatcctcccctgactcgctgagcctttcctggaccgtcccccagggccgctttgactccttcaccgtgcagtacaaggacagggacgggcggccccaggcggtgcgtgttgggggccaggagagcaaggtcac

SEQ ID NO: 14879 - protein, 4000 aa, Homo sapiens
MMPAQYALTSSLVLLVLLSTARAGPFSSRSNVTLPAPRPPPQPGGHTVGAGVGSPSSQLYEHTVEGGEKQVVFTHRINLPPSTGCGCPPGTEPPVLASEVQALRVRLEILEELVKGLKEQCTGGCCPASAQAGTGQTDVRTLCSLHGVFDLSRCTCSCEPGWGGPTCSDPTDAEIPPSSPPSASGSCPDDCNDQGRCVRGRCVCFPGYTGPSCGWPSCPGDCQGRGRCVQGVCVCRAGFSGPDCSQRSCPRGCSQRGRCEGGRCVCDPGYTGDDCGMRSCPRGCSQRGRCENGRCVCNPGYTGEDCGVRSCPRGCSQRGRCKDGRCVCDPGYTGEDCGTRSCPWDCGEGGRCVDGRCVCWPGYTGEDCSTRTCPRDCRGRGRCEDGECICDTGYSGDDCGVRSCPGDCNQRGRCEDGRCVCWPGYTGTDCGSRACPRDCRGRGRCENGVCVCNAGYSGEDCGVRSCPGDCRGRGRCESGRCMCWPGYTGRDCGTRACPGDCRGRGRCVDGRCVCNPGFTGEDCGSRRCPGDCRGHGLCEDGVCVCDAGYSGEDCSTRSCPGGCRGRGQCLDGRCVCEDGYSGEDCGVRQCPNDCSQHGVCQDGVCICWEGYVSEDCSIRTCPSNCHGRGRCEEGRCLCDPGYTGPTCATRMCPADCRGRGRCVQGVCLCHVGYGGEDCGQEEPPASACPGGCGPRELCRAGQCVCVEGFRGPDCAIQTCPGDCRGRGECHDGSCVCKDGYAGEDCGEARVPSSASAYDQRGLAPGQEYQVTVRALRGTSWGLPASKTITTMIDGPQDLRVVAVTPTTLELGWLRPQAEVDRFVVSYVSAGNQRVRLEVPPEADGTLLTDLMPGVEYVVTVTAERGRAVSYPASVRANTEEREEESPPRPSLSQPPRRPWGNLTAELSRFRGTVQDLERHLRAHGYPLRANQTYTSVARHIHEYLQRQVLGSSADGALLVSLDGLRGQFERVVLRWRPQPPAEGPGGELTVPGTTRTVSLPDLRPGTTYHVEVHGVRAGQTSKSYAFITTTGPSTTQGAQAPLLQQRPQELGELRVLGRDETGRLRVVWTAQPDTFAYFQLRMRVPEGPGAHEEVLPGDVRQALVPPPPPGTPYELSLHGVPPGGKPSDPIIYQGIMDKDEEKPGKSSGPPRLGELTVTDRTSDSLLLRWTVPEGEFDSFVIQYKDRDGQPQVVPVEGPQRSAVITSLDPGRKYKFVLYGFVGKKRHGPLVAEAKILPQSDPSPGTPPHLGNLWVTDPTPDSLHLSWTVPEGQFDTFMVQYRDRDGRPQVVPVEGPERSFVVSSLDPDHKYRFTLFGIANKKRYGPLTADGTTAPERKEEPPRPEFLEQPLLGELTVTGVTPDSLRLSWTVAQGPFDSFMVQYKDAQGQPQAVPVAGDENEVTVPGLDPDRKYKMNLYGLRGRQRVGPESVVAKTAPQEDVDETPSPTELGTEAPESPEEPLLGELTVTGSSPDSLSLFWTVPQGSFDSFTVQYKDRDGRPRAVRVGGKESEVTVGGLEPGHKYKMHLYGLHEGQRVGPVSAVGVTAPQQEETPPATESPLEPRLGELTVTDVTPNSVGLSWTVPEGQFDSFIVQYKDKDGQPQVVPVAADQREVTVYNLEPERKYKMNMYGLHDGQRMGPLSVVIVTAPLPPAPATEASKPPLEPRLGELTVTDITPDSVGLSWTVPEGEFDSFVVQYKDRDGQPQVVPVAADQREVTIPDLEPSRKYKFLLFGIQDGKRRSPVSVEAKTVARGDASPGAPPRLGELWVTDPTPDSLRLSWTVPEGQFDSFVVQFKDKDGPQVVPVEGHERSVTVTPLDAGRKYRFLLYGLLGKKRHGPLTADGTTEARSAMDDTGTKRPPKPRLGEELQVTTVTQNSVGLSWTVPEGQFDSFVVQYKDRDGQPQVVPVEGSLREVSVPGLDPAHRYKLLLYGLHHGKRVGPISAVAITAGREETETETTAPTPPAPEPHLGELTVEEATSHTLHLSWMVTEGEFDSFEIQYTDRDGQLQMVRIGGDRNDITLSGLESDHRYLVTLYGFSDGKHVGPVHVEALTVPEEEKPSEPPTATPEPPIKPRLGELTVTDATPDSLSLSWTVPEGQFDHFLVQYRNGDGQPKAVRVPGHEEGVTISGLEPDHKYKMNLYGFHGGQRMGPVSVVGVTAAEEETPSPTEPSMEAPEPAEEPLLGELTVTGSSPDSLSLSWTVPQGRFDSFTVQYKDRDGRPQVVRVGGEESEVTVGGLEPGRKYKMHLYGLHEGRRVGPVSAVGVTAPEEESPDAPLAKLRLGQMTVRDITSDSLSLSWTVPEGQFDHFLVQFKNGDGQPKAVRVPGHEDGVTISGLEPDHKYKMNLYGFHGGQRVGPVSAVGLTAPGKDEEMAPASTEPPTPEPPIKPRLEELTVTDATPDSLSLSWTVPEGQFDHFLVQYKNGDGQPKATRVPGHEDRVTISGLEPDNKYKMNLYGFHGGQRVGPVSAIGVTAAEEETPSPTEPSMEAPEPPEEPLLGELTVTGSSPDSLSLSWTVPQGRFDSFTVQYKDRDGRPQVVRVGGEESEVTVGGLEPGRKYKMHLYGLHEGRRVGPVSTVGVTAPQEDVDETPSPTEPGTEAPGPPEEPLLGELTVTGSSPDSLSLSWTVPQGRFDSFTVQYKDRDGRPQAVRVGGQESKVTVRGLEPGRKYKMHLYGLHEGRRLGPVSAVGVTEDEAETTQAVPTMTPEPPIKPRLGELTMTDATPDSLSLSWTVPEGQFDHFLVQYRNGDGQPKAVRVPGHEDGVTISGLEPDHKYKMNLYGFHGGQRVGPISVIGVTEEETPSPTELSTEAPEPPEEPLLGELTVTGSSPDSLSLSWTIPQGHFDSFTVQYKDRDGRPQVMRVRGEESEVTVGGLEPGRKYKMHLYGLHEGRRVGPVSTVGVTVPTTTPEPPNKPRLGELTVTDATPDSLSLSWMVPEGQFDHFLVQYRNGDGQPKVVRVPGHEDGVTISGLEPDHKYKMNLYGFHGGQRVGPISVIGVTEEETPAPTEPSTEAPEPPEEPLLGELTVTGSSPDSLSLSWTIPQGRFDSFTVQYKDRDGRPQVVRVRGEESEVTVGGLEPGCKYKMHLYGLHEGQRVGPVSAVGVTAPKDEAETTQAVPTMTPEPPIKPRLGELTVTDATPDSLSLSWMVPEGQFDHFLVQYRNGDGQPKAVRVPGHEDGVTISGLEPDHKYKMNLYGFHGGQRVGPVSAIGVTEEETPSPTEPSTEAPEAPEEPLLGELTVTGSSPDSLSLSWTVPQGRFDSFTVQYKDRDGQPQVVRVRGEESEVTVGGLEPGRKYKMHLYGLHEGQRVGPVSTVGITAPLPTPLPVEPRLGELAVAAVTSDSVGLSWTVAQGPFDSFLVQYRDAQGQPQAVPVSGDLRAVAVSGLDPARKYKFLLFGLQNGKRHGPVPVEARTAPDTKPSPRLGELTVTDATPDSVGLSWTVPEGEFDSFVVQYKDKDGRLQVVPVAANQREVTVQGLEPSRKYRFLLYGLSGRKRLGPISADSTTAPLEKELPPHLGELTVAEETSSSLRLSWTVAQGPFDSFVVQYRDTDGQPRAVPVAADQRTVTVEDLEPGKKYKFLLYGLLGGKRLGPVSALGMTAPEEDTPAPELAPEAPEPPEEPRLGVLTVTDTTPDSMRLSWSVAQGPFDSFVVQYEDTNGQPQALLVDGDQSKILISGLEPSTPYRFLLYGLHEGKRLGPLSAEGTTGLAPAGQTSEESRPRLSQLSVTDVTTSSLRLNWEAPPGAFDSFLLRFGVPSPSTLEPHPRPLLQRELMVPGTRHSAVLRDLRSGTLYSLTLYGLRGPHKADSIQGTARTLSPVLESPRDLQFSEIRETSAKVNWMPPPSRADSFKVSYQLADGGEPQSVQVDGQARTQKLQGLIPGARYEVTVVSVRGFEESEPLTGFLTTVPDGPTQLRALNLTEGFAVLHWKPPQNPVDTYDVQVTAPGAPPLQAETPGSAVDYPLHDLVLHTNYTATVRGLRGPNLTSPASIT

SEQ ID NO: 14880 - DNA, 411 bp, Homo sapiens
tctcaccagctccttggcctctttccctccacctcctacacgaggggcctggtggtacaggaactgccactacgccaacctcaacgggctctacgggagcacagtggaccatcagggagtgagctggtaccactggaagggcttcgagttctcggtgcccttcacggaaatgaagctgagaccaagaaactttcgctccccagcggggggaggctgagctgctgcccacctctctcgcaccccagtatgactgccgagcactgaggggtcgccccgagagaagagccagggtccttcaccacccagccgctggaggaagccttctctgccagcgatctcgcagcactgtgtttacaggggggaggggaggggttcgtacgggagcaataaaggagaaactgaggtacccgg

SEQ ID NO: 14881 - protein, 39 aa, Homo sapiens [sequence omitted]

SEQ ID NO: 14882 - DNA, 2669 bp, Homo sapiens
cagagcaggtgcagaggcactgcagctgctcggttgcccagcctcctgaatgatgccagcccagtatgctctaacctccagcctggttctcctggtgctgctgagcacagccagagcaggccccttctcttcacggtccaatgtgacactgccagccccccggccccctccccagccagggggccacacagtgggggctggagtgggaagcccctcttctcagctttacgagcacacagtggaaggaggggagaagcaggtggtattcacccaccgcattaacctgcccccttccactggctgtggctgtcccccaggcaccgagcccccagtccttgcttcagaggtacaggccctgagggtccgtctagagatcctggaggagttggtgaaggggctcaaggaacagtgcactgggggatgttgtcctgcctctgcccaagctggcacaggtgagcaggtgatcacagaagagggtggagaggtggggtggggtgggcattgctagtccataaaggtccttggtatgaattagaagaaggcactccttcctcaccatgaggggtgtggatgcagcccagaacacaacttggagagcagagctgggctacatgtcaaccaaagcatatgcgagggccctgagaggctgcatacattacacatactagcaactgggagcagacatggccttatgagatgaggctagcctggctaggggcctgcacataggagcactacataggctcagcctctctcccaggagagagactgagacttgcctctcccctcctactccaggtcagacagatgtgcggaccctctgcagtctccatggtgtgtttgatctgagccgctgcacctgttcctgtgagccaggctggggtgggcccacctgctcagaccccacagatgctgagatccctccctcttccccaccctcagcctcggggtcctgcccagatgactgcaatgatcagggtcgctgtgtccgtggtcgttgcgtgtgctttcccggctacactggccccagctgtggctggccatcctgtcccggggactgccaaggccgtgggcgctgcgtgcagggcgtgtgtgtgtgccgggcaggcttctcaggccccgactgcagccagcgctcctgccctcgaggttgcagccagaggggacgctgtgagggtgggcgctgcgtgtgtgacccaggctacactggtgacgactgtggcatgaggagctgccctcgcggttgcagtcagagggggcgctgtgagaatgggcgctgcgtgtgtaaccccggctacactggcgaggactgtggggtgaggagctgccctcggggctgcagccagcggggacgctgcaaggacgggcgctgcgtgtgtgaccccggctacactggcgaggactgtggtacgcggagctgcccctgggactgtggcgagggcgggcgctgcgtggacggccgctgcgtgtgctggcccgggtacacaggcgaggactgcagcacgcggacatgtccgagggactgccggggccgcgggcgctgcgaggacggcgaatgcatttgcgacacgggctacagcggggacgactgcggcgtgcgcagctgccctggcgactgcaaccaaaggggccgctgcgaggacggccgctgcgtgtgctggccggggtacactggaaccgattgcggctcgcgcgcctgcccacgcgactgtagaggtcgcgggcgctgcgagaacggcgtgtgtgtttgcaatgcgggctacagcggcgaggactgcggtgtgcgcagctgtcctggggactgtcgtggccggggccgctgtgagagtggccgctgcatgtgttggccggggtacacaggccgggactgcggcacgcgcgcctgtcctggcgactgtcgcgggcgcgggcgctgcgtggatggccgctgcgtgtgcaacccgggcttcaccggtgaggactgtgggagccgtcgctgtcccggggactgccgtgggcacggcctttgcgaggatggcgtgtgcgtgtgtgacgcaggctactcaggggaagactgcagcacgcgcagctgccccgggggctgccgaggccgcggccagtgcctagatgggcggtgtgtgtgcgaggacggctactctggcgaggattgcggtgtgaggcagtgcccgaatgactgcagccagcacggcgtgtgccaggacggtgtgtgcatctgttgggaaggctacgtgagtgaggactgcagcatccgcacctgcccctccaactgccacgggaggggccgctgtgaggaagggcgctgcctgtgcgacccaggctacaccggccctacctgtgccacccgcatgtgcccggctgactgccggggacgtgggcggtgtgtgcaaggagtgtgcctgtgccacgtgggctatggcggtgaggactgcgggcaggaagagcctccagccagcgcctgccctggaggctgcgggccccgggaactgtgccgggcaggccagtgtgtgtgtgtagagggcttccgaggccctgactgtgccatccagacatgcccaggggactgccgtggccgaggagagtgtcacgatggcagctgtgtctgcaaagatgggtatgctggcgaagactgcggagaaggtgagcaggcagccttccccagtgtactctgg

SEQ ID NO: 14883 - protein, 481 aa, Homo sapiens
MRSCPRGCSQRGRCENGRCVCNPGYTGEDCGVRSCPRGCSQRGRCKDGRCVCDPGYTGEDCGTRSCPWDCGEGGRCVDGRCVCWPGYTGEDCSTRTCPRDCRGRGRCEDGECICDTGYSGDDCGVRSCPGDCNQRGRCEDGRCVCWPGYTGTDCGSRACPRDCRGRGRCENGVCVCNAGYSGEDCGVRSCPGDCRGRGRCESGRCMCWPGYTGRDCGTRACPGDCRGRGRCVDGRCVCNPGFTGEDCGSRRCPGDCRGHGLCEDGVCVCDAGYSGEDCSTRSCPGGCRGRGQCLDGRCVCEDGYSGEDCGVRQCPNDCSQHGVCQDGVCICWEGYVSEDCSIRTCPSNCHGRGRCEEGRCLCDPGYTGPTCATRMCPADCRGRGRCVQGVCLCHVGYGGEDCGQEEPPASACPGGCGPRELCRAGQCVCVEGFRGPDCAIQTCPGDCRGRGECHDGSCVCKDGYAGEDCGEGEQAAFPSVL

SEQ ID NO: 14884 - DNA, 794 bp, Homo sapiens
ctcctggttggggggtgggggggaaagatggcggagctgatgctgctcagcgagattgctgacccgacgcgtttcttcaccgacaacctgcttagcccggaggactggggtctgcagaacagcaccttgtattctggcctagatgaagtggccgaggagcagacgcagctcttccgttgcccggagcaggatgtcccgtttgacggcagctccctggacgtggggatggatgtcaccccacagaccagcccagtttcagcaacctgacagccttccctgggggcgccaaggagctactactaagagacctagaccagctcttcctctcctctgattgccggcacttcaaccgcactgagtccctgaggcttgctgacgagttgagtggctgggtccagcgccaccagagaggccggaggaagatccctcagagggcccaggagagacagaagtctcagccacggaagaagtcacctccagttaaggcagtccccatccaaccccctggacccccagaaagggattctgtgggccagctgcaactatatcgccacccagaccgttcgcagccagcattcttggatgcaattgaccgacgggaagacacattttatgttgtctctttccgaagggaccacctgctgctcccagccatcagccacaacaagacctcccggcccaagatgtccctggtgatgcctgccatggcccccaatgcctcctgaatgatgccagcccagtatgctctaacctccagcctggttctcctggtgctgctgagcacagccagagca

SEQ ID NO: 14885 - protein, 79 aa, Homo sapiens
MAELMLLSEIADPTRFFTDNLLSPEDWGLQNSTLYSGLDEVAEEQTQLFRCPEQDVPFDGSSLDVGMDVTPQTSPVSAT

SEQ ID NO: 14886 - DNA, 2633 bp, Homo sapiens
ggcgggccttgggaaccgtctcctggttggggggtgggggggaaagatggcggagctgatgctgctcagcgagattgctgacccgacgcgtttcttcaccgacaacctgcttagcccggaggactggggtctgcagaacagcaccttgtattctggcctagatgaagtggccgaggagcagacgcagctcttccgttgcccggagcaggatgtcccgtttgacggcagctccctggacgtggggatggatgtcagcccctctgagcccccatgggaactcctgccgatcttcccagatcttcaggtgaagtctgagccatcttccccctgctcttcctcctccctcagctccgagtcatcgcgtctctccacagagccatccagcgaggctcttggggtaggggaggtgctccatgtgaagacagagtccttggcacccccactgtgtctcctgggagatgacccaacatcctcatttgaaaccgtccagatcaacgttatccccacctctgatgattcctcagatgtccagaccaagatagaacctgtctctccatgttcttccgtcaactctgaggcctccctgctctcagccgactcctccagccaggcttttataggagaggaggtcctggaagtgaagacagagtccctgtccccttcaggatgcctcctgtgggatgtcccagccccctcacttggagctgtccagatcagcatgggcccatcccttgatggctcctcaggcaaagccctgcccacccggaagccgccactgcagcccaaacctgtagtgctaaccactgtcccaatgccatccagagctgtgcctcccagcaccacagtccttctgcagtccctcgtccagccacccccagtgtccccagttgtcctcatccagggtgctattcgagtccagcctgaagggccggctccctctctaccacggcctgagaggaagagcatcgttcccgctcctatgcctggaaactcctgcccgcctgaagtggatgcaaagctgctgaagcggcagcagcgaatgatcaagaaccgggagtcagcctgccagtcccggagaaagaagaaagagtatctgcagggactggaggctcggctgcaagcagtactggctgacaaccagcagctccgccgagagaatgctgccctccggcggcggctggaggccctgctggctgaaaacagcgagctcaagttagggtctggaaacaggaaggtggtctgcatcatggtcttccttctcttcattgccttcaactttggacctgtcagcatcagtgagcctccttcagctcccatctctcctcggatgaacaagggggagcctcaaccccggagacacttgctggggttctcagagcaagagccagttcagggagttgaacctctccaggggtcctcccagggccctaaggagccccagcccagccccacagaccagcccagtttcagcaacctgacagccttccctgggggcgccaaggagctactactaagagacctagaccagctcttcctctcctctgattgccggcacttcaaccgcactgagtccctgaggcttgctgacgagttgagtggctgggtccagcgccaccagagaggccggaggaagatccctcagagggcccaggagagacagaagtctcagccacggaagaagtcacctccagttaaggcagtccccatccaaccccctggacccccagaaagggattctgtgggccagctgcaactatatcgccacccagaccgttcgcagccagcattcttggatgcaattgaccgacgggaagacacattttatgttgtctctttccgaagggaccacctgctgctcccagccatcagccacaacaagacctcccggcccaagatgtccctggtgatgcctgccatggcccccaatgagaccctgtcaggccgtggggccccgggggactatgaggagatgatgcagatcgagtgtgaggtcatggacaccagggtgattcacatcaagacctccacagtgcccccctcgctccgaaaacagccatccccaaccccaggcaatgccacaggtggccccttgccagtctctgcagccagccaggcccaccaggcctcccaccagcccctctacctcaatcatccctgacctctgccattcacactgacttagaacggggggagggggtaccaggtggccaggtgggactgtttcaaatttccctgatccccaggcttggggcaattggtaaaggaaagagcaggtgtgggggttaagcacttatttgaggtgggggtgttcacctctcttctcatcccttttcagaatatagggctcctctcattcctgtgaacccccagtcctggcttctttgtttgaggggattgtgtgaggttcagttgtggggtgggtggtgagctgctgcatattttttattttgtttctctagtgttatggcagtggaggtgggaatttagtccccaggtgggacaagggaagttttttcattttggagctagttactgggagtaagggagggtggggtgggggggagttcaggtttatgtgtgtgcatttcttttttattattattaaataaacaacttggagggagttgaaggaa

SEQ ID NO: 14887 - protein, 703 aa, Homo sapiens; identical to SEQ ID NO: 1648

SEQ ID NO: 14888 - DNA, 524 bp, Homo sapiens
aggctgaggcaggagaatggggtgaacccgggaggcggagcttgcagtgagccgagatcgcccactgctattagcagcaaaaggattgtaaggattgttggtggctttgcattgcatagtgttattagaagtagatgatggtgataatgctggtagaaatagtgactattaagtgcttactgagttctaggctctaggtgatgcactgtcttttttgtatgtagggaccatccttattcccatcttacagaggcagactcaggcttgtataacagattgcaactcaagcagtccatctgcagagtctttattcttacctagatacttgatacagctgaaattcttcattgtgctcagtccttctttatccacagcatcagtgagcctccttcagctcccatctctcctcggatgaacaagggggagcctcaaccccggagacacttgctggggttctcagagcaagagccagttcagggagttgaacctctccaggggtcctcccagggccctaaggagcccca

SEQ ID NO: 14889 - protein, 36 aa, Homo sapiens
MNKGEPQPRRHLLGFSEQEPVQGVEPLQGSSQGPKE

SEQ ID NO: 14890 - DNA, 562 bp, Homo sapiens
gggtgtggacacaaggaccccacccagcgcacagccctctgacctctgctcacttgccccagtgtccccagttgtcctcatccagggtgctattcgagtccagcctgaagggccggctccctctctaccacggcctgagaggaagagcatcgttcccgctcctatgcctggaaactcctgcccgcctgaagtggatgcaaagctgctgaagcggcagcagcgaatgatcaagaaccgggagtcagcctgccagtcccggagaaagaagaaagagtatctgcagggactggaggctcggctgcaagcagtactggctgacaaccagcagctccgccgagagaatgctgccctccggcggcggctggaggccctgctggctgaagtaagaccagtctgtccctgggagaccaacaggaatacagcctccttggaatgattcccctttttcttgtctccttctttgtaccttagaacagcgagctcaagttagggtctggaaacaggaaggtggtctgcatcatggtcttccttctcttcattgccttcaactttggacctgtca

SEQ ID NO: 14891 - protein, 90 aa, Homo sapiens [sequence omitted]

SEQ ID NO: 14892 - DNA, 1149 bp, Homo sapiens
gggtgggggggaaagatggcggagctgatgctgctcagcgagattgctgacccgacgcgtttcttcaccgacaacctgcttagcccggaggactggggtctgcagaacagcaccttgtattctggcctagatgaagtggccgaggagcagacgcagctcttccgttgcccggagcaggatgtcccgtttgacggcagctccctggacgtggggatggatgtcagcccctctgagcccccatgggaactcctgccgatcttcccagatcttcaggtgaagtctgagccatcttccccctgctcttcctcctccctcagctccgagtcatcgcgtctctccacagagccatccagcgaggctcttggggtaggggaggtgctccatgtgaagacagagtccttggcacccccactgtgtctcctgggagatgacccaacatcctcatttgaaaccgtccagatcaacgttatccccacctctgatgattcctcagatgtccagaccaagatagaacctgtctctccatgttcttccgtcaactctgaggcctccctgctctcagccgactcctccagccaggcttttataggagaggaggtcctggaagtgaagacagagtccctgtccccttcaggatgcctcctgtgggatgtcccagccccctcacttggagctgtccagatcagcatgggcccatcccttgatggctcctcaggcaaagccctgcccacccggaagccgccactgcagcccaaacctgtagtgctaaccactgtcccaatgccatccagagctgtgcctcccagcaccacagtccttctgcagtccctcgtccagccacccccaggtactgaagaaggagaaaagggccgggcatggtggctcacgccggtaatcccagcactttgggaggctgaggcgggcgaatcacctgaggtcagaagtttaagaccagcctggccaacgtggtgaaaccttgtctctactaaaaatacaaaaattagcgtggagtggtggcaggcgcctgtaatcccagctcctcgggaggctgaggcaggagaatcacttgaacccaggaggcggaggttgcagtgagccgagatcatgccactgcactccagcctgggcgacaaagcgagactttgtctc

SEQ ID NO: 14893 - protein, 318 aa, Homo sapiens
MAELMLLSEIADPTRFFTDNLLSPEDWGLQNSTLYSGLDEVAEEQTQLFRCPEQDVPFDGSSLDVGMDVSPSEPPWELLPIFPDLQVKSEPSSPCSSSSLSSESSRLSTEPSSEALGVGEVLHVKTESLAPPLCLLGDDPTSSFETVQINVIPTSDDSSDVQTKIEPVSPCSSVNSEASLLSADSSSQAFIGEEVLEVKTESLSPSGCLLWDVPAPSLGAVQISMGPSLDGSSGKALPTRKPPLQPKPVVLTTVPMPSRAVPPSTTVLLQSLVQPPPGTEEGEKGRAWWLTPVIPALWEAEAGESPEVRSLRPAWPTW

SEQ ID NO: 14894 - DNA, 447 bp, Homo sapiens
tccccacctctgatgattcctcaggtaataaaacagcctgcccccaatccttggctctactacgggagaatgtgttatgtgtgtgtgtgtatgtgtgtagatggaggggaagtgcaggcagcaggacagggagaaaaaggtggggaggggaaatggcagaaaaccaggagggaaggcaggaaggagaggaaacatttcagggaaccacagcaagggcagtgctgaggagatggatattatttttctctctttttcttgttcctagtattctgtcatgccattcaacttactttttaaaaacttgtgagcagtttagggcatatgtatctgtgtgattcccctccacccaacattttattataaacatttttgttgttgttgagacagagtctcacactgtcgctcgggtgcactccatcctgggcaaaagagcaagactccgtctgg

SEQ ID NO: 14895 - protein, 70 aa, Homo sapiens
MIPQVIKQPAPNPWLYYGRMCYVCVCMCVDGGEVQAAGQGEKGGEGKWQKTRREGRKERKHFREPQQGQC

SEQ ID NO: 14896 - DNA, 564 bp, Homo sapiens
gggggggaaagatggcggagctgatgctgctcagcgagattgctgacccgacgcgtttcttcaccgacaacctgcttagcccggaggactggggtctgcagaacagcaccttgtattctggcctagatgaagtggccgaggagcagacgcagctcttccgttgcccggagcaggatgtcccgtttgacggcagctccctggacgtggggatggatgtcagcccctctgagcccccatgggaactcctgccgatcttcccagatcttcaggtgaagtctgagccatcttccccctgctcttcctcctccctcagctccgagtcatcgcgtctctccacagagccatccagcgaggctcttggggtaggggaggtgctccatgtgaagacagagtccttggcacccccactgtgtctcctgggagatgacccaacatcctcatttgaaaccgtccagatcaacgttatccccacctctgatgattcctcaggtaataaaacagcctgcccccaatccttggctctactacgggagaatgtgttatgtgtgtgtgtgtatgtgtgta

SEQ ID NO: 14897 - protein, 183 aa, Homo sapiens
MAELMLLSEIADPTRFFTDNLLSPEDWGLQNSTLYSGLDEVAEEQTQLFRCPEQDVPFDGSSLDVGMDVSPSEPPWELLPIFPDLQVKSEPSSPCSSSSLSSESSRLSTEPSSEALGVGEVLHVKTESLAPPLCLLGDDPTSSFETVQINVIPTSDDSSGNKTACPQSLALLRENVLCVCVYV

SEQ ID NO: 14898 - DNA, 477 bp, Homo sapiens
ctctccgcgtggggcaaggctccgagggcagcattcagtagccatttagctttggaaggagaggtgattcgaatggcccggctcctcctgtcaccatgctaggcactttggccgcgcaggtgctgacctgaacctggttcatccctttctgaccaaaatgtccttcatgccaatctggctgcctgtcagttgttgctagggcagcctcagttggcagcccagagctgtgaccgggtgttggagcgggagcctggccatttaaaggccttataccgaaggggggttgcccaggctgcccttgggaacctggaaaaagcaactgctgacctcaagaaggtgctggcgatagatcccaaaaaccgggcagcccaggaggaactggggaaggtggtcattcaggggaagaaccaggatgcagggctggctcagggtctgcgcaagatgtttggctgattaaaagttaaaccttaaaagaga

SEQ ID NO: 14899 - protein, 45 aa, Homo sapiens
PQEGAGDRSQKPGSPGGTGEGGHSGEEPGCRAGSGSAQDVWLIKS

SEQ ID NO: 14900 - DNA, 1344 bp, Homo sapiens
gggttagttgtcagtatctttcccagttgttccgccccctacccccgcctcccgcaccgcgcccctctccggctgccctctccgcgtggggcaaggctccgagggcagcattcagtagccatttagctttggaaggagaggtgattcgaatggcccggctcctcctgtcaccatgctaggcactttggccgcgcaggtgctgacctgaacctggttcatccctttctgaccaaaactgttcactcaccgtggaagggactaagcatccatatggagacgccaccagtcaatacaattggagaaaaggacacctctcagccgcaacaagagtgggaaaagaaccttcgggagaaccttgattcagttattcagattaggcagcagccccgagaccctcctaccgaaacgcttgagctggaagtaagcccagatccagccagccaaattctagagcatactcaaggagctgaaaaactggttgctgaacttgaaggagactctcataagtctcatggatcaaccagtcagatgccagaggcccttcaagcttctgatctctggtactgccccgatgggagctttgtcaagaagatcgtaatccgtggccatggcttggacaaacccaaactaggctcctgctgccgggtactggctttggggtttcctttcggatcagggccgccagagggctggacagagctaactatgggcgtagggccatggagggaggaaacttggggggagctcatagagaaatgcttggagtccatgtgtcaaggtgaggaagcagagcttcagctgcctgggcactctggacctcctgtcaggctcacactggcatccttcactcaaggccgagactcctgggagctggagactagcgagaaggaagccctggccagggaagaacgtgcaaggggcacagaactatttcgagctgggaaccctgaaggagctgcccgatgctatggacgggctcttcggctgctcctgactttacccccacctggccctccagaacgaactgtccttcatgccaatctggctgcctgtcagttgttgctagggcagcctcagttggcagcccagagctgtgaccgggtgttggagcgggagcctggccatttaaaggccttataccgaaggggggttgcccaggctgcccttgggaacctggaaaaagcaactgctgacctcaagaaggtgctggcgatagatcccaaaaaccgggcagcccaggaggaactggggaaggtggtcattcaggggaagaaccaggatgcagggctggctcagggtctgcgcaagatgtttggctgattaaaagttaaaccttaaaagaga

SEQ ID NO: 14901 - protein, 349 aa, Homo sapiens; identical to SEQ ID NO: 1650

SEQ ID NO: 14902 - DNA, 1363 bp, Homo sapiens
agggtaatgggtgctttattttgagaagccataggtaaaaattgtgcttttaaagccactctgccagccgcccaacgctggtaggctgggagagggtcagagtgatgcccctgccccccaaatttccttccacagccatatgcaggcgggaccccggggggaacaggagtgacctccactctccccccgccgccccagggcccagggctggccctactggagccgaggcgcccgccacacgactacatgcccatcgcggtgctgaccaccatctgttgcttctggcctactggcatcattgccatcttcaaggccgtgcaggtgcgcacggccttggcccgcggagacatggtgtcggccgagatcgcttcacgcgaggcccggaacttctccttcatctccctggccgtgggcatcgcggccatggtgctctgtaccatcctcaccgtagtcatcatcatcgccgcgcagcaccacgagaactactgggatccctaaaaacgcccctggtccggccccactctgcgcccctcgatctcccaggctctttctgcagtcataccgcggacccaatgggcgccctgcacacccgtttctggggccgtcagacttggatacatcgtaaactccgcctccacggaacgtctcgccttgcgagcaagctcggaatccagttcctcaggaacccctccaaaacccacacccccagggacgccgctttccgggatcccggccaaacgccggaccctcagtcgctccaggccccctcaccctcaaagtgtagcgcccccaaccgagcaacctcggtttggtccctaaaaccccgcctcctctataagcaccgccccagctctgacaaaaccccgcctccaggtcggcaggctccgccttcttttcttctccgcggggtgattcagtccagtgattgggtttgtggctccaggcctcgcccacagacggacagacccctccctttcttccggcaaaaggaccgagccctggggtagtaaggcccccacactcctgttttttgcaagtacatttttgtccctcctccacccaggtatctgcctattttcttgctaatcccagaacctttccttttgctttttttaaggacatttgggaagttcctggtgtaggacccttctccctgggataagaaacctgcctgtaaacgctctgtaaatactcccttccacccatcccagcccctgggcagccgggcagaagggaatccaggctatggacctcccaagtccccgctccccgctcccctcggcggccccgccttgttctgatctgtgtgtgagtgtgtgtgaacttctgaaagacaatattaaagagacttagttgatttatc

SEQ ID NO: 14903 - protein, 300 aa, Homo sapiens
MPLPPKFPSTAICRRDPGGNRSDLHSPPAAPGPRAGPTGAEAPATRLHAHRGADHHLLLLAYWHHCHLQGRAGAHGLGPRRHGVGRDRFTRGPELLLHLPGRGHRGHGALYHPHRSHHHRRAAPRELLGSLKTPLVRPHSAPLDLPGSFCSHTADPMGALHTRFWGRQTWIHRKLRLHGTSRLASKLGIQFLRNPSKTHTPRDAAFRDPGQTPDPQSLQAPSPSKCSAPNRATSVWSLKPRLLYKHRPSSDKTPPPGRQAPPSFLLRGVIQSSDWVCGSRPRPQTDRPLPFFRQKDRALG

SEQ ID NO: 14904 - DNA, 2784 bp, Homo sapiens
gctgctgccggctgcgccatccagcacccagactccagcaccggccgaggacccccactccggctgcagggaccctgtcccagcgagaccgcaggcatgtcatccgaaaagtcaggtaaaaacaataacaaaacctcccaccccctccactgtctccagactctccgtcccccttgccccaaccccctcccttacccctcctcagctgtggttctatttcattccccttctctccagctctcaacactcccccagtccccctcctctttctgtctccccctttctcttcctttcctctttccagtggcagcctctgccccttgccaacaacatggtcaggggggtaggttgagagggtgaaggaggtacagccaggttttgcagggatggcatcattgggagtgacagatggacaatcactggctggcatggagacatcctgtgaggaaatatggagacatgaccagatgggggttgtcaagggagcaaaatccagagggctcttcttaatctgccctaaaagaggtcccgagattctcacagaggctggggcactcctccccccactgaaggaacagcagagtggaacacatgtcatcccacatgtgtttatacaactgttgaattgagcacatattaacacagggttgcatgtctacgcatacgcacacacaggactagctcggataggccagcccaaaggcagctatagcaaaggagaggggattaggtctgcaggtgagagctgggtgcatggtgatgaaaaagacagaaaagaagcagaccagagttgtgacctcaaaactagattggaaggaagaaggaggggggcagatggcctagatacagcccctctcttgcccctcaaattagagatggtttctcacccgtctctctctatgtgtctctcccattatctttctccatccctgaccggctgtgtttccccttaccccctcctcaactcatcactgtgtcatctttcctcttatactctcctccactcacctcccccaggactcccagactcagtccctcacacttctccgccgccctacaatgcccctcagcctccagccgaacccccagccccaccgccacaggcagccccttcctcacaccatcaccaccaccaccactaccatcagtctggcaccgccaccctcccgcgcttaggggcagggggcctggcctcttccgcggccaccgctcagcgcggtccctcctcctctgccacgctgccgaggcccccccaccacgcccctcccggccctgctgccggggcacccccacccggctgcgctaccttgccccgcatgccacccgacccttacctgcaggagactcgcttcgagggcccacttcccccgccgccgcccgctgccgccgccccgcccccgccggcgccagcccagactgcccaggcccctggcttcgtggtgcccacgcacgcggggactgtgggcacgctgccgctggggggctacgtagcgcccggataccccctgcagctgcagccttgcactgcttacgtgccggtctacccggtgggcacgccatatgcaggcgggaccccggggggaacaggagtgacctccactctccccccgccgccccagggcccagggctggccctactggagccgaggcgcccgccacacgactacatgcccatcgcggtgctgaccaccatctgttgcttctggcctactggcatcattgccatcttcaaggccgtgcaggtgcgcacggccttggcccgcggagacatggtgtcggccgagatcgcttcacgcgaggcccggaacttctccttcatctccctggccgtgggcatcgcggccatggtgctctgtaccatcctcaccgtagtcatcatcatcgccgcgcagcaccacgagaactactgggatccctaaaaacgcccctggtccggccccactctgcgcccctcgatctcccaggctctttctgcagtcataccgcggacccaatgggcgccctgcacacccgtttctggggccgtcagacttggatacatcgtaaactccgcctccacggaacgtctcgccttgcgagcaagctcggaatccagttcctcaggaacccctccaaaacccacacccccagggacgccgctttccgggatcccggccaaacgccggaccctcagtcgctccaggccccctcaccctcaaagtgtagcgcccccaaccgagcaacctcggtttggtccctaaaaccccgcctcctctataagcaccgccccagctctgacaaaaccccgcctccaggtcggcaggctccgccttcttttcttctccgcggggtgattcagtccagtgattgggtttgtggctccaggcctcgcccacagacggacagacccctccctttcttccggcaaaaggaccgagccctggggtagtaaggcccccacactcctgttttttgcaagtacatttttgtccctcctccacccaggtatctgcctattttcttgctaatcccagaacctttccttttgctttttttaaggacatttgggaagttcctggtgtaggacccttctccctgggataagaaacctgcctgtaaacgctctgtaaatactcccttccacccatcccagcccctgggcagccgggcagaagggaatccaggctatggacctcccaagtccccgctccccgctcccctcggcggccccgccttgttctgatctgtgtgtgagtgtgtgtgaacttctgaaagacaatattaaagagacttagttgatttatc

SEQ ID NO: 14905 - protein, 347 aa, Homo sapiens
MVSHPSLSMCLSHYLSPSLTGCVSPYPLLNSSLCHLSSYTLLHSPPPGLPDSVPHTSPPPYNAPQPPAEPPAPPPQAAPSSHHHHHHHYHQSGTATLPRLGAGGLASSAATAQRGPSSSATLPRPPHHAPPGPAAGAPPPGCATLPRMPPDPYLQETRFEGPLPPPPPAAAAPPPPAPAQTAQAPGFVVPTHAGTVGTLPLGGYVAPGYPLQLQPCTAYVPVYPVGTPYAGGTPGGTGVTSTLPPPPQGPGLALLEPRRPPHDYMPIAVLTTICCFWPTGIIAIFKAVQVRTALARGDMVSAEIASREARNFSFISLAVGIAAMVLCTILTVVIIIAAQHHENYWDP

SEQ ID NO: 14906 - DNA, 1357 bp, Homo sapiens
ctctccatctctgcgctgctgccggctgcgccatccagcacccagactccagcaccggccgaggacccccactccggctgcagggaccctgtcccagcgagaccgcaggcatgtcatccgaaaagtcagccatatgcaggcgggaccccggggggaacaggagtgacctccactctccccccgccgccccagggcccagggctggccctactggagccgaggcgcccgccacacgactacatgcccatcgcggtgctgaccaccatctgttgcttctggcctactggcatcattgccatcttcaaggccgtgcaggtgcgcacggccttggcccgcggagacatggtgtcggccgagatcgcttcacgcgaggcccggaacttctccttcatctccctggccgtgggcatcgcggccatggtgctctgtaccatcctcaccgtagtcatcatcatcgccgcgcagcaccacgagaactactgggatccctaaaaacgcccctggtccggccccactctgcgcccctcgatctcccaggctctttctgcagtcataccgcggacccaatgggcgccctgcacacccgtttctggggccgtcagacttggatacatcgtaaactccgcctccacggaacgtctcgccttgcgagcaagctcggaatccagttcctcaggaacccctccaaaacccacacccccagggacgccgctttccgggatcccggccaaacgccggaccctcagtcgctccaggccccctcaccctcaaagtgtagcgcccccaaccgagcaacctcggtttggtccctaaaaccccgcctcctctataagcaccgccccagctctgacaaaaccccgcctccaggtcggcaggctccgccttcttttcttctccgcggggtgattcagtccagtgattgggtttgtggctccaggcctcgcccacagacggacagacccctccctttcttccggcaaaaggaccgagccctggggtagtaaggcccccacactcctgttttttgcaagtacatttttgtccctcctccacccaggtatctgcctattttcttgctaatcccagaacctttccttttgctttttttaaggacatttgggaagttcctggtgtaggacccttctccctgggataagaaacctgcctgtaaacgctctgtaaatactcccttccacccatcccagcccctgggcagccgggcagaagggaatccaggctatggacctcccaagtccccgctccccgctcccctcggcggccccgccttgttctgatctgtgtgtgagtgtgtgtgaacttctgaaagacaatattaaagagacttagttgatttatc

SEQ ID NO: 14907 - protein, 296 aa, Homo sapiens
MSSEKSAICRRDPGGNRSDLHSPPAAPGPRAGPTGAEAPATRLHAHRGADHHLLLLAYWHHCHLQGRAGAHGLGPRRHGVGRDRFTRGPELLLHLPGRGHRGHGALYHPHRSHHHRRAAPRELLGSLKTPLVRPHSAPLDLPGSFCSHTADPMGALHTRFWGRQTWIHRKLRLHGTSRLASKLGIQFLRNPSKTHTPRDAAFRDPGQTPDPQSLQAPSPSKCSAPNRATSVWSLKPRLLYKHRPSSDKTPPPGRQAPPSFLLRGVIQSSDWVCGSRPRPQTDRPLPFFRQKDRALG

SEQ ID NO: 14908 - DNA, 1911 bp, Homo sapiens
cgccgctgccttcatctctccatctctgcgctgctgccggctgcgccatccagcacccagactccagcaccggccgaggacccccactccggctgcagggaccctgtcccagcgagaccgcaggcatgtcatccgaaaagtcaggactcccagactcagtccctcacacttctccgccgccctacaatgcccctcagcctccagccgaacccccagccccaccgccacaggcagccccttcctcacaccatcaccaccaccaccactaccatcagtctggcaccgccaccctcccgcgcttaggggcagggggcctggcctcttccgcggccaccgctcagcgcggtccctcctcctctgccacgctgccgaggcccccccaccacgcccctcccggccctgctgccggggcacccccacccggctgcgctaccttgccccgcatgccacccgacccttacctgcaggagactcgcttcgagggcccacttcccccgccgccgcccgctgccgccgccccgcccccgccggcgccagcccagactgcccaggcccctggcttcgtggtgcccacgcacgcggggactgtgggcacgctgccgctggggggctacgtagcgcccggataccccctgcagctgcagccttgcactgcttacgtgccggtctacccggtgggcacgccatatgcaggcgggaccccggggggaacaggagtgacctccactctccccccgccgccccagggcccagggctggccctactggagccgaggcgcccgccacacgactacatgcccatcgcggtgctgaccaccatctgttgcttctggcctactggcatcattgccatcttcaaggccgtgcaggtgcgcacggccttggcccgcggagacatggtgtcggccgagatcgcttcacgcgaggcccggaacttctccttcatctccctggccgtgggcatcgcggccatggtgctctgtaccatcctcaccgtagtcatcatcatcgccgcgcagcaccacgagaactactgggatccctaaaaacgcccctggtccggccccactctgcgcccctcgatctcccaggctctttctgcagtcataccgcggacccaatgggcgccctgcacacccgtttctggggccgtcagacttggatacatcgtaaactccgcctccacggaacgtctcgccttgcgagcaagctcggaatccagttcctcaggaacccctccaaaacccacacccccagggacgccgctttccgggatcccggccaaacgccggaccctcagtcgctccaggccccctcaccctcaaagtgtagcgcccccaaccgagcaacctcggtttggtccctaaaaccccgcctcctctataagcaccgccccagctctgacaaaaccccgcctccaggtcggcaggctccgccttcttttcttctccgcggggtgattcagtccagtgattgggtttgtggctccaggcctcgcccacagacggacagacccctccctttcttccggcaaaaggaccgagccctggggtagtaaggcccccacactcctgttttttgcaagtacatttttgtccctcctccacccaggtatctgcctattttcttgctaatcccagaacctttccttttgctttttttaaggacatttgggaagttcctggtgtaggacccttctccctgggataagaaacctgcctgtaaacgctctgtaaatactcccttccacccatcccagcccctgggcagccgggcagaagggaatccaggctatggacctcccaagtccccgctccccgctcccctcggcggccccgccttgttctgatctgtgtgtgagtgtgtgtgaacttctgaaagacaatattaaagagacttagttgatttatc

SEQ ID NO: 14909 - protein, 306 aa, Homo sapiens; identical to SEQ ID NO: 1652

SEQ ID NO: 14910 - DNA, 1728 bp, Homo sapiens
atctgactctgtggagcctgggactggtttcagcgagagcctctgtactgctctgtagtctctgctaggacatggacgaaaagggacgcagccgggagagcgactgccccagtcccacccgcctcgcctggtctagcctccgtgtttccatgacaactccaaaggaacccaaactgggggcttgaatgccgggcacccagactccagcaccggccgaggacccccactccggctgcagggaccctgtcccagcgagaccgcaggcatgtcatccgaaaagtcaggagactcgcttcgagggcccacttcccccgccgccgcccgctgccgccgccccgcccccgccggcgccagcccagactgcccaggcccctggcttcgtggtgcccacgcacgcggggactgtgggcacgctgccgctggggggctacgtagcgcccggataccccctgcagctgcagccttgcactgcttacgtgccggtctacccggtgggcacgccatatgcaggcgggaccccggggggaacaggagtgacctccactctccccccgccgccccagggcccagggctggccctactggagccgaggcgcccgccacacgactacatgcccatcgcggtgctgaccaccatctgttgcttctggcctactggcatcattgccatcttcaaggccgtgcaggtgcgcacggccttggcccgcggagacatggtgtcggccgagatcgcttcacgcgaggcccggaacttctccttcatctccctggccgtgggcatcgcggccatggtgctctgtaccatcctcaccgtagtcatcatcatcgccgcgcagcaccacgagaactactgggatccctaaaaacgcccctggtccggccccactctgcgcccctcgatctcccaggctctttctgcagtcataccgcggacccaatgggcgccctgcacacccgtttctggggccgtcagacttggatacatcgtaaactccgcctccacggaacgtctcgccttgcgagcaagctcggaatccagttcctcaggaacccctccaaaacccacacccccagggacgccgctttccgggatcccggccaaacgccggaccctcagtcgctccaggccccctcaccctcaaagtgtagcgcccccaaccgagcaacctcggtttggtccctaaaaccccgcctcctctataagcaccgccccagctctgacaaaaccccgcctccaggtcggcaggctccgccttcttttcttctccgcggggtgattcagtccagtgattgggtttgtggctccaggcctcgcccacagacggacagacccctccctttcttccggcaaaaggaccgagccctggggtagtaaggcccccacactcctgttttttgcaagtacatttttgtccctcctccacccaggtatctgcctattttcttgctaatcccagaacctttccttttgctttttttaaggacatttgggaagttcctggtgtaggacccttctccctgggataagaaacctgcctgtaaacgctctgtaaatactcccttccacccatcccagcccctgggcagccgggcagaagggaatccaggctatggacctcccaagtccccgctccccgctcccctcggcggccccgccttgttctgatctgtgtgtgagtgtgtgtgaacttctgaaagacaatattaaagagacttagttgatttatc

SEQ ID NO: 14911 - protein, 368 aa, Homo sapiens
MSSEKSGDSLRGPTSPAAARCRRPAPAGASPDCPGPWLRGAHARGDCGHAAAGGLRSARIPPAAAALHCLRAGLPGGHAICRRDPGGNRSDLHSPPAAPGPRAGPTGAEAPATRLHAHRGADHHLLLLAYWHHCHLQGRAGAHGLGPRRHGVGRDRFTRGPELLLHLPGRGHRGHGALYHPHRSHHHRRAAPRELLGSLKTPLVRPHSAPLDLPGSFCSHTADPMGALHTRFWGRQTWIHRKLRLHGTSRLASKLGIQFLRNPSKTHTPRDAAFRDPGQTPDPQSLQAPSPSKCSAPNRATSVWSLKPRLLYKHRPSSDKTPPPGRQAPPSFLLRGVIQSSDWVCGSRPRPQTDRPLPFFRQKDRALG

SEQ ID NO: 14912 - DNA, 543 bp, Homo sapiens
ccaggcttcgttgcccccagcgacccaaaagtccgatttccccgccttgattctccccacttcccaatacaggcgtctggctccgcagcagaacacgaagtttgcattccccaaggggcggccagggggcggaccagggaaaggtagtcctctgcattttgccgtgtgctggaatggtgtagagtgacgatgaggtggcggtaaggggttgagcgctcacgcgaacgcctaagtgaccagaacgactggtgtgaagccgtgatctgactctgtggagcctgggactggtttcagcgagagcctctgtactgctctgtagtctctgctaggacatggacgaaaagggacgcagccgggagagcgactgccccaggtgggggctggggggacgtaagggaagaataataattatctggctgtgtttttgtttaaaaaaaaaaaaaaactggtgtaaatctccatagacttcctatcctcgctcccttcacccacccacgcgctcccaagatgcaataagcaaataaaaagactaataacgctgta

SEQ ID NO: 14913 - protein, 43 aa, Homo sapiens
MDEKGRSRESDCPRWGLGGRKGRIIIIWLCFCLKKKKNWCKSP

SEQ ID NO: 14914 - DNA, 1087 bp, Homo sapiens
cgcctcagccatgaacaacgcggagttctttaatacccgtgagcagcagcccaggccccttgaagagtgcagactcccacctggcctgggtccgtaggcctcgctccacccgctgtttacttatcccaagtctggaacccacggtggcggggggaagggcgtctggctccgcagcagaacacgaagtttgcattccccaaggggcggccagggggcggaccagggaaagtccgccccaggtcagcgacttacaactcttcattctgaagtgcgtgtagtgcccttgtctccagagacgcagagagtcctcgaggccccttgagctaagtgcagcctggcccagtttctcctgccctactctactcccctccctataagcgacccaccctcaaggggcggagggcgcgtagggatgcgctgactcatgcccgcgtaatttcgaccagtctttcaacctgaacgacccccagaatctggctgtctgagttatctgtgggtggctccctaccgaaacccccaggcgccccacctctccgcctgtgacccctaaccgacaccctagtgcctcagggcttttacttgctagggcttttacttagcatttaaagacgtttctctagagataaggatttctcagcatgtctgagcccctctctctgtttacaaggtcattgcttggtctaaatttgtctcaatcaaaacatttttgcgctcagaatggtgtagagtgacgatgaggtggcggtaaggggttgagcgctcacgcgaacgcctaagtgaccagaacgactggtgtgaagccgtgatctgactctgtggagcctgggactggtttcagcgagagcctctgtactgctctgtagtctctgctaggacatggacgaaaagggacgcagccgggagagcgactgccccaggtgggggctggggggacgtaagggaagaataataattatctggctgtgtttttgtttaaaaaaaaaaaaaaactggtgtaaatctccatagacttcctatcctcgctcccttcacccacccacgcgctcccaagatgcaataagcaaataaaaagactaataacgctgta

SEQ ID NO: 14915 - protein, 43 aa, Homo sapiens; identical to SEQ ID NO: 14913

SEQ ID NO: 14916 - DNA, 567 bp, Homo sapiens
aatgcatcgcctcagccatgaacaacgcggagttctttaatacccgtgagcagcagcccaggccccttgaagagtgcagactcccacctggcctgggcgtctggctccgcagcagaacacgaagtttgcattccccaaggggcggccagggggcggaccagggaaaggtagtcctctgcattttgccgtgtgctggaatggtgtagagtgacgatgaggtggcggtaaggggttgagcgctcacgcgaacgcctaagtgaccagaacgactggtgtgaagccgtgatctgactctgtggagcctgggactggtttcagcgagagcctctgtactgctctgtagtctctgctaggacatggacgaaaagggacgcagccgggagagcgactgccccaggtgggggctggggggacgtaagggaagaataataattatctggctgtgtttttgtttaaaaaaaaaaaaaaactggtgtaaatctccatagacttcctatcctcgctcccttcacccacccacgcgctcccaagatgcaataagcaaataaaaagactaataacgctgta

SEQ ID NO: 14917 - protein, 62 aa, Homo sapiens
MNNAEFFNTREQQPRPLEECRLPPGLGVWLRSRTRSLHSPRGGQGADQGKVVLCILPCAGMV

SEQ ID NO: 14918 - DNA, 1031 bp, Homo sapiens
cttcctaatgcatcgcctcagccatgaacaacgcggagttctttaatacccgtgagcagcagcccaggccccttgaagagtgcagactcccacctggcctgggcgtctggctccgcagcagaacacgaagtttgcattccccaaggggcggccagggggcggaccagggaaagtccgccccaggtcagcgacttacaactcttcattctgaagtgcgtgtagtgcccttgtctccagagacgcagagagtcctcgaggccccttgagctaagtgcagcctggcccagtttctcctgccctactctactcccctccctataagcgacccaccctcaaggggcggagggcgcgtagggatgcgctgactcatgcccgcgtaatttcgaccagtctttcaacctgaacgacccccagaatctggctgtctgagttatctgtgggtggctccctaccgaaacccccaggcgccccacctctccgcctgtgacccctaaccgacaccctagtgcctcagggcttttacttgctagggcttttacttagcatttaaagacgtttctctagagataaggatttctcagcatgtctgagcccctctctctgtttacaaggtcattgcttggtctaaatttgtctcaatcaaaacatttttgcgctcagaatggtgtagagtgacgatgaggtggcggtaaggggttgagcgctcacgcgaacgcctaagtgaccagaacgactggtgtgaagccgtgatctgactctgtggagcctgggactggtttcagcgagagcctctgtactgctctgtagtctctgctaggacatggacgaaaagggacgcagccgggagagcgactgccccaggtgggggctggggggacgtaagggaagaataataattatctggctgtgtttttgtttaaaaaaaaaaaaaaactggtgtaaatctccatagacttcctatcctcgctcccttcacccacccacgcgctcccaagatgcaataagcaaataaaaagactaataacgctgta

SEQ ID NO: 14919 - protein, 80 aa, Homo sapiens
MNNAEFFNTREQQPRPLEECRLPPGLGVWLRSRTRSLHSPRGGQGADQGKSAPGQRLTTLHSEVRVVPLSPETQRVLEAP

SEQ ID NO: 14920 - DNA, 548 bp, Homo sapiens
ggggacttgttctctaggtccaggatcttcctaatgcatcgcctcagccatgaacaacgcggagttctttaatacccgcgtctggctccgcagcagaacacgaagtttgcattccccaaggggcggccagggggcggaccagggaaaggtagtcctctgcattttgccgtgtgctggaatggtgtagagtgacgatgaggtggcggtaaggggttgagcgctcacgcgaacgcctaagtgaccagaacgactggtgtgaagccgtgatctgactctgtggagcctgggactggtttcagcgagagcctctgtactgctctgtagtctctgctaggacatggacgaaaagggacgcagccgggagagcgactgccccaggtgggggctggggggacgtaagggaagaataataattatctggctgtgtttttgtttaaaaaaaaaaaaaaactggtgtaaatctccatagacttcctatcctcgctcccttcacccacccacgcgctcccaagatgcaataagcaaataaaaagactaataacgctgta

SEQ ID NO: 14921 - protein, 45 aa, Homo sapiens
MNNAEFFNTRVWLRSRTRSLHSPRGGQGADQGKVVLCILPCAGMV

SEQ ID NO: 14922 - DNA, 903 bp, Homo sapiens
attacgcgggcatgagtcagcgcatccctacgcgccctccgccccttgagggtgggtcgcttatagggaggggagtagagtagggcaggagaaactgggccaggctgcacttagctcaaggggcctcgaggactctctgcgtctctggagacaagggcactacacgcacttcagaatgaagagttacttgggataagtaaacagcgggtggagcgaggcctacggacccaggccaggtgggagtctgcactcttcaaggggcctgggctgctgctcacgggtattaaagaactccgcgttgttcatggctgaggcgatgcattaggaagatcctggacctagagaacaagtcccccgaacgctgagttggaggcgggacttcgggtgcgcgttggcgggagcatgctggggctctgcgggcagcggctccccgcggcgtgggtcctgcttctgttgcctttcctgccgctgctgctgcttgcagcccccgcgccccaccgcgcgtcctacaagccggtcatcgtggtgcatgggctcttcgacagctcgtacagcttccgccacctgctggaatacatcaatgagacacaccccgggactgtggtgacagtgctcgatctcttcgatgggagagagagcttgcgacccctgtgggaacaggtgcaagggttccgagaggctgtggtccccatcatggcaaaggcccctcaaggggtgcatctcatctgctactcgcaggggggccttgtgtgccgggctctgctttctgtcatggatgatcacaacgtggattctttcatctccctctcctctccacagatgggacagtatggagacacggactacttgaagtggctgttccccacctccatgcggtctaacctctatcggatctgctatagc

SEQ ID NO: 14923 - protein, 166 aa, Homo sapiens
MLGLCGQRLPAAWVLLLLPFLPLLLLAAPAPHRASYKPVIVVHGLFDSSYSFRHLLEYINETHPGTVVTVLDLFDGRESLRPLWEQVQGFREAVVPIMAKAPQGVHLICYSQGGLVCRALLSVMDDHNVDSFISLSSPQMGQYGDTDYLKWLFPTSMRSNLYRICY

SEQ ID NO: 14924 - DNA, 1762 bp, Homo sapiens
ggagtagagtagggcaggagaaactgggccaggctgcacttagctcaaggggcctcgaggactctctgcgtctctggagacaagggcactacacgcacttcagaatgaagagttgcgggagcatgctggggctctgcgggcagcggctccccgcggcgtgggtcctgcttctgttgcctttcctgccgctgctgctgcttgcagcccccgcgccccaccgcgcgtcctacaagccggtcatcgtggtgcatgggctcttcgacagctcgtacagcttccgccacctgctggaatacatcaatgagacacaccccgggactgtggtgacagtgctcgatctcttcgatgggagagagagcttgcgacccctgtgggaacaggtgcaagggttccgagaggctgtggtccccatcatggcaaaggcccctcaaggggtgcatctcatctgctactcgcaggggggccttgtgtgccgggctctgctttctgtcatggatgatcacaacgtggattctttcatctccctctcctctccacagatgggacagtatggagacacggactacttgaagtggctgttccccacctccatgcggtctaacctctatcggatctgctatagcccctggggccaggaattctccatctgcaactactggcatgatccccaccacgatgacttgtacctcaatgccagcagcttcctggccctgatcaatggggaaagagaccatcccaatgccacagtatggcggaagaactttctgcgtgtgggccacctggtgctgattgggggccctgatgatggtgttattactccctggcagtccagcttctttggtttctatgatgcaaatgagaccgtcctggagatggaggagcaactggtttatctgcgggattcttttgggttgaagactctattggcccggggggccatagtgaggtgtccaatggccggtatctcccacacagcctggcactccaaccgtaccctttatgagacctgcattgaaccttggctctcctgaggatatattcaggggtccccaggaactcctcggtccagagaccaagtggtggccttggaaagcagatgtcaggctttggtgtgcctgtgaccacctcattgctcccatattatcccccatttttagtagagacggggttttagtagagacttggcctcccagaacccccttcctctgctcctccatgaatgacaattccaggcctcccctacctcatgtcctctcatttgggggattgctccgtgctgtccctttctctcaaggccgaagttgggaagtgagaaaccatgtttttaacttgtggctgcttttgctgctgctgctcctccgtatctggctgtatgggtggagaacccaccccctgcccaccacaggggtctccttccaggccactcaggacatttttagcttctctcctccccatgttcccttttttctctaaagtcccctgacatcagccctcccaactcctaagagggactacccatgagagtggggttctgaggctcccctatggggacagttccgttcttgaagtgtcagtgttggggaatatctgtggcctatgaggcccatctcaggtttggggatcccccagtccctatgatcagtgttggagtacccccctgggagagcctagtttctttgaggccccaggccctcttttaactacctttgaataggtgttatccctgtatttatggaaataaagttccatttcctcagtgtga

SEQ ID NO: 14925 - protein, 308 aa, Homo sapiens
MKSCGSMLGLCGQRLPAAWVLLLLPFLPLLLLAAPAPHRASYKPVIVVHGLFDSSYSFRHLLEYINETHPGTVVTVLDLFDGRESLRPLWEQVQGFREAVVPIMAKAPQGVHLICYSQGGLVCRALLSVMDDHNVDSFISLSSPQMGQYGDTDYLKWLFPTSMRSNLYRICYSPWGQEFSICNYWHDPHHDDLYLNASSFLALINGERDHPNATVWRKNFLRVGHLVLIGGPDDGVITPWQSSFFGFYDANETVLEMEEQLVYLRDSFGLKTLLARGAIVRCPMAGISHTAWHSNRTLYETCIEPWLS

SEQ ID NO: 14926 - DNA, 583 bp, Homo sapiens
aggctgcacttagctcaaggggcctcgaggactctctgcgtctctggagacaagggcactacacgcacttcagaatgaagagttgcgggagcatgctggggctctgcgggcagcggctccccgcggcgtgggtcctgcttctgttgcctttcctgccgctgctgctgcttgcagcccccgcgccccaccgcgcgtcctacaagccggtcatcgtggtgcatgggctcttcgacagctcgtacagcttccgccacctgctggaatacatcaatgagacacaccccgggactgtggtgacagtgctcgatctcttcgatgggagagagagcttgcgacccctgtgggaacaggtgcaagggttccgagaggctgtggtccccatcatggcaaaggcccctcaaggggtgcatctcatctgctactcgcaggggggccttgtgtgccgggctctgctttctgtcatggatgatcacaacgtggattctttcatctccctctcctctccacagatgggacagtatggagacacggactacttgaagtggctgttccccacctccatgcggtctaacctctatcggat

SEQ ID NO: 14927 - protein, 168 aa, Homo sapiens
MKSCGSMLGLCGQRLPAAWVLLLLPFLPLLLLAAPAPHRASYKPVIVVHGLFDSSYSFRHLLEYINETHPGTVVTVLDLFDGRESLRPLWEQVQGFREAVVPIMAKAPQGVHLICYSQGGLVCRALLSVMDDHNVDSFISLSSPQMGQYGDTDYLKWLFPTSMRSNLY

SEQ ID NO: 14928 - DNA, 2208 bp, Homo sapiens
ggaagtggggagaatcaaggcggggaaatcggacttttgggtcgctgggggcaacgaagcctggagaggccttctttccattcccagaatatgtttgctgctttttcctctccccactggcctaaatggatcgctccgcctgtttcctccccagcacctagggcgcaatggaatattccattgcccctcctgtcctgggtctgtgttgcggggaacgctcgcgcggttgccagagaaagccccggacgtgacggatttgcgcgaccccaagcagcccgcccttccccctcccatccgtcattcccctgcgctctctttcctcacccttccccccgccaccgtgggttccagacttgggataagtaaacagcgggtggagcgaggcctacggacccaggccaggtgggagtctgcactcttcaaggggcctgggctgctgctcacgggtattaaagaactccgcgttgttcatggctgaggcgatgcattaggaagatcctggacctagagaacaagtcccccgaacgctgagttggaggcgggacttcgggtgcgcgttggcgggagcatgctggggctctgcgggcagcggctccccgcggcgtgggtcctgcttctgttgcctttcctgccgctgctgctgcttgcagcccccgcgccccaccgcgcgtcctacaagccggtcatcgtggtgcatgggctcttcgacagctcgtacagcttccgccacctgctggaatacatcaatgagacacaccccgggactgtggtgacagtgctcgatctcttcgatgggagagagagcttgcgacccctgtgggaacaggtgcaagggttccgagaggctgtggtccccatcatggcaaaggcccctcaaggggtgcatctcatctgctactcgcaggggggccttgtgtgccgggctctgctttctgtcatggatgatcacaacgtggattctttcatctccctctcctctccacagatgggacagtatggagacacggactacttgaagtggctgttccccacctccatgcggtctaacctctatcggatctgctatagcccctggggccaggaattctccatctgcaactactggcatgatccccaccacgatgacttgtacctcaatgccagcagcttcctggccctgatcaatggggaaagagaccatcccaatgccacagtatggcggaagaactttctgcgtgtgggccacctggtgctgattgggggccctgatgatggtgttattactccctggcagtccagcttctttggtttctatgatgcaaatgagaccgtcctggagatggaggagcaactggtttatctgcgggattcttttgggttgaagactctattggcccggggggccatagtgaggtgtccaatggccggtatctcccacacagcctggcactccaaccgtaccctttatgagacctgcattgaaccttggctctcctgaggatatattcaggggtccccaggaactcctcggtccagagaccaagtggtggccttggaaagcagatgtcaggctttggtgtgcctgtgaccacctcattgctcccatattatcccccatttttagtagagacggggttttagtagagacttggcctcccagaacccccttcctctgctcctccatgaatgacaattccaggcctcccctacctcatgtcctctcatttgggggattgctccgtgctgtccctttctctcaaggccgaagttgggaagtgagaaaccatgtttttaacttgtggctgcttttgctgctgctgctcctccgtatctggctgtatgggtggagaacccaccccctgcccaccacaggggtctccttccaggccactcaggacatttttagcttctctcctccccatgttcccttttttctctaaagtcccctgacatcagccctcccaactcctaagagggactacccatgagagtggggttctgaggctcccctatggggacagttccgttcttgaagtgtcagtgttggggaatatctgtggcctatgaggcccatctcaggtttggggatcccccagtccctatgatcagtgttggagtacccccctgggagagcctagtttctttgaggccccaggccctcttttaactacctttgaataggtgttatccctgtatttatggaaataaagttccatttcctcagtgtga

SEQ ID NO: 14929 - protein, 302 aa, Homo sapiens
MLGLCGQRLPAAWVLLLLPFLPLLLLAAPAPHRASYKPVIVVHGLFDSSYSFRHLLEYINETHPGTVVTVLDLFDGRESLRPLWEQVQGFREAVVPIMAKAPQGVHLICYSQGGLVCRALLSVMDDHNVDSFISLSSPQMGQYGDTDYLKWLFPTSMRSNLYRICYSPWGQEFSICNYWHDPHHDDLYLNASSFLALINGERDHPNATVWRKNFLRVGHLVLIGGPDDGVITPWQSSFFGFYDANETVLEMEEQLVYLRDSFGLKTLLARGAIVRCPMAGISHTAWHSNRTLYETCIEPWLS

SEQ ID NO: 14930 - DNA, 2874 bp, Homo sapiens
ggaagtggggagaatcaaggcggggaaatcggacttttgggtcgctgggggcaacgaagcctggagaggccttctttccattcccagaatatgtttgctgctttttcctctccccactggcctaaatggatcgctccgcctgtttcctccccagcacctagggcgcaatggaatattccattgcccctcctgtcctgggtctgtgttgcggggaacgctcgcgcggttgccagagaaagccccggacgtgacggatttgcgcgaccccaagcagcccgcccttccccctcccatccgtcattcccctgcgctctctttcctcacccttccccccgccaccgtgggttccagacttgggataagtaaacagcgggtggagcgaggcctacggacccaggccaggtgggagtctgcactcttcaaggggcctgggctgctgctcacgggtattaaagaactccgcgttgttcatggctgaggcgatgcattaggaagatcctggacctagagaacaagtcccccgaacgctgagttggaggcgggacttcgggtgcgcgttggcgggagcatgctggggctctgcgggcagcggctccccgcggcgtgggtcctgcttctgttgcctttcctgccgctgctgctgcttgcagcccccgcgccccaccgcgcgtcctacaagccggtcatcgtggtgcatgggctcttcgacagctcgtacagcttccgccacctgctggaatacatcaatgagacacaccccgggactgtggtgacagtgctcgatctcttcgatgggagagagagcttgcgacccctgtgggaacaggtgcaagggttccgagaggctgtggtccccatcatggcaaaggcccctcaaggggtgcatctcatctgctactcgcaggggggccttgtgtgccgggctctgctttctgtcatggatgatcacaacgtggattctttcatctccctctcctctccacagatgggacagtatggagacacggactacttgaagtggctgttccccacctccatgcggtctaacctctatcggatctgctatagcccctggggccaggaattctccatctgcaactactggcatgatccccaccacgatgacttgtacctcaatgccagcagcttcctggccctgatcaatggggaaagagaccatcccaatgccacagtatggcggaagaactttctgcgtgtgggccacctggtgctgattgggggccctgatgatggtgttattactccctggcagtccagcttctttggtttctatgatgcaaatgagaccgtcctggagatggaggagcaactgcctgccaggcccacccaccagtctgagctgcttctgctgaggctggtctgcttgaagcctcccaggagaaagaagccagcctgtagggtccagcgtcaaagcgaatcatggggtccagggctgagctgtgcactctcttaggcggattctccttcctcctgctactgataccaggcgagggggccaagggtggatccctcagagagaggtgacaacagagggggtagggcccggggtgagctcttctcaggagccttctgctgggggtggggcttcacaggaggcaaaacataactgtaagtttagaatgggggtgagaggctgtcatctggagggagagcggggggcctcagtagcctcttgagggaagtgggactcctggctccccagggcctggcctactcaatctctcccacctcatcctctggcatggacgcagtcagggagtctgctccaagcagacactggtggtcccgctccactacaacgagtcctacagccaaccagtgtacaagccctacctgaccttgtgcgctgggaggcgcatctgcagcacttacaggaccatgtaccgcgttatgtggcgggaggtgaggcgggaggttcagcagacccatgcagtgtgctgccagggctggaagaagcggcacccgggggcgctcacctgtgaagccatctgcgccaagccttgcctgaacggaggcgtctgcgttaggcctgaccagtgcgagtgcgcccccggctggggagggaagcactgtcatgtggacgtggatgaatgtaggaccagcatcaccctctgctcgcaccattgttttaatacggcaggcagcttcacctgcggctgcccccatgacctagtgctaggcgtggacgggcgcacctgcatggaggggtccccagagcccccaaccagtgccagcatactcagcgtggccgttcgggaggcggaaaaagatgagcgcgctctgaagcaggagattcacgagctgcgagggcgcctggagcggctggagcagtgggccggtcaggctggggcctgggtcagagcggtgctgcccgtgccgcctgaagagctgcagccagaacaggtggctgagctgtggggccggggtgaccggatcgaatctctcagcgaccaggtgctgctgctggaggagaggctaggtgcctgctcctgtgaggacaacagcctgggcctcggcgtcaatcatcgataagaagcctctacagcacccctgccccctaatttatacagaaaccggacccactaatcctctgggattggccgactgtgagctgcagataaggctatcagccaccaaagagcaatgaacaatggaaacttcagagagctgaagaaagggggaggcctgtgttcttggcctgcccctgagtcttctggctgggggcaggttgcctgggcaagaactgcttcttcaattccttaacaaatgcaaccaccaacacccagatctctctctctctttattttcagtttttttgctgttatccagataattaataaaaaccaaccacgc

SEQ ID NO: 14931 - protein, 301 aa, Homo sapiens
MLGLCGQRLPAAWVLLLLPFLPLLLLAAPAPHRASYKPVIVVHGLFDSSYSFRHLLEYINETHPGTVVTVLDLFDGRESLRPLWEQVQGFREAVVPIMAKAPQGVHLICYSQGGLVCRALLSVMDDHNVDSFISLSSPQMGQYGDTDYLKWLFPTSMRSNLYRICYSPWGQEFSICNYWHDPHHDDLYLNASSFLALINGERDHPNATVWRKNFLRVGHLVLIGGPDDGVITPWQSSFFGFYDANETVLEMEEQLPARPTHQSELLLLRLVCLKPPRRKKPACRVQRQSESWGPGLSCALS

SEQ ID NO: 14932 - DNA, 4309 bp, Homo sapiens
ggaagtggggagaatcaaggcggggaaatcggacttttgggtcgctgggggcaacgaagcctggagaggccttctttccattcccagaatatgtttgctgctttttcctctccccactggcctaaatggatcgctccgcctgtttcctccccagcacctagggcgcaatggaatattccattgcccctcctgtcctgggtctgtgttgcggggaacgctcgcgcggttgccagagaaagccccggacgtgacggatttgcgcgaccccaagcagcccgcccttccccctcccatccgtcattcccctgcgctctctttcctcacccttccccccgccaccgtgggttccagacttgggataagtaaacagcgggtggagcgaggcctacggacccaggccaggtgggagtctgcactcttcaaggggcctgggctgctgctcacgggtattaaagaactccgcgttgttcatggctgaggcgatgcattaggaagatcctggacctagagaacaagtcccccgaacgctgagttggaggcgggacttcgggtgcgcgttggcgggagcatgctggggctctgcgggcagcggctccccgcggcgtgggtcctgcttctgttgcctttcctgccgctgctgctgcttgcagcccccgcgccccaccgcgcgtcctacaagccggtcatcgtggtgcatgggctcttcgacagctcgtacagcttccgccacctgctggaatacatcaatgagacacaccccgggactgtggtgacagtgctcgatctcttcgatgggagagagagcttgcgacccctgtgggaacaggtgcaagggttccgagaggctgtggtccccatcatggcaaaggcccctcaaggggtgcatctcatctgctactcgcaggggggccttgtgtgccgggctctgctttctgtcatggatgatcacaacgtggattctttcatctccctctcctctccacagatgggacagtatggagacacggactacttgaagtggctgttccccacctccatgcggtctaacctctatcggatctgctatagcccctggggccaggaattctccatctgcaactactggcatgatccccaccacgatgacttgtacctcaatgccagcagcttcctggccctgatcaatggggaaagagaccatcccaatgccacagtatggcggaagaactttctgcgtgtgggccacctggtgctgattgggggccctgatgatggtgttattactccctggcagtccagcttctttggtttctatgatgcaaatgagaccgtcctggagatggaggagcaactgcctgccaggcccacccaccagtctgagctgcttctgctgaggctggtctgcttgaagcctcccaggagaaagaagccagcctgtagggtccagcgtcaaagcgaatcatggggtccagggctgagctgtgcactctcttaggcggattctccttcctcctgctactgataccaggcgagggggccaagggtggatccctcagagagaggtgacaacagagggggtagggcccggggtgagctcttctcaggagccttctgctgggggtggggcttcacaggaggcaaaacataactgtaagtttagaatgggggtgagaggctgtcatctggagggagagcggggggcctcagtagcctcttgagggaagtgggactcctggctccccagggcctggcctactcaatctctcccacctcatcctctggcatggacgcagtcagggagtctgctccaagcagacactggtggtcccgctccactacaacgagtcctacagccaaccagtgtacaagccctacctgaccttgtgcgctgggaggcgcatctgcagcacttacaggaccatgtaccgcgttatgtggcgggaggtgaggcgggaggttcagcagacccatgcagtgtgctgccagggctggaagaagcggcacccgggggcgctcacctgtgaagccatctgcgccaagccttgcctgaacggaggcgtctgcgttaggcctgaccagtgcgagtgcgcccccggctggggagggaagcactgtcatgtggacgtggatgaatgtaggaccagcatcaccctctgctcgcaccattgttttaatacggcaggcagcttcacctgcggctgcccccatgacctagtgctaggcgtggacgggcgcacctgcatggaggggtccccagagcccccaaccagtgccagcatactcagcgtggccgttcgggaggcggaaaaagatgagcgcgctctgaagcaggagattcacgagctgcgagggcgcctggagcggctggagcagtgggccggtcaggctggggcctgggtcagagcggtgctgcccgtgccgcctgaagagctgcagccagaacaggtggctgagctgtggggccggggtgaccggatcgaatctctcagcgaccaggtgctgctgctggaggagaggctaggtgcctgctcctgtgaggacaacagcctgggcctcggcgtcaatcatcgataagaagcctctacagcacccctgccccctaatttatacagaaaccggacccactaatcctctgggattggccgactgtgagctgcagataaggctatcagccaccaaagagcaatgaacaatggaaacttcagagagctgaagaaagggggaggcctgtgttcttggcctgcccctgagtcttctggctgggggcaggttgcctgggcaagaactgcttcttcaattccttaacaaatgcaaccaccaacacccagatctctctctctctttattttcagtttttttgctgttatccagataattaataaaaaccaaccacgcaaaactgggtcccaccctctccttttgctcccagcctacctccccagttgtgggaacaggtctggagtgagaggcagggagtggctaatgccaccaggaagaaatgaaaactggctcagagagggggaagcctcaacagaaaaagaaataaattaaaagccctcctatcccctccagccagggttcgttcctttccccaactccccagggggcagaagtgagtgcagcacctgatgtctgcttcttccccttgtgtctggtgagatggtgcagcagggctgcagggggctgggtggggtcatgtccactgaagaactgtactatggggacagaaaaccagaaatgtggagactgaactggtatcccagagagtgcacgaccctgggcatctgggcaagggcaggcatgagacctctgaattagaagggtccagcccccactgacaggaggctacactgggagggaaggtgaaggtgctgaggaaagctcccatgatgagcctgggagtgcttcaggtatcagcttccagccagagggcgagaagtcctcctcacaaatggatgagtccattgaatccatggactttggagtgggggggatttgttccaaagaatggatgagtccactggccaatgtggggtagaggggtagagaagaccacataggaagagactccactggggatggaatgttcccctcccttgtgtaggctgagtcactggagatgagggggaggcaactgtcccacagacaagacagtaggaggtgggggtcaagagtggagactgcaccgaggcaagagtccatggatggggccaagagggggcaggagtggcgctgtatccacattcacttcagaagttgaagattccaaagaggagaataagtggggagaggggagacaaggaagagggtttggccctgcttcagggcccactgggtgggtaggtgtggggaggaagatggggacagatgggaggagagctcagagccagggttcacccaccgcccccaggcttcttcagatagtcaccaccaccccggccatcagtggagatttcccggaaaacagtgagcatggagtgccggactctgtcagccagagctgggacgtcatctggtgtcagcccttccgtgggcactgggggcagcacccgcacctgacattgtcctggggcaaggggagcaccatcatggcctgtccacccaggtctttgcccacaggtggggcccagcttccgagtgatactcttcctcaacctttcagttctcttcccccaaccctggacaaccatccctgggcttgccagctgccacttctgaggcccttctcctatacaaagccttctccaatccccagttcagacatctcctcagcacccctccagcccccctcctctgggtttggcatttactgctgaatgagtgttattca

SEQ ID NO: 14933 - protein, 301 aa, Homo sapiens; identical to SEQ ID NO: 14931

SEQ ID NO: 14934 - DNA, 619 bp, Homo sapiens
attgcccctcctgtcctgggtctgtgttgcggggaacgctcgcgcggttgccagagaaagccccggacgtgacggatttgcgcgaccccaagcagcccgcccttccccctcccatccgtcattcccctgcgctctctttcctcacccttccccccgccaccgtgggttccagacttgggataagtaaacagcgggtggagcgaggcctacggacccaggccaggtgggagtctgcactcttcaaggggcctgggctgctgctcacgggtattaaagaactccgcgttgttcatggctgaggcgatgcattaggaagatcctggacctagagaacaagtcccccgaacgctgagttggaggcgggacttcgggtgcgcgttggcgggagcatgctggggctctgcgggcagcggctccccgcggcgtgggtcctgcttctgttgcctttcctgccgctgctgctgcttgcagcccccgcgccccaccgcgcgtcctacaagccggtcatcgtggtgcatgggctcttcgacagctcgtacagcttccgccacctgctggaatacatcaatgagacacaccccgggactgtggtgacagtgctcgatctcttcgatgggag

SEQ ID NO: 14935 - protein, 75 aa, Homo sapiens
MLGLCGQRLPAAWVLLLLPFLPLLLLAAPAPHRASYKPVIVVHGLFDSSYSFRHLLEYINETHPGTVVTVLDLFD

SEQ ID NO: 14936 - DNA, 798 bp, Homo sapiens
attgcccctcctgtcctgggtctgtgttgcggggaacgctcgcgcggttgccagagaaagccccggacgtgacggatttgcgcgaccccaagcagcccgcccttccccctcccatccgtcattcccctgcgctctctttcctcacccttccccccgccaccgtgggttccagacttgggataagtaaacagcgggtggagcgaggcctacggacccaggccaggtgggagtctgcactcttcaaggggcctgggctgctgctcacgggtattaaagaactccgcgttgttcatggctgaggcgatgcattaggaagatcctggacctagagaacaagtcccccgaacgctgagttggaggcgggacttcgggtgcgcgttggcgggagcatgctggggctctgcgggcagcggctccccgcggcgtgggtcctgcttctgttgcctttcctgccgctgctgctgcttgcagcccccgcgccccaccgcgcgtcctacaagccggtcatcgtggtgcatgggctcttcgacagctcgtacagcttccgccacctgctggaatacatcaatgagacacaccccgggactgtggtgacagtgctcgatctcttcgatgggagagagagcttgcgacccctgtgggaacaggtgcaagggttccgagaggctgtggtccccatcatggcaaaggcccctcaaggggtgcatctcatctgctactcgcaggggggccttgtgtgccgggctctgctttctgtcatggatgatcacaacgtggattctttcatctccctctcct

SEQ ID NO: 14937 - protein, 135 aa, Homo sapiens
MLGLCGQRLPAAWVLLLLPFLPLLLLAAPAPHRASYKPVIVVHGLFDSSYSFRHLLEYINETHPGTVVTVLDLFDGRESLRPLWEQVQGFREAVVPIMAKAPQGVHLICYSQGGLVCRALLSVMDDHNVDSFISL

SEQ ID NO: 14938 - DNA, 999 bp, Homo sapiens
attgcccctcctgtcctgggtctgtgttgcggggaacgctcgcgcggttgccagagaaagccccggacgtgacggatttgcgcgaccccaagcagcccgcccttccccctcccatccgtcattcccctgcgctctctttcctcacccttccccccgccaccgtgggttccagacttgggataagtaaacagcgggtggagcgaggcctacggacccaggccaggtgggagtctgcactcttcaaggggcctgggctgctgctcacgggtattaaagaactccgcgttgttcatggctgaggcgatgcattaggaagatcctggacctagagaacaagtcccccgaacgctgagttggaggcgggacttcgggtgcgcgttggcgggagcatgctggggctctgcgggcagcggctccccgcggcgtgggtcctgcttctgttgcctttcctgccgctgctgctgcttgcagcccccgcgccccaccgcgcgtcctacaagccggtcatcgtggtgcatgggctcttcgacagctcgtacagcttccgccacctgctggaatacatcaatgagacacaccccgggactgtggtgacagtgctcgatctcttcgatgggagagagagcttgcgacccctcccaccacaggggtctccttccaggccactcaggacatttttagcttctctcctccccatgttcccttttttctctaaagtcccctgacatcagccctcccaactcctaagagggactacccatgagagtggggttctgaggctcccctatggggacagttccgttcttgaagtgtcagtgttggggaatatctgtggcctatgaggcccatctcaggtttggggatcccccagtccctatgatcagtgttggagtacccccctgggagagcctagtttctttgaggccccaggccctcttttaactacctttgaataggtgttatccctgtatttatggaaataaagttccatttcctcag

SEQ ID NO: 14939 - protein, 111 aa, Homo sapiens
MLGLCGQRLPAAWVLLLLPFLPLLLLAAPAPHRASYKPVIVVHGLFDSSYSFRHLLEYINETHPGTVVTVLDLFDGRESLRPLPPQGSPSRPLRTFLASLLPMFPFFSKVP

SEQ ID NO: 14940 - DNA, 1790 bp, Homo sapiens
attgcccctcctgtcctgggtctgtgttgcggggaacgctcgcgcggttgccagagaaagccccggacgtgacggatttgcgcgaccccaagcagcccgcccttccccctcccatccgtcattcccctgcgctctctttcctcacccttccccccgccaccgtgggttccagacttgggataagtaaacagcgggtggagcgaggcctacggacccaggccaggtgggagtctgcactcttcaaggggcctgggctgctgctcacgggtattaaagaactccgcgttgttcatggctgaggcgatgcattaggaagatcctggacctagagaacaagtcccccgaacgctgagttggaggcgggacttcgggtgcgcgttggcgggagcatgctggggctctgcgggcagcggctccccgcggcgtgggtcctgcttctgttgcctttcctgccgctgctgctgcttgcagcccccgcgccccaccgcgcgtcctacaagccggtcatcgtggtgcatgggctcttcgacagctcgtacagcttccgccacctgctggaatacatcaatgagggggccttgtgtgccgggctctgctttctgtcatggatgatcacaacgtggattctttcatctccctctcctctccacagatgggacagtatggagacacggactacttgaagtggctgttccccacctccatgcggtctaacctctatcggatctgctatagcccctgatcaatggggaaagagaccatcccaatgccacagtatggcggaagaactttctgcgtgtgggccacctggtgctgattgggggccctgatgatggtgttattactccctggcagtccagcttctttggtttctatgatgcaaatgagaccgtcctggagatggaggagcaactggtttatctgcgggattcttttgggttgaagactctattggcccggggggccatagtgaggtgtccaatggccggtatctcccacacagcctggcactccaaccgtaccctttatgagacctgcattgaaccttggctctcctgaggatatattcaggggtccccaggaactcctcggtccagagaccaagtggtggccttggaaagcagatgtcaggctttggtgtgcctgtgaccacctcattgctcccatattatcccccatttttagtagagacggggttttagtagagacttggcctcccagaacccccttcctctgctcctccatgaatgacaattccaggcctcccctacctcatgtcctctcatttgggggattgctccgtgctgtccctttctctcaaggccgaagttgggaagtgagaaaccatgtttttaacttgtggctgcttttgctgctgctgctcctccgtatctggctgtatgggtggagaacccaccccctgcccaccacaggggtctccttccaggccactcaggacatttttagcttctctcctccccatgttcccttttttctctaaagtcccctgacatcagccctcccaactcctaagagggactacccatgagagtggggttctgaggctcccctatggggacagttccgttcttgaagtgtcagtgttggggaatatctgtggcctatgaggcccatctcaggtttggggatcccccagtccctatgatcagtgttggagtacccccctgggagagcctagtttctttgaggccccaggccctcttttaactacctttgaataggtgttatccctgtatttatggaaataaagttccatttcctcagtgtga

SEQ ID NO: 14941 - protein, 97 aa, Homo sapiens
MLGLCGQRLPAAWVLLLLPFLPLLLLAAPAPHRASYKPVIVVHGLFDSSYSFRHLLEYINEGALCAGLCFLSWMITTWILSSPSPLHRWDSMETRTT

SEQ ID NO: 14942 - DNA, 361 bp, Homo sapiens
cggacccaggccaggtgggagtctgcactcttcaaggggcctgggctgctgctcacgggtattaaagaactccgcgttgttcatggctgaggcgatgcattaggaagatcctggactacccatgagagtggggttctgaggctcccctatggggacagttccgttcttgaagtgtcagtgttggggaatatctgtggcctatgaggcccatctcaggtttggggatcccccagtccctatgatcagtgttggagtacccccctgggagagcctagtttctttgaggccccaggccctcttttaactacctttgaataggtgttatccctgtatttatggaaataaagttccatttcctcag

SEQ ID NO: 14943 - protein, 51 aa, Homo sapiens [sequence omitted]

SEQ ID NO: 14944 - DNA, 611 bp, Homo sapiens
cacggacctggtgtgggagcgagaggaggtggcttgattgccgggcgtctgttccgagggaggagggtgttgccatctccctcacatgcccttatcacccctttctcaggcgggagcatgctggggctctgcgggcagcggctccccgcggcgtgggtcctgcttctgttgcctttcctgccgctgctgctgcttgcagcccccgcgccccaccgcgcgtcctacaagccggtcatcgtggtgcatgggctcttcgacagctcgtacagcttccgccacctgctggaatacatcaatgagacacaccccgggactgtggtgacagtgctcgatctcttcgatgggagagagagcttgcgacccctgtgggaacaggtgcaagggttccgagaggctgtggtccccatcatggcaaaggcccctcaaggggtgcatctcatctgctactcgcaggggggccttgtgtgccgggctctgctttctgtcatggatgatcacaacgtggattctttcatctccctctcctctccacagatgggacagtatggagacacggactacttgaagtggctgttccccacctccatgcggtctaacctctatcggatctg

SEQ ID NO: 14945 - protein, 163 aa, Homo sapiens
MLGLCGQRLPAAWVLLLLPFLPLLLLAAPAPHRASYKPVIVVHGLFDSSYSFRHLLEYINETHPGTVVTVLDLFDGRESLRPLWEQVQGFREAVVPIMAKAPQGVHLICYSQGGLVCRALLSVMDDHNVDSFISLSSPQMGQYGDTDYLKWLFPTSMRSNLYR

SEQ ID NO: 14946 - DNA, 927 bp, Homo sapiens
ggtgtgagccaccgcacctggcctacattatcactactattttattactatccaccttgactattgctgcagcttccttattgggcttttcaccaccagtcttgcctcccttttctgcttctttttctaactgctgtttgtacccagatccccaccacgatgacttgtacctcaatgccagcagcttcctggccctgatcaatggggaaagagaccatcccaatgccacagtatggcggaagaactttctgcgtgtgggccacctggtgctgattgggggccctgatgatggtgttattactccctggcagtccaggtaataagggattttgtggcctgaagattggctaaagacatcccccaaccccagttggtctttatctcatgcctaaactggcctgctccttccactgttcagttagtgctcctccccccattcatcatgtcacccaagaccaaaacctgggagtcatatcccaaccccttgtatcaagccagtcactaagtcctgctgactcttctcctctccatccctatcaccccctcccccactttataaaaacttttaattttgaaattcttatagattcataggaaattgcaaagatagtatagcaaggcccttcacccagcttcccccagtggttgcatcctatgtaattatagcacagtatcaaaaccaggaaattcacattggttcaatgtgtgtgtgtagttttataccattttatcacatttcctaccacctctttacttacctggactattataacagcctccagctttgtcccctccatcctattccttagaaaaaaatccatggctccatggtactatgtgcttgcctgtgttataggtcaccatgtgtgatctgtaatgtcacctgagctacttgaattgctcaacaaatatttattcaacattatg

SEQ ID NO: 14947 - protein, 69 aa, Homo sapiens
MPKLACSFHCSVSAPPPIHHVTQDQNLGVISQPLVSSQSLSPADSSPLHPYHPLPHFIKTFNFEILIDS

SEQ ID NO: 14948 - DNA, 755 bp, Homo sapiens
cacccaccagtctgagctgcttctgctgaggctggtctgcttgaagcctcccaggagaaagaagccagcctgtagggtccagcgtcaaagcgaatcatggggtccagggctgagctgtgcactctcttaggcggattctccttcctcctgctactgataccaggcgagggggccaagggtggatccctcagagagagtcagggagtctgctccaagcagacactggtggtcccgctccactacaacgagtcctacagccaaccagtgtacaagccctacctgaccttgtgcgctgggaggcgcatctgcagcacttacaggaccatgtaccgcgttatgtggcgggaggtgaggcgggaggttcagcagacccatgcagtgtgctgccagggctggaagaagcggcacccgggggcgctcacctgtgaagccatctgcgccaagccttgcctgaacggaggcgtctgcgttaggcctgaccagtgcgagtgcgcccccggctggggagggaagcactgtcatgtggacgtggatgaatgtaggaccagcatcaccctctgctcgcaccattgttttaatacggcaggcagcttcacctgcggctgcccccatgacctagtgctaggcgtggacgggcgcacctgcatggaggggtccccagagcccccaaccagtgccagcatactcagcgtggccgttcgggaggcggaaaaagatgagcgcgctctgaagcaggagattcacgagctgcgagg

SEQ ID NO: 14949 - protein, 218 aa, Homo sapiens
MGSRAELCTLLGGFSFLLLLIPGEGAKGGSLRESQGVCSKQTLVVPLHYNESYSQPVYKPYLTLCAGRRICSTYRTMYRVMWREVRREVQQTHAVCCQGWKKRHPGALTCEAICAKPCLNGGVCVRPDQCECAPGWGGKHCHVDVDECRTSITLCSHHCFNTAGSFTCGCPHDLVLGVDGRTCMEGSPEPPTSASILSVAVREAEKDERALKQEIHEL

SEQ ID NO: 14950 - DNA, 2719 bp, Homo sapiens
gctgcttctgctgaggctggtctgcttgaagcctcccaggagaaagaagccagcctgtagggtccagcgtcaaagcgaatcatggggtccagggctgagctgtgcactctcttaggcggattctccttcctcctgctactgataccaggcgagggggccaagggtggatccctcagagagagtcagggagtctgctccaagcagacactggtggtcccgctccactacaacgagtcctacagccaaccagtgtacaagccctacctgaccttgtgcgctgggaggcgcatctgcagcacttacaggaccatgtaccgcgttatgtggcgggaggtgaggcgggaggttcagcagacccatgcagtgtgctgccagggctggaagaagcggcacccgggggcgctcacctgtgaagccatctgcgccaagccttgcctgaacggaggcgtctgcgttaggcctgaccagtgcgagtgcgcccccggctggggagggaagcactgtcatgtggacgtggatgaatgtaggaccagcatcaccctctgctcgcaccattgttttaatacggcaggcagcttcacctgcggctgcccccatgacctagtgctaggcgtggacgggcgcacctgcatggaggggtccccagagcccccaaccagtgccagcatactcagcgtggccgttcgggaggcggaaaaagatgagcgcgctctgaagcaggagattcacgagctgcgagggcgcctggagcggctggagcagtgggccggtcaggctggggcctgggtcagagcggtgctgcccgtgccgcctgaagagctgcagccagaacaggtggctgagctgtggggccggggtgaccggatcgaatctctcagcgaccaggtgctgctgctggaggagaggctaggtgcctgctcctgtgaggacaacagcctgggcctcggcgtcaatcatcgataagaagcctctacagcacccctgccccctaatttatacagaaaccggacccactaatcctctgggattggccgactgtgagctgcagataaggctatcagccaccaaagagcaatgaacaatggaaacttcagagagctgaagaaagggggaggcctgtgttcttggcctgcccctgagtcttctggctgggggcaggttgcctgggcaagaactgcttcttcaattccttaacaaatgcaaccaccaacacccagatctctctctctctttattttcagtttttttgctgttatccagataattaataaaaaccaaccacgcaaaactgggtcccaccctctccttttgctcccagcctacctccccagttgtgggaacaggtctggagtgagaggcagggagtggctaatgccaccaggaagaaatgaaaactggctcagagagggggaagcctcaacagaaaaagaaataaattaaaagccctcctatcccctccagccagggttcgttcctttccccaactccccagggggcagaagtgagtgcagcacctgatgtctgcttcttccccttgtgtctggtgagatggtgcagcagggctgcagggggctgggtggggtcatgtccactgaagaactgtactatggggacagaaaaccagaaatgtggagactgaactggtatcccagagagtgcacgaccctgggcatctgggcaagggcaggcatgagacctctgaattagaagggtccagcccccactgacaggaggctacactgggagggaaggtgaaggtgctgaggaaagctcccatgatgagcctgggagtgcttcaggtatcagcttccagccagagggcgagaagtcctcctcacaaatggatgagtccattgaatccatggactttggagtgggggggatttgttccaaagaatggatgagtccactggccaatgtggggtagaggggtagagaagaccacataggaagagactccactggggatggaatgttcccctcccttgtgtaggctgagtcactggagatgagggggaggcaactgtcccacagacaagacagtaggaggtgggggtcaagagtggagactgcaccgaggcaagagtccatggatggggccaagagggggcaggagtggcgctgtatccacattcacttcagaagttgaagattccaaagaggagaataagtggggagaggggagacaaggaagagggtttggccctgcttcagggcccactgggtgggtaggtgtggggaggaagatggggacagatgggaggagagctcagagccagggttcacccaccgcccccaggcttcttcagatagtcaccaccaccccggccatcagtggagatttcccggaaaacagtgagcatggagtgccggactctgtcagccagagctgggacgtcatctggtgtcagcccttccgtgggcactgggggcagcacccgcacctgacattgtcctggggcaaggggagcaccatcatggcctgtccacccaggtctttgcccacaggtggggcccagcttccgagtgatactcttcctcaacctttcagttctcttcccccaaccctggacaaccatccctgggcttgccagctgccacttctgaggcccttctcctatacaaagccttctccaatccccagttcagacatctcctcagcacccctccagcccccctcctctgggtttggcatttactgctgaatgagtgttattca

SEQ ID NO: 14951 - protein, 293 aa, Homo sapiens; identical to SEQ ID NO: 1658

SEQ ID NO: 14952 - DNA, 1216 bp, Homo sapiens
ctgcttctgctgaggctggtctgcttgaagcctcccaggagaaagaagccagcctgtagggtccagcgtcaaagcgaatcatggggtccagggctgagctgtgcactctcttaggcggattctccttcctcctgctactgataccaggcgagggggccaagggtggatccctcagagagagtcagggagtctgctccaagcagacactggtggtcccgctccactacaacgagtcctacagccaaccagtgtacaagccctacctgaccttgtgcgctgggaggcgcatctgcagcacttacaggaccatgtaccgcgttatgtggcgggaggtgaggcgggaggttcagcagacccatgcagtgtgctgccagggctggaagaagcggcacccgggggcgctcacctgtgaagccatctgcgccaagccttgcctgaacggaggcgtctgcgttaggcctgaccagtgcgagtgcgcccccggctggggagggaagcactgtcatgtggacgtggatgaatgtaggaccagcatcaccctctgctcgcaccattgttttaatacggcaggcagcttcacctgcggctgcccccatgacctagtgctaggcgtggacgggcgcacctgcatggaggggtccccagagcccccaaccagtgccagcatactcagcgtggccgttcgggaggcggaaaaagatgagcgcgctctgaagcaggagattcacgagctgcgagggcgcctggagcggctggagcagtgggccggtcaggctggggcctgggtcagagcggtgctgcccgtgccgcctgaagagctgcagccagaacaggtggctgagctgtggggccggggtgaccggatcgaatctctcagcgaccaggtgctgctgctggaggagaggctaggtgcctgctcctgtgaggacaacagcctgggcctcggcgtcaatcatcgataagaagcctctacagcacccctgccccctaatttatacagaaaccggacccactaatcctctgggattggccgactgtgagctgcagataaggctatcagccaccaaagagcaatgaacaatggaaacttcagagagctgaagaaagggggaggcctgtgttcttggcctgcccctgagtcttctggctgggggcaggttgcctgggcaagaactgcttcttcaattccttaacaaatgcaaccaccaacacccag

SEQ ID NO: 14953 - protein, 293 aa, Homo sapiens; identical to SEQ ID NO: 1658

SEQ ID NO: 14954 - DNA, 1283 bp, Homo sapiens
ctgcttctgctgaggctggtctgcttgaagcctcccaggagaaagaagccagcctgtagggtccagcgtcaaagcgaatcatggggtccagggctgagctgtgcactctcttaggcggattctccttcctcctgctactgataccaggcgagggggccaagggtggatccctcagagagagtcagggagtctgctccaagcagacactggtggtcccgctccactacaacgagtcctacagccaaccagtgtacaagccctacctgaccttgtgcgctgggaggcgcatctgcagcacttacaggaccatgtaccgcgttatgtggcgggaggtgaggcgggaggttcagcagacccatgcagtgtgctgccagggctggaagaagcggcacccgggggcgctcacctgtgaagccatctgcgccaagccttgcctgaacggaggcgtctgcgttaggcctgaccagtgcgagtgcgcccccggctggggagggaagcactgtcatgtggacgtggatgaatgtaggaccagcatcaccctctgctcgcaccattgttttaatacggcaggcagcttcacctgcggctgcccccatgacctagtgctaggcgtggacgggcgcacctgcatggaggggtccccagagcccccaaccagtgccagcatactcagcgtggccgttcgggaggcggaaaaagatgagcgcgctctgaagcaggagattcacgagctgcgagggcgcctggagcggctggagcagtgggccggtcaggctggggcctgggtcagagcggtgctgcccgtgccgcctgaagagctgcagccagaacaggtggctgagctgtggggccggggtgaccggatcgaatctctcagcgaccaggtgctgctgctggaggagaggctaggtgcctgctcctgtgaggacaacagcctgggcctcggcgtcaatcatcgataagaagcctctacagcacccctgccccctaatttatacagaaaccggacccactaatcctctgggattggccgactgtgagctgcagataaggctatcagccaccaaagagcaatgaacaatggaaacttcagagagctgaagaaagggggaggcctgtgttcttggcctgcccctgagtcttctggctgggggcaggttgcctgggcaagaactgcttcttcaattccttaacaaatgcaaccaccaacacccagatctctctctctctttattttcagtttttttgctgttatccagataattaataaaaaccaaccacgc

SEQ ID NO: 14955 - protein, 293 aa, Homo sapiens; identical to SEQ ID NO: 1658

SEQ ID NO: 14956 - DNA, 2437 bp, Homo sapiens
ttataagagggcatgttaaagacaggagggttggccaggcatggtggctcacacctgtaatcccagcactttgggaggccaaggcaggcggatcacctgaagtcgggagttcgagaccagcctgaccaacatggagaaaccccgtctctactaaaaatacaaaacaaaattagccgggcgtggtggcaggcgcctgtagtcccagctactcgggaggctgaggcaggagaatggcatgaacccgggaggcggagcttgcagcaagccgagatcgcaccactgcactccagccagggtgacagcgagactccgtctcaaaaaacaacaacaaaaaaaaaaccaaaaaaaaaaaaccctagctatataccctcacaccctacaaaacaaaacaaaacaaaattagccaggcgtggtggcgcatgcctgtaatcccagctatttgggaggctgaggcaggagaatcacttgaacctggggggcggaggtcgtgcggtgaggcaagaacatgccattgcattccagcctgggtagtaagagcgaaactccttctcaaaaacaaaaacaaaaaaaaacccaaaaaaagacaggagggtcataaggggagggttgactgtgtgtccctccaggttgtgcagaggggattagaagtaagtaggttagaggggaggtggagggagtgtgctggggtgtgagcttttatgatgctgaaaggatcatgatatgctaaggacaggatagtgttgggttgtacacacaggtgtaggcaatcctggtggctagtatgtaaaagtgaatgtcctgactcccttagagggtacctgcagagtgcccttggagggactagtgctggagaaattaataggagaggggacgggcatccattaaccttttcttgcctgcagcctgtagggtccagcgtcaaagcgaatcatggggtccagggctgagctgtgcactctcttaggcggattctccttcctcctgctactgataccaggcgagggggccaagggtggatccctcagagagaggtgacaacagagggggtagggcccggggtgagctcttctcaggagccttctgctgggggtggggcttcacaggaggcaaaacataactgtaagtttagaatgggggtgagaggctgtcatctggagggagagcggggggcctcagtagcctcttgagggaagtgggactcctggctccccagggcctggcctactcaatctctcccacctcatcctctggcatggacgcagtcagggagtctgctccaagcagacactggtggtcccgctccactacaacgagtcctacagccaaccagtgtacaagccctacctgaccttgtgcgctgggaggcgcatctgcagcacttacaggaccatgtaccgcgttatgtggcgggaggtgaggcgggaggttcagcagacccatgcagtgtgctgccagggctggaagaagcggcacccgggggcgctcacctgtgaagccatctgcgccaagccttgcctgaacggaggcgtctgcgttaggcctgaccagtgcgagtgcgcccccggctggggagggaagcactgtcatgtggacgtggatgaatgtaggaccagcatcaccctctgctcgcaccattgttttaatacggcaggcagcttcacctgcggctgcccccatgacctagtgctaggcgtggacgggcgcacctgcatggaggggtccccagagcccccaaccagtgccagcatactcagcgtggccgttcgggaggcggaaaaagatgagcgcgctctgaagcaggagattcacgagctgcgagggcgcctggagcggctggagcaggtgagccaagcctgctgggtggggcgaggccagacgtcactgtcaataccctgaggcatctcttcctttctagtgggccggtcaggctggggcctgggtcagagcggtgctgcccgtgccgcctgaagagctgcagccagaacaggtggctgagctgtggggccggggtgaccggatcgaatctctcagcgaccaggtgctgctgctggaggagaggctaggtgcctgctcctgtgaggacaacagcctgggcctcggcgtcaatcatcgataagaagcctctacagcacccctgccccctaatttatacagaaaccggacccactaatcctctgggattggccgactgtgagctgcagataaggctatcagccaccaaagagcaatgaacaatggaaacttcagagagctgaagaaagggggaggcctgtgttcttggcctgcccctgagtcttctggctgggggcaggttgcctgggcaagaactgcttcttcaattccttaacaaatgcaaccaccaacacccagatctctctctctctttattttcagtttttttgctgttatccagataattaataaaaaccaaccacgc

SEQ ID NO: 14957 - protein, 168 aa, Homo sapiens [sequence omitted]

SEQ ID NO: 14958 - DNA, 3872 bp, Homo sapiens
ttataagagggcatgttaaagacaggagggttggccaggcatggtggctcacacctgtaatcccagcactttgggaggccaaggcaggcggatcacctgaagtcgggagttcgagaccagcctgaccaacatggagaaaccccgtctctactaaaaatacaaaacaaaattagccgggcgtggtggcaggcgcctgtagtcccagctactcgggaggctgaggcaggagaatggcatgaacccgggaggcggagcttgcagcaagccgagatcgcaccactgcactccagccagggtgacagcgagactccgtctcaaaaaacaacaacaaaaaaaaaaccaaaaaaaaaaaaccctagctatataccctcacaccctacaaaacaaaacaaaacaaaattagccaggcgtggtggcgcatgcctgtaatcccagctatttgggaggctgaggcaggagaatcacttgaacctggggggcggaggtcgtgcggtgaggcaagaacatgccattgcattccagcctgggtagtaagagcgaaactccttctcaaaaacaaaaacaaaaaaaaacccaaaaaaagacaggagggtcataaggggagggttgactgtgtgtccctccaggttgtgcagaggggattagaagtaagtaggttagaggggaggtggagggagtgtgctggggtgtgagcttttatgatgctgaaaggatcatgatatgctaaggacaggatagtgttgggttgtacacacaggtgtaggcaatcctggtggctagtatgtaaaagtgaatgtcctgactcccttagagggtacctgcagagtgcccttggagggactagtgctggagaaattaataggagaggggacgggcatccattaaccttttcttgcctgcagcctgtagggtccagcgtcaaagcgaatcatggggtccagggctgagctgtgcactctcttaggcggattctccttcctcctgctactgataccaggcgagggggccaagggtggatccctcagagagaggtgacaacagagggggtagggcccggggtgagctcttctcaggagccttctgctgggggtggggcttcacaggaggcaaaacataactgtaagtttagaatgggggtgagaggctgtcatctggagggagagcggggggcctcagtagcctcttgagggaagtgggactcctggctccccagggcctggcctactcaatctctcccacctcatcctctggcatggacgcagtcagggagtctgctccaagcagacactggtggtcccgctccactacaacgagtcctacagccaaccagtgtacaagccctacctgaccttgtgcgctgggaggcgcatctgcagcacttacaggaccatgtaccgcgttatgtggcgggaggtgaggcgggaggttcagcagacccatgcagtgtgctgccagggctggaagaagcggcacccgggggcgctcacctgtgaagccatctgcgccaagccttgcctgaacggaggcgtctgcgttaggcctgaccagtgcgagtgcgcccccggctggggagggaagcactgtcatgtggacgtggatgaatgtaggaccagcatcaccctctgctcgcaccattgttttaatacggcaggcagcttcacctgcggctgcccccatgacctagtgctaggcgtggacgggcgcacctgcatggaggggtccccagagcccccaaccagtgccagcatactcagcgtggccgttcgggaggcggaaaaagatgagcgcgctctgaagcaggagattcacgagctgcgagggcgcctggagcggctggagcaggtgagccaagcctgctgggtggggcgaggccagacgtcactgtcaataccctgaggcatctcttcctttctagtgggccggtcaggctggggcctgggtcagagcggtgctgcccgtgccgcctgaagagctgcagccagaacaggtggctgagctgtggggccggggtgaccggatcgaatctctcagcgaccaggtgctgctgctggaggagaggctaggtgcctgctcctgtgaggacaacagcctgggcctcggcgtcaatcatcgataagaagcctctacagcacccctgccccctaatttatacagaaaccggacccactaatcctctgggattggccgactgtgagctgcagataaggctatcagccaccaaagagcaatgaacaatggaaacttcagagagctgaagaaagggggaggcctgtgttcttggcctgcccctgagtcttctggctgggggcaggttgcctgggcaagaactgcttcttcaattccttaacaaatgcaaccaccaacacccagatctctctctctctttattttcagtttttttgctgttatccagataattaataaaaaccaaccacgcaaaactgggtcccaccctctccttttgctcccagcctacctccccagttgtgggaacaggtctggagtgagaggcagggagtggctaatgccaccaggaagaaatgaaaactggctcagagagggggaagcctcaacagaaaaagaaataaattaaaagccctcctatcccctccagccagggttcgttcctttccccaactccccagggggcagaagtgagtgcagcacctgatgtctgcttcttccccttgtgtctggtgagatggtgcagcagggctgcagggggctgggtggggtcatgtccactgaagaactgtactatggggacagaaaaccagaaatgtggagactgaactggtatcccagagagtgcacgaccctgggcatctgggcaagggcaggcatgagacctctgaattagaagggtccagcccccactgacaggaggctacactgggagggaaggtgaaggtgctgaggaaagctcccatgatgagcctgggagtgcttcaggtatcagcttccagccagagggcgagaagtcctcctcacaaatggatgagtccattgaatccatggactttggagtgggggggatttgttccaaagaatggatgagtccactggccaatgtggggtagaggggtagagaagaccacataggaagagactccactggggatggaatgttcccctcccttgtgtaggctgagtcactggagatgagggggaggcaactgtcccacagacaagacagtaggaggtgggggtcaagagtggagactgcaccgaggcaagagtccatggatggggccaagagggggcaggagtggcgctgtatccacattcacttcagaagttgaagattccaaagaggagaataagtggggagaggggagacaaggaagagggtttggccctgcttcagggcccactgggtgggtaggtgtggggaggaagatggggacagatgggaggagagctcagagccagggttcacccaccgcccccaggcttcttcagatagtcaccaccaccccggccatcagtggagatttcccggaaaacagtgagcatggagtgccggactctgtcagccagagctgggacgtcatctggtgtcagcccttccgtgggcactgggggcagcacccgcacctgacattgtcctggggcaaggggagcaccatcatggcctgtccacccaggtctttgcccacaggtggggcccagcttccgagtgatactcttcctcaacctttcagttctcttcccccaaccctggacaaccatccctgggcttgccagctgccacttctgaggcccttctcctatacaaagccttctccaatccccagttcagacatctcctcagcacccctccagcccccctcctctgggtttggcatttactgctgaatgagtgttattca

SEQ ID NO: 14959 - protein, 168 aa, Homo sapiens [sequence omitted]

SEQ ID NO: 14960 - DNA, 533 bp, Homo sapiens
ctcttaggcggattctccttcctcctgctactgataccagtcagggagtctgctccaagcagacactggtggtcccgctccactacaacgagtcctacagccaaccagtgtacaagccctacctgaccttgtgcgctgggaggcgcatctgcagcacttacaggaccatgtaccgcgttatgtggcgggaggtgaggcgggaggttcagcagacccatgcagtgtgctgccagggctggaagaagcggcacccgggggcgctcacctgtgaagccatctgcgccaagccttgcctgaacggaggcgtctgcgttaggcctgaccagtgcgagtgcgcccccggctggggagggaagcactgtcatgtgggtgagtcagcttgtcctccccacctacccaggtgcttgcccccgccccctctctcagccccttccttttttcggtaactagacgtggatgaatgtaggaccagcatcaccctctgctcgcaccattgttttaatacggcaggcagcttcacctgcggctgcccc

SEQ ID NO: 14961 - protein, 92 aa, Homo sapiens
MYRVMWREVRREVQQTHAVCCQGWKKRHPGALTCEAICAKPCLNGGVCVRPDQCECAPGWGGKHCHVGESACPPHLPRCLPPPPLSAPSFFR

SEQ ID NO: 14962 - DNA, 281 bp, Homo sapiens
aaccagtgccagcatactcagcgtggccgttcgggaggcggaaaaagatgagcgcgctctgaagcaggagattcacgagctgcgagggcgcctggagcggtgtgagctgcagataaggctatcagccaccaaagagcaatgaacaatggaaacttcagagagctgaagaaagggggaggcctgtgttcttggcctgcccctgagtcttctggctgggggcaggttgcctgggcaagaactgcttcttcaattccttaacaaatgcaaccaccaacacccag

SEQ ID NO: 14963 - protein, 39 aa, Homo sapiens
MNNGNFRELKKGGGLCSWPAPESSGWGQVAWARTASSIP

SEQ ID NO: 14964 - DNA, 1783 bp, Homo sapiens
aaccagtgccagcatactcagcgtggccgttcgggaggcggaaaaagatgagcgcgctctgaagcaggagattcacgagctgcgagggcgcctggagcggtgtgagctgcagataaggctatcagccaccaaagagcaatgaacaatggaaacttcagagagctgaagaaagggggaggcctgtgttcttggcctgcccctgagtcttctggctgggggcaggttgcctgggcaagaactgcttcttcaattccttaacaaatgcaaccaccaacacccagatctctctctctctttattttcagtttttttgctgttatccagataattaataaaaaccaaccacgcaaaactgggtcccaccctctccttttgctcccagcctacctccccagttgtgggaacaggtctggagtgagaggcagggagtggctaatgccaccaggaagaaatgaaaactggctcagagagggggaagcctcaacagaaaaagaaataaattaaaagccctcctatcccctccagccagggttcgttcctttccccaactccccagggggcagaagtgagtgcagcacctgatgtctgcttcttccccttgtgtctggtgagatggtgcagcagggctgcagggggctgggtggggtcatgtccactgaagaactgtactatggggacagaaaaccagaaatgtggagactgaactggtatcccagagagtgcacgaccctgggcatctgggcaagggcaggcatgagacctctgaattagaagggtccagcccccactgacaggaggctacactgggagggaaggtgaaggtgctgaggaaagctcccatgatgagcctgggagtgcttcaggtatcagcttccagccagagggcgagaagtcctcctcacaaatggatgagtccattgaatccatggactttggagtgggggggatttgttccaaagaatggatgagtccactggccaatgtggggtagaggggtagagaagaccacataggaagagactccactggggatggaatgttcccctcccttgtgtaggctgagtcactggagatgagggggaggcaactgtcccacagacaagacagtaggaggtgggggtcaagagtggagactgcaccgaggcaagagtccatggatggggccaagagggggcaggagtggcgctgtatccacattcacttcagaagttgaagattccaaagaggagaataagtggggagaggggagacaaggaagagggtttggccctgcttcagggcccactgggtgggtaggtgtggggaggaagatggggacagatgggaggagagctcagagccagggttcacccaccgcccccaggcttcttcagatagtcaccaccaccccggccatcagtggagatttcccggaaaacagtgagcatggagtgccggactctgtcagccagagctgggacgtcatctggtgtcagcccttccgtgggcactgggggcagcacccgcacctgacattgtcctggggcaaggggagcaccatcatggcctgtccacccaggtctttgcccacaggtggggcccagcttccgagtgatactcttcctcaacctttcagttctcttcccccaaccctggacaaccatccctgggcttgccagctgccacttctgaggcccttctcctatacaaagccttctccaatccccagttcagacatctcctcagcacccctccagcccccctcctctgggtttggcatttactgctgaatgagtgttattca

SEQ ID NO: 14965 - protein, 203 aa, Homo sapiens [sequence omitted]

SEQ ID NO: 14966 - DNA, 1083 bp, Homo sapiens
aggaaagataaggcctgtgtgcacaaagctgtaatgaataacactcattcagcagtaaatgccaaacccagaggaggggggctggaggggtgctgaggagatgtctgaactggggattggagaaggctttgtataggagaagggcctcagaagtggcagctggcaagcccagggatggttgtccagggttgggggaagagaactgaaaggttgaggaagagtatcactcggaagctgggccccacctgtgggcaaagacctgggtggacaggccatgatggtgctccccttgccccaggacaatgtcaggtgcgggtgctgcccccagtgcccacggaagggctgacaccagatgacgtcccagctctggctgacagagtccggcactccatgctcactgttttccgggaaatctccactgatggccggggtggtggtgactatctgaagaagcctgggggcggtgggtgaaccctggctctgagctctcctcccatctgtccccatcttcctccccacacctacccacccagtgggccctgaagcagggccaaaccctcttccttgtctcccctctccccacttattctcctctttggaatcttcaacttctgaagtgaatgtggatacagcgccactcctgcccccttggggagttggggaaaggaacgaaccctggctggaggggataggagggcttttaatttatttctttttctgttgaggcttccccctctctgagccagttttcatttcttcctggtggcattagccactccctgcctctcactccagacctgttcccacaactggggaggtaggctgggagcaaaaggagagggtgggacccagttttgcgtggttggtttttattaattatctggataacagcaaaaaaactgaaaataaagagagagagagatctgggtgttggtggttgcatttgttaaggaattgaagaagcagttcttgcccaggcaacctgcccccagccagaagactcaggggcaggccaagaacacaggcctccccctttcttcagctctctgaagtttccattgttcattgctctttggtggctga

SEQ ID NO: 14967 - protein, 98 aa, Homo sapiens
MVVQGWGKRTERLRKSITRKLGPTCGQRPGWTGHDGAPLAPGQCQVRVLPPVPTEGLTPDDVPALADRVRHSMLTVFREISTDGRGGGDYLKKPGGGG

SEQ ID NO: 14968 - DNA, 1541 bp, Homo sapiens
aggaaagataaggcctgtgtgcacaaagctgtaatgaataacactcattcagcagtaaatgccaaacccagaggaggggggctggaggggtgctgaggagatgtctgaactggggattggagaaggctttgtataggagaagggcctcagaagtggcagctggcaagcccagggatggttgtccagggttgggggaagagaactgaaaggttgaggaagagtatcactcggaagctgggccccacctgtgggcaaagacctgggtggacaggccatgatggtgctccccttgccccaggacaatgtcaggtgcgggtgctgcccccagtgcccacggaagggctgacaccagatgacgtcccagctctggctgacagagtccggcactccatgctcactgttttccgggaaatctccactgatggccggggtggtggtgactatctgaagaagcctgggggcggtgggtgaaccctggctctgagctctcctcccatctgtccccatcttcctccccacacctacccacccagtgggccctgaagcagggccaaaccctcttccttgtctcccctctccccacttattctcctctttggaatcttcaacttctgaagtgaatgtggatacagcgccactcctgccccctcttggccccatccatggactcttgcctcggtgcagtctccactcttgacccccacctcctactgtcttgtctgtgggacagttgcctccccctcatctccagtgactcagcctacacaagggaggggaacattccatccccagtggagtctcttcctatgtggtcttctctacccctctaccccacattggccagtggactcatccattctttggaacaaatcccccccactccaaagtccatggattcaatggactcatccatttgtgaggaggacttctcgccctctggctggaagctgatacctgaagcactcccaggctcatcatgggagctttcctcagcaccttcaccttccctcccagtgtagcctccagccccctgcagccctgctgcaccatctcaccagacacaaggggaagaagcagacatcaggtgctgcactcacttctgccccctggggagttggggaaaggaacgaaccctggctggaggggataggagggcttttaatttatttctttttctgttgaggcttccccctctctgagccagttttcatttcttcctggtggcattagccactccctgcctctcactccagacctgttcccacaactggggaggtaggctgggagcaaaaggagagggtgggacccagttttgcgtggttggtttttattaattatctggataacagcaaaaaaactgaaaataaagagagagagagatctgggtgttggtggttgcatttgttaaggaattgaagaagcagttcttgcccaggcaacctgcccccagccagaagactcaggggcaggccaagaacacaggcctccccctttcttcagctctctgaagtttccattgttcattgctctttggtggctga

SEQ ID NO: 14969 - protein, 57 aa, Homo sapiens
MGAFLSTFTFPPSVASSPLQPCCTISPDTRGRSRHQVLHSLLPPGELGKGTNPGWRG

SEQ ID NO: 14970 - DNA, 2161 bp, Homo sapiens
gtaatggagtggttaggaacacaggcggcttagatttaacctagaaactgctgtttaggagctgtatgacctcaggtggccagaatggatttgtggccaggggcatggatgctgctgctgctgctcttcctgctgctgctcttcctgctgcccaccctgtggttctgcagccccagtgccaagtacttcttcaagatggccttctacaatggctggatcctcttcctggctgtgctcgccatccctgtgtgtgccgtgcgaggacgcaacgtcgagaacatgaagatcttgcgtctaatgctgctccacatcaaatacctgtacgggatccgagtggaggtgcgaggggctcaccacttccctccctcgcagccctatgttgttgtctccaaccaccagagctctctcgatctgcttgggatgatggaggtactgccaggccgctgtgtgcccattgccaagcgcgagctactgtgggctggctctgccgggctggcctgctggctggcaggagtcatcttcatcgaccggaagcgcacgggggatgccatcagtgtcatgtctgaggtcgcccagaccctgctcacccaggacgtgagggtctgggtgtttcctgagggaacgagaaaccacaatggctccatgctgcccttcaaacgtggcgccttccatcttgcagtgcaggcccaggttcccattgtccccatagtcatgtcctcctaccaagacttctactgcaagaaggagcgtcgcttcacctcgggacaatgtcaggtgcgggtgctgcccccagtgcccacggaagggctgacaccagatgacgtcccagctctggctgacagagtccggcactccatgctcactgttttccgggaaatctccactgatggccggggtggtggtgactatctgaagaagcctgggggcggtgggtgaaccctggctctgagctctcctcccatctgtccccatcttcctccccacacctacccacccagtgggccctgaagcagggccaaaccctcttccttgtctcccctctccccacttattctcctctttggaatcttcaacttctgaagtgaatgtggatacagcgccactcctgccccctcttggccccatccatggactcttgcctcggtgcagtctccactcttgacccccacctcctactgtcttgtctgtgggacagttgcctccccctcatctccagtgactcagcctacacaagggaggggaacattccatccccagtggagtctcttcctatgtggtcttctctacccctctaccccacattggccagtggactcatccattctttggaacaaatcccccccactccaaagtccatggattcaatggactcatccatttgtgaggaggacttctcgccctctggctggaagctgatacctgaagcactcccaggctcatcatgggagctttcctcagcaccttcaccttccctcccagtgtagcctcctgtcagtgggggctggacccttctaattcagaggtctcatgcctgcccttgcccagatgcccagggtcgtgcactctctgggataccagttcagtctccacatttctggttttctgtccccatagtacagttcttcagtggacatgaccccacccagccccctgcagccctgctgcaccatctcaccagacacaaggggaagaagcagacatcaggtgctgcactcacttctgccccctggggagttggggaaaggaacgaaccctggctggaggggataggagggcttttaatttatttctttttctgttgaggcttccccctctctgagccagttttcatttcttcctggtggcattagccactccctgcctctcactccagacctgttcccacaactggggaggtaggctgggagcaaaaggagagggtgggacccagttttgcgtggttggtttttattaattatctggataacagcaaaaaaactgaaaataaagagagagagagatctgggtgttggtggttgcatttgttaaggaattgaagaagcagttcttgcccaggcaacctgcccccagccagaagactcaggggcaggccaagaacacaggcctccccctttcttcagctctctgaagtttccattgttcattgctctttggtggctga

SEQ ID NO: 14971 - protein, 283 aa, Homo sapiens; identical to SEQ ID NO: 1660

SEQ ID NO: 14972 - DNA, 2241 bp, Homo sapiens
ggggaggggtggcgggggaatagcggcggcagcagccccagccctcagagagacagcagaaagggagggagggagggtgctggggggacagccccccaccattcctaccgctatgggcccaacctcccactcccacctcccctccatcggccggggctaggacacccccaaatcccgtcgcccccttggcaccgacaccccgacagagacagagacacagccatccgccaccaccgctgccgcagcctggctggggagggggccagccccccaggccccctacccctctgaggtggccagaatggatttgtggccaggggcatggatgctgctgctgctgctcttcctgctgctgctcttcctgctgcccaccctgtggttctgcagccccagtgccaagtacttcttcaagatggccttctacaatggctggatcctcttcctggctgtgctcgccatccctgtgtgtgccgtgcgaggacgcaacgtcgagaacatgaagatcttgcgtctaatgctgctccacatcaaatacctgtacgggatccgagtggaggtgcgaggggctcaccacttccctccctcgcagccctatgttgttgtctccaaccaccagagctctctcgatctgcttgggatgatggaggtactgccaggccgctgtgtgcccattgccaagcgcgagctactgtgggctggctctgccgggctggcctgctggctggcaggagtcatcttcatcgaccggaagcgcacgggggatgccatcagtgtcatgtctgaggtcgcccagaccctgctcacccaggacgtgagggtctgggtgtttcctgagggaacgagaaaccacaatggctccatgctgcccttcaaacgtggcgccttccatcttgcagtgcaggcccaggttcccattgtccccatagtcatgtcctcctaccaagacttctactgcaagaaggagcgtcgcttcacctcgggacaatgtcaggtgcgggtgctgcccccagtgcccacggaagggctgacaccagatgacgtcccagctctggctgacagagtccggcactccatgctcactgttttccgggaaatctccactgatggccggggtggtggtgactatctgaagaagcctgggggcggtgggtgaaccctggctctgagctctcctcccatctgtccccatcttcctccccacacctacccacccagtgggccctgaagcagggccaaaccctcttccttgtctcccctctccccacttattctcctctttggaatcttcaacttctgaagtgaatgtggatacagcgccactcctgccccctcttggccccatccatggactcttgcctcggtgcagtctccactcttgacccccacctcctactgtcttgtctgtgggacagttgccccccccactccaaagtccatggattcaatggactcatccatttgtgaggaggacttctcgccctctggctggaagctgatacctgaagcactcccaggctcatcatgggagctttcctcagcaccttcaccttccctcccagtgtagcctcctgtcagtgggggctggacccttctaattcagaggtctcatgcctgcccttgcccagatgcccagggtcgtgcactctctgggataccagttcagtctccacatttctggttttctgtccccatagtacagttcttcagtggacatgaccccacccagccccctgcagccctgctgcaccatctcaccagacacaaggggaagaagcagacatcaggtgctgcactcacttctgccccctggggagttggggaaaggaacgaaccctggctggaggggataggagggcttttaatttatttctttttctgttgaggcttccccctctctgagccagttttcatttcttcctggtggcattagccactccctgcctctcactccagacctgttcccacaactggggaggtaggctgggagcaaaaggagagggtgggacccagttttgcgtggttggtttttattaattatctggataacagcaaaaaaactgaaaataaagagagagagagatctgggtgttggtggttgcatttgttaaggaattgaagaagcagttcttgcccaggcaacctgcccccagccagaagactcaggggcaggccaagaacacaggcctccccctttcttcagctctctgaagtttccattgttcattgctctttggtggctga

SEQ ID NO: 14973 - protein, 283 aa, Homo sapiens; identical to SEQ ID NO: 1660

SEQ ID NO: 14974 - DNA, 2378 bp, Homo sapiens
ggggaggggtggcgggggaatagcggcggcagcagccccagccctcagagagacagcagaaagggagggagggagggtgctggggggacagccccccaccattcctaccgctatgggcccaacctcccactcccacctcccctccatcggccggggctaggacacccccaaatcccgtcgcccccttggcaccgacaccccgacagagacagagacacagccatccgccaccaccgctgccgcagcctggctggggagggggccagccccccaggccccctacccctctgaggtggccagaatggatttgtggccaggggcatggatgctgctgctgctgctcttcctgctgctgctcttcctgctgcccaccctgtggttctgcagccccagtgccaagtacttcttcaagatggccttctacaatggctggatcctcttcctggctgtgctcgccatccctgtgtgtgccgtgcgaggacgcaacgtcgagaacatgaagatcttgcgtctaatgctgctccacatcaaatacctgtacgggatccgagtggaggtgcgaggggctcaccacttccctccctcgcagccctatgttgttgtctccaaccaccagagctctctcgatctgcttgggatgatggaggtactgccaggccgctgtgtgcccattgccaagcgcgagctactgtgggctggctctgccgggctggcctgctggctggcaggagtcatcttcatcgaccggaagcgcacgggggatgccatcagtgtcatgtctgaggtcgcccagaccctgctcacccaggacgtgagggtctgggtgtttcctgagggaacgagaaaccacaatggctccatgctgcccttcaaacgtggcgccttccatcttgcagtgcaggcccaggttcccattgtccccatagtcatgtcctcctaccaagacttctactgcaagaaggagcgtcgcttcacctcgggacaatgtcaggtgcgggtgctgcccccagtgcccacggaagggctgacaccagatgacgtcccagctctggctgacagagtccggcactccatgctcactgttttccgggaaatctccactgatggccggggtggtggtgactatctgaagaagcctgggggcggtgggtgaaccctggctctgagctctcctcccatctgtccccatcttcctccccacacctacccacccagtgggccctgaagcagggccaaaccctcttccttgtctcccctctccccacttattctcctctttggaatcttcaacttctgaagtgaatgtggatacagcgccactcctgccccctcttggccccatccatggactcttgcctcggtgcagtctccactcttgacccccacctcctactgtcttgtctgtgggacagttgcctccccctcatctccagtgactcagcctacacaagggaggggaacattccatccccagtggagtctcttcctatgtggtcttctctacccctctaccccacattggccagtggactcatccattctttggaacaaatcccccccactccaaagtccatggattcaatggactcatccatttgtgaggaggacttctcgccctctggctggaagctgatacctgaagcactcccaggctcatcatgggagctttcctcagcaccttcaccttccctcccagtgtagcctcctgtcagtgggggctggacccttctaattcagaggtctcatgcctgcccttgcccagatgcccagggtcgtgcactctctgggataccagttcagtctccacatttctggttttctgtccccatagtacagttcttcagtggacatgaccccacccagccccctgcagccctgctgcaccatctcaccagacacaaggggaagaagcagacatcaggtgctgcactcacttctgccccctggggagttggggaaaggaacgaaccctggctggaggggataggagggcttttaatttatttctttttctgttgaggcttccccctctctgagccagttttcatttcttcctggtggcattagccactccctgcctctcactccagacctgttcccacaactggggaggtaggctgggagcaaaaggagagggtgggacccagttttgcgtggttggtttttattaattatctggataacagcaaaaaaactgaaaataaagagagagagagatctgggtgttggtggttgcatttgttaaggaattgaagaagcagttcttgcccaggcaacctgcccccagccagaagactcaggggcaggccaagaacacaggcctccccctttcttcagctctctgaagtttccattgttcattgctctttggtggctga

SEQ ID NO: 14975 - protein, 283 aa, Homo sapiens; identical to SEQ ID NO: 1660

SEQ ID NO: 14976 - DNA, 2178 bp, Homo sapiens
gaaatagggtcttcttcccaggttggaccccggggagtttgggcttttcctacaatcactgaccctcactgtgactaaaggagcagaattaggtggccagaatggatttgtggccaggggcatggatgctgctgctgctgctcttcctgctgctgctcttcctgctgcccaccctgtggttctgcagccccagtgccaagtacttcttcaagatggccttctacaatggctggatcctcttcctggctgtgctcgccatccctgtgtgtgccgtgcgaggacgcaacgtcgagaacatgaagatcttgcgtctaatgctgctccacatcaaatacctgtacgggatccgagtggaggtgcgaggggctcaccacttccctccctcgcagccctatgttgttgtctccaaccaccagagctctctcgatctgcttgggatgatggaggtactgccaggccgctgtgtgcccattgccaagcgcgagctactgtgggctggctctgccgggctggcctgctggctggcaggagtcatcttcatcgaccggaagcgcacgggggatgccatcagtgtcatgtctgaggtcgcccagaccctgctcacccaggacgtgagggtctgggtgtttcctgagggaacgagaaaccacaatggctccatgctgcccttcaaacgtggcgccttccatcttgcagtgcaggcccaggttcccattgtccccatagtcatgtcctcctaccaagacttctactgcaagaaggagcgtcgcttcacctcgggacaatgtcaggtgcgggtgctgcccccagtgcccacggaagggctgacaccagatgacgtcccagctctggctgacagagtccggcactccatgctcactgttttccgggaaatctccactgatggccggggtggtggtgactatctgaagaagcctgggggcggtgggtgaaccctggctctgagctctcctcccatctgtccccatcttcctccccacacctacccacccagtgggccctgaagcagggccaaaccctcttccttgtctcccctctccccacttattctcctctttggaatcttcaacttctgaagtgaatgtggatacagcgccactcctgccccctcttggccccatccatggactcttgcctcggtgcagtctccactcttgacccccacctcctactgtcttgtctgtgggacagttgcctccccctcatctccagtgactcagcctacacaagggaggggaacattccatccccagtggagtctcttcctatgtggtcttctctacccctctaccccacattggccagtggactcatccattctttggaacaaatcccccccactccaaagtccatggattcaatggactcatccatttgtgaggaggacttctcgccctctggctggaagctgatacctgaagcactcccaggctcatcatgggagctttcctcagcaccttcaccttccctcccagtgtagcctcctgtcagtgggggctggacccttctaattcagaggtctcatgcctgcccttgcccagatgcccagggtcgtgcactctctgggataccagttcagtctccacatttctggttttctgtccccatagtacagttcttcagtggacatgaccccacccagccccctgcagccctgctgcaccatctcaccagacacaaggggaagaagcagacatcaggtgctgcactcacttctgccccctggggagttggggaaaggaacgaaccctggctggaggggataggagggcttttaatttatttctttttctgttgaggcttccccctctctgagccagttttcatttcttcctggtggcattagccactccctgcctctcactccagacctgttcccacaactggggaggtaggctgggagcaaaaggagagggtgggacccagttttgcgtggttggtttttattaattatctggataacagcaaaaaaactgaaaataaagagagagagagatctgggtgttggtggttgcatttgttaaggaattgaagaagcagttcttgcccaggcaacctgcccccagccagaagactcaggggcaggccaagaacacaggcctccccctttcttcagctctctgaagtttccattgttcattgctctttggtggctga

SEQ ID NO: 14977 - protein, 283 aa, Homo sapiens; identical to SEQ ID NO: 1660

SEQ ID NO: 14978 - DNA, 2609 bp, Homo sapiens
ttataatttgcccatcagaaatagggtcttcttcccaggttggaccccggggagtttgggcttttcctacaatcactgaccctcactgtgactaaaggagcagaattaggtaacagtcctcccactaccaatcctcttcccgagggcatgtaaactaatgcagggtaaaggtgtggctagaggggggaccttgataaaagatcccatgtgactcaagagtaaggaaagatgagaagttagcagttgcgtaaagaaggactggggcagatgaggattcaggaagcttgaggtttaggaaggaagatattgagagggaaaggtggaaatgaaggagagtgaagtgatggaatgatcctagtaaagggataatgggagtggaggaagagaagagggggtggaaaactagatacatggctaccaaattaaggaggcacgcgcattccagaggaatcggcattcttcctcactttttatttttctagaaagcacccctgaagccaaatttccattggaagaaaagatgtacccatattgtatgttgtgagaaggggttgtctcagcttgggcaagtaaggagactgatacgaaggaagtaggaaagaaaaggtacagaggtaaaagagcatggaaaaggaaagggtcagggataaggccaaagagatctcttctctttaaaggccagagaaggcaggtggaggggggagctggactgctgggagatagtgagggacaaagggcaaaggaaaccagaccagaggactggagagtgagatggagtgagatggagtcctggagagaaaaagaagagaggtgaacttaatgcttgtcatatggtggccagaatggatttgtggccaggggcatggatgctgctgctgctgctcttcctgctgctgctcttcctgctgcccaccctgtggttctgcagccccagtgccaagtacttcttcaagatggccttctacaatggctggatcctcttcctggctgtgctcgccatccctgtgtgtgccgtgcgaggacgcaacgtcgagaacatgaagtgagggtctgggtgtttcctgagggaacgagaaaccacaatggctccatgctgcccttcaaacgtggcgccttccatcttgcagtgcaggcccaggttcccattgtccccatagtcatgtcctcctaccaagacttctactgcaagaaggagcgtcgcttcacctcgggacaatgtcaggtgcgggtgctgcccccagtgcccacggaagggctgacaccagatgacgtcccagctctggctgacagagtccggcactccatgctcactgttttccgggaaatctccactgatggccggggtggtggtgactatctgaagaagcctgggggcggtgggtgaaccctggctctgagctctcctcccatctgtccccatcttcctccccacacctacccacccagtgggccctgaagcagggccaaaccctcttccttgtctcccctctccccacttattctcctctttggaatcttcaacttctgaagtgaatgtggatacagcgccactcctgccccctcttggccccatccatggactcttgcctcggtgcagtctccactcttgacccccacctcctactgtcttgtctgtgggacagttgcctccccctcatctccagtgactcagcctacacaagggaggggaacattccatccccagtggagtctcttcctatgtggtcttctctacccctctaccccacattggccagtggactcatccattctttggaacaaatcccccccactccaaagtccatggattcaatggactcatccatttgtgaggaggacttctcgccctctggctggaagctgatacctgaagcactcccaggctcatcatgggagctttcctcagcaccttcaccttccctcccagtgtagcctcctgtcagtgggggctggacccttctaattcagaggtctcatgcctgcccttgcccagatgcccagggtcgtgcactctctgggataccagttcagtctccacatttctggttttctgtccccatagtacagttcttcagtggacatgaccccacccagccccctgcagccctgctgcaccatctcaccagacacaaggggaagaagcagacatcaggtgctgcactcacttctgccccctggggagttggggaaaggaacgaaccctggctggaggggataggagggcttttaatttatttctttttctgttgaggcttccccctctctgagccagttttcatttcttcctggtggcattagccactccctgcctctcactccagacctgttcccacaactggggaggtaggctgggagcaaaaggagagggtgggacccagttttgcgtggttggtttttattaattatctggataacagcaaaaaaactgaaaataaagagagagagagatctgggtgttggtggttgcatttgttaaggaattgaagaagcagttcttgcccaggcaacctgcccccagccagaagactcaggggcaggccaagaacacaggcctccccctttcttcagctctctgaagtttccattgttcattgctctttggtggctga

SEQ ID NO: 14979 - protein, 173 aa, Homo sapiens
MDAAAAALPAAALPAAHPVVLQPQCQVLLQDGLLQWLDPLPGCARHPCVCRARTQRREHEVRVWVFPEGTRNHNGSMLPFKRGAFHLAVQAQVPIVPIVMSSYQDFYCKKERRFTSGQCQVRVLPPVPTEGLTPDDVPALADRVRHSMLTVFREISTDGRGGGDYLKKPGGGG

SEQ ID NO: 14980 - DNA, 2182 bp, Homo sapiens
tcctcttttagagaatgtccggattgctattggactttggagcgtatggctccaaatcaactcattggctaaaacttgacggaaaatggtggttaggtggccagaatggatttgtggccaggggcatggatgctgctgctgctgctcttcctgctgctgctcttcctgctgcccaccctgtggttctgcagccccagtgccaagtacttcttcaagatggccttctacaatggctggatcctcttcctggctgtgctcgccatccctgtgtgtgccgtgcgaggacgcaacgtcgagaacatgaagatcttgcgtctaatgctgctccacatcaaatacctgtacgggatccgagtggaggtgcgaggggctcaccacttccctccctcgcagccctatgttgttgtctccaaccaccagagctctctcgatctgcttgggatgatggaggtactgccaggccgctgtgtgcccattgccaagcgcgagctactgtgggctggctctgccgggctggcctgctggctggcaggagtcatcttcatcgaccggaagcgcacgggggatgccatcagtgtcatgtctgaggtcgcccagaccctgctcacccaggacgtgagggtctgggtgtttcctgagggaacgagaaaccacaatggctccatgctgcccttcaaacgtggcgccttccatcttgcagtgcaggcccaggttcccattgtccccatagtcatgtcctcctaccaagacttctactgcaagaaggagcgtcgcttcacctcgggacaatgtcaggtgcgggtgctgcccccagtgcccacggaagggctgacaccagatgacgtcccagctctggctgacagagtccggcactccatgctcactgttttccgggaaatctccactgatggccggggtggtggtgactatctgaagaagcctgggggcggtgggtgaaccctggctctgagctctcctcccatctgtccccatcttcctccccacacctacccacccagtgggccctgaagcagggccaaaccctcttccttgtctcccctctccccacttattctcctctttggaatcttcaacttctgaagtgaatgtggatacagcgccactcctgccccctcttggccccatccatggactcttgcctcggtgcagtctccactcttgacccccacctcctactgtcttgtctgtgggacagttgcctccccctcatctccagtgactcagcctacacaagggaggggaacattccatccccagtggagtctcttcctatgtggtcttctctacccctctaccccacattggccagtggactcatccattctttggaacaaatcccccccactccaaagtccatggattcaatggactcatccatttgtgaggaggacttctcgccctctggctggaagctgatacctgaagcactcccaggctcatcatgggagctttcctcagcaccttcaccttccctcccagtgtagcctcctgtcagtgggggctggacccttctaattcagaggtctcatgcctgcccttgcccagatgcccagggtcgtgcactctctgggataccagttcagtctccacatttctggttttctgtccccatagtacagttcttcagtggacatgaccccacccagccccctgcagccctgctgcaccatctcaccagacacaaggggaagaagcagacatcaggtgctgcactcacttctgccccctggggagttggggaaaggaacgaaccctggctggaggggataggagggcttttaatttatttctttttctgttgaggcttccccctctctgagccagttttcatttcttcctggtggcattagccactccctgcctctcactccagacctgttcccacaactggggaggtaggctgggagcaaaaggagagggtgggacccagttttgcgtggttggtttttattaattatctggataacagcaaaaaaactgaaaataaagagagagagagatctgggtgttggtggttgcatttgttaaggaattgaagaagcagttcttgcccaggcaacctgcccccagccagaagactcaggggcaggccaagaacacaggcctccccctttcttcagctctctgaagtttccattgttcattgctctttggtggctga

SEQ ID NO: 14981 - protein, 283 aa, Homo sapiens; identical to SEQ ID NO: 1660

SEQ ID NO: 14982 - DNA, 967 bp, Homo sapiens
gctgacaccagatgacgtcccagctctggctgacagagtccggcactccatgctcactgttttccgggaaatctccactgatggccggggtggtggtgactatctgaagaagcctgggggcggtgggtgaaccctggctctgagctctcctcccatctgtccccatcttcctccccacacctacccacccagtgggccctgaagcagggccaaaccctcttccttgtctcccctctccccacttattctcctctttggaatcttcaacttctgaagtgaatgtggatacagcgccactcctgccccctcttggccccatccatggactcttgcctcggtgcagtctccactcttgacccccacctcctactgtcttgtctgtgggacagttgcctcccctcatcatgggagctttcctcagcaccttcaccttccctcccagtgtagcctcctgtcagtgggggctggacccttctaattcagaggtctcatgcctgcccttgcccagatgcccagggtcgtgcactctctgggataccagttcagtctccacatttctggttttctgtccccatagtacagttcttcagtggacatgaccccacccagccccctgcagccctgctgcaccatctcaccagacacaaggggaagaagcagacatcaggtgctgcactcacttctgccccctggggagttggggaaaggaacgaaccctggctggaggggataggagggcttttaatttatttctttttctgttgaggcttccccctctctgagccagttttcatttcttcctggtggcattagccactccctgcctctcactccagacctgttcccacaactggggaggtaggctgggagcaaaaggagagggtgggacccagttttgcgtggttggtttttattaattatctggataacagcaaaaaaactgaaaataaagagagagagagatctg

SEQ ID NO: 14983 - protein, 55 aa, Homo sapiens
MWIQRHSCPLLAPSMDSCLGAVSTLDPHLLLSCLWDSCLPSSWELSSAPSPSLPV

SEQ ID NO: 14984 - DNA, 1384 bp, Homo sapiens
aggaaagataaggcctgtgtgcacaaagctgtaatgaataacactcattcagcagtaaatgccaaacccagaggaggggggctggaggggtgctgaggagatgtctgaactggggattggagaaggctttgtataggagaagggcctcagaagtggcagctggcaagcccagggatggttgtccagggttgggggaagagaactgaaaggttgaggaagagtatcactcggaagctgggccccacctgtgggcaaagacctgggtggacaggccatgatggtgctccccttgccccaggacaatgtcaggtgcgggtgctgcccccagtgcccacggaagggctgacaccagatgacgtcccagctctggctgacagagtccggcactccatgctcactgttttccgggaaatctccactgatggccggggtggtggtgactatctgaagaagcctgggggcggtgggtgaaccctggctctgagctctcctcccatctgtccccatcttcctccccacacctacccacccagtgggccctgaagcagggccaaaccctcttccttgtctcccctctccccacttattctcctctttggaatcttcaacttctgaagtgaatgtggatacagcgccactcctgccccctcttggccccatccatggactcttgcctcggtgcagtctccactcttgacccccacctcctactgtcttgtctgtgggacagttgcctccccctcatctccagtgactcagcctacacaagggaggggaacattccatccccagtggagtctcttcctatgtggtcttctctacccctctaccccacattggccagtggactcatccattctttggaacaaatcccccccactccaaagtccatggattcaatggactcatccatttgtgaggaggacttctcgccctctggctggaagctgatacctgaagcactcccaggctcatcatgggagctttcctcagcaccttcaccttccctcccagtgtagcctccagccccctgcagccctgctgcaccatctcaccagacacaaggggaagaagcagacatcaggtgctgcactcacttctgccccctggggagttggggaaaggaacgaaccctggctggaggggataggagggcttttaatttatttctttttctgttgaggcttccccctctctgagccagttttcatttcttcctggtggcattagccactccctgcctctcactccagacctgttcccacaactggggaggtaggctgggagcaaaaggagagggtgggacccagttttgcgtggttggtttttattaattatctggataacagcaaaaaaactgaaaataaagagagagagagatctg

SEQ ID NO: 14985 - protein, 57 aa, Homo sapiens; identical to SEQ ID NO: 14969

SEQ ID NO: 14986 - DNA, 2004 bp, Homo sapiens
gtaatggagtggttaggaacacaggcggcttagatttaacctagaaactgctgtttaggagctgtatgacctcaggtggccagaatggatttgtggccaggggcatggatgctgctgctgctgctcttcctgctgctgctcttcctgctgcccaccctgtggttctgcagccccagtgccaagtacttcttcaagatggccttctacaatggctggatcctcttcctggctgtgctcgccatccctgtgtgtgccgtgcgaggacgcaacgtcgagaacatgaagatcttgcgtctaatgctgctccacatcaaatacctgtacgggatccgagtggaggtgcgaggggctcaccacttccctccctcgcagccctatgttgttgtctccaaccaccagagctctctcgatctgcttgggatgatggaggtactgccaggccgctgtgtgcccattgccaagcgcgagctactgtgggctggctctgccgggctggcctgctggctggcaggagtcatcttcatcgaccggaagcgcacgggggatgccatcagtgtcatgtctgaggtcgcccagaccctgctcacccaggacgtgagggtctgggtgtttcctgagggaacgagaaaccacaatggctccatgctgcccttcaaacgtggcgccttccatcttgcagtgcaggcccaggttcccattgtccccatagtcatgtcctcctaccaagacttctactgcaagaaggagcgtcgcttcacctcgggacaatgtcaggtgcgggtgctgcccccagtgcccacggaagggctgacaccagatgacgtcccagctctggctgacagagtccggcactccatgctcactgttttccgggaaatctccactgatggccggggtggtggtgactatctgaagaagcctgggggcggtgggtgaaccctggctctgagctctcctcccatctgtccccatcttcctccccacacctacccacccagtgggccctgaagcagggccaaaccctcttccttgtctcccctctccccacttattctcctctttggaatcttcaacttctgaagtgaatgtggatacagcgccactcctgccccctcttggccccatccatggactcttgcctcggtgcagtctccactcttgacccccacctcctactgtcttgtctgtgggacagttgcctccccctcatctccagtgactcagcctacacaagggaggggaacattccatccccagtggagtctcttcctatgtggtcttctctacccctctaccccacattggccagtggactcatccattctttggaacaaatcccccccactccaaagtccatggattcaatggactcatccatttgtgaggaggacttctcgccctctggctggaagctgatacctgaagcactcccaggctcatcatgggagctttcctcagcaccttcaccttccctcccagtgtagcctcctgtcagtgggggctggacccttctaattcagaggtctcatgcctgcccttgcccagatgcccagggtcgtgcactctctgggataccagttcagtctccacatttctggttttctgtccccatagtacagttcttcagtggacatgaccccacccagccccctgcagccctgctgcaccatctcaccagacacaaggggaagaagcagacatcaggtgctgcactcacttctgccccctggggagttggggaaaggaacgaaccctggctggaggggataggagggcttttaatttatttctttttctgttgaggcttccccctctctgagccagttttcatttcttcctggtggcattagccactccctgcctctcactccagacctgttcccacaactggggaggtaggctgggagcaaaaggagagggtgggacccagttttgcgtggttggtttttattaattatctggataacagcaaaaaaactgaaaataaagagagagagagatctg

SEQ ID NO: 14987 - protein, 283 aa, Homo sapiens; identical to SEQ ID NO: 1660

SEQ ID NO: 14988 - DNA, 2084 bp, Homo sapiens
ggggaggggtggcgggggaatagcggcggcagcagccccagccctcagagagacagcagaaagggagggagggagggtgctggggggacagccccccaccattcctaccgctatgggcccaacctcccactcccacctcccctccatcggccggggctaggacacccccaaatcccgtcgcccccttggcaccgacaccccgacagagacagagacacagccatccgccaccaccgctgccgcagcctggctggggagggggccagccccccaggccccctacccctctgaggtggccagaatggatttgtggccaggggcatggatgctgctgctgctgctcttcctgctgctgctcttcctgctgcccaccctgtggttctgcagccccagtgccaagtacttcttcaagatggccttctacaatggctggatcctcttcctggctgtgctcgccatccctgtgtgtgccgtgcgaggacgcaacgtcgagaacatgaagatcttgcgtctaatgctgctccacatcaaatacctgtacgggatccgagtggaggtgcgaggggctcaccacttccctccctcgcagccctatgttgttgtctccaaccaccagagctctctcgatctgcttgggatgatggaggtactgccaggccgctgtgtgcccattgccaagcgcgagctactgtgggctggctctgccgggctggcctgctggctggcaggagtcatcttcatcgaccggaagcgcacgggggatgccatcagtgtcatgtctgaggtcgcccagaccctgctcacccaggacgtgagggtctgggtgtttcctgagggaacgagaaaccacaatggctccatgctgcccttcaaacgtggcgccttccatcttgcagtgcaggcccaggttcccattgtccccatagtcatgtcctcctaccaagacttctactgcaagaaggagcgtcgcttcacctcgggacaatgtcaggtgcgggtgctgcccccagtgcccacggaagggctgacaccagatgacgtcccagctctggctgacagagtccggcactccatgctcactgttttccgggaaatctccactgatggccggggtggtggtgactatctgaagaagcctgggggcggtgggtgaaccctggctctgagctctcctcccatctgtccccatcttcctccccacacctacccacccagtgggccctgaagcagggccaaaccctcttccttgtctcccctctccccacttattctcctctttggaatcttcaacttctgaagtgaatgtggatacagcgccactcctgccccctcttggccccatccatggactcttgcctcggtgcagtctccactcttgacccccacctcctactgtcttgtctgtgggacagttgccccccccactccaaagtccatggattcaatggactcatccatttgtgaggaggacttctcgccctctggctggaagctgatacctgaagcactcccaggctcatcatgggagctttcctcagcaccttcaccttccctcccagtgtagcctcctgtcagtgggggctggacccttctaattcagaggtctcatgcctgcccttgcccagatgcccagggtcgtgcactctctgggataccagttcagtctccacatttctggttttctgtccccatagtacagttcttcagtggacatgaccccacccagccccctgcagccctgctgcaccatctcaccagacacaaggggaagaagcagacatcaggtgctgcactcacttctgccccctggggagttggggaaaggaacgaaccctggctggaggggataggagggcttttaatttatttctttttctgttgaggcttccccctctctgagccagttttcatttcttcctggtggcattagccactccctgcctctcactccagacctgttcccacaactggggaggtaggctgggagcaaaaggagagggtgggacccagttttgcgtggttggtttttattaattatctggataacagcaaaaaaactgaaaataaagagagagagagatctg

SEQ ID NO: 14989 - protein, 283 aa, Homo sapiens; identical to SEQ ID NO: 1660

SEQ ID NO: 14990 - DNA, 2238 bp, Homo sapiens
ggaaaccagcaggcgttggggaggggtggcgggggaatagcggcggcagcagccccagccctcagagagacagcagaaagggagggagggagggtgctggggggacagccccccaccattcctaccgctatgggcccaacctcccactcccacctcccctccatcggccggggctaggacacccccaaatcccgtcgcccccttggcaccgacaccccgacagagacagagacacagccatccgccaccaccgctgccgcagcctggctggggagggggccagccccccaggccccctacccctctgaggtggccagaatggatttgtggccaggggcatggatgctgctgctgctgctcttcctgctgctgctcttcctgctgcccaccctgtggttctgcagccccagtgccaagtacttcttcaagatggccttctacaatggctggatcctcttcctggctgtgctcgccatccctgtgtgtgccgtgcgaggacgcaacgtcgagaacatgaagatcttgcgtctaatgctgctccacatcaaatacctgtacgggatccgagtggaggtgcgaggggctcaccacttccctccctcgcagccctatgttgttgtctccaaccaccagagctctctcgatctgcttgggatgatggaggtactgccaggccgctgtgtgcccattgccaagcgcgagctactgtgggctggctctgccgggctggcctgctggctggcaggagtcatcttcatcgaccggaagcgcacgggggatgccatcagtgtcatgtctgaggtcgcccagaccctgctcacccaggacgtgagggtctgggtgtttcctgagggaacgagaaaccacaatggctccatgctgcccttcaaacgtggcgccttccatcttgcagtgcaggcccaggttcccattgtccccatagtcatgtcctcctaccaagacttctactgcaagaaggagcgtcgcttcacctcgggacaatgtcaggtgcgggtgctgcccccagtgcccacggaagggctgacaccagatgacgtcccagctctggctgacagagtccggcactccatgctcactgttttccgggaaatctccactgatggccggggtggtggtgactatctgaagaagcctgggggcggtgggtgaaccctggctctgagctctcctcccatctgtccccatcttcctccccacacctacccacccagtgggccctgaagcagggccaaaccctcttccttgtctcccctctccccacttattctcctctttggaatcttcaacttctgaagtgaatgtggatacagcgccactcctgccccctcttggccccatccatggactcttgcctcggtgcagtctccactcttgacccccacctcctactgtcttgtctgtgggacagttgcctccccctcatctccagtgactcagcctacacaagggaggggaacattccatccccagtggagtctcttcctatgtggtcttctctacccctctaccccacattggccagtggactcatccattctttggaacaaatcccccccactccaaagtccatggattcaatggactcatccatttgtgaggaggacttctcgccctctggctggaagctgatacctgaagcactcccaggctcatcatgggagctttcctcagcaccttcaccttccctcccagtgtagcctcctgtcagtgggggctggacccttctaattcagaggtctcatgcctgcccttgcccagatgcccagggtcgtgcactctctgggataccagttcagtctccacatttctggttttctgtccccatagtacagttcttcagtggacatgaccccacccagccccctgcagccctgctgcaccatctcaccagacacaaggggaagaagcagacatcaggtgctgcactcacttctgccccctggggagttggggaaaggaacgaaccctggctggaggggataggagggcttttaatttatttctttttctgttgaggcttccccctctctgagccagttttcatttcttcctggtggcattagccactccctgcctctcactccagacctgttcccacaactggggaggtaggctgggagcaaaaggagagggtgggacccagttttgcgtggttggtttttattaattatctggataacagcaaaaaaactgaaaataaagagagagagagatctg

SEQ ID NO: 14991 - protein, 283 aa, Homo sapiens; identical to SEQ ID NO: 1660

SEQ ID NO: 14992 - DNA, 2021 bp, Homo sapiens
gaaatagggtcttcttcccaggttggaccccggggagtttgggcttttcctacaatcactgaccctcactgtgactaaaggagcagaattaggtggccagaatggatttgtggccaggggcatggatgctgctgctgctgctcttcctgctgctgctcttcctgctgcccaccctgtggttctgcagccccagtgccaagtacttcttcaagatggccttctacaatggctggatcctcttcctggctgtgctcgccatccctgtgtgtgccgtgcgaggacgcaacgtcgagaacatgaagatcttgcgtctaatgctgctccacatcaaatacctgtacgggatccgagtggaggtgcgaggggctcaccacttccctccctcgcagccctatgttgttgtctccaaccaccagagctctctcgatctgcttgggatgatggaggtactgccaggccgctgtgtgcccattgccaagcgcgagctactgtgggctggctctgccgggctggcctgctggctggcaggagtcatcttcatcgaccggaagcgcacgggggatgccatcagtgtcatgtctgaggtcgcccagaccctgctcacccaggacgtgagggtctgggtgtttcctgagggaacgagaaaccacaatggctccatgctgcccttcaaacgtggcgccttccatcttgcagtgcaggcccaggttcccattgtccccatagtcatgtcctcctaccaagacttctactgcaagaaggagcgtcgcttcacctcgggacaatgtcaggtgcgggtgctgcccccagtgcccacggaagggctgacaccagatgacgtcccagctctggctgacagagtccggcactccatgctcactgttttccgggaaatctccactgatggccggggtggtggtgactatctgaagaagcctgggggcggtgggtgaaccctggctctgagctctcctcccatctgtccccatcttcctccccacacctacccacccagtgggccctgaagcagggccaaaccctcttccttgtctcccctctccccacttattctcctctttggaatcttcaacttctgaagtgaatgtggatacagcgccactcctgccccctcttggccccatccatggactcttgcctcggtgcagtctccactcttgacccccacctcctactgtcttgtctgtgggacagttgcctccccctcatctccagtgactcagcctacacaagggaggggaacattccatccccagtggagtctcttcctatgtggtcttctctacccctctaccccacattggccagtggactcatccattctttggaacaaatcccccccactccaaagtccatggattcaatggactcatccatttgtgaggaggacttctcgccctctggctggaagctgatacctgaagcactcccaggctcatcatgggagctttcctcagcaccttcaccttccctcccagtgtagcctcctgtcagtgggggctggacccttctaattcagaggtctcatgcctgcccttgcccagatgcccagggtcgtgcactctctgggataccagttcagtctccacatttctggttttctgtccccatagtacagttcttcagtggacatgaccccacccagccccctgcagccctgctgcaccatctcaccagacacaaggggaagaagcagacatcaggtgctgcactcacttctgccccctggggagttggggaaaggaacgaaccctggctggaggggataggagggcttttaatttatttctttttctgttgaggcttccccctctctgagccagttttcatttcttcctggtggcattagccactccctgcctctcactccagacctgttcccacaactggggaggtaggctgggagcaaaaggagagggtgggacccagttttgcgtggttggtttttattaattatctggataacagcaaaaaaactgaaaataaagagagagagagatctg

SEQ ID NO: 14993 - protein, 283 aa, Homo sapiens; identical to SEQ ID NO: 1660

SEQ ID NO: 14994 - DNA, 2452 bp, Homo sapiens
ttataatttgcccatcagaaatagggtcttcttcccaggttggaccccggggagtttgggcttttcctacaatcactgaccctcactgtgactaaaggagcagaattaggtaacagtcctcccactaccaatcctcttcccgagggcatgtaaactaatgcagggtaaaggtgtggctagaggggggaccttgataaaagatcccatgtgactcaagagtaaggaaagatgagaagttagcagttgcgtaaagaaggactggggcagatgaggattcaggaagcttgaggtttaggaaggaagatattgagagggaaaggtggaaatgaaggagagtgaagtgatggaatgatcctagtaaagggataatgggagtggaggaagagaagagggggtggaaaactagatacatggctaccaaattaaggaggcacgcgcattccagaggaatcggcattcttcctcactttttatttttctagaaagcacccctgaagccaaatttccattggaagaaaagatgtacccatattgtatgttgtgagaaggggttgtctcagcttgggcaagtaaggagactgatacgaaggaagtaggaaagaaaaggtacagaggtaaaagagcatggaaaaggaaagggtcagggataaggccaaagagatctcttctctttaaaggccagagaaggcaggtggaggggggagctggactgctgggagatagtgagggacaaagggcaaaggaaaccagaccagaggactggagagtgagatggagtgagatggagtcctggagagaaaaagaagagaggtgaacttaatgcttgtcatatggtggccagaatggatttgtggccaggggcatggatgctgctgctgctgctcttcctgctgctgctcttcctgctgcccaccctgtggttctgcagccccagtgccaagtacttcttcaagatggccttctacaatggctggatcctcttcctggctgtgctcgccatccctgtgtgtgccgtgcgaggacgcaacgtcgagaacatgaagtgagggtctgggtgtttcctgagggaacgagaaaccacaatggctccatgctgcccttcaaacgtggcgccttccatcttgcagtgcaggcccaggttcccattgtccccatagtcatgtcctcctaccaagacttctactgcaagaaggagcgtcgcttcacctcgggacaatgtcaggtgcgggtgctgcccccagtgcccacggaagggctgacaccagatgacgtcccagctctggctgacagagtccggcactccatgctcactgttttccgggaaatctccactgatggccggggtggtggtgactatctgaagaagcctgggggcggtgggtgaaccctggctctgagctctcctcccatctgtccccatcttcctccccacacctacccacccagtgggccctgaagcagggccaaaccctcttccttgtctcccctctccccacttattctcctctttggaatcttcaacttctgaagtgaatgtggatacagcgccactcctgccccctcttggccccatccatggactcttgcctcggtgcagtctccactcttgacccccacctcctactgtcttgtctgtgggacagttgcctccccctcatctccagtgactcagcctacacaagggaggggaacattccatccccagtggagtctcttcctatgtggtcttctctacccctctaccccacattggccagtggactcatccattctttggaacaaatcccccccactccaaagtccatggattcaatggactcatccatttgtgaggaggacttctcgccctctggctggaagctgatacctgaagcactcccaggctcatcatgggagctttcctcagcaccttcaccttccctcccagtgtagcctcctgtcagtgggggctggacccttctaattcagaggtctcatgcctgcccttgcccagatgcccagggtcgtgcactctctgggataccagttcagtctccacatttctggttttctgtccccatagtacagttcttcagtggacatgaccccacccagccccctgcagccctgctgcaccatctcaccagacacaaggggaagaagcagacatcaggtgctgcactcacttctgccccctggggagttggggaaaggaacgaaccctggctggaggggataggagggcttttaatttatttctttttctgttgaggcttccccctctctgagccagttttcatttcttcctggtggcattagccactccctgcctctcactccagacctgttcccacaactggggaggtaggctgggagcaaaaggagagggtgggacccagttttgcgtggttggtttttattaattatctggataacagcaaaaaaactgaaaataaagagagagagagatctg

SEQ ID NO: 14995 - protein, 173 aa, Homo sapiens; identical to SEQ ID NO: 14979

SEQ ID NO: 14996 - DNA, 2025 bp, Homo sapiens
tcctcttttagagaatgtccggattgctattggactttggagcgtatggctccaaatcaactcattggctaaaacttgacggaaaatggtggttaggtggccagaatggatttgtggccaggggcatggatgctgctgctgctgctcttcctgctgctgctcttcctgctgcccaccctgtggttctgcagccccagtgccaagtacttcttcaagatggccttctacaatggctggatcctcttcctggctgtgctcgccatccctgtgtgtgccgtgcgaggacgcaacgtcgagaacatgaagatcttgcgtctaatgctgctccacatcaaatacctgtacgggatccgagtggaggtgcgaggggctcaccacttccctccctcgcagccctatgttgttgtctccaaccaccagagctctctcgatctgcttgggatgatggaggtactgccaggccgctgtgtgcccattgccaagcgcgagctactgtgggctggctctgccgggctggcctgctggctggcaggagtcatcttcatcgaccggaagcgcacgggggatgccatcagtgtcatgtctgaggtcgcccagaccctgctcacccaggacgtgagggtctgggtgtttcctgagggaacgagaaaccacaatggctccatgctgcccttcaaacgtggcgccttccatcttgcagtgcaggcccaggttcccattgtccccatagtcatgtcctcctaccaagacttctactgcaagaaggagcgtcgcttcacctcgggacaatgtcaggtgcgggtgctgcccccagtgcccacggaagggctgacaccagatgacgtcccagctctggctgacagagtccggcactccatgctcactgttttccgggaaatctccactgatggccggggtggtggtgactatctgaagaagcctgggggcggtgggtgaaccctggctctgagctctcctcccatctgtccccatcttcctccccacacctacccacccagtgggccctgaagcagggccaaaccctcttccttgtctcccctctccccacttattctcctctttggaatcttcaacttctgaagtgaatgtggatacagcgccactcctgccccctcttggccccatccatggactcttgcctcggtgcagtctccactcttgacccccacctcctactgtcttgtctgtgggacagttgcctccccctcatctccagtgactcagcctacacaagggaggggaacattccatccccagtggagtctcttcctatgtggtcttctctacccctctaccccacattggccagtggactcatccattctttggaacaaatcccccccactccaaagtccatggattcaatggactcatccatttgtgaggaggacttctcgccctctggctggaagctgatacctgaagcactcccaggctcatcatgggagctttcctcagcaccttcaccttccctcccagtgtagcctcctgtcagtgggggctggacccttctaattcagaggtctcatgcctgcccttgcccagatgcccagggtcgtgcactctctgggataccagttcagtctccacatttctggttttctgtccccatagtacagttcttcagtggacatgaccccacccagccccctgcagccctgctgcaccatctcaccagacacaaggggaagaagcagacatcaggtgctgcactcacttctgccccctggggagttggggaaaggaacgaaccctggctggaggggataggagggcttttaatttatttctttttctgttgaggcttccccctctctgagccagttttcatttcttcctggtggcattagccactccctgcctctcactccagacctgttcccacaactggggaggtaggctgggagcaaaaggagagggtgggacccagttttgcgtggttggtttttattaattatctggataacagcaaaaaaactgaaaataaagagagagagagatctg

SEQ ID NO: 14997 - protein, 283 aa, Homo sapiens; identical to SEQ ID NO: 1660

SEQ ID NO: 14998 - DNA, 724 bp, Homo sapiens
tgaataacactcattcagcagtaaatgccaaacccagaggaggggggctggaggggtgctgaggagatgtctgaactggggattggagaaggctttgtataggagaagggcctcagaagtggcagctggcaagcccagggatggttgtccagggttgggggaagagaactgaaaggttgaggaagagtatcactcggaagctgggccccacctgtgggcaaagacctgggtggacaggccatgatggtgctccccttgccccaggacaatgtcaggtgcgggtgctgcccccagtgcccacggaagggctgacaccagatgacgtcccagctctggctgacagagtccggcactccatgctcactgttttccgggaaatctccactgatggccggggtggtggtgactatctgaagaagcagacatcaggtgctgcactcacttctgccccctggggagttggggaaaggaacgaaccctggctggaggggataggagggcttttaatttatttctttttctgttgaggcttccccctctctgagccagttttcatttcttcctggtggcattagccactccctgcctctcactccagacctgttcccacaactggggaggtaggctgggagcaaaaggagagggtgggacccagttttgcgtggttggtttttattaattatctggataacagcaaaaaaactgaaaataaagagagagagag

SEQ ID NO: 14999 - protein, 128 aa, Homo sapiens
MVVQGWGKRTERLRKSITRKLGPTCGQRPGWTGHDGAPLAPGQCQVRVLPPVPTEGLTPDDVPALADRVRHSMLTVFREISTDGRGGGDYLKKQTSGAALTSAPWGVGERNEPWLEGIGGLLIYFFFC

SEQ ID NO: 15000 - DNA, 921 bp, Homo sapiens
aggaaagataaggcctgtgtgcacaaagctgtaatgaataacactcattcagcagtaaatgccaaacccagaggaggggggctggaggggtgctgaggagatgtctgaactggggattggagaaggctttgtataggagaagggcctcagaagtggcagctggcaagcccagggatggttgtccagggttgggggaagagaactgaaaggttgaggaagagtatcactcggaagctgggccccacctgtgggcaaagacctgggtggacaggccatgatggtgctccccttgccccaggacaatgtcaggtgcgggtgctgcccccagtgcccacggaagggctgacaccagatgacgtcccagctctggctgacagagtccggcactccatgctcactgttttccgggaaatctccactgatggccggggtggtggtgactatctgaagaagcctgggggcggtgggtgaaccctggctctgagctctcctcccatctgtccccatcttcctccccacacctacccacccagtgggccctgaagcagggccaaaccctcttccttgtctcccctctccccacttattctcctctttggaatcttcaacttctgaagtgaatgtggatacagcgccactcctgcccccttggggagttggggaaaggaacgaaccctggctggaggggataggagggcttttaatttatttctttttctgttgaggcttccccctctctgagccagttttcatttcttcctggtggcattagccactccctgcctctcactccagacctgttcccacaactggggaggtaggctgggagcaaaaggagagggtgggacccagttttgcgtggttggtttttattaattatctggataacagcaaaaaaactgaaaataaagagagagagag

SEQ ID NO: 15001 - protein, 98 aa, Homo sapiens; identical to SEQ ID NO: 14967

SEQ ID NO: 15002 - DNA, 199 bp, Homo sapiens
agcaccatcatggcctgtccacccaggtctttgcccacagggatgtcctcccagcctctccggacacaccctaccccagaactgctcaaagccctcacccgaggtgaagcgacgctccttcttgcagtagaagtcttggatgactcacgtcctgggtgagcagggtctgggcgacctcagacatgacactgatggcatc

SEQ ID NO: 15003 - protein, 49 aa, Homo sapiens
MACPPRSLPTGMSSQPLRTHPTPELLKALTRGEATLLLAVEVLDDSRPG

SEQ ID NO: 15004 - DNA, 1466 bp, Homo sapiens
ccaatagcaatccggacattctctaaaagaggaagcgaaggaaagaaaggggcttatagtgggcgaggtctataggtagtcccgagcaaattgcttatggctttggttatgactgacaactactcagacgaataaagccctccttggccaggcgacagcgtgtagcgagttattaccaatcccttggcattgcacattgacttagaccgtatcagccaatagccattgtgcgaaggcaggactgcactaaccttttcccgcccctaccctttgggccaatcctttcttttgaattctttgtgactggcaggcattcagaccaatagtgattaggaaaccttgaagcctgcccaacgatcgtgggcaggaggtggtttctggtttgttggggcgtgtgtatgtgtatttggggggactgaagggtacgtggggcgaaacaaaaccggccatggcagcagcggaggaggaggacgggggccccgaagggccaaatcgcgagcggggcggggcgggcgcgaccttcgaatgtaatatatgtttggagactgctcgggaagctgtggtcagtgtgtgtggccacctgtactgttggccatgtcttcatcagtggctggagacacggccagaacggcaagagtgtccagtatgtaaagctgggatcagcagagagaaggttgtcccgctttatgggcgagggagccagaagccccaggatcccagattaaaaactccaccccgcccccagggccagagaccagctccggagagcagagggggattccagccatttggtgataccgggggcttccacttctcatttggtgttggtgcttttccctttggctttttcaccaccgtcttcaatgcccatgagcctttccgccggggtacaggtgtggatctgggacagggtcacccagcctccagctggcaggattccctcttcctgtttctcgccatcttcttctttttttggctgctcagtatttgagctatgtctgcttcctgcccacctccagccagagaagaatcagtattgagggtccctgctgacccttccgtactcctggacccccttgacccctctatttctgttggctaaggccagccctggacattgtccaggaaggcctggggaggaggagtgaagtctgtgcatagatgggagagccttctgctcagaggctcactcagtaacgttgtttaattctctgccctggggaaggaggatggattgagagaatgtctttctcctctcctaagtctttgctttccctgatttcttgatttgatcttcaaaggtgggcaaagttccctctgactcttcccccactccccatcttactgatttaatttaatttttcactccccagagtctaatatggattctgactcttaagtgcttccgccccctcactacctcctttaatacaaattcaataaaaaaggtgaaatatattgatggg

SEQ ID NO: 15005 - protein, 180 aa, Homo sapiens; identical to SEQ ID NO: 1664

SEQ ID NO: 15006 - DNA, 851 bp, Homo sapiens
cgtggggcgaaacaaaaccggccatggcagcagcggaggaggaggacgggggccccgaagggccaaatcgcgagcggggcggggcgggcgcgaccttcgaatgtaatatatgtttggagactgctcgggaagctgtggtcagtgtgtgtggccacctgtactgttggccatgtcttcatcagtggctggagacacggccagaacggcaagagttgcttttccctttggctttttcaccaccgtcttcaatgcccatgagcctttccgccggggtacaggtgtggatctgggacagggtcacccagcctccagctggcaggattccctcttcctgtttctcgccatcttcttctttttttggctgctcagtatttgagctatgtctgcttcctgcccacctccagccagagaagaatcagtattgagggtccctgctgacccttccgtactcctggacccccttgacccctctatttctgttggctaaggccagccctggacattgtccaggaaggcctggggaggaggagtgaagtctgtgcatagatgggagagccttctgctcagaggctcactcagtaacgttgtttaattctctgccctggggaaggaggatggattgagagaatgtctttctcctctcctaagtctttgctttccctgatttcttgatttgatcttcaaaggtgggcaaagttccctctgactcttcccccactccccatcttactgatttaatttaatttttcactccccagagtctaatatggattctgactcttaagtgcttccgccccctcactacctcctttaatacaaattcaataaaaaaggtgaaatatattgatggg

SEQ ID NO: 15007 - protein, 133 aa, Homo sapiens
MAAAEEEDGGPEGPNRERGGAGATFECNICLETAREAVVSVCGHLYCWPCLHQWLETRPERQELLFPLAFSPPSSMPMSLSAGVQVWIWDRVTQPPAGRIPSSCFSPSSSFFGCSVFELCLLPAHLQPEKNQY

SEQ ID NO: 15008 - DNA, 986 bp, Homo sapiens
cgtggggcgaaacaaaaccggccatggcagcagcggaggaggaggacgggggccccgaagggccaaatcgcgagcggggcggggcgggcgcgaccttcgaatgtaatatatgtttggagactgctcgggaagctgtggtcagtgtgtgtggccacctgtactgttggccatgtcttcatcagtggctggagacacggccagaacggcaagagtgtccagtatgtaaagctgggatcagcagagagaaggttgtcccgctttatgggcgagggagccagaagccccaggatcccagggattccagccatttggtgataccgggggcttccacttctcatttggtgttggtgcttttccctttggctttttcaccaccgtcttcaatgcccatgagcctttccgccggggtacaggtgtggatctgggacagggtcacccagcctccagctggcaggattccctcttcctgtttctcgccatcttcttctttttttggctgctcagtatttgagctatgtctgcttcctgcccacctccagccagagaagaatcagtattgagggtccctgctgacccttccgtactcctggacccccttgacccctctatttctgttggctaaggccagccctggacattgtccaggaaggcctggggaggaggagtgaagtctgtgcatagatgggagagccttctgctcagaggctcactcagtaacgttgtttaattctctgccctggggaaggaggatggattgagagaatgtctttctcctctcctaagtctttgctttccctgatttcttgatttgatcttcaaaggtgggcaaagttccctctgactcttcccccactccccatcttactgatttaatttaatttttcactccccagagtctaatatggattctgactcttaagtgcttccgccccctcactacctcctttaatacaaattcaataaaaaaggtgaaatatattgatggg

SEQ ID NO: 15009 - protein, 178 aa, Homo sapiens
MAAAEEEDGGPEGPNRERGGAGATFECNICLETAREAVVSVCGHLYCWPCLHQWLETRPERQECPVCKAGISREKVVPLYGRGSQKPQDPRDSSHLVIPGASTSHLVLVLFPLAFSPPSSMPMSLSAGVQVWIWDRVTQPPAGRIPSSCFSPSSSFFGCSVFELCLLPAHLQPEKNQY

SEQ ID NO: 15010 - DNA, 499 bp, Homo sapiens
agccatttggtgataccgggggcttccacttctcatttggtgttggtgcttttccctttggctttttcaccaccgtcttcaatgcccatgagcctttccgccggggtacaggtgtggatctgggacagggtcacccagcctccagctggcaggattccctcttcctgtttctcgccatcttcttctttttttggctgctcagtatttgagctatgtctgcttcctgcccacctccagccagagaagaatcagtattgagggggaaggaggatggattgagagaatgtctttctcctctcctaagtctttgctttccctgatttcttgatttgatcttcaaaggtgggcaaagttccctctgactcttcccccactccccatcttactgatttaatttaatttttcactccccagagtctaatatggattctgactcttaagtgcttccgccccctcactacctcctttaatacaaattcaataaaaaaggtgaaatata

SEQ ID NO: 15011 - protein, 58 aa, Homo sapiens
MPMSLSAGVQVWIWDRVTQPPAGRIPSSCFSPSSSFFGCSVFELCLLPAHLQPEKNQY

SEQ ID NO: 15012 - DNA, 887 bp, Homo sapiens
gatccccgtcccaccttctcctgtagcttcagcccaggccttccccgacaccgggccttgcgcacagcccccatccagccccgtgtctggggtgagcataggtggggagggccccaagctcacgtgagcacgttctggaagtctgacccttagggaaagagggagtcaagcccatggccactgggatcactcacaagtgtaactctccacctcaaaacccttccaactcccagagcctgtgcctctggaggaggtccaattggtggtggagccagaaggtggagcagtagctcctggtggaaccgtaaccctgacctgtgaagtccctgcccagccctctcctcaaatccactggatgaaggatggtgtgcccttgccccttccccccagccctgtgctgatcctccctgagatagggcctcaggaccagggaacctacagctgtgtggccacccattccagccacgggccccaggaaagccgtgctgtcagcatcagcatcatcgaaccaggcgaggaggggccaactgcaggtgaggggtttgataaagtcagggaagcagaagatagcccccaacacatgtgactggggggatggtcaacaagaaaggaatggaaggccccagaaaaccaggaggaagaggaggagcgtgcagaactgaatcagtcggaggaacctgaggcaggcgagagtagtactggagggccttgaggggcccacagacagatcccatccatcagctcccttttctttttcccttgaactgttctggcctcagaccaactctctcctgtataatctctctcctgtataaccccaccttgccaagctttcttctacaaccagagccccccacaatgatgattaaacacctgacacatcttgc

SEQ ID NO: 15013 - protein, 76 aa, Homo sapiens
MKDGVPLPLPPSPVLILPEIGPQDQGTYSCVATHSSHGPQESRAVSISIIEPGEEGPTAGEGFDKVREAEDSPQHM

SEQ ID NO: 15014 - DNA, 2110 bp, Homo sapiens
ctgtcccatcctcagccctgaactagctaccatctgatcccctcagacattctcaggattttacaagactgtcagagtggggaacccctcccattaaagatccgggcaggactggggacaggttggaagtgtgatgggtgggggggtgggaggcatgggccgggggcagttctctcctcacttgtaaacttgtgtagtttcacagaaaaaaaacaaaatgcagttttaaataaagaaatttcttttttccctgggtttagttgagaatttttttcaaaaaacatgagaaaccccagaaaaaaaatgattttctttcacgaagttccaaacaggtttctctcctgttccccagccttgccttcatgatgcaggcccaattgcacccttgcagacaacagtctggcctgaaccctattgatgcaactttgcgcaatcaagatggggctccagtgggtcaccaggcagccctgatggactgatggaataaataggatcgggggctctgagggaatgagaccctagagggtacactccccatcccccagggaagtgactgtacccagaggctggtagtacccaggggtggggtgataattatttctctagtacctgaaggactcttgtcccaaaggcatgaattcctagcattccctgtgacaagacgactgaaagatgggggctggagagagggtgcaggccccacctagggcggaggccacagcagggagaggggcagacagagccaggaccctggaaggaagcaggatggctgccggaacagcagttggagcctgggtgctggtcctcagtctgtggggggcagtagtaggtgctcaaaacatcacagcccggattggcgagccactggtgctgaagtgtaagggggcccccaagaaaccaccccagcggctggaatggaaactgaacacaggccggacagaagcttggaaggtcctgtctccccagggaggaggcccctgggacagtgtggctcgtgtccttcccaacggctccctcttccttccggctgtcgggatccaggatgaggggattttccggtgccaggcaatgaacaggaatggaaaggagaccaagtccaactaccgagtccgtgtctaccagattcctgggaagccagaaattgtagattctgcctctgaactcacggctggtgttcccaataaggtggggacatgtgtgtcagagggaagctaccctgcagggactcttagctggcacttggatgggaagcccctggtgcctaatgagaagggagtatctgtgaaggaacagaccaggagacaccctgagacagggctcttcacactgcagtcggagctaatggtgaccccagcccggggaggagatccccgtcccaccttctcctgtagcttcagcccaggccttccccgacaccgggccttgcgcacagcccccatccagccccgtgtctgggagcctgtgcctctggaggaggtccaattggtggtggagccagaaggtggagcagtagctcctggtggaaccgtaaccctgacctgtgaagtccctgcccagccctctcctcaaatccactggatgaaggatggtgtgcccttgccccttccccccagccctgtgctgatcctccctgagatagggcctcaggaccagggaacctacagctgtgtggccacccattccagccacgggccccaggaaagccgtgctgtcagcatcagcatcatcgaaccaggcgaggaggggccaactgcaggtgaggggtttgataaagtcagggaagcagaagatagcccccaacacatgtgactggggggatggtcaacaagaaaggaatggaaggccccagaaaaccaggaggaagaggaggagcgtgcagaactgaatcagtcggaggaacctgaggcaggcgagagtagtactggagggccttgaggggcccacagacagatcccatccatcagctcccttttctttttcccttgaactgttctggcctcagaccaactctctcctgtataatctctctcctgtataaccccaccttgccaagctttcttctacaaccagagccccccacaatgatgattaaacacctgacacatcttgc

SEQ ID NO: 15015 - protein, 378 aa, Homo sapiens
MGAGERVQAPPRAEATAGRGADRARTLEGSRMAAGTAVGAWVLVLSLWGAVVGAQNITARIGEPLVLKCKGAPKKPPQRLEWKLNTGRTEAWKVLSPQGGGPWDSVARVLPNGSLFLPAVGIQDEGIFRCQAMNRNGKETKSNYRVRVYQIPGKPEIVDSASELTAGVPNKVGTCVSEGSYPAGTLSWHLDGKPLVPNEKGVSVKEQTRRHPETGLFTLQSELMVTPARGGDPRPTFSCSFSPGLPRHRALRTAPIQPRVWEPVPLEEVQLVVEPEGGAVAPGGTVTLTCEVPAQPSPQIHWMKDGVPLPLPPSPVLILPEIGPQDQGTYSCVATHSSHGPQESRAVSISIIEPGEEGPTAGEGFDKVREAEDSPQHM

SEQ ID NO: 15016 - DNA, 2155 bp, Homo sapiens
ctgtcccatcctcagccctgaactagctaccatctgatcccctcagacattctcaggattttacaagactgtcagagtggggaacccctcccattaaagatccgggcaggactggggacaggttggaagtgtgatgggtgggggggtgggaggcatgggccgggggcagttctctcctcacttgtaaacttgtgtagtttcacagaaaaaaaacaaaatgcagttttaaataaagaaatttcttttttccctgggtttagttgagaatttttttcaaaaaacatgagaaaccccagaaaaaaaatgattttctttcacgaagttccaaacaggtttctctcctgttccccagccttgccttcatgatgcaggcccaattgcacccttgcagacaacagtctggcctgaaccctattgatgcaactttgcgcaatcaagatggggctccagtgggtcaccaggcagccctgatggactgatggaataaataggatcgggggctctgagggaatgagaccctagagggtacactccccatcccccagggaagtgactgtacccagaggctggtagtacccaggggtggggtgataattatttctctagtacctgaaggactcttgtcccaaaggcatgaattcctagcattccctgtgacaagacgactgaaagatgggggctggagagagggtgcaggccccacctagggcggaggccacagcagggagaggggcagacagagccaggaccctggaaggaagcaggatggctgccggaacagcagttggagcctgggtgctggtcctcagtctgtggggggcagtagtaggtgctcaaaacatcacagcccggattggcgagccactggtgctgaagtgtaagggggcccccaagaaaccaccccagcggctggaatggaaactgaacacaggccggacagaagcttggaaggtcctgtctccccagggaggaggcccctgggacagtgtggctcgtgtccttcccaacggctccctcttccttccggctgtcgggatccaggatgaggggattttccggtgccaggcaatgaacaggaatggaaaggagaccaagtccaactaccgagtccgtgtctaccagattcctgggaagccagaaattgtagattctgcctctgaactcacggctggtgttcccaataaggtggggacatgtgtgtcagagggaagctaccctgcagggactcttagctggcacttggatgggaagcccctggtgcctaatgagaagggagtatctgtgaaggaacagaccaggagacaccctgagacagggctcttcacactgcagtcggagctaatggtgaccccagcccggggaggagatccccgtcccaccttctcctgtagcttcagcccaggccttccccgacaccgggccttgcgcacagcccccatccagccccgtgtctgggagcctgtgcctctggaggaggtccaattggtggtggagccagaaggtggagcagtagctcctggtggaaccgtaaccctgacctgtgaagtccctgcccagccctctcctcaaatccactggatgaaggatggtgtgcccttgccccttccccccagccctgtgctgatcctccctgagatagggcctcaggaccagggaacctacagctgtgtggccacccattccagccacgggccccaggaaagccgtgctgtcagcatcagcatcatcgaaccaggcgaggaggggccaactgcaggctctgtgggaggatcagggctgggaactctagccctggccctggggatcctgggaggcctggggacagccgccctgctcattggggtcatcttgtggcaaaggcggcaacgccgaggagaggagaggaaggccccagaaaaccaggaggaagaggaggagcgtgcagaactgaatcagtcggaggaacctgaggcaggcgagagtagtactggagggccttgaggggcccacagacagatcccatccatcagctcccttttctttttcccttgaactgttctggcctcagaccaactctctcctgtataatctctctcctgtataaccccaccttgccaagctttcttctacaaccagagccccccacaatgatgattaaacacctgacacatcttgc

SEQ ID NO: 15017 - protein, 435 aa, Homo sapiens
MGAGERVQAPPRAEATAGRGADRARTLEGSRMAAGTAVGAWVLVLSLWGAVVGAQNITARIGEPLVLKCKGAPKKPPQRLEWKLNTGRTEAWKVLSPQGGGPWDSVARVLPNGSLFLPAVGIQDEGIFRCQAMNRNGKETKSNYRVRVYQIPGKPEIVDSASELTAGVPNKVGTCVSEGSYPAGTLSWHLDGKPLVPNEKGVSVKEQTRRHPETGLFTLQSELMVTPARGGDPRPTFSCSFSPGLPRHRALRTAPIQPRVWEPVPLEEVQLVVEPEGGAVAPGGTVTLTCEVPAQPSPQIHWMKDGVPLPLPPSPVLILPEIGPQDQGTYSCVATHSSHGPQESRAVSISIIEPGEEGPTAGSVGGSGLGTLALALGILGGLGTAALLIGVILWQRRQRRGEERKAPENQEEEEERAELNQSEEPEAGESSTGGP

SEQ ID NO: 15018 - DNA, 556 bp, Homo sapiens
cagaaccaggcgaggaggggccaactgcaggtgaggggtttgataaagtcagggaagcagaagatagcccccaacacatgtgactggggggatggtcaacaagaaaggaatggtgagtggtggtggctgtgctctcaattttccctgtctccgtacaggctctgtgggaggatcagggctgggaactctagccctggccctggggatcctgggaggcctggggacagccgccctgctcattggggtcatcttgtggcaaaggcggcaacgccgaggagaggagaggaaggccccagaaaaccaggaggaagaggaggagcgtgcagaactgaatcagtcggaggaacctgaggcaggcgagagtagtactggagggccttgaggggcccacagacagatcccatccatcagctcccttttctttttcccttgaactgttctggcctcagaccaactctctcctgtataatctctctcctgtataaccccaccttgccaagctttcttctacaaccagagccccccacaatgatgattaaacacctgacacatcttg

SEQ ID NO: 15019 - protein, 96 aa, Homo sapiens [sequence omitted]

SEQ ID NO: 15020 - DNA, 931 bp, Homo sapiens
gatccccgtcccaccttctcctgtagcttcagcccaggccttccccgacaccgggccttgcgcacagcccccatccagccccgtgtctggggtgagcataggtggggagggccccaagctcacgtgagcacgttctggaagtctgacccttagggaaagagggagtcaagcccatggccactgggatcactcacaagtgtaactctccacctcaaaacccttccaactcccagagcctgtgcctctggaggaggtccaattggtggtggagccagaaggtggagcagtagctcctggtggaaccgtaaccctgacctgtgaagtccctgcccagccctctcctcaaatccactggatgaaggatggtgtgcccttgccccttccccccagccctgtgctgatcctccctgagatagggcctcaggaccagggaacctacagctgtgtggccacccattccagccacgggccccaggaaagccgtgctgtcagcatcagcatcatcgaaccaggcgaggaggggccaactgcaggctctgtgggaggatcagggctgggaactctagccctggccctggggatcctgggaggcctggggacagccgccctgctcattggggtcatcttgtggcaaaggcggcaacgccgaggagaggagaggaaggccccagaaaaccaggaggaagaggaggagcgtgcagaactgaatcagtcggaggaacctgaggcaggcgagagtagtactggagggccttgaggggcccacagacagatcccatccatcagctcccttttctttttcccttgaactgttctggcctcagaccaactctctcctgtataatctctctcctgtataaccccaccttgccaagctttcttctacaaccagagccccccacaatgatgattaaacacctgacacatcttg

SEQ ID NO: 15021 - protein, 133 aa, Homo sapiens
MKDGVPLPLPPSPVLILPEIGPQDQGTYSCVATHSSHGPQESRAVSISIIEPGEEGPTAGSVGGSGLGTLALALGILGGLGTAALLIGVILWQRRQRRGEERKAPENQEEEEERAELNQSEEPEAGESSTGGP

SEQ ID NO: 15022 - DNA, 2337 bp, Homo sapiens
ctgtcccatcctcagccctgaactagctaccatctgatcccctcagacattctcaggattttacaagactgtcagagtggggaacccctcccattaaagatccgggcaggactggggacaggttggaagtgtgatgggtgggggggtgggaggcatgggccgggggcagttctctcctcacttgtaaacttgtgtagtttcacagaaaaaaaacaaaatgcagttttaaataaagaaatttcttttttccctgggtttagttgagaatttttttcaaaaaacatgagaaaccccagaaaaaaaatgattttctttcacgaagttccaaacaggtttctctcctgttccccagccttgccttcatgatgcaggcccaattgcacccttgcagacaacagtctggcctgaaccctattgatgcaactttgcgcaatcaagatggggctccagtgggtcaccaggcagccctgatggactgatggaataaataggatcgggggctctgagggaatgagaccctagagggtacactccccatcccccagggaagtgactgtacccagaggctggtagtacccaggggtggggtgataattatttctctagtacctgaaggactcttgtcccaaaggcatgaattcctagcattccctgtgacaagacgactgaaagatgggggctggagagagggtgcaggccccacctagggcggaggccacagcagggagaggggcagacagagccaggaccctggaaggaagcaggatggctgccggaacagcagttggagcctgggtgctggtcctcagtctgtggggtgagccactccctcaaccccactgaccctccctgcagaaagcactttaaccccacaccccagtcgtcctagaacttttcccagaacccgaggaagtgcctttcaaggtccctcacccaccctgtccaaattttgttagccctcattcccttcctacccctctaccatggtgctatctcccaggggcagtagtaggtgctcaaaacatcacagcccggattggcgagccactggtgctgaagtgtaagggggcccccaagaaaccaccccagcggctggaatggaaactgaacacaggccggacagaagcttggaaggtcctgtctccccagggaggaggcccctgggacagtgtggctcgtgtccttcccaacggctccctcttccttccggctgtcgggatccaggatgaggggattttccggtgccaggcaatgaacaggaatggaaaggagaccaagtccaactaccgagtccgtgtctaccagattcctgggaagccagaaattgtagattctgcctctgaactcacggctggtgttcccaataaggtggggacatgtgtgtcagagggaagctaccctgcagggactcttagctggcacttggatgggaagcccctggtgcctaatgagaagggagtatctgtgaaggaacagaccaggagacaccctgagacagggctcttcacactgcagtcggagctaatggtgaccccagcccggggaggagatccccgtcccaccttctcctgtagcttcagcccaggccttccccgacaccgggccttgcgcacagcccccatccagccccgtgtctgggagcctgtgcctctggaggaggtccaattggtggtggagccagaaggtggagcagtagctcctggtggaaccgtaaccctgacctgtgaagtccctgcccagccctctcctcaaatccactggatgaaggatggtgtgcccttgccccttccccccagccctgtgctgatcctccctgagatagggcctcaggaccagggaacctacagctgtgtggccacccattccagccacgggccccaggaaagccgtgctgtcagcatcagcatcatcgaaccaggcgaggaggggccaactgcaggctctgtgggaggatcagggctgggaactctagccctggccctggggatcctgggaggcctggggacagccgccctgctcattggggtcatcttgtggcaaaggcggcaacgccgaggagaggagaggaaggccccagaaaaccaggaggaagaggaggagcgtgcagaactgaatcagtcggaggaacctgaggcaggcgagagtagtactggagggccttgaggggcccacagacagatcccatccatcagctcccttttctttttcccttgaactgttctggcctcagaccaactctctcctgtataatctctctcctgtataaccccaccttgccaagctttcttctacaaccagagccccccacaatgatgattaaacacctgacacatcttg

SEQ ID NO: 15023 - protein, 303 aa, Homo sapiens
MNRNGKETKSNYRVRVYQIPGKPEIVDSASELTAGVPNKVGTCVSEGSYPAGTLSWHLDGKPLVPNEKGVSVKEQTRRHPETGLFTLQSELMVTPARGGDPRPTFSCSFSPGLPRHRALRTAPIQPRVWEPVPLEEVQLVVEPEGGAVAPGGTVTLTCEVPAQPSPQIHWMKDGVPLPLPPSPVLILPEIGPQDQGTYSCVATHSSHGPQESRAVSISIIEPGEEGPTAGSVGGSGLGTLALALGILGGLGTAALLIGVILWQRRQRRGEERKAPENQEEEEERAELNQSEEPEAGESSTGGP

SEQ ID NO: 15024 - DNA, 1999 bp, Homo sapiens
ctgtcccatcctcagccctgaactagctaccatctgatcccctcagacattctcaggattttacaagactgtcagagtggggaacccctcccattaaagatccgggcaggactggggacaggttggaagtgtgatgggtgggggggtgggaggcatgggccgggggcagttctctcctcacttgtaaacttgtgtagtttcacagaaaaaaaacaaaatgcagttttaaataaagaaatttcttttttccctgggtttagttgagaatttttttcaaaaaacatgagaaaccccagaaaaaaaatgattttctttcacgaagttccaaacaggtttctctcctgttccccagccttgccttcatgatgcaggcccaattgcacccttgcagacaacagtctggcctgaaccctattgatgcaactttgcgcaatcaagatggggctccagtgggtcaccaggcagccctgatggactgatggaataaataggatcgggggctctgagggaatgagaccctagagggtacactccccatcccccagggaagtgactgtacccagaggctggtagtacccaggggtggggtgataattatttctctagtacctgaaggactcttgtcccaaaggcatgaattcctagcattccctgtgacaagacgactgaaagatgggggctggagagagggtgcaggccccacctagggcggaggccacagcagggagaggggcagacagagccaggaccctggaaggaagcaggatggctgccggaacagcagttggagcctgggtgctggtcctcagtctgtggggggcagtagtaggtgctcaaaacatcacagcccggattggcgagccactggtgctgaagtgtaagggggcccccaagaaaccaccccagcggctggaatggaaactgggaggaggcccctgggacagtgtggctcgtgtccttcccaacggctccctcttccttccggctgtcgggatccaggatgaggggattttccggtgccaggcaatgaacaggaatggaaaggagaccaagtccaactaccgagtccgtgtctaccagattcctgggaagccagaaattgtagattctgcctctgaactcacggctggtgttcccaataaggtggggacatgtgtgtcagagggaagctaccctgcagggactcttagctggcacttggatgggaagcccctggtgcctaatgagaagggagtatctgtgaaggaacagaccaggagacaccctgagacagggctcttcacactgcagtcggagctaatggtgaccccagcccggggaggagatccccgtcccaccttctcctgtagcttcagcccaggccttccccgacaccgggccttgcgcacagcccccatccagccccgtgtctgggagcctgtgcctctggaggaggtccaattggtggtggagccagaaggtggagcagtagctcctggtggaaccgtaaccctgacctgtgaagtccctgcccagccctctcctcaaatccactggatgaaggatgtgagtgacctggagagaggggctgggagaaccaggcgaggaggggccaactgcaggctctgtgggaggatcagggctgggaactctagccctggccctggggatcctgggaggcctggggacagccgccctgctcattggggtcatcttgtggcaaaggcggcaacgccgaggagaggagaggaaggccccagaaaaccaggaggaagaggaggagcgtgcagaactgaatcagtcggaggaacctgaggcaggcgagagtagtactggagggccttgaggggcccacagacagatcccatccatcagctcccttttctttttcccttgaactgttctggcctcagaccaactctctcctgtataatctctctcctgtataaccccaccttgccaagctttcttctacaaccagagccccccacaatgatgattaaacacctgacacatcttg

SEQ ID NO: 15025 - protein, 373 aa, Homo sapiens
MGAGERVQAPPRAEATAGRGADRARTLEGSRMAAGTAVGAWVLVLSLWGAVVGAQNITARIGEPLVLKCKGAPKKPPQRLEWKLGGGPWDSVARVLPNGSLFLPAVGIQDEGIFRCQAMNRNGKETKSNYRVRVYQIPGKPEIVDSASELTAGVPNKVGTCVSEGSYPAGTLSWHLDGKPLVPNEKGVSVKEQTRRHPETGLFTLQSELMVTPARGGDPRPTFSCSFSPGLPRHRALRTAPIQPRVWEPVPLEEVQLVVEPEGGAVAPGGTVTLTCEVPAQPSPQIHWMKDVSDLERGAGRTRRGGANCRLCGRIRAGNSSPGPGDPGRPGDSRPAHWGHLVAKAATPRRGEEGPRKPGGRGGACRTESVGGT

SEQ ID NO: 15026 - DNA, 1126 bp, Homo sapiens
ctgtcccatcctcagccctgaactagctaccatctgatcccctcagacattctcaggattttacaagactgtcagagtggggaacccctcccattaaagatccgggcaggactggggacaggttggaagtgtgatgggtgggggggtgggaggcatgggccgggggcagttctctcctcacttgtaaacttgtgtagtttcacagaaaaaaaacaaaatgcagttttaaataaagaaatttcttttttccctgggtttagttgagaatttttttcaaaaaacatgagaaaccccagaaaaaaaatgattttctttcacgaagttccaaacaggtttctctcctgttccccagccttgccttcatgatgcaggcccaattgcacccttgcagacaacagtctggcctgaaccctattgatgcaactttgcgcaatcaagatggggctccagtgggtcaccaggcagccctgatggactgatggaataaataggatcgggggctctgagggaatgagaccctagagggtacactccccatcccccagggaagtgactgtacccagaggctggtagtacccaggggtggggtgataattatttctctagtacctgaaggactcttgtcccaaaggcatgaattcctagcattccctgtgacaagacgactgaaagatgggggctggagagagggtgcaggccccacctagggcggaggccacagcagggagaggggcagacagagccaggaccctggaaggaagcaggatggctgccggaacagcagttggagcctgggtgctggtcctcagtctgtggggtgagccactccctcaaccccactgaccctccctgcagaaagcactttaaccccacaccccagtcgtcctagaacttttcccagaacccgaggaagtgcctttcaaggtccctcacccaccctgtccaaattttgttagccctcattcccttcctacccctctaccatggtgctatctcccaggggcagtagtaggtgctcaaaacatcacagcccggattggcgagccactggtgctgaagtgtaagggggcccccaagaaaccaccccagcggctggaatggaaactgaacacaggccggacagaag

SEQ ID NO: 15027 - protein, 56 aa, Homo sapiens [sequence omitted]

SEQ ID NO: 15028 - DNA, 1541 bp, Homo sapiens
aatggcagctggcaagaggctgtgaccccctcttcagtgacatccccaacggagggaccagggagtgttcactctgatacctccaactgatcttgcccctcagggtcacaggggtgggggctctcacaaggcgacttgaagaggacgcaggcttccagaggacaaaccccaatacaggagaagcacaagacagagaagggccaatggggtcatcccctccctaacgagactctctgtgctgggggtgctaattacatggcaggaagaatggggcctctaaggggagtgtggggtctgtctctcccttttttccatctttttcctctctcgctttctttcttacacagaaacatacacataccgagaaacctatttctcagacccctttttctcctctgtctttctctctccctctcccacacctcacacacacatactcccacttgcaactattctgtttctctcctgggctcccccactttcccttccccaccccacttgtatgctctggaattcagtaattttgaggaaattgaagatgccatcttcccctgtgagtgacatgtctttaattttttaaaaaactactatttgaaaattggagggggaagaatgggaagggagttattgccaaatatgttaaatatgggttggggtgcttgtatatgtatcttcctcaatttccccataaatgaggtatctttttgtcacaccaaaatcaaggggtagggagagggaggaggttgcaaaaagccagatgtgggggaaaagtaacatcaacactgtcccatcctcagccctgaactagctaccatctgatcccctcagacattctcaggattttacaagactgtcagagtggggaacccctcccattaaagatccgggcaggactggggacaggttggaagtgtgatgggtgggggggtgggaggcatgggccgggggcagttctctcctcacttgtaaacttgtgtagtttcacagaaaaaaaacaaaatgcagttttaaataaagaaatttcttttttccctgggtttagttgagaatttttttcaaaaaacatgagaaaccccagaaaaaaaatgattttctttcacgaagttccaaacaggtttctctcctgttccccagccttgccttcatgatgcaggcccaattgcacccttgcagacaacagtctggcctgaaccctattgatgcaactttgcgcaatcaagatggggctccagtgggtcaccaggcagccctgatggactgatggaataaataggatcgggggctctgagggaatgagaccctagagggtacactccccatcccccagggaagtgactgtacccagaggctggtagtacccaggggtggggtgataattatttctctagtacctgaaggactcttgtcccaaaggcatgaattcctagcattccctgtgacaagacgactgaaagatgggggctggagagagggtgcaggccccacctagggcggaggccacagcagggagaggggcagacagagccaggaccctggaagga

SEQ ID NO: 15029 - protein, 101 aa, Homo sapiens
MAGRMGPLRGVWGLSLPFFHLFPLSLSFLHRNIHIPRNLFLRPLFLLCLSLSLSHTSHTHTPTCNYSVSLLGSPTFPSPPHLYALEFSNFEEIEDAIFPCE

SEQ ID NO: 15030 - DNA, 840 bp, Homo sapiens
ggattcgctataagaaaaacatcggaaagttccaagaggaggttgcaaaaagccagatgtgggggaaaagtaacatcaacactgtcccatcctcagccctgaactagctaccatctgatcccctcagacattctcaggattttacaagactgtcagagtggggaacccctcccattaaagatccgggcaggactggggacaggttggaagtgtgatgggtgggggggtgggaggcatgggccgggggcagttctctcctcacttgtaaacttgtgtagtttcacagaaaaaaaacaaaatgcagttttaaataaagaaatttcttttttccctgggtttagttgagaatttttttcaaaaaacatgagaaaccccagaaaaaaaatgattttctttcacgaagttccaaacaggtttctctcctgttccccagccttgccttcatgatgcaggcccaattgcacccttgcagacaacagtctggcctgaaccctattgatgcaactttgcgcaatcaagatggggctccagtgggtcaccaggcagccctgatggactgatggaataaataggatcgggggctctgagggaatgagaccctagagggtacactccccatcccccagggaagtgactgtacccagaggctggtagtacccaggggtggggtgataattatttctctagtacctgaaggactcttgtcccaaaggcatgaattcctagcattccctgtgacaagacgactgaaagatgggggctggagagagggtgcaggccccacctagggcggaggccacagcagggagaggggcagacagagccaggaccctggaagga

SEQ ID NO: 15031 - protein, 38 aa, Homo sapiens
MMQAQLHPCRQQSGLNPIDATLRNQDGAPVGHQAALMD

SEQ ID NO: 15032 - DNA, 2947 bp, Homo sapiens
tgggcaacagcatagtgagaccaggaagcaaaaaaaaaaaaaatgctgtcactcacatcttattcagtgaaggacttcagaggcaaatgtttctacctgaccctcctttctgccccacaggtctccaactggtttggcaacaagaggattcgctataagaaaaacatcggaaagttccaagaggaggcaaacatctatgctgtcaagaccgccgtgtcagtcacccaggggggccacagccgcaccagctccccgacacccccttcctctgcaggctctggcggctctttcaatctctcaggatctggagacatgtttctggggatgcctgggctcaacggagattcctattctgcttcccaggtcagatgcccatctcctctcgaatagggctttccccaactccatttcctctactttaggatacaagacctctttcctctgaggcttctcttcactgtcataccttcctctgctgcctgcaggtggaatcactccgacactcgatggggccagggggctatggggataacctcgggggaggccagatgtacagcccacgggaaatgagggtgagtggatcctgaagctcctctctgtccagttctcacaggacagaggggcattttccctagtaatgttgtgcccacacagggttcccagggctttctctgttttctgtactctgtctctcctttcaggcaaatggcagctggcaagaggctgtgaccccctcttcagtgacatccccaacggagggaccagggagtgttcactctgatacctccaactgatcttgcccctcagggtcacaggggtgggggctctcacaaggcgacttgaagaggacgcaggcttccagaggacaaaccccaatacaggagaagcacaagacagagaagggccaatggggtcatcccctccctaacgagactctctgtgctgggggtgctaattacatggcaggaagaatggggcctctaaggggagtgtggggtctgtctctcccttttttccatctttttcctctctcgctttctttcttacacagaaacatacacataccgagaaacctatttctcagacccctttttctcctctgtctttctctctccctctcccacacctcacacacacatactcccacttgcaactattctgtttctctcctgggctcccccactttcccttccccaccccacttgtatgctctggaatctgtggagacgccagccctgcccaatcagagatgccaaaaatggggacatgacttctggacagaggacatgggccacgcccccatgcatccccacccccgcccctccggacggcttacttacctcatacgcagctcatcttaaaccaatagaatcgctcggtggacgagagtgtctgactcagatatctacctcggagggagtttctgctactttagggaattattgactgggctttggggttgaacttttttttttttaaagaaagaaaaagaaaccctgggatccatctgttttttttgttgttgttgttgtttttgttgttgttggtggtggtggtggtggtggttcttaatttttaatttagtttggggaagtagcttgtttttttttttataaatatgttgatttcttgtctttttttttttttatttcttactttcccatattaggggtgatagccaaaggggttctggtaagagaaagggggacaaacagaactggtaaagaggcccccctggctccaggcctgtccatcaggaagtaaattttacagggcaccaagctttgccccctaaaatcccttaggtgttctttgttcatgcaggcaggtttctgccgcatttgatgtggaggcagtgaagggcttgccctgctggcctctcatcccccttcttcccacaacccttgggcagggctggactcagtaattttgaggaaattgaagatgccatcttcccctgtgagtgacatgtctttaattttttaaaaaactactatttgaaaattggagggggaagaatgggaagggagttattgccaaatatgttaaatatgggttggggtgcttgtatatgtatcttcctcaatttccccataaatgaggtatctttttgtcacaccaaaatcaaggggtagggagagggaggaggttgcaaaaagccagatgtgggggaaaagtaacatcaacactgtcccatcctcagccctgaactagctaccatctgatcccctcagacattctcaggattttacaagactgtcagagtggggaacccctcccattaaagatccgggcaggactggggacaggttggaagtgtgatgggtgggggggtgggaggcatgggccgggggcagttctctcctcacttgtaaacttgtgtagtttcacagaaaaaaaacaaaatgcagttttaaataaagaaatttcttttttccctgggtttagttgagaatttttttcaaaaaacatgagaaaccccagaaaaaaaatgattttctttcacgaagttccaaacaggtttctctcctgttccccagccttgccttcatgatgcaggcccaattgcacccttgcagacaacagtctggcctgaaccctattgatgcaactttgcgcaatcaagatggggctccagtgggtcaccaggcagccctgatggactgatggaataaataggatcgggggctctgagggaatgagaccctagagggtacactccccatcccccagggaagtgactgtacccagaggctggtagtacccaggggtggggtgataattatttctctagtacctgaaggactcttgtcccaaaggcatgaattcctagcattccctgtgacaagacgactgaaagatgggggctggagagagggtgcaggccccacctagggcggaggccacagcagggagaggggcagacagagccaggaccctggaagga

SEQ ID NO: 15033 - protein, 115 aa, Homo sapiens
MLSLTSYSVKDFRGKCFYLTLLSAPQVSNWFGNKRIRYKKNIGKFQEEANIYAVKTAVSVTQGGHSRTSSPTPPSSAGSGGSFNLSGSGDMFLGMPGLNGDSYSASQVRCPSPLE

SEQ ID NO: 15034 - DNA, 1718 bp, Homo sapiens
caaatggcagctggcaagaggctgtgaccccctcttcagtgacatccccaacggagggaccagggagtgttcactctgatacctccaactgatcttgcccctcagggtcacaggggtgggggctctcacaaggcgacttgaagaggacgcaggcttccagaggacaaaccccaatacaggagaagcacaagacagagaagggccaatggggtcatcccctccctaacgagactctctgtgctgggggtgctaattacatggcaggaagaatggggcctctaaggggagtgtggggtctgtctctcccttttttccatctttttcctctctcgctttctttcttacacagaaacatacacataccgagaaacctatttctcagacccctttttctcctctgtctttctctctccctctcccacacctcacacacacatactcccacttgcaactattctgtttctctcctgggctcccccactttcccttccccaccccacttgtatgctctggaatctgtggagacgccagccctgcccaatcagagatgccaaaaatggggacatgacttctggacagaggacatgggccacgcccccatgcatccccacccccgcccctccggacggcttacttacctcatacgcagctcatcttaaaccaatagaatcgctcggtggacgagagtgtctgactcagatatctacctcggagggagtttctgctactttagggaattattgactgggctttggggttgaacttttttttttttaaagaaagaaaaagaaaccctgggatccatctgttttttttgttgttgttgttgtttttgttgttgttggtggtggtggtggtggtggttcttaatttttaatttagtttggggaagtagcttgtttttttttttataaatatgttgatttcttgtctttttttttttttatttcttactttcccatattaggggtgatagccaaaggggttctggtaagagaaagggggacaaacagaactggtaaagaggcccccctggctccaggcctgtccatcaggaagtaaattttacagggcaccaagctttgccccctaaaatcccttaggtgttctttgttcatgcaggcaggtttctgccgcatttgatgtggaggcagcatgggccgggggcagttctctcctcacttgtaaacttgtgtagtttcacagaaaaaaaacaaaatgcagttttaaataaagaaatttcttttttccctgggtttagttgagaatttttttcaaaaaacatgagaaaccccagaaaaaaaatgattttctttcacgaagttccaaacaggtttctctcctgttccccagccttgccttcatgatgcaggcccaattgcacccttgcagacaacagtctggcctgaaccctattgatgcaactttgcgcaatcaagatggggctccagtgggtcaccaggcagccctgatggactgatggaataaataggatcgggggctctgagggaatgagaccctagagggtacactccccatcccccagggaagtgactgtacccagaggctggtagtacccaggggtggggtgataattatttctctagtacctgaaggactcttgtcccaaaggcatgaattcctagcattccctgtgacaagacgactgaaagatgggggctggagagagggtgcaggccccacctagggcggaggcc

SEQ ID NO: 15035 - protein, 40 aa, Homo sapiens
MWRQHGPGAVLSSLVNLCSFTEKKQNAVLNKEISFFPGFS

SEQ ID NO: 15036 - DNA, 1037 bp, Homo sapiens
aatggcagctggcaagaggctgtgaccccctcttcagtgacatccccaacggagggaccagggagtgttcactctgatacctccaactgatcttgcccctcagggtcacaggggtgggggctctcacaaggcgacttgaagaggacgcaggcttccagaggacaaaccccaatacaggagaagcacaagacagagaagggccaatggggtcatcccctccctaacgagactctctgtgctgggggtgctaattacatggcaggaagaatggggcctctaaggggagtgtggggtctgtctctcccttttttccatctttttcctctctcgctttctttcttacacagaaacatacacataccgagaaacctatttctcagacccctttttctcctctgtctttctctctccctctcccacacctcacacacacatactcccacttgcaactattctgtttctctcctgggctcccccactttcccttccccaccccacttgtatgctctggaattcagtaattttgaggaaattgaagatgccatcttcccctgtgagtgacatgtctttaattttttaaaaaactactatttgaaaattggagggggaagaatgggaagggagttattgccaaatatgttaaatatgggttggggtgcttgtatatgtatcttcctcaatttccccataaatgaggtatctttttgtcacaccaaaatcaaggggtagggagagggaggaggttgcaaaaagccagatgtgggggaaaagtaacatcaacactgtcccatcctcagccctgaactagctaccatctgatcccctcagacattctcaggattttacaagactgtcagagtggggaacccctcccattaaagatccgggcaggactggggacaggttggaagtgtgatgggtgggggggtgggaggcatgggccgggggcagttctctcctcacttgtaaacttgtgtagtttcacagaaaaaaaacaaaatgcagttttaaataaagaaatttcttttttccctggg

SEQ ID NO: 15037 - protein, 101 aa, Homo sapiens; identical to SEQ ID NO: 15029

SEQ ID NO: 15038 - DNA, 2443 bp, Homo sapiens
tgggcaacagcatagtgagaccaggaagcaaaaaaaaaaaaaatgctgtcactcacatcttattcagtgaaggacttcagaggcaaatgtttctacctgaccctcctttctgccccacaggtctccaactggtttggcaacaagaggattcgctataagaaaaacatcggaaagttccaagaggaggcaaacatctatgctgtcaagaccgccgtgtcagtcacccaggggggccacagccgcaccagctccccgacacccccttcctctgcaggctctggcggctctttcaatctctcaggatctggagacatgtttctggggatgcctgggctcaacggagattcctattctgcttcccaggtcagatgcccatctcctctcgaatagggctttccccaactccatttcctctactttaggatacaagacctctttcctctgaggcttctcttcactgtcataccttcctctgctgcctgcaggtggaatcactccgacactcgatggggccagggggctatggggataacctcgggggaggccagatgtacagcccacgggaaatgagggtgagtggatcctgaagctcctctctgtccagttctcacaggacagaggggcattttccctagtaatgttgtgcccacacagggttcccagggctttctctgttttctgtactctgtctctcctttcaggcaaatggcagctggcaagaggctgtgaccccctcttcagtgacatccccaacggagggaccagggagtgttcactctgatacctccaactgatcttgcccctcagggtcacaggggtgggggctctcacaaggcgacttgaagaggacgcaggcttccagaggacaaaccccaatacaggagaagcacaagacagagaagggccaatggggtcatcccctccctaacgagactctctgtgctgggggtgctaattacatggcaggaagaatggggcctctaaggggagtgtggggtctgtctctcccttttttccatctttttcctctctcgctttctttcttacacagaaacatacacataccgagaaacctatttctcagacccctttttctcctctgtctttctctctccctctcccacacctcacacacacatactcccacttgcaactattctgtttctctcctgggctcccccactttcccttccccaccccacttgtatgctctggaatctgtggagacgccagccctgcccaatcagagatgccaaaaatggggacatgacttctggacagaggacatgggccacgcccccatgcatccccacccccgcccctccggacggcttacttacctcatacgcagctcatcttaaaccaatagaatcgctcggtggacgagagtgtctgactcagatatctacctcggagggagtttctgctactttagggaattattgactgggctttggggttgaacttttttttttttaaagaaagaaaaagaaaccctgggatccatctgttttttttgttgttgttgttgtttttgttgttgttggtggtggtggtggtggtggttcttaatttttaatttagtttggggaagtagcttgtttttttttttataaatatgttgatttcttgtctttttttttttttatttcttactttcccatattaggggtgatagccaaaggggttctggtaagagaaagggggacaaacagaactggtaaagaggcccccctggctccaggcctgtccatcaggaagtaaattttacagggcaccaagctttgccccctaaaatcccttaggtgttctttgttcatgcaggcaggtttctgccgcatttgatgtggaggcagtgaagggcttgccctgctggcctctcatcccccttcttcccacaacccttgggcagggctggactcagtaattttgaggaaattgaagatgccatcttcccctgtgagtgacatgtctttaattttttaaaaaactactatttgaaaattggagggggaagaatgggaagggagttattgccaaatatgttaaatatgggttggggtgcttgtatatgtatcttcctcaatttccccataaatgaggtatctttttgtcacaccaaaatcaaggggtagggagagggaggaggttgcaaaaagccagatgtgggggaaaagtaacatcaacactgtcccatcctcagccctgaactagctaccatctgatcccctcagacattctcaggattttacaagactgtcagagtggggaacccctcccattaaagatccgggcaggactggggacaggttggaagtgtgatgggtgggggggtgggaggcatgggccgggggcagttctctcctcacttgtaaacttgtgtagtttcacagaaaaaaaacaaaatgcagttttaaataaagaaatttcttttttccctggg

SEQ ID NO: 15039 - protein, 115 aa, Homo sapiens; identical to SEQ ID NO: 15033

SEQ ID NO: 15040 - DNA, 3213 bp, Homo sapiens
ctctctcacacacacccccgcttgggcctcctctctctctccggctccattttctccgccgccgggggccggggtctcctgtggggggcccagccggtatcccaggtctcccttcagtgccggggtgaacccccgggggagccgggagccgggggcagacgggcgggggttggggcggagggagcagcggccccagcgagtttggggggagaagtaaccaggcggggggaggggcggagcagggagggggcctcagggcccccccccagctatggacgaacggctactggggccgccccctccaggcgggggccgggggggcctgggattggtgagtggggagcctgggggccctggcgagcctcccggtggcggagaccccggtgggggtagcgggggggtcccgggaggccgagggaagcaagacatcggggacattctgcagcagataatgaccatcaccgaccagagcctggacgaggcccaggccaagaaacacgccctaaactgccaccgaatgaagcctgctctctttagcgtcctgtgtgaaatcaaggagaaaactggcctcagcattcggagctcccaggaggaggagccggtggacccacagctgatgcgcttggacaacatgcttctggcagagggtgtggctgggcccgagaaagggggcggctcagcagcagcagctgcagccgctgcagcctctggtggtggtgtgtcccctgacaactccatcgaacactcggactatcgcagcaaacttgcccagatccgtcacatataccactcggagctggagaagtatgagcaggcatgtaatgagttcacgacccatgtcatgaacctgctgagggagcagagccgcaccaggcccgtggcccccaaagagatggaacgcatggtgagcatcatccatcgaaagttcagcgccatccagatgcagctgaagcagagcacctgcgaggctgtgatgatcctgcgctcccgtttcctggatgccagacgaaagcgccgtaacttcagcaaacaggccactgaggtcctaaatgagtatttctactcccacctgagtaacccatatcctagtgaggaggccaaggaggagcttgccaagaagtgtggcatcaccgtgtctcaggtctccaactggtttggcaacaagaggattcgctataagaaaaacatcggaaagttccaagaggaggcaaacatctatgctgtcaagaccgccgtgtcagtcacccaggggggccacagccgcaccagctccccgacacccccttcctctgcaggctctggcggctctttcaatctctcaggatctggagacatgtttctggggatgcctgggctcaacggagattcctattctgcttcccaggtggaatcactccgacactcgatggggccagggggctatggggataacctcgggggaggccagatgtacagcccacgggaaatgagggcaaatggcagctggcaagaggctgtgaccccctcttcagtgacatccccaacggagggaccagggagtgttcactctgatacctccaactgatcttgcccctcagggtcacaggggtgggggctctcacaaggcgacttgaagaggacgcaggcttccagaggacaaaccccaatacaggagaagcacaagacagagaagggccaatggggtcatcccctccctaacgagactctctgtgctgggggtgctaattacatggcaggaagaatggggcctctaaggggagtgtggggtctgtctctcccttttttccatctttttcctctctcgctttctttcttacacagaaacatacacataccgagaaacctatttctcagacccctttttctcctctgtctttctctctccctctcccacacctcacacacacatactcccacttgcaactattctgtttctctcctgggctcccccactttcccttccccaccccacttgtatgctctggaatctgtggagacgccagccctgcccaatcagagatgccaaaaatggggacatgacttctggacagaggacatgggccacgcccccatgcatccccacccccgcccctccggacggcttacttacctcatacgcagctcatcttaaaccaatagaatcgctcggtggacgagagtgtctgactcagatatctacctcggagggagtttctgctactttagggaattattgactgggctttggggttgaacttttttttttttaaagaaagaaaaagaaaccctgggatccatctgttttttttgttgttgttgttgtttttgttgttgttggtggtggtggtggtggtggttcttaatttttaatttagtttggggaagtagcttgtttttttttttataaatatgttgatttcttgtctttttttttttttatttcttactttcccatattaggggtgatagccaaaggggttctggtaagagaaagggggacaaacagaactggtaaagaggcccccctggctccaggcctgtccatcaggaagtaaattttacagggcaccaagctttgccccctaaaatcccttaggtgttctttgttcatgcaggcaggtttctgccgcatttgatgtggaggcagtgaagggcttgccctgctggcctctcatcccccttcttcccacaacccttgggcagggctggactcagtaattttgaggaaattgaagatgccatcttcccctgtgagtgacatgtctttaattttttaaaaaactactatttgaaaattggagggggaagaatgggaagggagttattgccaaatatgttaaatatgggttggggtgcttgtatatgtatcttcctcaatttccccataaatgaggtatctttttgtcacaccaaaatcaaggggtagggagagggaggaggttgcaaaaagccagatgtgggggaaaagtaacatcaacactgtcccatcctcagccctgaactagctaccatctgatcccctcagacattctcaggattttacaagactgtcagagtggggaacccctcccattaaagatccgggcaggactggggacaggttggaagtgtgatgggtgggggggtgggaggcatgggccgggggcagttctctcctcacttgtaaacttgtgtagtttcacagaaaaaaaacaaaatgcagttttaaataaagaaatttcttttttccctggg

SEQ ID NO: 15041 - protein, 430 aa, Homo sapiens; identical to SEQ ID NO: 1670

SEQ ID NO: 15042 - DNA, 1512 bp, Homo sapiens
tgggcaacagcatagtgagaccaggaagcaaaaaaaaaaaaaatgctgtcactcacatcttattcagtgaaggacttcagaggcaaatgtttctacctgaccctcctttctgccccacaggtctccaactggtttggcaacaagaggattcgctataagaaaaacatcggaaagttccaagaggaggcaaacatctatgctgtcaagaccgccgtgtcagtcacccaggggggccacagccgcaccagctccccgacacccccttcctctgcaggctctggcggctctttcaatctctcaggatctggagacatgtttctggggatgcctgggctcaacggagattcctattctgcttcccaggtcagatgcccatctcctctcgaatagggctttccccaactccatttcctctactttaggatacaagacctctttcctctgaggcttctcttcactgtcataccttcctctgctgcctgcaggtggaatcactccgacactcgatggggccagggggctatggggataacctcgggggaggccagatgtacagcccacgggaaatgagggtgagtggatcctgaagctcctctctgtccagttctcacaggacagaggggcattttccctagtaatgttgtgcccacacagggttcccagggctttctctgttttctgtactctgtctctcctttcaggcaaatggcagctggcaagaggctgtgaccccctcttcagtgacatccccaacggagggaccagggagtgttcactctgatacctccaactgatcttgcccctcagggtcacaggggtgggggctctcacaaggcgacttgaagaggacgcaggcttccagaggacaaaccccaatacaggagaagcacaagacagagaagggccaatggggtcatcccctccctaacgagactctctgtgctgggggtgctaattacatggcaggaagaatggggcctctaaggggagtgtggggtctgtctctcccttttttccatctttttcctctctcgctttctttcttacacagaaacatacacataccgagaaacctatttctcagacccctttttctcctctgtctttctctctccctctcccacacctcacacacacatactcccacttgcaactattctgtttctctcctgggctcccccactttcccttccccaccccacttgtatgctctggaatctgtggagacgccagccctgcccaatcagagatgccaaaaatggggacatgacttctggacagaggacatgggccacgcccccatgcatccccacccccgcccctccggacggcttacttacctcatacgcagctcatcttaaaccaatagaatcgctcggtggacgagagtgtctgactcagatatctacctcggagggagtttctgctactttagggaattattgactgggctttggggttgaacttttttttttttaaagaaagaaaaagaaaccctgggatccatctgtt

SEQ ID NO: 15043 - protein, 115 aa, Homo sapiens; identical to SEQ ID NO: 15033

SEQ ID NO: 15044 - DNA, 1387 bp, Homo sapiens
tgggcaacagcatagtgagaccaggaagcaaaaaaaaaaaaaatgctgtcactcacatcttattcagtgaaggacttcagaggcaaatgtttctacctgaccctcctttctgccccacaggtctccaactggtttggcaacaagaggattcgctataagaaaaacatcggaaagttccaagaggaggcaaacatctatgctgtcaagaccgccgtgtcagtcacccaggggggccacagccgcaccagctccccgacacccccttcctctgcaggctctggcggctctttcaatctctcaggatctggagacatgtttctggggatgcctgggctcaacggagattcctattctgcttcccaggtcagatgcccatctcctctcgaatagggctttccccaactccatttcctctactttaggatacaagacctctttcctctgaggcttctcttcactgtcataccttcctctgctgcctgcaggtggaatcactccgacactcgatggggccagggggctatggggataacctcgggggaggccagatgtacagcccacgggaaatgagggtgagtggatcctgaagctcctctctgtccagttctcacaggacagaggggcattttccctagtaatgttgtgcccacacagggttcccagggctttctctgttttctgtactctgtctctcctttcaggcaaatggcagctggcaagaggctgtgaccccctcttcagtgacatccccaacggagggaccagggagtgttcactctgatacctccaactgatcttgcccctcagggtcacaggggtgggggctctcacaaggcgacttgaagaggacgcaggcttccagaggacaaaccccaatacaggagaagcacaagacagagaagggccaatggggtcatcccctccctaacgagactctctgtgctgggggtgctaattacatggcaggaagaatggggcctctaaggggagtgtggggtctgtctctcccttttttccatctttttcctctctcgctttctttcttacacagaaacatacacataccgagaaacctatttctcagacccctttttctcctctgtctttctctctccctctcccacacctcacacacacatactcccacttgcaactattctgtttctctcctgggctcccccactttcccttccccaccccacttgtatgctctggaatctgtggagacgccagccctgcccaatcagagatgccaaaaatggggacatgacttctggacagaggacatgggccacgcccccatgcatccccacccccgcccctccggacggcttacttacctcatacgcagctcatcttaaaccaatagaatcgctcggtggacgag

SEQ ID NO: 15045 - protein, 115 aa, Homo sapiens; identical to SEQ ID NO: 15033

SEQ ID NO: 15046 - DNA, 1555 bp, Homo sapiens
acacacacccccgcttgggcctcctctctctctccggctccattttctccgccgccgggggccggggtctcctgtggggggcccagccggtatcccaggtctcccttcagtgccggggtgaacccccgggggagccgggagccgggggcagacgggcgggggttggggcggagggagcagcggccccagcgagtttggggggagaagtaaccaggcggggggaggggcggagcagggagggggcctcagggcccccccccagctatggacgaacggctactggggccgccccctccaggcgggggccgggggggcctgggattggtgagtggggagcctgggggccctggcgagcctcccggtggcggagaccccggtgggggtagcgggggggtcccgggaggccgagggaagcaagacatcggggacattctgcagcagataatgaccatcaccgaccagagcctggacgaggcccaggccaagaaacacgccctaaactgccaccgaatgaagcctgctctctttagcgtcctgtgtgaaatcaaggagaaaactggcctcagcattcggagctcccaggaggaggagccggtggacccacagctgatgcgcttggacaacatgcttctggcagagggtgtggctgggcccgagaaagggggcggctcagcagcagcagctgcagccgctgcagcctctggtggtggtgtgtcccctgacaactccatcgaacactcggactatcgcagcaaacttgcccagatccgtcacatataccactcggagctggagaagtatgagcaggcatgtaatgagttcacgacccatgtcatgaacctgctgagggagcagagccgcaccaggcccgtggcccccaaagagatggaacgcatggtgagcatcatccatcgaaagttcagcgccatccagatgcagctgaagcagagcacctgcgaggctgtgatgatcctgcgctcccgtttcctggatgccagacgaaagcgccgtaacttcagcaaacaggccactgaggtcctaaatgagtatttctactcccacctgagtaacccatatcctagtgaggaggccaaggaggagcttgccaagaagtgtggcatcaccgtgtctcaggtctccaactggtttggcaacaagaggattcgctataagaaaaacatcggaaagttccaagaggaggcaaacatctatgctgtcaagaccgccgtgtcagtcacccaggggggccacagccgcaccagctccccgacacccccttcctctgcaggtggatcccactgtcaccccggctgactgttttgcacacttcctgcttttgttcccacttcctatctaggcaggatcatagcagagagggggccttttggggtgagagggaccgagctgagataggctggagatgtcaggggacagaggccattccagtgatcttagttctgcctttcttcccacgggtggccaaggaacagcctgctctttctgtgtgttggaatgttattttgtggataattggagtatagtagcatgtccccac

SEQ ID NO: 15047 - protein, 349 aa, Homo sapiens
MDERLLGPPPPGGGRGGLGLVSGEPGGPGEPPGGGDPGGGSGGVPGGRGKQDIGDILQQIMTITDQSLDEAQAKKHALNCHRMKPALFSVLCEIKEKTGLSIRSSQEEEPVDPQLMRLDNMLLAEGVAGPEKGGGSAAAAAAAAASGGGVSPDNSIEHSDYRSKLAQIRHIYHSELEKYEQACNEFTTHVMNLLREQSRTRPVAPKEMERMVSIIHRKFSAIQMQLKQSTCEAVMILRSRFLDARRKRRNFSKQATEVLNEYFYSHLSNPYPSEEAKEELAKKCGITVSQVSNWFGNKRIRYKKNIGKFQEEANIYAVKTAVSVTQGGHSRTSSPTPPSSAGGSHCHPG

SEQ ID NO: 15048 - DNA, 1427 bp, Homo sapiens
cattccacccccaactcattccacccccaatccgcttcctccctccgcagactgaccctcctccctccttgttctcaggccccctgctctgtttctctagctcctcaacttttctctttccccactcccactcctcccaaggaaacacgccctaaactgccaccgaatgaagcctgctctctttagcgtcctgtgtgaaatcaaggagaaaactggtatgtgggccccccccggattgctcaactctgggaacagaaccctgttcattatagggctagagtgtgacaacttggggccctgaggaaagtaaggagtcagggggactggggaaggaaccaaagcctgggaacttggctctccaggaagcaccaggaggactgagcactgggtattggggtctctgggtccctaagtccactcgcctgcatgctaggcctcagcattcggagctcccaggaggaggagccggtggacccacagctgatgcgcttggacaacatgcttctggcagagggtgtggctgggcccgagaaagggggcggctcagcagcagcagctgcagccgctgcagcctctggtggtggtgtgtcccctgacaactccatcgaacactcggactatcgcagcaaacttgcccagatccgtcacatataccactcggagctggagaagtatgagcaggcatgtaatgagttcacgacccatgtcatgaacctgctgagggagcagagccgcaccaggcccgtggcccccaaagagatggaacgcatggtgagcatcatccatcgaaagttcagcgccatccagatgcagctgaagcagagcacctgcgaggctgtgatgatcctgcgctcccgtttcctggatgccagacgaaagcgccgtaacttcagcaaacaggccactgaggtcctaaatgagtatttctactcccacctgagtaacccatatcctagtgaggaggccaaggaggagcttgccaagaagtgtggcatcaccgtgtctcaggtctccaactggtttggcaacaagaggattcgctataagaaaaacatcggaaagttccaagaggaggcaaacatctatgctgtcaagaccgccgtgtcagtcacccaggggggccacagccgcaccagctccccgacacccccttcctctgcaggtggatcccactgtcaccccggctgactgttttgcacacttcctgcttttgttcccacttcctatctaggcaggatcatagcagagagggggccttttggggtgagagggaccgagctgagataggctggagatgtcaggggacagaggccattccagtgatcttagttctgcctttcttcccacgggtggccaaggaacagcctgctctttctgtgtgttggaatgttattttgtggataattggagtatagtagcatgtcccc

SEQ ID NO: 15049 - protein, 253 aa, Homo sapiens [sequence omitted]

SEQ ID NO: 15050 - DNA, 693 bp, Homo sapiens
ggaaggctggccccctccaaactccaccactcggccttggcgatctgctcctccatcccctcctcctccagggacccgccacacagctgctgagacttgagccccaaccagcccttccttgccactggtctcaaagctgggcagcccattgcatgccctcaactcttgcttggcaggggtaccagagactgaaagacacggcacaaatctcaatattcatctcccacatcaccttccctgggaactggacagggtgaaagtcctcaaactctgggaacaggcgagatggaacagggatttaactccccgcccacaggtccatgggagcttgaggcagtaagggggatcccaggcacccatctcaaggagtggctgggagtcttttccctaacttgtggggacaccaccagttgtcaagctactaggcagtagggtctgagggctcaggcctccacctgagaggttataacctgagagacagctctacccttcctcccagtaagaagggaaggtgggtgggcacctgagagattaagactattctcccagtcccactaccagcacccccgatccctgagactgaggggtttacgggctgtgaatggaccttcagccctgcccaccctccctccccactgctgctgagtctgtctgatgttttggttgtgtgaataaatataattcccctctgga

SEQ ID NO: 15051 - protein, 48 aa, Homo sapiens
MEQGFNSPPTGPWELEAVRGIPGTHLKEWLGVFSLTCGDTTSCQATRQ

SEQ ID NO: 15052 - DNA, 1254 bp, Homo sapiens
gggagcagagccagggattaggggactactgaggctctggagatgagaccgccaggagtccttccccaccatgagccccctccactcctgcagctggaggagtttttcccagtctcagtgctgccctggggcgagagagactgaacaagctgtttgggtgggaagagaatggaggaagctgagagaccccaggaagaagaggatggtgagcagggcccccctcaggatgaggaaggctggccccctccaaactccaccactcggccttggcgatctgctcctccatcccctcctcctccagggacccgccacacagccctgggaccccgctcggcctccctgctctccctgcagactgaactccttctggacctggtggctgaagcccagtcccgccgcctggaggagcagagggccaccttctacaccccccaaaacccctcaagcctagcccctgccccactccgtcctctcgaggacagagaacagctttacagcactatcctcagtcaccagtgccagcggatggaagcccagcggtcagagcctcccctccctccaggggggcaagagctcctggagttgctgctgagagttcagggtgggggtcgaatggaggagcaaaggtcccggccccccacacacacctgctgagacttgagccccaaccagcccttccttgccactggtctcaaagctgggcagcccattgcatgccctcaactcttgcttggcaggggtaccagagactgaaagacacggcacaaatctcaatattcatctcccacatcaccttccctgggaactggacagggtgaaagtcctcaaactctgggaacaggcgagatggaacagggatttaactccccgcccacaggtccatgggagcttgaggcagtaagggggatcccaggcacccatctcaaggagtggctgggagtcttttccctaacttgtggggacaccaccagttgtcaagctactaggcagtagggtctgagggctcaggcctccacctgagaggttataacctgagagacagctctacccttcctcccagtaagaagggaaggtgggtgggcacctgagagattaagactattctcccagtcccactaccagcacccccgatccctgagactgaggggtttacgggctgtgaatggaccttcagccctgcccaccctccctccccactgctgctgagtctgtctgatgttttggttgtgtgaataaatataattcccctctgga

SEQ ID NO: 15053 - protein, 161 aa, Homo sapiens
MEEAERPQEEEDGEQGPPQDEEGWPPPNSTTRPWRSAPPSPPPPGTRHTALGPRSASLLSLQTELLLDLVAEAQSRRLEEQRATFYTPQNPSSLAPAPLRPLEDREQLYSTILSHQCQRMEAQRSEPPLPPGGQELLELLLRVQGGGRMEEQRSRPPTHTC

SEQ ID NO: 15054 - DNA, 1495 bp, Homo sapiens
gctagttcctgtgttgacagaaagagcagaagaggaggtggggtggagggagcagagccagggattaggggactactgaggctctggagatgagaccgccaggagtccttccccaccatgagccccctccactcctgcagctggaggagtttttcccagtctcagtgctgccctggggcgagagagactgaacaagctgtttgggtgggaagagaatggaggaagttgacagggatgggcggggcccgtgggggggctgaccaggaacccagcttcctgctcagtacccaggcatccagcccccagctcacccccaccccttccagcccccactcccctcaggaacccaaggttccagccctcctcccaaatcccagccacccctcccccaccagtttctcccctctaggggatggaggctgagagaccccaggaagaagaggatggtgagcagggcccccctcaggatgaggaaggctggccccctccaaactccaccactcggccttggcgatctgctcctccatcccctcctcctccagggacccgccacacagccctgggaccccgctcggcctccctgctctccctgcagactgaactccttctggacctggtggctgaagcccagtcccgccgcctggaggagcagagggccaccttctacaccccccaaaacccctcaagcctagcccctgccccactccgtcctctcgaggacagagaacagctttacagcactatcctcagtcaccagtgccagcggatggaagcccagcggtcagagcctcccctccctccaggggggcaagagctcctggagttgctgctgagagttcagggtgggggtcgaatggaggagcaaaggtcccggccccccacacacacctgctgagacttgagccccaaccagcccttccttgccactggtctcaaagctgggcagcccattgcatgccctcaactcttgcttggcaggggtaccagagactgaaagacacggcacaaatctcaatattcatctcccacatcaccttccctgggaactggacagggtgaaagtcctcaaactctgggaacaggcgagatggaacagggatttaactccccgcccacaggtccatgggagcttgaggcagtaagggggatcccaggcacccatctcaaggagtggctgggagtcttttccctaacttgtggggacaccaccagttgtcaagctactaggcagtagggtctgagggctcaggcctccacctgagaggttataacctgagagacagctctacccttcctcccagtaagaagggaaggtgggtgggcacctgagagattaagactattctcccagtcccactaccagcacccccgatccctgagactgaggggtttacgggctgtgaatggaccttcagccctgcccaccctccctccccactgctgctgagtctgtctgatgttttggttgtgtgaataaatataattcccctctgga

SEQ ID NO: 15055 - protein, 160 aa, Homo sapiens; identical to SEQ ID NO: 1672

SEQ ID NO: 15056 - DNA, 1457 bp, Homo sapiens
gctagttcctgtgttgacagaaagagcagaagaggaggtggggtggagggagcagagccagggattaggggactactgaggctctggagatgagaccgccaggagtccttccccaccatgagccccctccactcctgcagctggaggagtttttcccagtctcagtgctgccctggggcgagagagactgaacaagctgtttgggtgggaagagaatggaggaagttgacagggatgggcggggcccgtgggggggctgaccaggaacccagcttcctgctcagtacccaggcatccagcccccagctcacccccaccccttccagcccccactcccctcaggaacccaaggttccagccctcctcccaaatcccagccacccctcccccaccagtttctcccctctaggggatggaggctgagagaccccaggaagaagaggatggtgagcagggcccccctcaggatgaggaaggctggccccctccaaactccaccactcggccttggcgatctgctcctccatcccctcctcctccagggacccgccacacagactgaactccttctggacctggtggctgaagcccagtcccgccgcctggaggagcagagggccaccttctacaccccccaaaacccctcaagcctagcccctgccccactccgtcctctcgaggacagagaacagctttacagcactatcctcagtcaccagtgccagcggatggaagcccagcggtcagagcctcccctccctccaggggggcaagagctcctggagttgctgctgagagttcagggtgggggtcgaatggaggagcaaaggtcccggccccccacacacacctgctgagacttgagccccaaccagcccttccttgccactggtctcaaagctgggcagcccattgcatgccctcaactcttgcttggcaggggtaccagagactgaaagacacggcacaaatctcaatattcatctcccacatcaccttccctgggaactggacagggtgaaagtcctcaaactctgggaacaggcgagatggaacagggatttaactccccgcccacaggtccatgggagcttgaggcagtaagggggatcccaggcacccatctcaaggagtggctgggagtcttttccctaacttgtggggacaccaccagttgtcaagctactaggcagtagggtctgagggctcaggcctccacctgagaggttataacctgagagacagctctacccttcctcccagtaagaagggaaggtgggtgggcacctgagagattaagactattctcccagtcccactaccagcacccccgatccctgagactgaggggtttacgggctgtgaatggaccttcagccctgcccaccctccctccccactgctgctgagtctgtctgatgttttggttgtgtgaataaatataattcccctctgga

SEQ ID NO: 15057 - protein, 137 aa, Homo sapiens [sequence omitted]

SEQ ID NO: 15058 - DNA, 1456 bp, Homo sapiens
ccggagcggggatcacctcaacttgactgtggtcccccagccctccaagaaatgcccataaaccaaggaggagagggtaaaaaatagaagaatacatggaattggggagaagaatgggaaaaaagatgggagtgactgcataatgtcagcattttgtgcttttggctcagcatttggattggatggaggattttcatcctgaaaccagccctccgtcgccaccgaccatggaataattgtcttccacgaaactcttccctggtgccaaaaagggttttatgtatatatttgagagctccacatccctggatctgaatcctccacttcccactggaaccatgcccctcccagtcccgtttctcccctctaggggatggaggctgagagaccccaggaagaagaggatggtgagcagggcccccctcaggatgaggaaggctggccccctccaaactccaccactcggccttggcgatctgctcctccatcccctcctcctccagggacccgccacacagccctgggaccccgctcggcctccctgctctccctgcagactgaactccttctggacctggtggctgaagcccagtcccgccgcctggaggagcagagggccaccttctacaccccccaaaacccctcaagcctagcccctgccccactccgtcctctcgaggacagagaacagctttacagcactatcctcagtcaccagtgccagcggatggaagcccagcggtcagagcctcccctccctccaggggggcaagagctcctggagttgctgctgagagttcagggtgggggtcgaatggaggagcaaaggtcccggccccccacacacacctgctgagacttgagccccaaccagcccttccttgccactggtctcaaagctgggcagcccattgcatgccctcaactcttgcttggcaggggtaccagagactgaaagacacggcacaaatctcaatattcatctcccacatcaccttccctgggaactggacagggtgaaagtcctcaaactctgggaacaggcgagatggaacagggatttaactccccgcccacaggtccatgggagcttgaggcagtaagggggatcccaggcacccatctcaaggagtggctgggagtcttttccctaacttgtggggacaccaccagttgtcaagctactaggcagtagggtctgagggctcaggcctccacctgagaggttataacctgagagacagctctacccttcctcccagtaagaagggaaggtgggtgggcacctgagagattaagactattctcccagtcccactaccagcacccccgatccctgagactgaggggtttacgggctgtgaatggaccttcagccctgcccaccctccctccccactgctgctgagtctgtctgatgttttggttgtgtgaataaatataattcccctctgga

SEQ ID NO: 15059 - protein, 160 aa, Homo sapiens; identical to SEQ ID NO: 1672

SEQ ID NO: 15060 - DNA, 620 bp, Homo sapiens
gcccagcggtcagagcctcccctccctccaggggggcaagagctcctggagttgctgctgagagttcagggtgggggtcgaatggaggagcaaaggtcccggccccccacacacacctgctgagacttgagccccaaccagcccttccttgccactggtctcaaagctgggcagcccattgcatgccctcaactcttgcttggcaggggtaccagagactgaaagacacggcacaaatctcaatattcatctcccacatcaccttccctgggaactggacagggtgaaagtcctcaaactctgggaacaggcgagatggaacagggatttaactccccgcccacaggtccatgggagcttgaggcagtaagggggatcccaggcacccatctcaaggagtggctgggagtcttttccctaacttgtggggacaccaccagttgtcaagctactaggcagtagggtctgagggctcaggcctccacctgagaggttataacctgagaactgaggggtttacgggctgtgaatggaccttcagccctgcccaccctccctccccactgctgctgagtctgtctgatgttttggttgtgtgaataaatataattcccctctgg

SEQ ID NO: 15061 - protein, 48 aa, Homo sapiens; identical to SEQ ID NO: 15051

SEQ ID NO: 15062 - DNA, 609 bp, Homo sapiens
cagtgccagcggatggaagcccagcggtcagagcctcccctccctccaggggggcaagagctcctggagttgctgctgagagttcagggtgggggtcgaatggaggagcaaaggtcccggccccccacacacacctgctgagacttgagccccaaccagcccttccttgccactggtctcaaagctgggcagcccattgcatgccctcaactcttgcttggcaggggtaccagagactgaaagacacggcacaaatctcaatattcatctcccacatcaccttccctgggaactggacagggtgaaagtcctcaaactctgggaacaggcgagatggaacagggatttaactccccgcccacaggtccatgggagcttgaggcagtaagggggatcccaggcacccatctcaaggagtggctgggagtcttttccctaacttgtggggacaccaccagttgtcaagctactaggcagtagggtctgagggctcaggcctccacctgagaggttataacctgagagacagctctacccttccctccctccccactgctgctgagtctgtctgatgttttggttgtgtgaataaatataattcccctctgg

SEQ ID NO: 15063 - protein, 48 aa, Homo sapiens; identical to SEQ ID NO: 15051

SEQ ID NO: 15064 - DNA, 6745 bp, Homo sapiens
agacgtgaggcttgcagcaggccgaggaggaagaagaggggcagtgggagcagaggaggtggctcctgccccagtgagagctctgagggtccctgcctgaagagggacagggaccggggcttggagaaggggctgtggaatgcagcccccttcactgctgctgctgctgctgctgctgctgctgctatgtgtctcagtggtcagacccagagggctgctgtgtgggagtttcccagaaccctgtgccaatggaggcacctgcctgagcctgtctctgggacaagggacctgccagtgtgcccctggcttcctgggtgagacgtgccagtttcctgacccctgccagaacgcccagctctgccaaaatggaggcagctgccaagccctgcttcccgctcccctagggctccccagctctccctctccattgacacccagcttcttgtgcacttgcctccctggcttcactggtgagagatgccaggccaagcttgaagacccttgtcctccctccttctgttccaaaaggggccgctgccacatccaggcctcgggccgcccacagtgctcctgcatgcctggatggacaggtgagcagtgccagcttcgggacttctgttcagccaacccatgtgttaatggaggggtgtgtctggccacatacccccagatccagtgccactgcccaccgggcttcgagggccatgcctgtgaacgtgatgtcaacgagtgcttccaggacccaggaccctgccccaaaggcacctcctgccataacaccctgggctccttccagtgcctctgccctgtggggcaggagggtccacgttgtgagctgcgggcaggaccctgccctcctaggggctgttcgaatgggggcacctgccagctgatgccagagaaagactccacctttcacctctgcctctgtcccccaggtttcataggcccagactgtgaggtgaatccagacaactgtgtcagccaccagtgtcagaatgggggcacttgccaggatgggctggacacctacacctgcctctgcccagaaacctggacaggctgggactgctccgaagatgtggatgagtgtgagacccagggtccccctcactgcagaaacgggggcacctgccagaactctgctggtagctttcactgcgtgtgtgtgagtggctggggcggcacaagctgtgaggagaacctggatgactgtattgctgccacctgtgccccgggatccacctgcattgaccgggtgggctctttctcctgcctctgcccacctggacgcacaggactcctgtgccacttggaagacatgtgtctgagccagccgtgccatggggatgcccaatgcagcaccaaccccctcacaggctccacactctgcctgtgtcagcctggctattcggggcccacctgccaccaggacctggacgagtgtctgatggcccagcaaggcccaagtccctgtgaacatggcggttcctgcctcaacactcctggctccttcaactgcctctgtccacctggctacacaggctcccgttgtgaggctgatcacaatgagtgcctctcccagccctgccacccaggaagcacctgtctggacctacttgccaccttccactgcctctgcccgccaggcttagaagggcagctctgtgaggtggagaccaacgagtgtgcctcagctccctgcctgaaccacgcggattgccatgacctgctcaacggcttccagtgcatctgcctgcctggattctccggcacccgatgtgaggaggatatcgatgagtgcagaagctctccctgtgccaatggtgggcagtgccaggaccagcctggagccttccactgcaagtgtctcccaggctttgaagggccacgctgtcaaacagaggtggatgagtgcctgagtgacccatgtcccgttggagccagctgccttgatcttccaggagccttcttttgcctctgcccctctggtttcacaggccagctctgtgaggttcccctgtgtgctcccaacctgtgccagcccaagcagatatgtaaggaccagaaagacaaggccaactgcctctgtcctgatggaagccctggctgtgccccacctgaggacaactgcacctgccaccacgggcactgccagagatcctcatgtgtgtgtgacgtgggttggacggggccagagtgtgaggcagagctagggggctgcatctctgcaccctgtgcccatggggggacctgctacccccagccctctggctacaactgcacctgccctacaggctacacaggacccacctgtagtgaggagatgacagcttgtcactcagggccatgtctcaatggcggctcctgcaaccctagccctggaggctactactgcacctgccctccaagccacacagggccccagtgccaaaccagcactgactactgtgtgtctgccccgtgcttcaatgggggtacctgtgtgaacaggcctggcaccttctcctgcctctgtgccatgggcttccagggcccgcgctgtgagggaaagctccgccccagctgtgcagacagcccctgtaggaatagggcaacctgccaggacagccctcagggtccccgctgcctctgccccactggctacaccggaggcagctgccagactctgatggacttatgtgcccagaagccctgcccacgcaattcccactgcctccagactgggccctccttccactgcttgtgcctccagggatggaccgggcctctctgcaaccttccactgtcctcctgccagaaggctgcactgagccaaggcatagacgtctcttccctttgccacaatggaggcctctgtgtcgacagcggcccctcctatttctgccactgcccccctggattccaaggcagcctgtgccaggatcacgtgaacccatgtgagtccaggccttgccagaacggggccacctgcatggcccagcccagtgggtatctctgccagtgtgccccaggctacgatggacagaactgctcaaaggaactcgatgcttgtcagtcccaaccctgtcacaaccatggaacctgtactcccaaacctggaggattccactgtgcctgccctccaggctttgtggggctacgctgtgagggagacgtggacgagtgtctggaccagccctgccaccccacaggcactgcagcctgccactctctggccaatgccttctactgccagtgtctgcctggacacacaggccagtggtgtgaggtggagatagacccctgccacagccaaccctgctttcatggagggacctgtgaggccacagcaggatcacccctgggtttcatctgccactgccccaagggttttgaaggccccacctgcagccacagggccccttcctgcggcttccatcactgccaccacggaggcctgtgtctgccctcccctaagccaggcttcccaccacgctgtgcctgcctcagtggctatgggggtcctgactgcctgaccccaccagctcctaaaggctgtggccctccctccccatgcctatacaatggcagctgctcagagaccacgggcttggggggcccaggctttcgatgctcctgccctcacagctctccagggccccggtgtcagaaacccggagccaaggggtgtgagggcagaagtggagatggggcctgcgatgctggctgcagtggcccgggaggaaactgggatggaggggactgctctctgggagtcccagacccctggaagggctgcccctcccactctcggtgctggcttctcttccgggacgggcagtgccacccacagtgtgactctgaagagtgtctgtttgatggctacgactgtgagacccctccagcctgcactccagcctatgaccagtactgccatgatcacttccacaacgggcactgtgagaaaggctgcaacactgcagagtgtggctgggatggaggtgactgcaggcctgaagatggggacccagagtgggggccctccctggccctgctggtggtactgagccccccagccctagaccagcagctgtttgccctggcccgggtgctgtccctgactctgagggtaggactctgggtaaggaaggatcgtgatggcagggacatggtgtacccctatcctggggcccgggctgaagaaaagctaggaggaactcgggaccccacctatcaggagagagcagcccctcaaacgcagcccctgggcaaggagaccgactccctcagtgctgggtttgtggtggtcatgggtgtggatttgtcccgctgtggccctgaccacccggcatcccgctgtccctgggaccctgggcttctactccgcttccttgctgcgatggctgcagtgggagccctggagcccctgctgcctggaccactgctggctgtccaccctcatgcagggaccgcaccccctgccaaccagcttccctggcctgtgctgtgctccccagtggccggggtgattctcctggccctaggggctcttctcgtcctccagctcatccggcgtcgacgccgagagcatggagctctctggctgccccctggtttcactcgacggcctcggactcagtcagctccccaccgacgccggcccccactaggcgaggacagcattggtctcaaggcactgaagccaaaggcagaagttgatgaggatggagttgtgatgtgctcaggccctgaggagggagaggaggtgggccaggctgaagaaacaggcccaccctccacgtgccagctctggtctctgagtggtggctgtggggcgctccctcaggcagccatgctaactcctccccaggaatctgagatggaagcccctgacctggacacccgtggacctgatggggtgacacccctgatgtcagcagtttgctgtggggaagtacagtccgggaccttccaaggggcatggttgggatgtcctgagccctgggaacctctgctggatggaggggcctgtccccaggctcacaccgtgggcactggggagacccccctgcacctggctgcccgattctcccggccaaccgctgcccgccgcctccttgaggctggagccaaccccaaccagccagaccgggcagggcgcacaccccttcatgctgctgtggctgctgatgctcgggaggtctgccagcttctgctccgtagcagacaaactgcagtggacgctcgcacagaggacgggaccacacccttgatgctggctgccaggctggcggtggaagacctggttgaagaactgattgcagcccaagcagacgtgggggccagagataaatgggggaaaactgcgctgcactgggctgctgccgtgaacaacgcccgagccgcccgctcgcttctccaggccggagccgataaagatgcccaggacaacagggagcagacgccgctattcctggcggcgcgggaaggagcggtggaagtagcccagctactgctggggctgggggcagcccgagagctgcgggaccaggctgggctagcgccggcggacgtcgctcaccaacgtaaccactgggatctgctgacgctgctggaaggggctgggccaccagaggcccgtcacaaagccacgccgggccgcgaggctgggcccttcccgcgcgcacggacggtgtcagtaagcgtgcccccgcatgggggcggggctctgccgcgctgccggacgctgtcagccggagcaggccctcgtgggggcggagcttgtctgcaggctcggacttggtccgtagacttggctgcgcgggggggcggggcctattctcattgccggagcctctcgggagtaggagcaggaggaggcccgacccctcgcggccgtaggttttctgcaggcatgcgcgggcctcggcccaaccctgcgataatgcgaggaagatacggagtggctgccgggcgcggaggcagggtctcaacggatgactggccctgtgattgggtggccctgggagcttgcggttctgcctccaacattccgatcccgcctccttgccttactccgtccccggagcggggatcacctcaacttgactgtggtcccccagccctccaagaaatgcccataaaccaaggaggagagggtaaaaaatagaagaatacatggtagggaggaattccaaaaatgattacccattaaaaggcaggctggaaggccttcctggttttaagatggatcccccaaaatgaagggttgtgagtttagtttctctcctaaaatgaatgtatgcccaccagagcagacatcttccacgtggagaagctgcagctctggaaagagggtttaagatgctaggatgaggcaggcccagtcctcctccagaaaataagacaggccacaggagggcagagtggagtggaaatacccctaagttggaaccaagaattgcaggcatatgggatgtaagatgttctttcctatatatggtttccaaagggtgcccctatgatccattgtccccactgcccacaaatggctgacaaatatttattgggcacctactatgtgccaggcactgtgtaggtgctgaaaagtggccaagggccacccccgctgatgactccttgcattccctcccctcacaacaaagaactccactgtggggatgaagcgcttcttctagccactgctatcgctatttaagaaccctaaatctgtcacccataataaagctgatttgaagtgtta

SEQ ID NO: 15065 - protein, 2003 aa, Homo sapiens; identical to SEQ ID NO: 1674

SEQ ID NO: 15066 - DNA, 936 bp, Homo sapiens
gccttctactgccagtgtctgcctggacacacaggccagtggtgtgaggtggagatagacccctgccacagccaaccctgctttcatggagggacctgtgaggccacagcaggatcacccctgggtttcatctgccactgccccaaggcaagtgaccacaaatctgccttctctgttgccccctatgctgacaaggcaagaatacctcagttggaatcccagaagggactgtgggtgagcactgatgtggaaattattggaaaaagccatgccaagctcacagtgggaagtgtctctcagaagcagtcaaaggcaaggcaggatcagttgatagcatgaatggaattttcaaaaatcacaggcgttgcctaagggaaggtcaggagctccccaagctcaagctgcgtggtgggtggcctcagataggttattttaactctgtgtgtgtttgtatatgtatttatggacctcagatgcatggaattagactaatcttaagctttggttcctgatacactgacattggtttatgcctggtcttcttttattttattattctaacaatgtaacacccatgaacctaacccaagaatttcaatattaataataacttacatctacttaagtcctcctcctgtatcctgttccctctccagaggaagaggaagacatatgatcctatttctaaggagtaagataataatataacagccggccgggcacagtggctcacgcctgtaatcccagcactttgggaggccgaggcaggcggatcacctgaggtcgggcattcgagaccagcctgacaaacatggagaaaccctgtctctactaaaaatacaaattagctgggcgtggtggtgcatggctgtaatcccagctattgggaaggctgaggcaggagaattgcttgaacccgggaggcagaggttgcaa

SEQ ID NO: 15067 - protein, 58 aa, Homo sapiens
MNGIFKNHRRCLREGQELPKLKLRGGWPQIGYFNSVCVCICIYGPQMHGIRLILSFGS

SEQ ID NO: 15068 - DNA, 568 bp, Homo sapiens
cctcatgtgtgtgtgacgtgggttggacggggccagagtgtgaggcagagctagggggctgcatctctgcaccctgtgcccatggggggacctgctacccccagccctctggctacaactgcacctgccctacaggctacacaggacccacctgtagtgaggagatgacagcttgtcactcagggccatgtctcaatggcggctcctgcaaccctagccctggaggctactactgcacctgccctccaagccacacagggccccagtgccaaaccagcactgactactgtgtgtctgccccgtgcttcaatgggggtacctgtgtgaacaggcctggcaccttctcctgcctctgtgccatgggcttccagggcccgcgctgtgagggaaagctccgccccagctgtgcagacagactctgatggacttatgtgcccagaagccctgcccacgcaattcccactgcctccagactgggccctccttccactgcttgtgcctccagggatggaccgggcctctctgcaaccttccactgtcctcctgccagaaggctgcactgagccaa

SEQ ID NO: 15069 - protein, 85 aa, Homo sapiens
MTACHSGPCLNGGSCNPSPGGYYCTCPPSHTGPQCQTSTDYCVSAPCFNGGTCVNRPGTFSCLCAMGFQGPRCEGKLRPSCADRL

SEQ ID NO: 15070 - DNA, 3072 bp, Homo sapiens
agacgtgaggcttgcagcaggccgaggaggaagaagaggggcagtgggagcagaggaggtggctcctgccccagtgagagctctgagggtccctgcctgaagagggacagggaccggggcttggagaaggggctgtggaatgcagcccccttcactgctgctgctgctgctgctgctgctgctgctatgtgtctcagtggtcagacccagagggctgctgtgtgggagtttcccagaaccctgtgccaatggaggcacctgcctgagcctgtctctgggacaagggacctgccagtgtgcccctggcttcctgggtgagacgtgccagtttcctgacccctgccagaacgcccagctctgccaaaatggaggcagctgccaagccctgcttcccgctcccctagggctccccagctctccctctccattgacacccagcttcttgtgcacttgcctccctggcttcactggtgagagatgccaggccaagcttgaagacccttgtcctccctccttctgttccaaaaggggccgctgccacatccaggcctcgggccgcccacagtgctcctgcatgcctggatggacaggtgagcagtgccagcttcgggacttctgttcagccaacccatgtgttaatggaggggtgtgtctggccacatacccccagatccagtgccactgcccaccgggcttcgagggccatgcctgtgaacgtgatgtcaacgagtgcttccaggacccaggaccctgccccaaaggcacctcctgccataacaccctgggctccttccagtgcctctgccctgtggggcaggagggtccacgttgtgagctgcgggcaggaccctgccctcctaggggctgttcgaatgggggcacctgccagctgatgccagagaaagactccacctttcacctctgcctctgtcccccaggtttcataggcccagactgtgaggtgaatccagacaactgtgtcagccaccagtgtcagaatgggggcacttgccaggatgggctggacacctacacctgcctctgcccagaaacctggacaggctgggactgctccgaagatgtggatgagtgtgagacccagggtccccctcactgcagaaacgggggcacctgccagaactctgctggtagctttcactgcgtgtgtgtgagtggctggggcggcacaagctgtgaggagaacctggatgactgtattgctgccacctgtgccccgggatccacctgcattgaccgggtgggctctttctcctgcctctgcccacctggacgcacaggactcctgtgccacttggaagacatgtgtctgagccagccgtgccatggggatgcccaatgcagcaccaaccccctcacaggctccacactctgcctgtgtcagcctggctattcggggcccacctgccaccaggacctggacgagtgtctgatggcccagcaaggcccaagtccctgtgaacatggcggttcctgcctcaacactcctggctccttcaactgcctctgtccacctggctacacaggctcccgttgtgaggctgatcacaatgagtgcctctcccagccctgccacccaggaagcacctgtctggacctacttgccaccttccactgcctctgcccgccaggcttagaagggcagctctgtgaggtggagaccaacgagtgtgcctcagctccctgcctgaaccacgcggattgccatgacctgctcaacggcttccagtgcatctgcctgcctggattctccggcacccgatgtgaggaggatatcgatgagtgcagaagctctccctgtgccaatggtgggcagtgccaggaccagcctggagccttccactgcaagtgtctcccaggctttgaagggccacgctgtcaaacagaggtggatgagtgcctgagtgacccatgtcccgttggagccagctgccttgatcttccaggagccttcttttgcctctgcccctctggtttcacaggttcacaggggaggcactggaaagaactggcagaatattttattccatttgggttggggcagagttcattggtgggtgtttgatggttgggatgtgagaatagaatgagaatggtatcctttaaagttatttagtgtaaaacctgcacaattgtacaaccatggggacaagggcaggggttaccgtagggcccacatgggcccagtgtaaatggtgtgattgcggcttgggagcagaggacggggctcaaagaaaaggcattcacttgcttatttagcaagcacttaccaactgcctactatgccagatacggaggcaaatctgagtaagacagttgccatcttcatgtgactttaagtctaatacagagagaccaacaagtctcctgttgatcatagcccacagaggtgctctgagagaaaaacgtgcaggatattacaagagcacagaggaccagccaacccagactaaaaatggaggaggtgatggctgagatgagtcttgaaagataagcagaggctgggcgtggtggctcacgcctatagtcccagcacttcgggaagccgaggcgggtggatcacccgagattaggagttcgagatcagcctggccaacatggtgaaacctcgtctctattaaaaatacaaaaattacactttgggaggccgaggcgggtggatcatgaggtcaggagatcgacactatcctggctaacacggtgaaaccccatctcaactaaaaatacaaaaaaataactgggcgtggtggcgggcgcctatagtcccagctactccagaggctgaggcaggagaatggcgtgaacccgggaggcggagcttgcagtgagctgagatcacgccactgcactccagcctgggtggcagagtaagactccacctcaaaaaaaaaaaaaaatacaaaaattagccaggcgtggtggcgggcgcctgcaatcccagctattggggaggctgaggcaagagaatcgcttgaacctgggaagcagtggttgcagtgagctgagatcactccactgcactccagcctgggtgacagagcaagattccatctc

SEQ ID NO: 15071 - protein, 647 aa, Homo sapiens
MQPPSLLLLLLLLLLLCVSVVRPRGLLCGSFPEPCANGGTCLSLSLGQGTCQCAPGFLGETCQFPDPCQNAQLCQNGGSCQALLPAPLGLPSSPSPLTPSFLCTCLPGFTGERCQAKLEDPCPPSFCSKRGRCHIQASGRPQCSCMPGWTGEQCQLRDFCSANPCVNGGVCLATYPQIQCHCPPGFEGHACERDVNECFQDPGPCPKGTSCHNTLGSFQCLCPVGQEGPRCELRAGPCPPRGCSNGGTCQLMPEKDSTFHLCLCPPGFIGPDCEVNPDNCVSHQCQNGGTCQDGLDTYTCLCPETWTGWDCSEDVDECETQGPPHCRNGGTCQNSAGSFHCVCVSGWGGTSCEENLDDCIAATCAPGSTCIDRVGSFSCLCPPGRTGLLCHLEDMCLSQPCHGDAQCSTNPLTGSTLCLCQPGYSGPTCHQDLDECLMAQQGPSPCEHGGSCLNTPGSFNCLCPPGYTGSRCEADHNECLSQPCHPGSTCLDLLATFHCLCPPGLEGQLCEVETNECASAPCLNHADCHDLLNGFQCICLPGFSGTRCEEDIDECRSSPCANGGQCQDQPGAFHCKCLPGFEGPRCQTEVDECLSDPCPVGASCLDLPGAFFCLCPSGFTGSQGRHWKELAEYFIPFGLGQSSLVGV

SEQ ID NO: 15072 - DNA, 887 bp, Homo sapiens
gcggttacgaggaggccgcctcctgcttgccggcctggcggtcctactcaacaccgcaagatttcaaaagggaaattcctccagggctgagtcacagggaagaaagcgatttcctccgcctcttccaaagcggtttggaaattgctctcttcatgtcatcataataaaccactagaaacttgcatttacttttgactgattattgaagtgtctggttatggagaacaaagaaattggagaaatgtgaagcttaagcttctgctgtgctgcagcgaagaagtctgggaagtttaggaagatatcctcttgattaaatggggctaaatgtcagcagaattgaagaaaagtaaaggaacttaccaatacttgatcgagacagtgctaaaataaaacacatcaaaagaagaatgagttctgtttgtcccagggagaacttagatgccatagacactatattgcagaaaggttgtggaaaagaggatagaaatgagtcacaacttatttcctggtatcaattgcaatgcaatgtggtgagcagctggatatctacatatggattccaatacttttgtggtaaggtgggactacaagatctatgcaacctgtctttcaattttggtaagagaataaaaatatttttggagattgctagtttctcaatctgaggacatttttctgtccctataagtcttctttcattggtgattctgctgctctgttctttccttctctacctttcctccacctcttcctctctctccttaattttctttctgttttccctttgttcgaaaagattttttgttacaccaaacaattaccacctaactgcttcaacaggggtttccactttccaaaattcacttgtgccctatggagatgaagaa

SEQ ID NO: 15073 - protein, 85 aa, Homo sapiens [sequence omitted]

SEQ ID NO: 15074 - DNA, 671 bp, Homo sapiens
gcttgccggcctggcggtcctactcaacaccgcaagatttcaaaagggaaattcctccagggctgagtcacagggaagaaagcgatttcctccgcctcttccaaagcggcccctttggtgccagtctgctggagtttgctggaggtccactcctgaccctgtttgcctgggtatcaccagcagaggctgcaaagcagcaaagattgctgcctgttctttcttctagaagcttcgacccagtggggcacctgtcagatgccagccagagctctcctgtatcaggtgtctgtcggtccaagctagaaggattttataacctgacagcgtgctggaacttctctgctggactcctggactcccacaatgtcagctgccaaatcttaaagacactcaggtggctcggtggagaggcctattggtgaggaactgaagccttcagtcaacagccatgtaatgagccttcttgtaaagagacccccaaccccagtcaaggattcagatggctgcagccccagccaatggcttcactgcaacctatgagagactgagccagagctacccagctaagctgctccaaaattcctgacctgtaagataatatgcaattgttgttttaagccactaagtttccaggtaatttgttaccagtaataaataattaattcactaag

SEQ ID NO: 15075 - protein, 139 aa, Homo sapiens
LPAWRSYSTPQDFKREIPPGLSHREESDFLRLFQSGPFGASLLEFAGGPLLTLFAWVSPAEAAKQQRLLPVLSSRSFDPVGHLSDASQSSPVSGVCRSKLEGFYNLTACWNFSAGLLDSHNVSCQILKTLRWLGGEAYW

SEQ ID NO: 15076 - DNA, 890 bp, Homo sapiens
gccggcctggcggtcctactcaacaccgcaagatttcaaaagggaaattcctccagggctgagtcacagggaagaaagcgatttcctccgcctcttccaaagcggcccctttggtgccagtctgctggagtttgctggaggtccactcctgaccctgtttgcctgggtatcaccagcagaggctgcaaagcagcaaagattgctgcctgttctttcttctagaagcttcgacccagtggggcacctgtcagatgccagccagagctctcctgtatcaggtgtctgtcggtccaagctagaaggttgtggggctagacaagaaggaaaaaaatcactgtcctcatggaagttaaattgtactgacaaaggaggaaaatgtcagggagttaacaattcagtctctgtggcttcctcctgtcctctccctgaaactgagatccagccaatctgcacatttattctgagagtggccccactttaatgactacacccagctgtctacacaccaggaggggagggaactgtatcctgaggcaccaacccgattacccacccaacagccacagggacttccagtgactggggcatcatcctcaatgccaccaacccctctccttcctgtggcttttctaactggaactggaactcagaaagtacattaatcaccaatttgggaagctataggaaagtatgttttctaatatacagtgagagaatgtgactgataaaaccaattttcttgagactttctccctggaaagtgaatatatgtattcatagggccttcacaagcacagactaacaagcaaagagctacattcactgggaaggaagactcaaaagtaagtgaaaaataatagttaacctttagatgttgtgcaataaattat

SEQ ID NO: 15077 - protein, 32 aa, Homo sapiens
MTTPSCLHTRRGGNCILRHQPDYPPNSHRDFQ

SEQ ID NO: 15078 - DNA, 788 bp, Homo sapiens
gattcagcaagtacatgtggaggtttgttacctgtttggaaattgctctcttcatgtcatcataataaaccactagaaacttgcatttacttttgactgattattgaagtgtctggttatggagaacaaagaaattggagaaatgtgaagcttaagcttctgctgtgctgcagcgaagaagtctgggaagtttaggaagatatcctcttgattaaatggggctaaatgtcagcagaattgaagaaaagtaaaggaacttaccaatacttgatcgagacagtgctaaaataaaacacatcaaaagaagaatgagttctgtttgtcccagggagaacttagatgccatagacactatattgcagaaaggttgtggaaaagaggatagaaatgagtcacaacttatttcctggtatcaattgcaatgcaatgtggtgagcagctggatatctacatatggattccaatacttttgtggtaaggtgggactacaagatctatgcaacctgtctttcaattttggtaagagaataaaaatatttttggagattgctagtttctcaatctgaggacatttttctgtccctataagtcttctttcattggtgattctgctgctctgttctttccttctctacctttcctccacctcttcctctctctccttaattttctttctgttttccctttgttcgaaaagattttttgttacaccaaacaattaccacctaactgcttcaacaggggtttccactttccaaaattcacttgtgccctatggagatgaagaa

SEQ ID NO: 15079 - protein, 85 aa, Homo sapiens [sequence omitted]

SEQ ID NO: 15080 - DNA, 2114 bp, Homo sapiens
ctgctccacacaatttctcagtgatcctctgcatctctgcctacaagggcctccctgacacccaagttcatattgctcagaaacagtgaacttgagtttttcgttttaccttgatctctctctgacaaagaaatccagatgatgcgagacctgatgaagacaatacatggaaaatgacagtcttggaaataactttggctgtcatcctgactctactgggacttgccatcctggctattttgttaacaagatgggcacgatgtaagcaaagtgaaatgtatatctccagatacagttcagaacaaagtgctagacttctggactatgaggatggtagaggatcccgacatgcatattcaacacaaagtgagagatccaaaagagattacacaccatcaaccaactctctagtgtctatggcatctaagttctccctgggacaaacagaactcattcttcttttgatgtgttttattttagcactgtctcgatcaagtattggtagtataaaatgtttacaaacaactgaagaacctccttccagaactgcaggagccatgatgcaattcacagcccctattcccggagctacaggacctatcaagctctctcaaaaaaccattgtgcaaactccaggacctattggtaagctgcctgtatatgtccaccttcagcaccccgcggtccacccatggcacccataataatttcacagagaaccgcaagaatacctcaagttcacactatggacagttctggaaaaatcatatgctcagttatattaacaggttacatggatgaagaacttgcaaaaaaatcttgttccaaaatccagattctaaaatgtggaggcactgcaaggtctcagaatagccgagaagaaaacaaggaagcactaaagaatgacatcatatttacgaattctgtagaatccttgaaatcagcacacataaaggagccagaaagagaaggaaaaggcactgatttagagaaagacaaaataggaatggaggtcaaggtagacagtgacgctggaataccaaaaagacaggaaacccaactaaaaatcagtgagatgagtataccacaaggacagggagcccaaataaagaaaagtgtgtcagatgtaccaagaggacaggagtcccaagtaaagaagagtgagtcaggtgtcccaaaaggacaagaagcccaagtaacgaagagtgggttggttgtactgaaaggacaggaagcccaggtagagaagagtgagatgggtgtgccaagaagacaggaatcccaagtaaagaagagtcagtctggtgtctcaaagggacaggaagcccaggtaaagaagagggagtcagttgtactgaaaggacaggaagcccaggtagagaagagtgagttgaaggtaccaaaaggacaagaaggccaagtagagaagactgaggcagatgtgccaaaggaacaagaggtccaagaaaagaagagtgaggcaggtgtactgaaaggaccagaatcccaagtaaagaacactgaggtgagtgtaccagaaacactggaatcccaagtaaagaagagtgagtcaggtgtactaaaaggacaggaagcccaagaaaagaaggagagttttgaggataaaggaaataatgataaagaaaaggagagagatgcagagaaagatccaaataaaaaagaaaaaggtgacaaaaacacaaaaggtgacaaaggaaaggacaaagttaaaggaaagagagaatcagaaatcaatggtgaaaaatcaaaaggctcgaaaagggcgaaggcaaatacaggaaggaagtacaacaaaaaagtggaagagtaaggataaattttttaaaggcccataagacaagtgattattatgattcccatactccagatacaaaccatatcccagccattgcctaaacagattacaattataaaatccctttcatcttcatatcacagtttctgctcttcagaagtttcaccctttttaatctctcagccacaaacctcagtttccaaatatttgttttataagttaagacgtatatgattccgtcaagaaagactggatactttctgaagtaaaacattttaattaaagaaatatatagtaa

SEQ ID NO: 15081 - protein, 379 aa, Homo sapiens [sequence omitted]

SEQ ID NO: 15082 - DNA, 2153 bp, Homo sapiens
tcccatcatttgcttaggtctgatcaatctgctccacacaatttctcagtgatcctctgcatctctgcctacaagggcctccctgacacccaagttcatattgctcagaaacagtgaacttgagtttttcgttttaccttgatctctctctgacaaagaaatccagatgatgcgagacctgatgaagacaatacatggaaaatgacagtcttggaaataactttggctgtcatcctgactctactgggacttgccatcctggctattttgttaacaagatgggcacgatgtaagcaaagtgaaatgtatatctccagatacagttcagaacaaagtgctagacttctggactatgaggatggtagaggatcccgacatgcatattcaacacaaagtgacacttcatatgataaccgaggtaagtatatgtagagatttttcaccatcaaccaactctctagcactgtctcgatcaagtattgctttacctcaaggatccatgagtagtataaaatgtttacaaacaactgaagaacctccttccagaactgcaggagccatgatctttctctctcacagccggagctacaggacctatcaagctctctcaaaaaaccattgtgcaaactccaggacctattggtaagctgccttcagatcgcatcctcacacaatcactggtccaccttcagcaccccgcggtccacccatggcacccataataatttcacagagaaccgcaagtcagctggcagcacctataagaatacctcaagttcacactatggacagttctggaaaaatcatatgctcagttatattaacaggttacatggatgaagaacttgcaaaaaaatcttgttccaaaatccagattctaaaatgtggaggcactgcaaggtctcagaatagccgagaagaaaacaaggaagcactaaagaatgacatcatatttacgaattctgtagaatccttgaaatcagcacacataaaggagccagaaagagaaggaaaaggcactgatttagagaaagacaaaataggaatggaggtcaaggtagacagtgacgctggaataccaaaaagacaggaaacccaactaaaaatcagtgagatgagtataccacaaggacagggagcccaaataaagaaaagtgtgtcagatgtaccaagaggacaggagtcccaagtaaagaagagtgagtcaggtgtcccaaaaggacaagaagcccaagtaacgaagagtgggttggttgtactgaaaggacaggaagcccaggtagagaagagtgagatgggtgtgccaagaagacaggaatcccaagtaaagaagagtcagtctggtgtctcaaagggacaggaagcccaggtaaagaagagggagtcagttgtactgaaaggacaggaagcccaggtagagaagagtgagttgaaggtaccaaaaggacaagaaggccaagtagagaagactgaggcagatgtgccaaaggaacaagaggtccaagaaaagaagagtgaggcaggtgtactgaaaggaccagaatcccaagtaaagaacactgaggtgagtgtaccagaaacactggaatcccaagtaaagaagagtgagtcaggtgtactaaaaggacaggaagcccaagaaaagaaggagagttttgaggataaaggaaataatgataaagaaaaggagagagatgcagagaaagatccaaataaaaaagaaaaaggtgacaaaaacacaaaaggtgacaaaggaaaggacaaagttaaaggaaagagagaatcagaaatcaatggtgaaaaatcaaaaggctcgaaaagggcgaaggcaaatacaggaaggaagtacaacaaaaaagtggaagagtaaggataaattttttaaaggcccataagacaagtgattattatgattcccatactccagatacaaaccatatcccagccattgcctaaacagattacaattataaaatccctttcatcttcatatcacagtttctgctcttcagaagtttcaccctttttaatctctcagccacaaacctcagtttccaaatatttgttttataagttaagacgtatatgattccgtcaagaaagactggatactttctgaagtaaaacattttaattaaagaaatatatagtaa

SEQ ID NO: 15083 - protein, 386 aa, Homo sapiens [sequence omitted]

SEQ ID NO: 15084 - DNA, 611 bp, Homo sapiens
ggaagaagaagaaaaaagtgagtagtacagccatccttgttttcaaggctgagagctgaggttcactgagatttgttggcgtgaacaatttcctatgatctttaaaaatgtggtgacctacttgttggtgatttctgtgttgctggtgacttctcatgtgttagggaggctgttttgtgtgctctagaaagtgcttccactttaaatttcttatgtccgtgaaacacttgtcttcctgtttggctgctagtgacgctctgctgctctccaggatggcagacgtcagaggcatcgcggtcccatgcggatcactcatgaacagcactctgaacttgctcttctgggccatcatttttttttctatttttaaattttgagtcttccttcccagtgaatgtagctctttgcttgttagtctgtgcttgtgaaggccctatgaatacatatattcactttccagggagaaagtctcaagaaaattggttttatcagtcacattctctcactgtatattagaaaacatactttcctatagcttcccaaattggtgattaatgtactttctgagttccagttccagttagaaaagccacaggaaggagaggggttgg

SEQ ID NO: 15085 - protein, 54 aa, Homo sapiens
MSVKHLSSCLAASDALLLSRMADVRGIAVPCGSLMNSTLNLLFWAIIFFSIFKF

SEQ ID NO: 15086 - DNA, 1368 bp, Homo sapiens; identical to SEQ ID NO: 1679

SEQ ID NO: 15087 - protein, 455 aa, Homo sapiens; identical to SEQ ID NO: 1680

SEQ ID NO: 15088 - DNA, 289 bp, Homo sapiens
acattctcttttcttttattcttgtctgttctgcctcactcccgagctctactgactcccaacagagcgcccaagaagaaaatggccataagtggagtccctgtgctaggatttttcatcatagctgtgctgatgagcgctcaggaatcatgggctatcaaaggtagaatttggacgatttgccagctttgaggctcaaggtgcattggccaacatagctgtggacaaagccaacctggaaatcatgacaaagcgctccaactatactccgatcaccaatggtacctcc

SEQ ID NO: 15089 - protein, 36 aa, Homo sapiens
MAISGVPVLGFFIIAVLMSAQESWAIKGRIWTICQL

SEQ ID NO: 15090 - DNA, 599 bp, Homo sapiens
acattctcttttcttttattcttgtctgttctgcctcactcccgagctctactgactcccaacagagcgcccaagaagaaaatggccataagtggagtccctgtgctaggatttttcatcatagctgtgctgatgagcgctcaggaatcatgggctatcaaagaagaacatgtgatcatccaggccgagttctatctgaatcctgaccaatcaggcgagtttatgtttgactttgatggtgatgagattttccatgtggatatggcaaagaaggagacggtctggcggcttgaagaatttggacgatttgccagctttgaggctcaaggtgcattggccaacatagctccctgtggaactgagagagcccaacgtcctcatctgtttcatagacaagttcaccccaccagtggtcaatgtcacgtggcttcgaaatggaaaacctgtcaccacaggagtgtcagagacagtcttcctgcccagggaagaccaccttttccgcaagttccactatctccccttcctgccctcaactgaggacgtttacgactgcagggtggagcactggggcttggatgagcctcttctcaagcactggg

SEQ ID NO: 15091 - protein, 151 aa, Homo sapiens
MAISGVPVLGFFIIAVLMSAQESWAIKEEHVIIQAEFYLNPDQSGEFMFDFDGDEIFHVDMAKKETVWRLEEFGRFASFEAQGALANIAPCGTERAQRPHLFHRQVHPTSGQCHVASKWKTCHHRSVRDSLPAQGRPPFPQVPLSPLPALN

SEQ ID NO: 15092 - DNA, 1150 bp, Homo sapiens
acattctcttttcttttattcttgtctgttctgcctcactcccgagctctactgactcccaacagagcgcccaagaagaaaatggccataagtggagtccctgtgctaggatttttcatcatagctgtgctgatgagcgctcaggaatcatgggctatcaaagaagaacatgtgatcatccaggccgagttctatctgaatcctgaccaatcaggcgagtttatgtttgactttgatggtgatgagattttccatgtggatatggcaaagaaggagacggtctggcggcttgaagaatttggacgatttgccagctttgaggctcaaggtgcattggccaacatagctgtggacaaagccaacctggaaatcatgacaaagcgctccaactatactccgatcaccaatgtacctccagaggtaactgtgctcacaaacagccctgtggaactgagagagcccaacgtcctcatctgtttcatagacaagttcaccccaccagtggtcaatgtcacgtggcttcgaaatggaaaacctgtcaccacaggagtgtcagagacagtcttcctgcccagggaagaccaccttttccgcaagttccactatctccccttcctgccctcaactgaggacgtttacgactgcagggtggagcactggggcttggatgagcctcttctcaagcactgggagtttgatgctccaagccctctcccagagactacagagaacgtggtgtgtgccctgggcctgactgtgggtctggtgggcatcattattgggaccatcttcatcatcaagggattgcgcaaaagcaatgcagcagaacgcagggggcctctgtaaggcacatggaggtgatggtgtttcttagagagaagatcactgaagaaacttctgctttaatggctttacaaagctggcaatattacaatccttgacctcagtgaaagcagtcatcttcagcattttccagccctatagccaccccaagtgtggatatgcctcttcgattgctccgtactctaacatctagctggcttccctgtctattgccttttcctgtatctattttcctctatttcctatcattttattatcaccatgcaatgcctctggaataaaacatacaggagtctgtctctgctat

SEQ ID NO: 15093 - protein, 254 aa, Homo sapiens; identical to SEQ ID NO: 1682

SEQ ID NO: 15094 - DNA, 896 bp, Homo sapiens
acattctcttttcttttattcttgtctgttctgcctcactcccgagctctactgactcccaacagagcgcccaagaagaaaatggccataagtggagtccctgtgctaggatttttcatcatagctgtgctgatgagcgctcaggaatcatgggctatcaaagaagaacatgtgatcatccaggccgagttctatctgaatcctgaccaatcaggcgagtttatgtttgactttgatggtgatgagattttccatgtggatatggcaaagaaggagacggtctggcggcttgaagaatttggacgatttgccagctttgaggctcaaggtgcattggccaacatagctgtggacaaagccaacctggaaatcatgacaaagcgctccaactatactccgacactggggcttggatgagcctcttctcaagcactgggagtttgatgctccaagccctctcccagagactacagagaacgtggtgtgtgccctgggcctgactgtgggtctggtgggcatcattattgggaccatcttcatcatcaagggattgcgcaaaagcaatgcagcagaacgcagggggcctctgtaaggcacatggaggtgatggtgtttcttagagagaagatcactgaagaaacttctgctttaatggctttacaaagctggcaatattacaatccttgacctcagtgaaagcagtcatcttcagcattttccagccctatagccaccccaagtgtggatatgcctcttcgattgctccgtactctaacatctagctggcttccctgtctattgccttttcctgtatctattttcctctatttcctatcattttattatcaccatgcaatgcctctggaataaaacatacaggagtctgtctctgctat

SEQ ID NO: 15095 - protein, 111 aa, Homo sapiens
MAISGVPVLGFFIIAVLMSAQESWAIKEEHVIIQAEFYLNPDQSGEFMFDFDGDEIFHVDMAKKETVWRLEEFGRFASFEAQGALANIAVDKANLEIMTKRSNYTPTLGLG

SEQ ID NO: 15096 - DNA, 744 bp, Homo sapiens
acattctcttttcttttattcttgtctgttctgcctcactcccgagctctactgactcccaacagagcgcccaagaagaaaatggccataagtggagtccctgtgctaggatttttcatcatagctgtgctgatgagcgctcaggaatcatgggctatcaaagaagaacatgtgatcatccaggccgagttctatctgaatcctgaccaatcaggcgagtttatgtttgactttgatggtgatgagattttccatgtggatatggcaaagaaggagacggtctggcggcttgaagaatttggacgatttgccagctttgaggctcaaggtgcattggccaacatagctgtggacaaagccaacctggaaatcatgacaaagcgctccaactatactccgatcaccaatgtacctccagaggtaactgtgctcacaaacagccctgtggaactgagagagcccaacgtcctcatctgtttcatagacaagttcaccccaccagtggtcaatgtcacgtggcttcgaaatggaaaacctgtctattgccttttcctgtatctattttcctctatttcctatcattttattatcaccatgcaatgcctctggaataaaacatacaggagtctgtctctgctatggaatgccccatggggcatctcttgtgtacttattgtttaaggtttcctcaaactgtgatttttctgaacacaataaactattttgatgatcttgggtggaatt

SEQ ID NO: 15097 - protein, 199 aa, Homo sapiens
MAISGVPVLGFFIIAVLMSAQESWAIKEEHVIIQAEFYLNPDQSGEFMFDFDGDEIFHVDMAKKETVWRLEEFGRFASFEAQGALANIAVDKANLEIMTKRSNYTPITNVPPEVTVLTNSPVELREPNVLICFIDKFTPPVVNVTWLRNGKPVYCLFLYLFSSISYHFIITMQCLWNKTYRSLSLLWNAPWGISCVLIV

SEQ ID NO: 15098 - DNA, 1254 bp, Homo sapiens
acattctcttttcttttattcttgtctgttctgcctcactcccgagctctactgactcccaacagagcgcccaagaagaaaatggccataagtggagtccctgtgctaggatttttcatcatagctgtgctgatgagcgctcaggaatcatgggctatcaaagaagaacatgtgatcatccaggccgagttctatctgaatcctgaccaatcaggcgagtttatgtttgactttgatggtgatgagattttccatgtggatatggcaaagaaggagacggtctggcggcttgaagaatttggacgatttgccagctttgaggctcaaggtgcattggccaacatagctgtggacaaagccaacctggaaatcatgacaaagcgctccaactatactccgatcaccaatgtacctccagaggtaactgtgctcacaaacagccctgtggaactgagagagcccaacgtcctcatctgtttcatagacaagttcaccccaccagtggtcaatgtcacgtggcttcgaaatggaaaacctgtcaccacaggagtgtcagagacagtcttcctgcccagggaagaccaccttttccgcaagttccactatctccccttcctgccctcaactgaggacgtttacgactgcagggtggagcactggggcttggatgagcctcttctcaagcactgggagtttgatgctccaagccctctcccagagactacagagaacgtggtgtgtgccctgggcctgactgtgggtctggtgggcatcattattgggaccatcttcatcatcaagggattgcgcaaaagcaatgcagcagaacgcagggggcctctgtaaggcacatggaggtgatggtgtttcttagagagaagatcactgaagaaacttctgctttaatggctttacaaagctggcaatattacaatccttgacctcagtgaaagcagtcatcttcagcattttccagccctatagccaccccaagtgtggatatgcctcttcgattgctccgtactctaacatctagctggcttccctgtctattgccttttcctgtatctattttcctctatttcctatcattttattatcaccatgcaatgcctctggaataaaacatacaggagtctgtctctgctatggaatgccccatggggcatctcttgtgtacttattgtttaaggtttcctcaaactgtgatttttctgaacacaataaactattttgatgatcttgggtggaatt

SEQ ID NO: 15099 - protein, 254 aa, Homo sapiens; identical to SEQ ID NO: 1682

SEQ ID NO: 15100 - DNA, 983 bp, Homo sapiens
acattctcttttcttttattcttgtctgttctgcctcactcccgagctctactgactcccaacagagcgcccaagaagaaaatggccataagtggagtccctgtgctaggatttttcatcatagctgtgctgatgagcgctcaggaatcatgggctatcaaagaagaacatgtgatcatccaggccgagttctatctgaatcctgaccaatcaggcgagtttatgtttgactttgatggtgatgagattttccatgtggatatggcaaagaaggagacgtgtcagagacagtcttcctgcccagggaagaccaccttttccgcaagttccactatctccccttcctgccctcaactgaggacgtttacgactgcagggtggagcactggggcttggatgagcctcttctcaagcactgggagtttgatgctccaagccctctcccagagactacagagaacgtggtgtgtgccctgggcctgactgtgggtctggtgggcatcattattgggaccatcttcatcatcaagggattgcgcaaaagcaatgcagcagaacgcagggggcctctgtaaggcacatggaggtgatggtgtttcttagagagaagatcactgaagaaacttctgctttaatggctttacaaagctggcaatattacaatccttgacctcagtgaaagcagtcatcttcagcattttccagccctatagccaccccaagtgtggatatgcctcttcgattgctccgtactctaacatctagctggcttccctgtctattgccttttcctgtatctattttcctctatttcctatcattttattatcaccatgcaatgcctctggaataaaacatacaggagtctgtctctgctatggaatgccccatggggcatctcttgtgtacttattgtttaaggtttcctcaaactgtgatttttctgaacacaataaactattttgatgatcttgggtggaatt

SEQ ID NO: 15101 - protein, 133 aa, Homo sapiens
MAISGVPVLGFFIIAVLMSAQESWAIKEEHVIIQAEFYLNPDQSGEFMFDFDGDEIFHVDMAKKETCQRQSSCPGKTTFSASSTISPSCPQLRTFTTAGWSTGAWMSLFSSTGSLMLQALSQRLQRTWCVPWA

SEQ ID NO: 15102 - DNA, 1000 bp, Homo sapiens
acattctcttttcttttattcttgtctgttctgcctcactcccgagctctactgactcccaacagagcgcccaagaagaaaatggccataagtggagtccctgtgctaggatttttcatcatagctgtgctgatgagcgctcaggaatcatgggctatcaaagaagaacatgtgatcatccaggccgagttctatctgaatcctgaccaatcaggcgagtttatgtttgactttgatggtgatgagattttccatgtggatatggcaaagaaggagacggtctggcggcttgaagaatttggacgatttgccagctttgaggctcaaggtgcattggccaacatagctgtggacaaagccaacctggaaatcatgacaaagcgctccaactatactccgacactggggcttggatgagcctcttctcaagcactgggagtttgatgctccaagccctctcccagagactacagagaacgtggtgtgtgccctgggcctgactgtgggtctggtgggcatcattattgggaccatcttcatcatcaagggattgcgcaaaagcaatgcagcagaacgcagggggcctctgtaaggcacatggaggtgatggtgtttcttagagagaagatcactgaagaaacttctgctttaatggctttacaaagctggcaatattacaatccttgacctcagtgaaagcagtcatcttcagcattttccagccctatagccaccccaagtgtggatatgcctcttcgattgctccgtactctaacatctagctggcttccctgtctattgccttttcctgtatctattttcctctatttcctatcattttattatcaccatgcaatgcctctggaataaaacatacaggagtctgtctctgctatggaatgccccatggggcatctcttgtgtacttattgtttaaggtttcctcaaactgtgatttttctgaacacaataaactattttgatgatcttgggtggaatt

SEQ ID NO: 15103 - protein, 111 aa, Homo sapiens; identical to SEQ ID NO: 15095

SEQ ID NO: 15104 - DNA, 1140 bp, Homo sapiens
acattctcttttcttttattcttgtctgttctgcctcactcccgagctctactgactcccaacagagcgcccaagaagaaaatggccataagtggagtccctgtgctaggatttttcatcatagctgtgctgatgagcgctcaggaatcatgggctatcaaagaagaacatgtgatcatccaggccgagttctatctgaatcctgaccaatcaggcgagtttatgtttgactttgatggtgatgagattttccatgtggatatggcaaagaaggagacggtctggcggcttgaagaatttggacgatttgccagctttgaggctcaaggtgcattggccaacatagctgtggacaaagccaacctggaaatcatgacaaagcgctccaactatactccgacactggggcttggatgagcctcttctcaagcactgggagtttgatgctccaagccctctcccagagactacagagaacgtggtgtgtgccctgggcctgactgtgggtctggtgggcatcattattgggaccatcttcatcatcaagggattgcgcaaaagcaatgcagcagaacgcagggggcctctgtaaggcacatggaggtgatggtgtttcttagagagaagatcactgaagaaacttctgctttaatggctttacaaagctggcaatattacaatccttgacctcagtgaaagcagtcatcttcagcattttccagccctatagccaccccaagtgtggatatgcctcttcgattgctccgtactctaacatctagctggcttccctgtctattgccttttcctgtatctattttcctctatttcctatcattttattatcaccatgcaatgcctctggaataaaacatacaggagtctgtctctgctatggaatgccccatggggcatctcttgtgtacttattgtttaaggtttcctcaaactgtgatttttctgaacacaataaactattttgatgatcttgggtggaatttttggtgtttaagccagttctttgggtggcggtggggggtggggagtcggtcctggggaatatatgtgatcctttcccggtaaaatatctgaatgttgaatttatcttataaattctagaattcatcagacatatcccgg

SEQ ID NO: 15105 - protein, 111 aa, Homo sapiens; identical to SEQ ID NO: 15095

SEQ ID NO: 15106 - DNA, 599 bp, Homo sapiens
gtcagagacagtcttcctgcccagggaagaccaccttttccgcaagttccactatctccccttcctgccctcaactgaggacgtttacgactgcagggtggagcactggggcttggatgagcctcttctcaagcactgggagtttgatgctccaagccctctcccagagactacagagaacgtggtgtgtgccctgggcctgactgtgggtctggtgggcatcattattgggaccatcttcatcatcaagggattgcgcaaaagcaatgcagcagaacgcagggggcctctgtaaggcacatggaggtgatggtgtttcttagagagaagatcactgaagaaacttctgctttaatggctttacaaagctggcaatattacaatccttgacctcagtgaaagcagtcatcttcagcattttccagccctatagccaccccaagtgtggatatgcctcttcgattgctccgtactctaacatctagctggcttccctgtctattgccttttcctgtatctattttcctctatttcctatcattttattatcaccatgcaatgcctctggaataaaacatacaggagtctgtctctgctat

SEQ ID NO: 15107 - protein, 40 aa, Homo sapiens
MPLRLLRTLTSSWLPCLLPFPVSIFLYFLSFYYHHAMPLE

SEQ ID NO: 15108 - DNA, 351 bp, Homo sapiens
aggtgatggtgtttcttagagagaagatcactgaagaaactcagtgaaagcagtcatcttcagcattttccagccctatagccaccccaagtgtggatatgcctcttcgattgctccgtactctaacatctagctggcttccctgtctattgccttttcctgtatctattttcctctatttcctatcattttattatcaccatgcaatgcctctggaataaaacatacaggagtctgtctctgctatggaatgccccatggggcatctcttgtgtacttattgtttaaggtttcctcaaactgtgatttttctgaacacaataaactattttgatgatcttgggtggaatt

SEQ ID NO: 15109 - protein, 40 aa, Homo sapiens; identical to SEQ ID NO: 15107

SEQ ID NO: 15110 - DNA, 545 bp, Homo sapiens
gagcacagtctgaatctgcacagagcaagatgctgagtggagtcgggggctttgtgctgggcctgctcttccttggggccgggctattcatctacttcaagaatcagaaaggtgaggagctctctctctgcaggactcgtgagctgaagtgcagatgaccacattcaagggggaaccttctgccccagctttgcatgatgaaaagctttcctgcttggctcttattcttccacaagagaggactttctcaggccctggttgctaccggttcagcaactctgcagaaaatgtccatccttgtggcttcctcagctcctgcccttggcctgaagtcccagcattgatggcagtgcctcatcttcaactttagtgctcccctttacctaaccctacggcctcccatgcatctgtactccccctgtgtgccacaaatgcactacgttattaaatttttctgaagcccagagttaaaaatcatctgtccacctggctccaaagacaaaaaataaaaagaaaagaaaaagggaagattatttcctaatagc

SEQ ID NO: 15111 - protein, 42 aa, Homo sapiens
MLSGVGGFVLGLLFLGAGLFIYFKNQKGEELSLCRTRELKCR

SEQ ID NO: 15112 - DNA, 1291 bp, Homo sapiens
ataatttggaatgtgggtggagggggatcatagttctccctgagtgagacttgcctgctcctctggcccctggtcctgtcctgttctccagcatggtgtgtctgaagctccctggaggttcctacatggcaaagctgacagtgacactgatggtgctgagctccccactggctttggctggggacacccgaccacgtttcttgcagcaggataagtatgagtgtcatttcttcaacgggacggagcgggtgcggttcctgcacagagacatctataaccaagaggaggacttgcgcttcgacagcgacgtgggggagtaccgggcggtgacggagctggggcggcctgacgctgagtactggaacagccagaaggacttcctggaagacaggcgcgccgcggtggacacctactgcagacacaactacggggttggtgagagcttcacagtgcagcggcgagttgagcctaaggtgactgtgtatcctgcaaggacccagaccctgcagcaccacaacctcctggtctgctctgtgaatggtttctatccaggcagcattgaagtcaggtggttccggaacagccaggaagagaaggctggggtggtgtccacaggcctgattcagaatggagactggaccttccagaccctggtgatgctggaaacagttcctcgaagtggagaggtttacacctgccaagtggagcacccaagcgtgacgagccctctcacagtggaatggagagcacagtctgaatctgcacagagcaagatgctgagtggagtcgggggctttgtgctgggcctgctcttccttggggccgggctattcatctacttcaagaatcagaaagggcactctggacttcacccaacaggactcgtgagctgaagtgcagatgaccacattcaagggggaaccttctgccccagctttgcatgatgaaaagctttcctgcttggctcttattcttccacaagagaggactttctcaggccctggttgctaccggttcagcaactctgcagaaaatgtccatccttgtggcttcctcagctcctgcccttggcctgaagtcccagcattgatggcagtgcctcatcttcaactttagtgctcccctttacctaaccctacggcctcccatgcatctgtactccccctgtgtgccacaaatgcactacgttattaaatttttctgaagcccagagttaaaaatcatctgtccacctggctccaaagacaaaaaataaaaagaaaagaaaaagggaagattatttcctaatagc

SEQ ID NO: 15113 - protein, 266 aa, Homo sapiens; identical to SEQ ID NO: 1684

SEQ ID NO: 15114 - DNA, 681 bp, Homo sapiens
cctccccataatttggaatgtgggtggagggggatcatagttctccctgagtgagacttgcctgctcctctggcccctggtcctgtcctgttctccagcatggtgtgtctgaagctccctggaggttcctacatggcaaagctgacagtgacactgatggtgctgagctccccactggctttggctggggacacccgaccacgtttcttgcagcaggataagtatgagtgtcatttcttcaacgggacggagcgggtgcggttcctgcacagagacatctataaccaagaggaggacttgcgcttcgacagcgacgtgggggagtaccgggcggtgacggagctggggcggcctgacgctgagtactggaacagccagaaggacttcctggaagacaggcgcgccgcggtggacactctgcagaaaatgtccatccttgtggcttcctcagctcctgcccttggcctgaagtcccagcattgatggcagtgcctcatcttcaactttagtgctcccctttacctaaccctacggcctcccatgcatctgtactccccctgtgtgccacaaatgcactacgttattaaatttttctgaagcccagagttaaaaatcatctgtccacctggctccaaagacaaaaaataaaaagaaaagaaaaagggaagattatttcctaat

SEQ ID NO: 15115 - protein, 127 aa, Homo sapiens
MVCLKLPGGSYMAKLTVTLMVLSSPLALAGDTRPRFLQQDKYECHFFNGTERVRFLHRDIYNQEEDLRFDSDVGEYRAVTELGRPDAEYWNSQKDFLEDRRAAVDTLQKMSILVASSAPALGLKSQH

SEQ ID NO: 15116 - DNA, 1215 bp, Homo sapiens
ataatttggaatgtgggtggagggggatcatagttctccctgagtgagacttgcctgctcctctggcccctggtcctgtcctgttctccagcatggtgtgtctgaagctccctggaggttcctacatggcaaagctgacagtgacactgatggtgctgagctccccactggctttggctggggacacccgaccacgtttcttgcagcaggataagtatgagtgtcatttcttcaacgggacggagcgggtgcggttcctgcacagagacatctataaccaagaggaggacttgcgcttcgacagcgacgtgggggagtaccgggcggtgacggagctggggcggcctgacgctgagtactggaacagccagaaggacttcctggaagacaggcgcgccgcggtggacacctactgcagacacaactacggggttggtgagagcttcacagtgcagcggcgagttgagcctaaggtgactgtgtatcctgcaaggacccagaccctgcagcaccacaacctcctggtctgctctgtgaatggtttctatccaggcagcattgaagtcaggtggttccggaacagccaggaagagaaggctggggtggtgtccacaggcctgattcagaatggagactggaccttccagaccctggtgatgctggaaacagttcctcgaagtggagaggtttacacctgccaagtggagcacccaagcgtgacgagccctctcacagtggaatggagagcacagtctgaatctgcacagagcaagatgctgagtggagtcgggggctttgtgctgggcctgctcttccttggggccgggctattcatctacttcaagaatcagaaagggcactctggacttcacccaacaggactcgtgagctgaagtgcagatgaccacattcaagggggaaccttctgccccagctttgcatgatgaaaagctttcctgcttggctcttattcttccacaagagaggactttctcaggccctggttgctaccggttcagcaactctgcagaaaatgtccatccttgtggcttcctcagctcctgcccttggcctgaagtcccagcattgatggcagtgcctcatcttcaactttagtgctcccctttacctaaccctacggcctcccatgcatctgtactccccctgtgtgccacaaatgcactacgttattaaatttttctgaagcccagagtt

SEQ ID NO: 15117 - protein, 266 aa, Homo sapiens; identical to SEQ ID NO: 1684

SEQ ID NO: 15118 - DNA, 1255 bp, Homo sapiens
aacagcgaactgtttatcatgaatacagaatgtgggcaaactcgcttctgtgccggccgccagaaggtttgctgagggcaatcactccctggtgccgggctccttgaggttatgcactgggacatctagagcctattgtttgaggaatgcagtcttgcaagcctgctctggatcaagccacagactgaaacacccccgaagagcaagcacgtttcttggagcaggctaagtgtgagtgtcatatcttcaatgggatgaagcgggtgcagtacctgaacagatacatccataaacgggaggagaacctgcgcttcgacagcaacgtggaggagttccaggcagttacggaactggggcggcctgtcgcagagaactggaacagccagaagggcatcccggaggagaagcgggacaagatggacgactactgcagatacaattacggggttttttgagagcttcacagtgcagccgcgagtccatcctaaggtgactgtgtatcctgcaaagacccagcccctgcatcaccgcaaccccctggtcggctctgtgagtggtttctatccaggcagcattaaagtcaggtggttccagaatggtcaggaagagaaggctgcggtggtctccataggcctgatccagaatggagattggaccttccagaccctggtgatgctggaaacagttcctcggagtggagaggtttacacctgccaagtggagcatccaagcgtgacgagccctctcacagtggaatggagtacacggactgaatctgcacagagcaagatgctgagtggagtcgggggctttgtgctgggcctgctcttccttgggacagggctgttcatctacttcaggaatcagaaaggacactctggacttcagccaacaggactcctgcgctggactcctgagctgaagtgcacatgaccacattcaaggaagaaccttctgccacagctttgcaggatgaaaagctttcccacttggctcttattcttccacaagagctctctcaggaccaggttgttactcgttcagcaactctgcagaaaatgccctcccttgtggcttcctcagctcctgttcttggcctgaaaccccacagccttgatggcagcgcctcgtcttcaacttttgtgcttccttttacctaaattttcctgcctcccctgggtctgtattccccttgtgccacaaacacattgcattattcaatgtttctcaaacatggagttaaaaattatctggt

SEQ ID NO: 15119 - protein, 86 aa, Homo sapiens
MLETVPRSGEVYTCQVEHPSVTSPLTVEWSTRTESAQSKMLSGVGGFVLGLLFLGTGLFIYFRNQKGHSGLQPTGLLRWTPELKCT

SEQ ID NO: 15120 - DNA, 1078 bp, Homo sapiens
gaatacagaatgtgggcaaactcgcttctgtgccggccgccagaaggtttgctgagggcaatcactccctggtgccgggctccttgaggttatgcactgggacatctagagcctattgtttgaggaatgcagtcttgcaagcctgctctggatcaagccacagactgaaacacccccgaagagcaagcacgtttcttggagcaggctaagtgtgagtgtcatatcttcaatgggatgaagcgggtgcagtacctgaacagatacatccataaacgggaggagaacctgcgcttcgacagcaacgtggaggagttccaggcagttacggaactggggcggcctgtcgcagagaactggaacagccagaagggcatcccggaggagaagcgggacaagatggacgactactgcagatacaattacggggttttttgagagcttcacagtgcagccgcgagtccatcctaaggtgactgtgtatcctgcaaagacccagcccctgcatcaccgcaaccccctggtcggctctgtgagtggtttctatccaggcagcattaaagtcaggtggttccagaatggtcaggaagagaaggctgcggtggtctccataggcctgatccagaatggagattggaccttccagaccctggtgatgctggaaacagttcctcggagtggagaggtttacacctgccaagtggagcatccaagcgtgacgagccctctcacagtggaatggagtgagcagctttctgacttcataaatttctcaaccaccaagaaggggactgtgctaatccctgagcgtcaggtacacggactgaatctgcacagagcaagatgctgagtggagtcgggggctttgtgctgggcctgctcttccttgggacagggctgttcatctacttcaggaatcagaaaggacactctggacttcagccaacaggactcctgcgctggactcctgagctgaagtgcacatgaccacattcaaggaagaaccttctgccacagctttgcaggatgaaaagctttcccacttggctcttattcttccacaagagctctctcaggacca

SEQ ID NO: 15121 - protein, 64 aa, Homo sapiens
MLETVPRSGEVYTCQVEHPSVTSPLTVEWSEQLSDFINFSTTKKGTVLIPERQVHGLNLHRARC

SEQ ID NO: 15122 - DNA, 1938 bp, Homo sapiens
gaagagccactaaggctaatggaattacactggatcctgtgacagacacttcaggcttcatgggtcacatggtctgtttctgctcctttctgccctggttggtgtgggttgtggtgttagagaaatctcaggtgggagatctggggctgggacattgtgttggaggacagatttgcttcaataacttttaagtgtatatcttttcctctttttcccaggacactctggacttcagccaacaggattcctgagctgaaatgcagatgaccacattcaaggaagaactttctgccccggctttgcaggatgaaaagctttcctgcttggcagttattcttccacaagagagggctttctcaggacctggttgctactggttcggcaactgcagaaaatgtcctcccttgtggcttcctcagctcctgcccttggcctgaagtcccagcattgatggcagcgcctcatcttcaacttttgtgctcccctttgcctaaaccgtatggcctcccgtgcatctgtattcaccctgtatgacaaacacattacattattaaatgtttctcaaagatggagttaaatatcatctggtccatttggctccaaagacagaaaatgaaaagaaaaagggaagattattttccaatagaataatgattttcatgtatatgtcatgagtgtgtgaggtaatgcgtatgttaaatagctggatttagacattccacactatagccatatatcaaaacttcatgctgtacaacataaatatactatacaatttttacttgtcaattaaaaaagtaatcctaacatttaaaaaggcaatgcataaaaactgagaacagactataacaactgaaacaaactgggcaaacatgagatgagaaaccagccagcaagtcaatcagaactctttcttcatctcgtctacaatattttgtatttataactgtaaattagtgtatagtgtttcactccagagacttcaataatacagtgttatcaaaggacttgtacagatttcagagaaagacacatttagaagatggagagttctccgttatgttctatctgagagtcagtatgaaatgtcaaatctaaaagtacataattcagaggtctatttcaaattaataatcatttgagcataatttctccactgtcagagacgactgttattttattttcaatcaaattaaaagttgtttttatgcatatcttatttttagttatatgttacttgtacatacgtagcagtacaagtgcatataaatcctgtaagagtataaatcctatagaaatatattaagctgataattatgtctgttctgtttgatcacagagttgcaacaaataggcctcatttcctaagttgaggaaatgattttctcattttatatgagacttgtggtgtggaatttcaaggtagaaccaaaatgtgtggaatgaatatttcaatgaagatgcgttctgctgctaatagcaggaaatcccatctagtggctttatttttctttaacccgttatctcacatagccgatagatccaaggctgggcatctccagagttgctcaactcagcaggccagtggcatcaccagcgaccctggaacttcatagctcatctctctatcacacacagtatgtcagctttcctgagatggtagggtgacccctgcagcagctttaggtttgttattctttcacaacaactcccaaaggcaggaaaaggatactcctttctcctgtgtgcctttataaggagcaactaaactgtttccagagtgttcccagtacccactttctcacacattggaatgaccgtgggatcacatgggctcagacaagccaggattcaacctttgcagagtgggcctgaggcacatgggaagaaaaggagcaaaatcatgtattttaaaaaataaagaaatggtggatggag

SEQ ID NO: 15123 - protein, 75 aa, Homo sapiens
MKSFPAWQLFFHKRGLSQDLVATGSATAENVLPCGFLSSCPWPEVPALMAAPHLQLLCSPLPKPYGLPCICIHPV

SEQ ID NO: 15124 - DNA, 1880 bp, Homo sapiens
tgccaagtggagcactcaagtgtgatgagtgccctcacagtggaatggagagcacggtctgaatctgcacagagcaagatgctgagtggagtcgggggctttgtgctgggcctgctcttccttggggccgggctgttcatctacttcaggaatcagaaaggacactctggacttcagccaacaggattcctgagctgaaatgcagatgaccacattcaaggaagaactttctgccccggctttgcaggatgaaaagctttcctgcttggcagttattcttccacaagagagggctttctcaggacctggttgctactggttcggcaactgcagaaaatgtcctcccttgtggcttcctcagctcctgcccttggcctgaagtcccagcattgatggcagcgcctcatcttcaacttttgtgctcccctttgcctaaaccgtatggcctcccgtgcatctgtattcaccctgtatgacaaacacattacattattaaatgtttctcaaagatggagttaaatatcatctggtccatttggctccaaagacagaaaatgaaaagaaaaagggaagattattttccaatagaataatgattttcatgtatatgtcatgagtgtgtgaggtaatgcgtatgttaaatagctggatttagacattccacactatagccatatatcaaaacttcatgctgtacaacataaatatactatacaatttttacttgtcaattaaaaaagtaatcctaacatttaaaaaggcaatgcataaaaactgagaacagactataacaactgaaacaaactgggcaaacatgagatgagaaaccagccagcaagtcaatcagaactctttcttcatctcgtctacaatattttgtatttataactgtaaattagtgtatagtgtttcactccagagacttcaataatacagtgttatcaaaggacttgtacagatttcagagaaagacacatttagaagatggagagttctccgttatgttctatctgagagtcagtatgaaatgtcaaatctaaaagtacataattcagaggtctatttcaaattaataatcatttgagcataatttctccactgtcagagacgactgttattttattttcaatcaaattaaaagttgtttttatgcatatcttatttttagttatatgttacttgtacatacgtagcagtacaagtgcatataaatcctgtaagagtataaatcctatagaaatatattaagctgataattatgtctgttctgtttgatcacagagttgcaacaaataggcctcatttcctaagttgaggaaatgattttctcattttatatgagacttgtggtgtggaatttcaaggtagaaccaaaatgtgtggaatgaatatttcaatgaagatgcgttctgctgctaatagcaggaaatcccatctagtggctttatttttctttaacccgttatctcacatagccgatagatccaaggctgggcatctccagagttgctcaactcagcaggccagtggcatcaccagcgaccctggaacttcatagctcatctctctatcacacacagtatgtcagctttcctgagatggtagggtgacccctgcagcagctttaggtttgttattctttcacaacaactcccaaaggcaggaaaaggatactcctttctcctgtgtgcctttataaggagcaactaaactgtttccagagtgttcccagtacccactttctcacacattggaatgaccgtgggatcacatgggctcagacaagccaggattcaacctttgcagagtgggcctgaggcacatgggaagaaaaggagcaaaatcatgtattttaaaaaataaagaaatggtggatggag

SEQ ID NO: 15125 - protein, 57 aa, Homo sapiens
MSALTVEWRARSESAQSKMLSGVGGFVLGLLFLGAGLFIYFRNQKGHSGLQPTGFLS

SEQ ID NO: 15126 - DNA, 2687 bp, Homo sapiens
gataaataggtgccaagtggagcactcaagtgtgatgagtgccctcacagtggaatggagtgagaagctttctgacctcataaactgaaggctatcttcagtcattgttttatatattttacgtgcattaatcctcatataaccccaagaggtaaattagtataattatccttcattgtaggtgacaaagttgagacacagaagaatcaaaaaactcttccaggatcaaccagtaaaaggcagaccttggattcgaaccaggcaacctggctcaaatatcagttttaattactacactctgtactttccaagatttgtaaacagtttgacaatgcatgccgatttaaaactatgaagaaacaaacacaatttttcacaacacctctcaaatctaatgggtcctcactgtcaagattaaattccaggctgatgacactgtaaggtcacatggccagctgtgctataggcctggtcaaggccagagcctgggtttgcagagaagcagacacacagccaaaccaggagacttactctgtcttcctgactcattccctctacgttgtttttctcctagtccaacctaaggtgactgtatatccttcaaagacccagcccctgcagcaccacaacctcctggtctgctctgtgagtggtttctatccaggcagcattgaagtcaggtggttcctgaacggccaggaagagaaggctgggatggtgtccacaggcctgatccagaatggagactggaccttccagaccctggtgatgctggaaacagttcctcgaagtggagaggtttacacctgccaagtggagcacccaagcgtgacaagccctctcacagtggaatggagagcacggtctgaatctgcacagagcaagatgctgagtggagtcgggggctttgtgctgggcctgctcttccttggggccgggctgttcatctacttcaggaatcagaaaggacactctggacttcagccaacaggattcctgagctgaaatgcagatgaccacattcaaggaagaactttctgccccggctttgcaggatgaaaagctttcctgcttggcagttattcttccacaagagagggctttctcaggacctggttgctactggttcggcaactgcagaaaatgtcctcccttgtggcttcctcagctcctgcccttggcctgaagtcccagcattgatggcagcgcctcatcttcaacttttgtgctcccctttgcctaaaccgtatggcctcccgtgcatctgtattcaccctgtatgacaaacacattacattattaaatgtttctcaaagatggagttaaatatcatctggtccatttggctccaaagacagaaaatgaaaagaaaaagggaagattattttccaatagaataatgattttcatgtatatgtcatgagtgtgtgaggtaatgcgtatgttaaatagctggatttagacattccacactatagccatatatcaaaacttcatgctgtacaacataaatatactatacaatttttacttgtcaattaaaaaagtaatcctaacatttaaaaaggcaatgcataaaaactgagaacagactataacaactgaaacaaactgggcaaacatgagatgagaaaccagccagcaagtcaatcagaactctttcttcatctcgtctacaatattttgtatttataactgtaaattagtgtatagtgtttcactccagagacttcaataatacagtgttatcaaaggacttgtacagatttcagagaaagacacatttagaagatggagagttctccgttatgttctatctgagagtcagtatgaaatgtcaaatctaaaagtacataattcagaggtctatttcaaattaataatcatttgagcataatttctccactgtcagagacgactgttattttattttcaatcaaattaaaagttgtttttatgcatatcttatttttagttatatgttacttgtacatacgtagcagtacaagtgcatataaatcctgtaagagtataaatcctatagaaatatattaagctgataattatgtctgttctgtttgatcacagagttgcaacaaataggcctcatttcctaagttgaggaaatgattttctcattttatatgagacttgtggtgtggaatttcaaggtagaaccaaaatgtgtggaatgaatatttcaatgaagatgcgttctgctgctaatagcaggaaatcccatctagtggctttatttttctttaacccgttatctcacatagccgatagatccaaggctgggcatctccagagttgctcaactcagcaggccagtggcatcaccagcgaccctggaacttcatagctcatctctctatcacacacagtatgtcagctttcctgagatggtagggtgacccctgcagcagctttaggtttgttattctttcacaacaactcccaaaggcaggaaaaggatactcctttctcctgtgtgcctttataaggagcaactaaactgtttccagagtgttcccagtacccactttctcacacattggaatgaccgtgggatcacatgggctcagacaagccaggattcaacctttgcagagtgggcctgaggcacatgggaagaaaaggagcaaaatcatgtattttaaaaaataaagaaatggtggatggag

SEQ ID NO: 15127 - protein, 185 aa, Homo sapiens
MASCAIGLVKARAWVCREADTQPNQETYSVFLTHSLYVVFLLVQPKVTVYPSKTQPLQHHNLLVCSVSGFYPGSIEVRWFLNGQEEKAGMVSTGLIQNGDWTFQTLVMLETVPRSGEVYTCQVEHPSVTSPLTVEWRARSESAQSKMLSGVGGFVLGLLFLGAGLFIYFRNQKGHSGLQPTGFLS

SEQ ID NO: 15128 - DNA, 2585 bp, Homo sapiens
acttcctccctataacttggaatgtgggtggaggggttcatagttctccctgagtgagacttgcctgcttctctggcccctggtcctgtcctgttctccagcatggtgtgtctgaagctccctggaggctcctgcatgacagcgctgacagtgacactgatggtgctgagctccccactggctttgtctggggacacccgaccacgtttcctgtggcagcctaagagggagtgtcatttcttcaatgggacggagcgggtgcggttcctggacagatacttctataaccaggaggagtccgtgcgcttcgacagcgacgtgggggagttccgggcggtgacggagctggggcggcctgacgctgagtactggaacagccagaaggacatcctggagcaggcgcgggccgcggtggacacctactgcagacacaactacggggttgtggagagcttcacagtgcagcggcgagtccaacctaaggtgactgtatatccttcaaagacccagcccctgcagcaccacaacctcctggtctgctctgtgagtggtttctatccaggcagcattgaagtcaggtggttcctgaacggccaggaagagaaggctgggatggtgtccacaggcctgatccagaatggagactggaccttccagaccctggtgatgctggaaacagttcctcgaagtggagaggtttacacctgccaagtggagcacccaagcgtgacaagccctctcacagtggaatggagagcacggtctgaatctgcacagagcaagatgctgagtggagtcgggggctttgtgctgggcctgctcttccttggggccgggctgttcatctacttcaggaatcagaaaggacactctggacttcagccaacaggattcctgagctgaaatgcagatgaccacattcaaggaagaactttctgccccggctttgcaggatgaaaagctttcctgcttggcagttattcttccacaagagagggctttctcaggacctggttgctactggttcggcaactgcagaaaatgtcctcccttgtggcttcctcagctcctgcccttggcctgaagtcccagcattgatggcagcgcctcatcttcaacttttgtgctcccctttgcctaaaccgtatggcctcccgtgcatctgtattcaccctgtatgacaaacacattacattattaaatgtttctcaaagatggagttaaatatcatctggtccatttggctccaaagacagaaaatgaaaagaaaaagggaagattattttccaatagaataatgattttcatgtatatgtcatgagtgtgtgaggtaatgcgtatgttaaatagctggatttagacattccacactatagccatatatcaaaacttcatgctgtacaacataaatatactatacaatttttacttgtcaattaaaaaagtaatcctaacatttaaaaaggcaatgcataaaaactgagaacagactataacaactgaaacaaactgggcaaacatgagatgagaaaccagccagcaagtcaatcagaactctttcttcatctcgtctacaatattttgtatttataactgtaaattagtgtatagtgtttcactccagagacttcaataatacagtgttatcaaaggacttgtacagatttcagagaaagacacatttagaagatggagagttctccgttatgttctatctgagagtcagtatgaaatgtcaaatctaaaagtacataattcagaggtctatttcaaattaataatcatttgagcataatttctccactgtcagagacgactgttattttattttcaatcaaattaaaagttgtttttatgcatatcttatttttagttatatgttacttgtacatacgtagcagtacaagtgcatataaatcctgtaagagtataaatcctatagaaatatattaagctgataattatgtctgttctgtttgatcacagagttgcaacaaataggcctcatttcctaagttgaggaaatgattttctcattttatatgagacttgtggtgtggaatttcaaggtagaaccaaaatgtgtggaatgaatatttcaatgaagatgcgttctgctgctaatagcaggaaatcccatctagtggctttatttttctttaacccgttatctcacatagccgatagatccaaggctgggcatctccagagttgctcaactcagcaggccagtggcatcaccagcgaccctggaacttcatagctcatctctctatcacacacagtatgtcagctttcctgagatggtagggtgacccctgcagcagctttaggtttgttattctttcacaacaactcccaaaggcaggaaaaggatactcctttctcctgtgtgcctttataaggagcaactaaactgtttccagagtgttcccagtacccactttctcacacattggaatgaccgtgggatcacatgggctcagacaagccaggattcaacctttgcagagtgggcctgaggcacatgggaagaaaaggagcaaaatcatgtattttaaaaaataaagaaatggtggatggag

SEQ ID NO: 15129 - protein, 266 aa, Homo sapiens
MVCLKLPGGSCMTALTVTLMVLSSPLALSGDTRPRFLWQPKRECHFFNGTERVRFLDRYFYNQEESVRFDSDVGEFRAVTELGRPDAEYWNSQKDILEQARAAVDTYCRHNYGVVESFTVQRRVQPKVTVYPSKTQPLQHHNLLVCSVSGFYPGSIEVRWFLNGQEEKAGMVSTGLIQNGDWTFQTLVMLETVPRSGEVYTCQVEHPSVTSPLTVEWRARSESAQSKMLSGVGGFVLGLLFLGAGLFIYFRNQKGHSGLQPTGFLS

SEQ ID NO: 15130 - DNA, 575 bp, Homo sapiens
gaagagccactaaggctaatggaattacactggatcctgtgacagacacttcaggcttcatgggtcacatggtctgtttctgctcctttctgccctggttggtgtgggttgtggtgttagagaaatctcaggtgggagatctggggctgggacattgtgttggaggacagatttgcttcaataacttttaagtgtatatcttttcctctttttcccaggacactctggacttcagccaacaggattcctgagctgaaatgcagatgaccacattcaaggaagaactttctgccccggctttgcaggatgaaaagctttcctgcttggcagttattcttccacaagagagggctttctcaggacctggttgctactggttcggcaactgcagaaaatgtcctcccttgtggcttcctcagctcctgcccttggcctgaagtcccagcattgatggcagcgcctcatcttcaacttttgtgctcccctttgcctaaaccgtatggcctcccgtgcatctgtattcaccctgtatgacaaacacattacattattaaatgtttctcaaagatggagtt

SEQ ID NO: 15131 - protein, 75 aa, Homo sapiens; identical to SEQ ID NO: 15123

SEQ ID NO: 15132 - DNA, 517 bp, Homo sapiens
tgccaagtggagcactcaagtgtgatgagtgccctcacagtggaatggagagcacggtctgaatctgcacagagcaagatgctgagtggagtcgggggctttgtgctgggcctgctcttccttggggccgggctgttcatctacttcaggaatcagaaaggacactctggacttcagccaacaggattcctgagctgaaatgcagatgaccacattcaaggaagaactttctgccccggctttgcaggatgaaaagctttcctgcttggcagttattcttccacaagagagggctttctcaggacctggttgctactggttcggcaactgcagaaaatgtcctcccttgtggcttcctcagctcctgcccttggcctgaagtcccagcattgatggcagcgcctcatcttcaacttttgtgctcccctttgcctaaaccgtatggcctcccgtgcatctgtattcaccctgtatgacaaacacattacattattaaatgtttctcaaagatggagtt

SEQ ID NO: 15133 - protein, 57 aa, Homo sapiens; identical to SEQ ID NO: 15125

SEQ ID NO: 15134 - DNA, 1324 bp, Homo sapiens
gataaataggtgccaagtggagcactcaagtgtgatgagtgccctcacagtggaatggagtgagaagctttctgacctcataaactgaaggctatcttcagtcattgttttatatattttacgtgcattaatcctcatataaccccaagaggtaaattagtataattatccttcattgtaggtgacaaagttgagacacagaagaatcaaaaaactcttccaggatcaaccagtaaaaggcagaccttggattcgaaccaggcaacctggctcaaatatcagttttaattactacactctgtactttccaagatttgtaaacagtttgacaatgcatgccgatttaaaactatgaagaaacaaacacaatttttcacaacacctctcaaatctaatgggtcctcactgtcaagattaaattccaggctgatgacactgtaaggtcacatggccagctgtgctataggcctggtcaaggccagagcctgggtttgcagagaagcagacacacagccaaaccaggagacttactctgtcttcctgactcattccctctacgttgtttttctcctagtccaacctaaggtgactgtatatccttcaaagacccagcccctgcagcaccacaacctcctggtctgctctgtgagtggtttctatccaggcagcattgaagtcaggtggttcctgaacggccaggaagagaaggctgggatggtgtccacaggcctgatccagaatggagactggaccttccagaccctggtgatgctggaaacagttcctcgaagtggagaggtttacacctgccaagtggagcacccaagcgtgacaagccctctcacagtggaatggagagcacggtctgaatctgcacagagcaagatgctgagtggagtcgggggctttgtgctgggcctgctcttccttggggccgggctgttcatctacttcaggaatcagaaaggacactctggacttcagccaacaggattcctgagctgaaatgcagatgaccacattcaaggaagaactttctgccccggctttgcaggatgaaaagctttcctgcttggcagttattcttccacaagagagggctttctcaggacctggttgctactggttcggcaactgcagaaaatgtcctcccttgtggcttcctcagctcctgcccttggcctgaagtcccagcattgatggcagcgcctcatcttcaacttttgtgctcccctttgcctaaaccgtatggcctcccgtgcatctgtattcaccctgtatgacaaacacattacattattaaatgtttctcaaagatggagtt

SEQ ID NO: 15135 - protein, 185 aa, Homo sapiens; identical to SEQ ID NO: 15127

SEQ ID NO: 15136 - DNA, 1222 bp, Homo sapiens
acttcctccctataacttggaatgtgggtggaggggttcatagttctccctgagtgagacttgcctgcttctctggcccctggtcctgtcctgttctccagcatggtgtgtctgaagctccctggaggctcctgcatgacagcgctgacagtgacactgatggtgctgagctccccactggctttgtctggggacacccgaccacgtttcctgtggcagcctaagagggagtgtcatttcttcaatgggacggagcgggtgcggttcctggacagatacttctataaccaggaggagtccgtgcgcttcgacagcgacgtgggggagttccgggcggtgacggagctggggcggcctgacgctgagtactggaacagccagaaggacatcctggagcaggcgcgggccgcggtggacacctactgcagacacaactacggggttgtggagagcttcacagtgcagcggcgagtccaacctaaggtgactgtatatccttcaaagacccagcccctgcagcaccacaacctcctggtctgctctgtgagtggtttctatccaggcagcattgaagtcaggtggttcctgaacggccaggaagagaaggctgggatggtgtccacaggcctgatccagaatggagactggaccttccagaccctggtgatgctggaaacagttcctcgaagtggagaggtttacacctgccaagtggagcacccaagcgtgacaagccctctcacagtggaatggagagcacggtctgaatctgcacagagcaagatgctgagtggagtcgggggctttgtgctgggcctgctcttccttggggccgggctgttcatctacttcaggaatcagaaaggacactctggacttcagccaacaggattcctgagctgaaatgcagatgaccacattcaaggaagaactttctgccccggctttgcaggatgaaaagctttcctgcttggcagttattcttccacaagagagggctttctcaggacctggttgctactggttcggcaactgcagaaaatgtcctcccttgtggcttcctcagctcctgcccttggcctgaagtcccagcattgatggcagcgcctcatcttcaacttttgtgctcccctttgcctaaaccgtatggcctcccgtgcatctgtattcaccctgtatgacaaacacattacattattaaatgtttctcaaagatggagtt

SEQ ID NO: 15137 - protein, 266 aa, Homo sapiens; identical to SEQ ID NO: 15129

SEQ ID NO: 15138 - DNA, 520 bp, Homo sapiens
aagagcaaaataatatgaaaagtatttaacaaggaatataaagaatcatcaaagaaaatgttataaaacttctttgagaccacaagagatgatagagatggggtttcactgtgttagcgaggatggtcttgatctcctgacctcgtgatccgcctgcttctgcctcccaaagtgctgggattacagtcgtgagccaccgcgcctggcctcctcatattattttttattgtgcagtttattcaagagagctttccagcacctgtgataagcctcagcccgcctgccggataatgagcccacatggattgagagaggcctcctatccctgccaaacctattgatgctacagagatgtgagggagcccacctgagaaaagctgaacctgcccagtacataaaaaccactcagctcagaacaccaactgctgaggctgccttgggaagaggatgatcctaaacaaagctctgctgctgggggccctcgctctgaccaccgtgatgagcccctgtggaggtgaag

SEQ ID NO: 15139 - protein, 36 aa, Homo sapiens
MLQRCEGAHLRKAEPAQYIKTTQLRTPTAEAALGRG

SEQ ID NO: 15140 - DNA, 872 bp, Homo sapiens
ggcagggtttggtttgggtgtcttcagatttccttgtcttgaggtcctcacaattactctacagctcagaacaccaactgctgaggctgccttgggaagaggatgatcctaaacaaagctctgctgctgggggccctcgctctgaccaccgtgatgagcccctgtggaggtgaagacattgtggctgaccacgttgcctcttgtggtgtaaacttgtaccagttttacggtccctctggccagtacacccatgaatttgatggagatgagcagttctacgtggacctggagaggaaggagactgcctggcggtggcctgagttcagcaaatttggaggttttgacccgcagggtgcactgagaaacatggctgtggcaaaggttcctgaggtcacagtgttttccaagtctcccgtgacactgggtcagcccaacaccctcatttgtctttgggcctcatgggcattgtggtgggcactgtcttcatcatccaaggcctgcgttcagttggtgcttccagacaccaagggccattgtgaatcccatcctggaagggaaggtgcatcgccatctacaggagcagaagaatggacttgctaaatgacctagcactattctctggcccgatttatcatatcccttttctcctccaaatatttctcctctcaccttttctctgggacttaagctgctatatcccctcagagctcacaaatgcctttacattctttccctgacctcctgattttttttttcttttctcaaatgttacctacaaagacatgcctggggtaagccacccggctacctaattcctcagtaacctccatctaaaatctccaaggaagcaataaattccttttatgagatct

SEQ ID NO: 15141 - protein, 165 aa, Homo sapiens
MILNKALLLGALALTTVMSPCGGEDIVADHVASCGVNLYQFYGPSGQYTHEFDGDEQFYVDLERKETAWRWPEFSKFGGFDPQGALRNMAVAKVPEVTVFSKSPVTLGQPNTLICLWASWALWWALSSSSKACVQLVLPDTKGHCESHPGREGASPSTGAEEWTC

SEQ ID NO: 15142 - DNA, 2667 bp, Homo sapiens
ggcagggtttggtttgggtgtcttcagatttccttgtcttgaggtcctcacaattactctacagctcagaacaccaactgctgaggctgccttgggaagaggatgatcctaaacaaagctctgctgctgggggccctcgctctgaccaccgtgatgagcccctgtggaggtgaagacattgtggctgaccacgttgcctcttgtggtgtaaacttgtaccagttttacggtccctctggccagtacacccatgaatttgatggagatgagcagttctacgtggacctggagaggaaggagactgcctggcggtggcctgagttcagcaaatttggaggttttgacccgcagggtgcactgagaaacatggctgtggcaaaggttcctgaggtcacagtgttttccaagtctcccgtgacactgggtcagcccaacaccctcatttgtctttgggcctcatgggcattgtggtgggcactgtcttcatcatccaaggcctgcgttcagttggtgcttccagacaccaagggccattgtgaatcccatcctggaagggaaggtgcatcgccatctacaggagcagaagaatggacttgctaaatgacctagcactattctctggcccgatttatcatatcccttttctcctccaaatatttctcctctcaccttttctctgggacttaagctgctatatcccctcagagctcacaaatgcctttacattctttccctgacctcctgattttttttttcttttctcaaatgttacctacaaagacatgcctggggtaagccacccggctacctaattcctcagtaacctccatctaaaatctccaaggaagcaataaattccttttatgagatctatgtcaaatttttccatctttcatccagggctgactgaaactatggctaataattggggtactcttatgtttcaatccaatttaacctcatttcccagatcatttttcatgtccagtaacacagaagccaccaagtacagtatagcctgataatatgttgatttcttagctgacattaatatttcttgcttccttgtgttcccacccttggcactgccacccacccctcaattcaggcaacaatgaaattaatggataccgtctgcccttggcccagaattgttatagcaaaaattttagaaccaaaaaataagtctgtactaatttcaatgtggcttttaaaagtatgacagagaaataagttaggataaaggaaatttgaatctcaaaaatatcaaaagtaaaaatgtattctcaaaactttaaatttatgaagaatgatgacagtagaagccttcctcttcccttgtcaccttgagataaaaattctttaggcaggaaaagaaatggaagtcagaaaaacattagaataagacaataatgtgggtgtctgaaaaggaacaaatacttattcctcacatagggttagtgacaatgggaaaagggacgggagtagaagccacagacatatctaggagccctgaatagaggcgcagtctgcctcacctcctgaatgaagctgtactagataaccatgtagctttccctgtgccactctggcatgaaggagacagtatagtgaatatggctacaggatgtttcttggaaacatgccaatatcttcagaaatccccagccctttcccctaacccctcctgactaaggaaagcatgagcttatgagagaaaccctaggaagaacaacacagttgagacaatgtagcagcagcagtgggtgctgtgtcctccactggattcgccatctccgaggagaaactctcacagaggaaatgggtcagcagcgacctcatggctctaaacagctatgaaatccatgaggatatttctaaccatgctacctgcatcagtgagtttaaattttaattggagaaaaaatacaaaacattaatgcaataattgatacagtatagtttggtgcaaagaaccctaaatccaaatccaggactcagtactttgaagctagtattttaaactttataaatgtgtgaagtctctaacatttctggccttacttttctcatccacaatgtaggagtaataatactttccttgcagagttattgataaaatttgaataattttgatatttagtcaatgccttacacatagtacatgaacacataagaaaacattgtggttatatttataattaatttatttaaaagaatggatcatattatatgaaaagcacttttgtttttctcagcctcttaatgatttaggagattcaaatgtagagctatgggtgaatttcttttcatatgataattgaaggatatttttctttttccagaatgagagaggctgagattggattggtaagagaactcttagcactagaagttgtaatatttgactttggttttcaactctctaagagggaatatattccctccttatggcccataagtgtttattcaaggtatatcatatacaacagatctttatgcctgtttactttggggaagaagtgaagatagttcaaggagaaaataatttaaaacacagactgggaatcagtaagcacaggaaatctgaaccagtgatgatcatgaaaatgtccatcacagagcacagatgattttcagggcaataaaactattctgtttgatacc

SEQ ID NO: 15143 - protein, 165 aa, Homo sapiens; identical to SEQ ID NO: 15141

SEQ ID NO: 15144 - DNA, 1168 bp, Homo sapiens
gaggtcctcacaattactctacagctcagaacaccaactgctgaggctgccttgggaagaggatgatcctaaacaaagctctgctgctgggggccctcgctctgaccaccgtgatgagcccctgtggaggtgaagacattgtggctgaccacgttgcctcttgtggtgtaaacttgtaccagttttacggtccctctggccagtacacccatgaatttgatggagatgagcagttctacgtggacctggagaggaaggagactgcctggcggtggcctgagttcagcaaatttggaggttttgacccgcagggtgcactgagaaacatggctgtggcaaaacacaacttgaacatcatgattaaacgctacaactctaccgctgctaccaatgaggttcctgaggtcacagtgttttccaagtctcccgtgacactgggtcagcccaacaccctcatttgtcttgtggacaacatctttcctcctgtggtcaacatcacatggctgagcaatgggcagtcagtcacagaaggtgtttctgagaccagcttcctctccaagagtgatcattccttcttcaagatcagttacctcaccttcctcccttctgctgatgagatttatgactgcaaggtggagcactggggcctggaccagcctcttctgaaacactgggagcctgagattccagcccctatgtcagagctcacagagactgtggtctgtgccctggggttgtctgtgggcctcatgggcattgtggtgggcactgtcttcatcatccaaggcctgcgttcagttggtgcttccagacaccaagggccattgtgaatcccatcctggaagggaaggtgcatcgccatctacaggagcagaagaatggacttgctaaatgacctagcactattctctggcccgatttatcatatcccttttctcctccaaatatttctcctctcaccttttctctgggacttaagctgctatatcccctcagagctcacaaatgcctttacattctttccctgacctcctgattttttttttcttttctcaaatgttacctacaaagacatgcctggggtaagccacccggctacctaattcctcagtaacctccatctaaaatctccaaggaagcaataaattccttttatgagatctatgtc

SEQ ID NO: 15145 - protein, 255 aa, Homo sapiens; identical to SEQ ID NO: 1689

SEQ ID NO: 15146 - DNA, 2958 bp, Homo sapiens
gaggtcctcacaattactctacagctcagaacaccaactgctgaggctgccttgggaagaggatgatcctaaacaaagctctgctgctgggggccctcgctctgaccaccgtgatgagcccctgtggaggtgaagacattgtggctgaccacgttgcctcttgtggtgtaaacttgtaccagttttacggtccctctggccagtacacccatgaatttgatggagatgagcagttctacgtggacctggagaggaaggagactgcctggcggtggcctgagttcagcaaatttggaggttttgacccgcagggtgcactgagaaacatggctgtggcaaaacacaacttgaacatcatgattaaacgctacaactctaccgctgctaccaatgaggttcctgaggtcacagtgttttccaagtctcccgtgacactgggtcagcccaacaccctcatttgtcttgtggacaacatctttcctcctgtggtcaacatcacatggctgagcaatgggcagtcagtcacagaaggtgtttctgagaccagcttcctctccaagagtgatcattccttcttcaagatcagttacctcaccttcctcccttctgctgatgagatttatgactgcaaggtggagcactggggcctggaccagcctcttctgaaacactgggagcctgagattccagcccctatgtcagagctcacagagactgtggtctgtgccctggggttgtctgtgggcctcatgggcattgtggtgggcactgtcttcatcatccaaggcctgcgttcagttggtgcttccagacaccaagggccattgtgaatcccatcctggaagggaaggtgcatcgccatctacaggagcagaagaatggacttgctaaatgacctagcactattctctggcccgatttatcatatcccttttctcctccaaatatttctcctctcaccttttctctgggacttaagctgctatatcccctcagagctcacaaatgcctttacattctttccctgacctcctgattttttttttcttttctcaaatgttacctacaaagacatgcctggggtaagccacccggctacctaattcctcagtaacctccatctaaaatctccaaggaagcaataaattccttttatgagatctatgtcaaatttttccatctttcatccagggctgactgaaactatggctaataattggggtactcttatgtttcaatccaatttaacctcatttcccagatcatttttcatgtccagtaacacagaagccaccaagtacagtatagcctgataatatgttgatttcttagctgacattaatatttcttgcttccttgtgttcccacccttggcactgccacccacccctcaattcaggcaacaatgaaattaatggataccgtctgcccttggcccagaattgttatagcaaaaattttagaaccaaaaaataagtctgtactaatttcaatgtggcttttaaaagtatgacagagaaataagttaggataaaggaaatttgaatctcaaaaatatcaaaagtaaaaatgtattctcaaaactttaaatttatgaagaatgatgacagtagaagccttcctcttcccttgtcaccttgagataaaaattctttaggcaggaaaagaaatggaagtcagaaaaacattagaataagacaataatgtgggtgtctgaaaaggaacaaatacttattcctcacatagggttagtgacaatgggaaaagggacgggagtagaagccacagacatatctaggagccctgaatagaggcgcagtctgcctcacctcctgaatgaagctgtactagataaccatgtagctttccctgtgccactctggcatgaaggagacagtatagtgaatatggctacaggatgtttcttggaaacatgccaatatcttcagaaatccccagccctttcccctaacccctcctgactaaggaaagcatgagcttatgagagaaaccctaggaagaacaacacagttgagacaatgtagcagcagcagtgggtgctgtgtcctccactggattcgccatctccgaggagaaactctcacagaggaaatgggtcagcagcgacctcatggctctaaacagctatgaaatccatgaggatatttctaaccatgctacctgcatcagtgagtttaaattttaattggagaaaaaatacaaaacattaatgcaataattgatacagtatagtttggtgcaaagaaccctaaatccaaatccaggactcagtactttgaagctagtattttaaactttataaatgtgtgaagtctctaacatttctggccttacttttctcatccacaatgtaggagtaataatactttccttgcagagttattgataaaatttgaataattttgatatttagtcaatgccttacacatagtacatgaacacataagaaaacattgtggttatatttataattaatttatttaaaagaatggatcatattatatgaaaagcacttttgtttttctcagcctcttaatgatttaggagattcaaatgtagagctatgggtgaatttcttttcatatgataattgaaggatatttttctttttccagaatgagagaggctgagattggattggtaagagaactcttagcactagaagttgtaatatttgactttggttttcaactctctaagagggaatatattccctccttatggcccataagtgtttattcaaggtatatcatatacaacagatctttatgcctgtttactttggggaagaagtgaagatagttcaaggagaaaataatttaaaacacagactgggaatcagtaagcacaggaaatctgaaccagtgatgatcatgaaaatgtccatcacagagcacagatgattttcagggcaataaaactattctgtttgatacc

SEQ ID NO: 15147 - protein, 255 aa, Homo sapiens; identical to SEQ ID NO: 1689

SEQ ID NO: 15148 - DNA, 967 bp, Homo sapiens
ctcacaattactctacagctcagaacaccaactgctgaggctgccttgggaagaggatgatcctaaacaaagctctgctgctgggggccctcgctctgaccaccgtgatgagcccctgtggaggtgaagacattgtggctgaccacgttgcctcttgtggtgtaaacttgtaccagttttacggtccctctggccagtacacccatgaatttgatggagatgagcagttctacgtggacctggagaggaaggagactgcctggcggtggcctgagttcagcaaatttggaggttttgacccgcagggtgcactgagaaacatggctgtggcaaaacacaacttgaacatcatgattaaacgctacaactctaccgctgctaccaatgaggttcctgaggtcacagtgttttccaagtctcccgtgacactgggtcagcccaacaccctcatttgtcttgtggacaacatctttcctcctgtggtcaacatcacatggctgagcaatgggcagtcagtcacagaaggtgtttctgagaccagcttcctctccaagagtgatcattccttcttcaagatcagttacctcaccttcctcccttctgctgatgagatttatgactgcaaggtggagcactggggcctggaccagcctcttctgaaacactggggtaaggatgagtttcatcattttttgattctttcttgtctgtcaagttcagaacttcctgccttttactcctatatccaaaaacttgttttccacacttcatgggtttcttttctgtctctcttttttttttgaaagaataaagcaaaaaaagcagagatttattgaaaatgaaagtacactctacaggatgggagtgggcctgccacttcatggttttctaatgatagacttcactcttctccctaagcctggggccttgagtctttgcagagccaaccctctaccccatcccatcc

SEQ ID NO: 15149 - protein, 248 aa, Homo sapiens
MILNKALLLGALALTTVMSPCGGEDIVADHVASCGVNLYQFYGPSGQYTHEFDGDEQFYVDLERKETAWRWPEFSKFGGFDPQGALRNMAVAKHNLNIMIKRYNSTAATNEVPEVTVFSKSPVTLGQPNTLICLVDNIFPPVVNITWLSNGQSVTEGVSETSFLSKSDHSFFKISYLTFLPSADEIYDCKVEHWGLDQPLLKHWGKDEFHHFLILSCLSSSELPAFYSYIQKLVFHTSWVSFLSLFFF

SEQ ID NO: 15150 - DNA, 2156 bp, Homo sapiens
ctcacaattactctacagctcagaacaccaactgctgaggctgccttgggaagaggatgatcctaaacaaagctctgctgctgggggccctcgctctgaccaccgtgatgagcccctgtggaggtgaagacattgtgggatccatctctgactccctgctcctttatagagatggacagtgggtttgtaaaacaaaagttgaaaagtcagatagttaaaaggggaagtgaactggaaggtactttaaactttcacaactttattaaccgtggctgctcccattatgattttgttcggcagtggaagtttcacctgcttctccagagcgcttggcgtctttgttccaaatttcctttcttcaacctcacaccagagtgccctggtcaggcttggctcattcattaggcacaatgtgggcagtgcaggggaccctccatactgtaaagccacatgagaaggttttaactccttttaaaattagaaaaataatggaatattagagcctaagaaaatgttttaacttttaattcagcctagattatattgtctttataccaattcagtcataaaatataattttccatatttttgtggaggaagaggcccatacaagcaagaatgctcggggctcacatgtcagaatgcagccttggtcatgactgatcctggccttcgtatggttctgctacctgtgtgcctgcccgtcttccccaaaatctatgtggtcctcgaatatagcaactgtcattcaatacacatgtttgagcacacagtgagctaagttttaaggattcaaagatgaaaagtcatgctgtcttccctgcagagggtgctcagattagtgatggaaacagtatggggtgcaggaaagcagaaggccattgctgagcagggcagtggacccagcagaggctgaaacaatacaagtgacttggttccaggtgggccagcagggtgacgtcctctagcaaaatttggcacccaagacaagtaccagaagaaaagaaagactgcatgtattccacatatattcatgtttgaacaaggagtcaagatttatggcaaggataaggaggctttgttggtgacctgttaagaccaaccagggcagtcatgctggatagggaagaagctgaccacgttgcctcttgtggtgtaaacttgtaccagttttacggtccctctggccagtacacccatgaatttgatggagatgagcagttctacgtggacctggagaggaaggagactgcctggcggtggcctgagttcagcaaatttggaggttttgacccgcagggtgcactgagaaacatggctgtggcaaaacacaacttgaacatcatgattaaacgctacaactctaccgctgctaccaatgaggttcctgaggtcacagtgttttccaagtctcccgtgacactgggtcagcccaacaccctcatttgtcttgtggacaacatctttcctcctgtggtcaacatcacatggctgagcaatgggcagtcagtcacagaaggtgtttctgagaccagcttcctctccaagagtgatcattccttcttcaagatcagttacctcaccttcctcccttctgctgatgagatttatgactgcaaggtggagcactggggcctggaccagcctcttctgaaacactgggagcctgagattccagcccctatgtcagagctcacagagactgtggtctgtgccctggggttgtctgtgggcctcatgggcattgtggtgggcactgtcttcatcatccaaggcctgcgttcagttggtgcttccagacaccaagggccattgtgaatcccatcctggaagggaaggtgcatcgccatctacaggagcagaagaatggacttgctaaatgacctagcactattctctggcccgatttatcatatcccttttctcctccaaatatttctcctctcaccttttctctgggacttaagctgctatatcccctcagagctcacaaatgcctttacattctttccctgacctcctgattttttttttcttttctcaaatgttacctacaaagacatgcctggggtaagccacccggctacctaattcctcagtaacctccatctaaaatctccaaggaagcaataaattccttttatgagatctatgtc

SEQ ID NO: 15151 - protein, 234 aa, Homo sapiens
MLDREEADHVASCGVNLYQFYGPSGQYTHEFDGDEQFYVDLERKETAWRWPEFSKFGGFDPQGALRNMAVAKHNLNIMIKRYNSTAATNEVPEVTVFSKSPVTLGQPNTLICLVDNIFPPVVNITWLSNGQSVTEGVSETSFLSKSDHSFFKISYLTFLPSADEIYDCKVEHWGLDQPLLKHWEPEIPAPMSELTETVVCALGLSVGLMGIVVGTVFIIQGLRSVGASRHQGPL

SEQ ID NO: 15152 - DNA, 1943 bp, Homo sapiens
gagcctgagattccagcccctatgtcagagctcacagagactgtggtctgtgccctggggttgtctgtgggcctcatgggcattgtggtgggcactgtcttcatcatccaaggcctgcgttcagttggtgcttccagacaccaagggccattgtgaatcccatcctggaagggaagggctgactgaaactatggctaataattggggtactcttatgtttcaatccaatttaacctcatttcccagatcatttttcatgtccagtaacacagaagccaccaagtacagtatagcctgataatatgttgatttcttagctgacattaatatttcttgcttccttgtgttcccacccttggcactgccacccacccctcaattcaggcaacaatgaaattaatggataccgtctgcccttggcccagaattgttatagcaaaaattttagaaccaaaaaataagtctgtactaatttcaatgtggcttttaaaagtatgacagagaaataagttaggataaaggaaatttgaatctcaaaaatatcaaaagtaaaaatgtattctcaaaactttaaatttatgaagaatgatgacagtagaagccttcctcttcccttgtcaccttgagataaaaattctttaggcaggaaaagaaatggaagtcagaaaaacattagaataagacaataatgtgggtgtctgaaaaggaacaaatacttattcctcacatagggttagtgacaatgggaaaagggacgggagtagaagccacagacatatctaggagccctgaatagaggcgcagtctgcctcacctcctgaatgaagctgtactagataaccatgtagctttccctgtgccactctggcatgaaggagacagtatagtgaatatggctacaggatgtttcttggaaacatgccaatatcttcagaaatccccagccctttcccctaacccctcctgactaaggaaagcatgagcttatgagagaaaccctaggaagaacaacacagttgagacaatgtagcagcagcagtgggtgctgtgtcctccactggattcgccatctccgaggagaaactctcacagaggaaatgggtcagcagcgacctcatggctctaaacagctatgaaatccatgaggatatttctaaccatgctacctgcatcagtgagtttaaattttaattggagaaaaaatacaaaacattaatgcaataattgatacagtatagtttggtgcaaagaaccctaaatccaaatccaggactcagtactttgaagctagtattttaaactttataaatgtgtgaagtctctaacatttctggccttacttttctcatccacaatgtaggagtaataatactttccttgcagagttattgataaaatttgaataattttgatatttagtcaatgccttacacatagtacatgaacacataagaaaacattgtggttatatttataattaatttatttaaaagaatggatcatattatatgaaaagcacttttgtttttctcagcctcttaatgatttaggagattcaaatgtagagctatgggtgaatttcttttcatatgataattgaaggatatttttctttttccagaatgagagaggctgagattggattggtaagagaactcttagcactagaagttgtaatatttgactttggttttcaactctctaagagggaatatattccctccttatggcccataagtgtttattcaaggtatatcatatacaacagatctttatgcctgtttactttggggaagaagtgaagatagttcaaggagaaaataatttaaaacacagactgggaatcagtaagcacaggaaatctgaaccagtgatgatcatgaaaatgtccatcacagagcacagatgattttcagggcaataaaactattctgtttgatacc

SEQ ID NO: 15153 - protein, 70 aa, Homo sapiens [sequence omitted]

SEQ ID NO: 15154 - DNA, 683 bp, Homo sapiens
ctcaactttctctgtctgaagctgcagggggcccctgaagggtgggggagatggcaggcccaccaggataccctgtgctgatcaatgctcttctctcttctccagggcttctgcactgactcctgagactattttaactaggattggttatcactcttctgtgatgcctgcttatgcctgcccagaattcccagctgcctgtgtcagcttgtccccctgagatcaaagtcctacagtggctgtcacgcagccaccaggtcatctcctttcatccccaccccaaggcgctggctgtgactctgcttcctgcactgacccagagcctctgcctgtgcatggccagctgcgtctactcaggtcccaaggggtttctgtttctattctttcctcagactgctcaagagaagcacatgaaaaacattacctgactttagagcttttttacataattaaacatgatcctgagttatctgtattctgaactttcttaattgagaagaggcaggaaatcactgcagaatgaaggaacatcccttgaggtgacccagcaaacctgtggccagaaggaggattgtaccttgaaaagacaacccgtaaagggtctgtgctgaggaggattagtaaaagaggaaggcctttttgcagttgagataagaggaaggcatctgtctcctgctcgtccc

SEQ ID NO: 15155 - protein, 84 aa, Homo sapiens [sequence omitted]

SEQ ID NO: 15156 - DNA, 879 bp, Homo sapiens
tgcatcaagctgaagttctgtgtcctcatgagctgatttcacctttgcacagatcttgggggagggcttctgcactgactcctgagactattttaactaggattggttatcactcttctgtgatgcctgcttatgcctgcccagaattcccagctgcctgtgtcagcttgtccccctgagatcaaagtcctacagtggctgtcacgcagccaccaggtcatctcctttcatccccaccccaaggcgctggctgtgactctgcttcctgcactgacccagagcctctgcctgtgcatggccagctgcgtctactcaggtcccaaggggtttctgtttctattctttcctcagactgctcaagagaagcacatgaaaaacattacctgactttagagcttttttacataattaaacatgatcctgagttatctgtattctgaactttcttaattgagaagaggcaggaaatcactgcagaatgaaggaacatcccttgaggtgacccagcaaacctgtggccagaaggaggattgtaccttgaaaagacactgaaagcattttggggtgtgaagtaagggtgggcagaggaggtagaaaataattcaattgtcgcatcattcatggttctttaatactgatgctcagtgcattggccttagaatatcccagcctctcttctggtttggtgagtgctgtgtaaataagcatggtagaattgtttggagacatatatagtgatccttggtcactggtgtttcaaacattctggaaagtcacatcgatcaagaatattttttatttttaagaaagcataaccagcaataaaaatactatttttgagtctaaatgatagaagcccaaatatattttgttcatggt

SEQ ID NO: 15157 - protein, 84 aa, Homo sapiens [sequence omitted]

SEQ ID NO: 15158 - DNA, 738 bp, Homo sapiens
ataacagctgttccccacctcccacacatctgcatcaagctgaagttctgtgtcctcatgagctgatttcacctttgcacagatcttgggggaggtgatgacaatacaccctggactctgcttcctgcactgacccagagcctctgcctgtgcatggccagctgcgtctactcaggtcccaaggggtttctgtttctattctttcctcagactgctcaagagaagcacatgaaaaacattacctgactttagagcttttttacataattaaacatgatcctgagttatctgtattctgaactttcttaattgagaagaggcaggaaatcactgcagaatgaaggaacatcccttgaggtgacccagcaaacctgtggccagaaggaggattgtaccttgaaaagacactgaaagcattttggggtgtgaagtaagggtgggcagaggaggtagaaaataattcaattgtcgcatcattcatggttctttaatactgatgctcagtgcattggccttagaatatcccagcctctcttctggtttggtgagtgctgtgtaaataagcatggtagaattgtttggagacatatatagtgatccttggtcactggtgtttcaaacattctggaaagtcacatcgatcaagaatattttttatttttaagaaagcataaccagcaataaaaatactatttttgagtctaaatgatagaagcccaaatatattttgttcatggt

SEQ ID NO: 15159 - protein, 32 aa, Homo sapiens
MVELFGDIYSDPWSLVFQTFWKVTSIKNIFYF

SEQ ID NO: 15160 - DNA, 1510 bp, Homo sapiens
ccgagctgtgttgactaccactgcttttcccttcgtctcagttatgtcttggaagaaggctttgcggatccccggagaccttcgggtagcaactgtcaccttgatgctggcgatgctgagctccctactggctgagggcagagactctcccgaggatttcgtgttccagtttaagggcatgtgctacttcaccaacgggacggagcgcgtgcgtcttgtgaccagatacatctataaccgagaggagtacgcgcgcttcgacagcgacgtgggggtgtaccgcgcgatcttgcagaggagagtggagcccacagtgaccatctccccatccaggacagaggccctcaaccaccacaacctgctggtctgctcggtgacagatttctatccaggccagatcaaagtccggtggtttcggaatgatcaggaggagacagccggcgttgtgtccaccccccttattaggaatggtgactggactttccagatcctggtgatgctggaaatgactccccagcgtggagatgtctacacctgccacgtggagcaccccagcctccagagccccatcaccgtggagtggcgggctcagtctgaatctgcccagagcaagatgctgagtggcgttggaggcttcgtgctggggctgatcttccttgggctgggccttatcatccgtcaaaggagtcagaaagggcttctgcactgactcctgagactattttaactaggattggttatcactcttctgtgatgcctgcttatgcctgcccagaattcccagctgcctgtgtcagcttgtccccctgagatcaaagtcctacagtggctgtcacgcagccaccaggtcatctcctttcatccccaccccaaggcgctggctgtgactctgcttcctgcactgacccagagcctctgcctgtgcatggccagctgcgtctactcaggtcccaaggggtttctgtttctattctttcctcagactgctcaagagaagcacatgaaaaacattacctgactttagagcttttttacataattaaacatgatcctgagttatctgtattctgaactttcttaattgagaagaggcaggaaatcactgcagaatgaaggaacatcccttgaggtgacccagcaaacctgtggccagaaggaggattgtaccttgaaaagacactgaaagcattttggggtgtgaagtaagggtgggcagaggaggtagaaaataattcaattgtcgcatcattcatggttctttaatactgatgctcagtgcattggccttagaatatcccagcctctcttctggtttggtgagtgctgtgtaaataagcatggtagaattgtttggagacatatatagtgatccttggtcactggtgtttcaaacattctggaaagtcacatcgatcaagaatattttttatttttaagaaagcataaccagcaataaaaatactatttttgagtctaaatgatagaagcccaaatatattttgttcatggt

SEQ ID NO: 15161 - protein, 221 aa, Homo sapiens
MSWKKALRIPGDLRVATVTLMLAMLSSLLAEGRDSPEDFVFQFKGMCYFTNGTERVRLVTRYIYNREEYARFDSDVGVYRAILQRRVEPTVTISPSRTEALNHHNLLVCSVTDFYPGQIKVRWFRNDQEETAGVVSTPLIRNGDWTFQILVMLEMTPQRGDVYTCHVEHPSLQSPITVEWRAQSESAQSKMLSGVGGFVLGLIFLGLGLIIRQRSQKGLLH

SEQ ID NO: 15162 - DNA, 1251 bp, Homo sapiens
gtccgagctgtgttgactaccactgcttttcccttcgtctcagttatgtcttggaagaaggctttgcggatccccggagaccttcgggtagcaactgtcaccttgatgctggcgatgctgagctccctactggctgagggcagagactctcccgtggagcccacagtgaccatctccccatccaggacagaggccctcaaccaccacaacctgctggtctgctcggtgacagatttctatccaggccagatcaaagtccggtggtttcggaatgatcaggaggagacagccggcgttgtgtccaccccccttattaggaatggtgactggactttccagatcctggtgatgctggaaatgactccccagcgtggagatgtctacacctgccacgtggagcaccccagcctccagagccccatcaccgtggagtggcggcttctgcactgactcctgagactattttaactaggattggttatcactcttctgtgatgcctgcttatgcctgcccagaattcccagctgcctgtgtcagcttgtccccctgagatcaaagtcctacagtggctgtcacgcagccaccaggtcatctcctttcatccccaccccaaggcgctggctgtgactctgcttcctgcactgacccagagcctctgcctgtgcatggccagctgcgtctactcaggtcccaaggggtttctgtttctattctttcctcagactgctcaagagaagcacatgaaaaacattacctgactttagagcttttttacataattaaacatgatcctgagttatctgtattctgaactttcttaattgagaagaggcaggaaatcactgcagaatgaaggaacatcccttgaggtgacccagcaaacctgtggccagaaggaggattgtaccttgaaaagacactgaaagcattttggggtgtgaagtaagggtgggcagaggaggtagaaaataattcaattgtcgcatcattcatggttctttaatactgatgctcagtgcattggccttagaatatcccagcctctcttctggtttggtgagtgctgtgtaaataagcatggtagaattgtttggagacatatatagtgatccttggtcactggtgtttcaaacattctggaaagtcacatcgatcaagaatattttttatttttaagaaagcataaccagcaataaaaatactatttttgagtctaaatgatagaagcccaaatatattttgttcatggt

SEQ ID NO: 15163 - protein, 134 aa, Homo sapiens
MSWKKALRIPGDLRVATVTLMLAMLSSLLAEGRDSPVEPTVTISPSRTEALNHHNLLVCSVTDFYPGQIKVRWFRNDQEETAGVVSTPLIRNGDWTFQILVMLEMTPQRGDVYTCHVEHPSLQSPITVEWRLLH

SEQ ID NO: 15164 - DNA, 1664 bp, Homo sapiens
attctttctgccaggtacatcagatccatcaggtccgagctgtgttgactaccactgcttttcccttcgtctcagttatgtcttggaagaaggctttgcggatccccggagaccttcgggtagcaactgtcaccttgatgctggcgatgctgagctccctactggctgagggcagagactctcccgaggatttcgtgttccagtttaagggcatgtgctacttcaccaacgggacggagcgcgtgcgtcttgtgaccagatacatctataaccgagaggagtacgcgcgcttcgacagcgacgtgggggtgtaccgcgcggtgacgccgcaggggcggcctgatgccgagtactggaacagccagaaggaagtcctggaggggacccgggcggagttggacacggtgtgcagacacaactacgaggtggcgttccgcgggatcttgcagaggagagtggagcccacagtgaccatctccccatccaggacagaggccctcaaccaccacaacctgctggtctgctcggtgacagatttctatccaggccagatcaaagtccggtggtttcggaatgatcaggaggagacagccggcgttgtgtccaccccccttattaggaatggtgactggactttccagatcctggtgatgctggaaatgactccccagcgtggagatgtctacacctgccacgtggagcaccccagcctccagagccccatcaccgtggagtggcgggctcagtctgaatctgcccagagcaagatgctgagtggcgttggaggcttcgtgctggggctgatcttccttgggctgggccttatcatccgtcaaaggagtcagaaagggcttctgcactgactcctgagactattttaactaggattggttatcactcttctgtgatgcctgcttatgcctgcccagaattcccagctgcctgtgtcagcttgtccccctgagatcaaagtcctacagtggctgtcacgcagccaccaggtcatctcctttcatccccaccccaaggcgctggctgtgactctgcttcctgcactgacccagagcctctgcctgtgcatggccagctgcgtctactcaggtcccaaggggtttctgtttctattctttcctcagactgctcaagagaagcacatgaaaaacattacctgactttagagcttttttacataattaaacatgatcctgagttatctgtattctgaactttcttaattgagaagaggcaggaaatcactgcagaatgaaggaacatcccttgaggtgacccagcaaacctgtggccagaaggaggattgtaccttgaaaagacactgaaagcattttggggtgtgaagtaagggtgggcagaggaggtagaaaataattcaattgtcgcatcattcatggttctttaatactgatgctcagtgcattggccttagaatatcccagcctctcttctggtttggtgagtgctgtgtaaataagcatggtagaattgtttggagacatatatagtgatccttggtcactggtgtttcaaacattctggaaagtcacatcgatcaagaatattttttatttttaagaaagcataaccagcaataaaaatactatttttgagtctaaatgatagaagcccaaatatattttgttcatggt

SEQ ID NO: 15165 - protein, 261 aa, Homo sapiens
MSWKKALRIPGDLRVATVTLMLAMLSSLLAEGRDSPEDFVFQFKGMCYFTNGTERVRLVTRYIYNREEYARFDSDVGVYRAVTPQGRPDAEYWNSQKEVLEGTRAELDTVCRHNYEVAFRGILQRRVEPTVTISPSRTEALNHHNLLVCSVTDFYPGQIKVRWFRNDQEETAGVVSTPLIRNGDWTFQILVMLEMTPQRGDVYTCHVEHPSLQSPITVEWRAQSESAQSKMLSGVGGFVLGLIFLGLGLIIRQRSQKGLLH

SEQ ID NO: 15166 - DNA, 1553 bp, Homo sapiens
attctttctgccaggtacatcagatccatcaggtccgagctgtgttgactaccactgcttttcccttcgtctcagttatgtcttggaagaaggctttgcggatccccggagaccttcgggtagcaactgtcaccttgatgctggcgatgctgagctccctactggctgagggcagagactctcccgaggatttcgtgttccagtttaagggcatgtgctacttcaccaacgggacggagcgcgtgcgtcttgtgaccagatacatctataaccgagaggagtacgcgcgcttcgacagcgacgtgggggtgtaccgcgcggtgacgccgcaggggcggcctgatgccgagtactggaacagccagaaggaagtcctggaggggacccgggcggagttggacacggtgtgcagacacaactacgaggtggcgttccgcgggatcttgcagaggagagtggagcccacagtgaccatctccccatccaggacagaggccctcaaccaccacaacctgctggtctgctcggtgacagatttctatccaggccagatcaaagtccggtggtttcggaatgatcaggaggagacagccggcgttgtgtccaccccccttattaggaatggtgactggactttccagatcctggtgatgctggaaatgactccccagcgtggagatgtctacacctgccacgtggagcaccccagcctccagagccccatcaccgtggagtggcggcttctgcactgactcctgagactattttaactaggattggttatcactcttctgtgatgcctgcttatgcctgcccagaattcccagctgcctgtgtcagcttgtccccctgagatcaaagtcctacagtggctgtcacgcagccaccaggtcatctcctttcatccccaccccaaggcgctggctgtgactctgcttcctgcactgacccagagcctctgcctgtgcatggccagctgcgtctactcaggtcccaaggggtttctgtttctattctttcctcagactgctcaagagaagcacatgaaaaacattacctgactttagagcttttttacataattaaacatgatcctgagttatctgtattctgaactttcttaattgagaagaggcaggaaatcactgcagaatgaaggaacatcccttgaggtgacccagcaaacctgtggccagaaggaggattgtaccttgaaaagacactgaaagcattttggggtgtgaagtaagggtgggcagaggaggtagaaaataattcaattgtcgcatcattcatggttctttaatactgatgctcagtgcattggccttagaatatcccagcctctcttctggtttggtgagtgctgtgtaaataagcatggtagaattgtttggagacatatatagtgatccttggtcactggtgtttcaaacattctggaaagtcacatcgatcaagaatattttttatttttaagaaagcataaccagcaataaaaatactatttttgagtctaaatgatagaagcccaaatatattttgttcatggt

SEQ ID NO: 15167 - protein, 224 aa, Homo sapiens
MSWKKALRIPGDLRVATVTLMLAMLSSLLAEGRDSPEDFVFQFKGMCYFTNGTERVRLVTRYIYNREEYARFDSDVGVYRAVTPQGRPDAEYWNSQKEVLEGTRAELDTVCRHNYEVAFRGILQRRVEPTVTISPSRTEALNHHNLLVCSVTDFYPGQIKVRWFRNDQEETAGVVSTPLIRNGDWTFQILVMLEMTPQRGDVYTCHVEHPSLQSPITVEWRLLH

SEQ ID NO: 15168 - DNA, 1820 bp, Homo sapiens
gcactggattgagaaccttcacaaaaaaaatgtctgcccagagacagatgaggtccttcagctccagtgctgattggttcttttccgagggaccatccaatcctgccactcacggaaacatccacaggtttttattctttctgccaggtacatcagatccatcaggtccgagctgtgttgactaccactgcttttcccttcgtctcagttatgtcttggaagaaggctttgcggatccccggagaccttcgggtagcaactgtcaccttgatgctggcgatgctgagctccctactggctgagggcagagactctcccgaggatttcgtgttccagtttaagggcatgtgctacttcaccaacgggacggagcgcgtgcgtcttgtgaccagatacatctataaccgagaggagtacgcgcgcttcgacagcgacgtgggggtgtaccgcgcggtgacgccgcaggggcggcctgatgccgagtactggaacagccagaaggaagtcctggaggggacccgggcggagttggacacggtgtgcagacacaactacgaggtggcgttccgcgggatcttgcagaggagagtggagcccacagtgaccatctccccatccaggacagaggccctcaaccaccacaacctgctggtctgctcggtgacagatttctatccaggccagatcaaagtccggtggtttcggaatgatcaggaggagacagccggcgttgtgtccaccccccttattaggaatggtgactggactttccagatcctggtgatgctggaaatgactccccagcgtggagatgtctacacctgccacgtggagcaccccagcctccagagccccatcaccgtggagtggcgggctcagtctgaatctgcccagagcaagatgctgagtggcgttggaggcttcgtgctggggctgatcttccttgggctgggccttatcatccgtcaaaggagtcagaaagacctcaagggcctccaccagcagggcttctgcactgactcctgagactattttaactaggattggttatcactcttctgtgatgcctgcttatgcctgcccagaattcccagctgcctgtgtcagcttgtccccctgagatcaaagtcctacagtggctgtcacgcagccaccaggtcatctcctttcatccccaccccaaggcgctggctgtgactctgcttcctgcactgacccagagcctctgcctgtgcatggccagctgcgtctactcaggtcccaaggggtttctgtttctattctttcctcagactgctcaagagaagcacatgaaaaacattacctgactttagagcttttttacataattaaacatgatcctgagttatctgtattctgaactttcttaattgagaagaggcaggaaatcactgcagaatgaaggaacatcccttgaggtgacccagcaaacctgtggccagaaggaggattgtaccttgaaaagacactgaaagcattttggggtgtgaagtaagggtgggcagaggaggtagaaaataattcaattgtcgcatcattcatggttctttaatactgatgctcagtgcattggccttagaatatcccagcctctcttctggtttggtgagtgctgtgtaaataagcatggtagaattgtttggagacatatatagtgatccttggtcactggtgtttcaaacattctggaaagtcacatcgatcaagaatattttttatttttaagaaagcataaccagcaataaaaatactatttttgagtctaaatgatagaagcccaaatatattttgttcatggt

SEQ ID NO: 15169 - protein, 271 aa, Homo sapiens
MSWKKALRIPGDLRVATVTLMLAMLSSLLAEGRDSPEDFVFQFKGMCYFTNGTERVRLVTRYIYNREEYARFDSDVGVYRAVTPQGRPDAEYWNSQKEVLEGTRAELDTVCRHNYEVAFRGILQRRVEPTVTISPSRTEALNHHNLLVCSVTDFYPGQIKVRWFRNDQEETAGVVSTPLIRNGDWTFQILVMLEMTPQRGDVYTCHVEHPSLQSPITVEWRAQSESAQSKMLSGVGGFVLGLIFLGLGLIIRQRSQKDLKGLHQQGFCTDS

SEQ ID NO: 15170 - DNA, 433 bp, Homo sapiens
tgcatcaagctgaagttctgtgtcctcatgagctgatttcacctttgcacagatcttgggggagggcttctgcactgactcctgagactattttaactaggattggttatcactcttctgtgatgcctgcttatgcctgcccagaattcccagctgcctgtgtcagcttgtccccctgagatcaaagtcctacagtggctgtcacgcagccaccaggtcatctcctttcatccccaccccaaggcgctggctgtgactctgcttcctgcactgacccagagcctctgcctgtgcatggccagctgcgtctactcaggtcccaaggggtttctgtttctattctttcctcagactgctcaagagaagcacatgaaaaacattacctgactttagagcttttttacataattaaacatgatcctgagttatctgt

SEQ ID NO: 15171 - protein, 84 aa, Homo sapiens [sequence omitted]

SEQ ID NO: 15172 - DNA, 1165 bp, Homo sapiens
aggaaccccaggggaaaaggggaagatgggctgtgacccagaccctctgttcagagtggtcctgtctgtagattagctctttcctcctgaccctgagaagaagtgcgaggagacaggacaagatgggaggaggcattggaatctgattttactggttgaaaggtagcgctgtcacagagctgactgatagagcttattccagggcatccttaccattcatcattgtctcactggctcctttccaaaagcttcctccattaagagggtcagagcctcagcttcctttctttctagtgacaatttcctttgttttaggggattttaaattagggtgctgaaggcctggaagaacatgggtgggaagagaatgtaactctaagtcatgtgtgtcattttcctttggggtgagagagtggctgtttgtgtaatgagacctttctctgcataacttccttttgtaagacctcaagggcctccaccagcaggtaatatttcagccatgatccagtgtggggaggcacaggtataagagggaagagcatgagctgagtgtacctgaccacagtggtccatgttcatggcctatttgctgctatgaggatcaagacttaggggagaagtttgccagtttctaggaatctccagacattgttccccagaaccaagccttaactttggtggcatcttcttgtgaaatgtggagccagaaccacagcttaaatgttagacactaggatgatgcccactttgtgccacatgatggtggctactgcctgtaagcattttccagtgactgaaagaggctgctagtggtcgggaagagatatcatccaatttcctaaaaagactgaacccttcatattccccagaagaataacagctgttccccacctcccacacatctgcatcaagctgaagttctgtgtcctcatgagctgatttcacctttgcacagatcttgggggaggtgatgacaatacaccctggactctgcttcctgcactgacccagagcctctgcctgtgcatggccagctgcgtctactcaggtcccaaggggtttctgtttctattctttcctcagactgctcaagagaagcacatgaaaaacattacctgactttagagcttttttacataattaaacatgatcctgagttatctgt

SEQ ID NO: 15173 - protein, 30 aa, Homo sapiens
MASCVYSGPKGFLFLFFPQTAQEKHMKNIT

SEQ ID NO: 15174 - DNA, 1064 bp, Homo sapiens
ccgagctgtgttgactaccactgcttttcccttcgtctcagttatgtcttggaagaaggctttgcggatccccggagaccttcgggtagcaactgtcaccttgatgctggcgatgctgagctccctactggctgagggcagagactctcccgaggatttcgtgttccagtttaagggcatgtgctacttcaccaacgggacggagcgcgtgcgtcttgtgaccagatacatctataaccgagaggagtacgcgcgcttcgacagcgacgtgggggtgtaccgcgcgatcttgcagaggagagtggagcccacagtgaccatctccccatccaggacagaggccctcaaccaccacaacctgctggtctgctcggtgacagatttctatccaggccagatcaaagtccggtggtttcggaatgatcaggaggagacagccggcgttgtgtccaccccccttattaggaatggtgactggactttccagatcctggtgatgctggaaatgactccccagcgtggagatgtctacacctgccacgtggagcaccccagcctccagagccccatcaccgtggagtggcgggctcagtctgaatctgcccagagcaagatgctgagtggcgttggaggcttcgtgctggggctgatcttccttgggctgggccttatcatccgtcaaaggagtcagaaagggcttctgcactgactcctgagactattttaactaggattggttatcactcttctgtgatgcctgcttatgcctgcccagaattcccagctgcctgtgtcagcttgtccccctgagatcaaagtcctacagtggctgtcacgcagccaccaggtcatctcctttcatccccaccccaaggcgctggctgtgactctgcttcctgcactgacccagagcctctgcctgtgcatggccagctgcgtctactcaggtcccaaggggtttctgtttctattctttcctcagactgctcaagagaagcacatgaaaaacattacctgactttagagcttttttacataattaaacatgatcctgagttatctgt

SEQ ID NO: 15175 - protein, 221 aa, Homo sapiens; identical to SEQ ID NO: 15161

SEQ ID NO: 15176 - DNA, 805 bp, Homo sapiens
gtccgagctgtgttgactaccactgcttttcccttcgtctcagttatgtcttggaagaaggctttgcggatccccggagaccttcgggtagcaactgtcaccttgatgctggcgatgctgagctccctactggctgagggcagagactctcccgtggagcccacagtgaccatctccccatccaggacagaggccctcaaccaccacaacctgctggtctgctcggtgacagatttctatccaggccagatcaaagtccggtggtttcggaatgatcaggaggagacagccggcgttgtgtccaccccccttattaggaatggtgactggactttccagatcctggtgatgctggaaatgactccccagcgtggagatgtctacacctgccacgtggagcaccccagcctccagagccccatcaccgtggagtggcggcttctgcactgactcctgagactattttaactaggattggttatcactcttctgtgatgcctgcttatgcctgcccagaattcccagctgcctgtgtcagcttgtccccctgagatcaaagtcctacagtggctgtcacgcagccaccaggtcatctcctttcatccccaccccaaggcgctggctgtgactctgcttcctgcactgacccagagcctctgcctgtgcatggccagctgcgtctactcaggtcccaaggggtttctgtttctattctttcctcagactgctcaagagaagcacatgaaaaacattacctgactttagagcttttttacataattaaacatgatcctgagttatctgt

SEQ ID NO: 15177 - protein, 134 aa, Homo sapiens; identical to SEQ ID NO: 15163

SEQ ID NO: 15178 - DNA, 1218 bp, Homo sapiens
attctttctgccaggtacatcagatccatcaggtccgagctgtgttgactaccactgcttttcccttcgtctcagttatgtcttggaagaaggctttgcggatccccggagaccttcgggtagcaactgtcaccttgatgctggcgatgctgagctccctactggctgagggcagagactctcccgaggatttcgtgttccagtttaagggcatgtgctacttcaccaacgggacggagcgcgtgcgtcttgtgaccagatacatctataaccgagaggagtacgcgcgcttcgacagcgacgtgggggtgtaccgcgcggtgacgccgcaggggcggcctgatgccgagtactggaacagccagaaggaagtcctggaggggacccgggcggagttggacacggtgtgcagacacaactacgaggtggcgttccgcgggatcttgcagaggagagtggagcccacagtgaccatctccccatccaggacagaggccctcaaccaccacaacctgctggtctgctcggtgacagatttctatccaggccagatcaaagtccggtggtttcggaatgatcaggaggagacagccggcgttgtgtccaccccccttattaggaatggtgactggactttccagatcctggtgatgctggaaatgactccccagcgtggagatgtctacacctgccacgtggagcaccccagcctccagagccccatcaccgtggagtggcgggctcagtctgaatctgcccagagcaagatgctgagtggcgttggaggcttcgtgctggggctgatcttccttgggctgggccttatcatccgtcaaaggagtcagaaagggcttctgcactgactcctgagactattttaactaggattggttatcactcttctgtgatgcctgcttatgcctgcccagaattcccagctgcctgtgtcagcttgtccccctgagatcaaagtcctacagtggctgtcacgcagccaccaggtcatctcctttcatccccaccccaaggcgctggctgtgactctgcttcctgcactgacccagagcctctgcctgtgcatggccagctgcgtctactcaggtcccaaggggtttctgtttctattctttcctcagactgctcaagagaagcacatgaaaaacattacctgactttagagcttttttacataattaaacatgatcctgagttatctgt

SEQ ID NO: 15179 - protein, 261 aa, Homo sapiens; identical to SEQ ID NO: 15165

SEQ ID NO: 15180 - DNA, 1107 bp, Homo sapiens
attctttctgccaggtacatcagatccatcaggtccgagctgtgttgactaccactgcttttcccttcgtctcagttatgtcttggaagaaggctttgcggatccccggagaccttcgggtagcaactgtcaccttgatgctggcgatgctgagctccctactggctgagggcagagactctcccgaggatttcgtgttccagtttaagggcatgtgctacttcaccaacgggacggagcgcgtgcgtcttgtgaccagatacatctataaccgagaggagtacgcgcgcttcgacagcgacgtgggggtgtaccgcgcggtgacgccgcaggggcggcctgatgccgagtactggaacagccagaaggaagtcctggaggggacccgggcggagttggacacggtgtgcagacacaactacgaggtggcgttccgcgggatcttgcagaggagagtggagcccacagtgaccatctccccatccaggacagaggccctcaaccaccacaacctgctggtctgctcggtgacagatttctatccaggccagatcaaagtccggtggtttcggaatgatcaggaggagacagccggcgttgtgtccaccccccttattaggaatggtgactggactttccagatcctggtgatgctggaaatgactccccagcgtggagatgtctacacctgccacgtggagcaccccagcctccagagccccatcaccgtggagtggcggcttctgcactgactcctgagactattttaactaggattggttatcactcttctgtgatgcctgcttatgcctgcccagaattcccagctgcctgtgtcagcttgtccccctgagatcaaagtcctacagtggctgtcacgcagccaccaggtcatctcctttcatccccaccccaaggcgctggctgtgactctgcttcctgcactgacccagagcctctgcctgtgcatggccagctgcgtctactcaggtcccaaggggtttctgtttctattctttcctcagactgctcaagagaagcacatgaaaaacattacctgactttagagcttttttacataattaaacatgatcctgagttatctgt

SEQ ID NO: 15181 - protein, 224 aa, Homo sapiens; identical to SEQ ID NO: 15167

SEQ ID NO: 15182 - DNA, 381 bp, Homo sapiens
gagaatggagatgcagtagccctcaccgggctctgaactaggggagtgtggattctcaaagaattcatgaaaatgttcacaatggagtcttcttatgcatctgttttccctagagcattcaattcaagctcatgaaatatcaggttgtacaagaagcatggcaccagcatctgcatctgatgaggacctcagggtgcttccacttgtggcggaagaaggggagccagcatgtgcagataccacacggcgagagatgaaggaagagaaagaggaggaaggttccaggctctttttaacaatcagacctcacaggaactaatagtgtgagaagatgtttaacatattctaataagatattcctaataaactgccatgagataa

SEQ ID NO: 15183 - protein, 74 aa, Homo sapiens
MHLFSLEHSIQAHEISGCTRSMAPASASDEDLRVLPLVAEEGEPACADTTRREMKEEKEEEGSRLFLTIRPHRN

SEQ ID NO: 15184 - DNA, 294 bp, Homo sapiens
acttaaacattatcagagaggttatgaagccttcctgaatgctcattcaaggttgtacaagaagcatggcaccagcatctgcatctgatgaggacctcagggtgcttccacttgtggcggaagaaggggagccagcatgtgcagataccacacggcgagagatgaaggaagagaaagaggaggaaggttccaggctctttttaacaatcagacctcacaggaactaatagtgtgagaagatgtttaacatattctaataagatattcctaataaactgccatgagataactgct

SEQ ID NO: 15185 - protein, 62 aa, Homo sapiens
MLIQGCTRSMAPASASDEDLRVLPLVAEEGEPACADTTRREMKEEKEEEGSRLFLTIRPHRN

SEQ ID NO: 15186 - DNA, 939 bp, Homo sapiens
acaattgctctacagctcagagcagcaactgctgaggctgccttgggaagaagatgatcctaaacaaagctctgctgctgggggccctcgccctgactgccgtgatgagcccctgtggaggtgaagacattgtggctgaccatgttgcctcctatggtgtgaacttctaccagtctcacggtccctctggccagtacacccatgaatttgatggagacgaggagttctatgtggacctggagacgaaagagactgtctggcagttgcctatgtttagcaaatttataagttttgacccgcagagtgcactgagaaatatggctgtgggaaaacacaccttggaattcatgatgagacagtccaactctaccgctgccaccaatgaggttcctgaggtcacagtgttttccaagtttcctgtgacgctgggtcagcccaacaccctcatctgtcttgtggacaacatctttcctcctgtggtcaacatcacctggctgagcaatgggcactcagtcacagaaggtgtttctgagaccagcttcctctccaagagtgatcattccttcttcaagatcagttacctcaccttcctcccttctgctgatgagatttatgactgcaaggtggagcactggggcctggacgagcctcttctgaaacactgggagcctgagattccagcccctatgtcagagctcacagagactttggtctgcgccctggggttgtctgtgggcctcatgggcattgtggtgggcactgtcttcatcatccaaggcctgcgttcagttggtgcttccagacaccaagggctcttatgaatcccatcctgaaaaggaagtgttacctactaagggatgcctgggtaagccactcagctacctaattcctcaatgacctttatctaaaatctccatggaagcaataaattcccttttg

SEQ ID NO: 15187 - protein, 255 aa, Homo sapiens; identical to SEQ ID NO: 1693

SEQ ID NO: 15188 - DNA, 1121 bp, Homo sapiens
tccggcaggtacataagatccattaggtttgagctgtgttgactaccactgctttttccttggtctcacttacgtcttggaagatggctctgcagatccctggaggcttttgggcagcagctgtgaccgtgatgctggtgatgctgagcaccccagtggctgaggccagagactttcccaaggatttcttggtccagtttaagggcatgtgctacttcaccaacgggacagagcgcgtgcgcggtgtggccagatacatctataaccgcgaggagtacgggcgcttcgacagcgacgttggggagttccaggcggtgaccgagctggggcggagcatcgaggactggaacaactataaggacttcttggagcaggagcgggccgcggtggacaaggtgtgcagacacaactacgaggcggagctgcgcacgaccttgcagcggcaagtggagcccacagtgaccatctccccatccaggacagaggccctcaaccaccacaacctgctggtctgctcggtgacagatttctatccagcccagatcaaagtccggtggtttcggaatgaccaggaggagacagccggtgttgtgtccacctccctcattaggaatggtgactggaccttccagattctggtgatgctggaaataactccccagcgtggagacatctacacctgccaagtggagcaccccagcctccagagccccatcaccgtggagtggcgacctcgagggcctccaccagcaggactcctgcactgactcctgaggacttttgtctgggattggtcatcactcttctgtaatgcccacctgcccctgcccagaattcctagctgcctgtgtcaccctgtcccactgaggtcagagtcctacagtggctcatgcagccacaggtcaccttctgtgatccccatcccaaggcactggtggtgactctgcttcctgcactgacccagagcctctgcctgtgcactgcaagctgtgtctactcaggccccaaggggcatctctgtttccattctccccccacagacctgtcaagagaagcatgacaaacaaaatcatttacctgactttagtgctttttcccataattaaacctgattctgagtt

SEQ ID NO: 15189 - protein, 227 aa, Homo sapiens
MALQIPGGFWAAAVTVMLVMLSTPVAEARDFPKDFLVQFKGMCYFTNGTERVRGVARYIYNREEYGRFDSDVGEFQAVTELGRSIEDWNNYKDFLEQERAAVDKVCRHNYEAELRTTLQRQVEPTVTISPSRTEALNHHNLLVCSVTDFYPAQIKVRWFRNDQEETAGVVSTSLIRNGDWTFQILVMLEITPQRGDIYTCQVEHPSLQSPITVEWRPRGPPPAGLLH

SEQ ID NO: 15190 - DNA, 2046 bp, Homo sapiens
tccggcaggtacataagatccattaggtttgagctgtgttgactaccactgctttttccttggtctcacttacgtcttggaagatggctctgcagatccctggaggcttttgggcagcagctgtgaccgtgatgctggtgatgctgagcaccccagtggctgaggccagagactttcccaaggatttcttggtccagtttaagggcatgtgctacttcaccaacgggacagagcgcgtgcgcggtgtggccagatacatctataaccgcgaggagtacgggcgcttcgacagcgacgttggggagttccaggcggtgaccgagctggggcggagcatcgaggactggaacaactataaggacttcttggagcaggagcgggccgcggtggacaaggtgtgcagacacaactacgaggcggagctgcgcacgaccttgcagcggcaagtggagcccacagtgaccatctccccatccaggacagaggccctcaaccaccacaacctgctggtctgctcggtgacagatttctatccagcccagatcaaagtccggtggtttcggaatgaccaggaggagacagccggtgttgtgtccacctccctcattaggaatggtgactggaccttccagattctggtgatgctggaaataactccccagcgtggagacatctacacctgccaagtggagcaccccagcctccagagccccatcaccgtggagtggcgggctcagtctgaatctgcccagagcaagatgctgagtggcattggaggcttcgtgctggggctgatcttcctcgggctgggccttatcatccgtcacaggggtcagaaaggacctcgagggcctccaccagcaggtaatatttcagccatgatccagtcaggggagagggcacaggcataagagggaagagccatggtgaaaccgcatctctactaaaaatacaaaaattagctggacgtggtggtgtgcatctgtaatcccggctacttgggaggttgaggcaagagaatcacttgaacccaggaggcagaggttgcagtgagccaagatggcgccactgcactccagtctgggcgatagagctagagtctgtctcaaaaaaaaaaaagaagagcatgagcggagtgttccagggcacagtggtctctgttcatggcctgtttgctgctatgagggttaagacttaggggaaaagtttgccagtttctacgaatctccagagattgtttcctagaaccaggccttaactttggtggcatctttttgtgaaatgtggggacagagccacatcttgaatgtgagatagtagggtgatgcccactttgtgccacattttgttagctactgcctgtaggcattttcagtgactaaaagaggctgctagtggtggagatgaagtgtcacccaatttactaaaaaaatcaaactcttcatattacccagaagggtaactgctgttcccccacctccacatatctgcatcaagctgaagttctgtgtcctcatgagctgattttacctttacacagatattggggaacgtgatgatgatatgccctggacctcagcatcctctgtttgatgctacagagggaactgaggactaggggagagggtgtgtccctcagggtaccctgtgctgatcatgcctcgtctctcttctccaggactcctgcactgactcctgaggacttttgtctgggattggtcatcactcttctgtaatgcccacctgcccctgcccagaattcctagctgcctgtgtcaccctgtcccactgaggtcagagtcctacagtggctcatgcagccacaggtcaccttctgtgatccccatcccaaggcactggtggtgactctgcttcctgcactgacccagagcctctgcctgtgcactgcaagctgtgtctactcaggccccaaggggcatctctgtttccattctccccccacagacctgtcaagagaagcatgacaaacaaaatcatttacctgactttagtgctttttcccataattaaacctgattctgagtt

SEQ ID NO: 15191 - protein, 275 aa, Homo sapiens
MALQIPGGFWAAAVTVMLVMLSTPVAEARDFPKDFLVQFKGMCYFTNGTERVRGVARYIYNREEYGRFDSDVGEFQAVTELGRSIEDWNNYKDFLEQERAAVDKVCRHNYEAELRTTLQRQVEPTVTISPSRTEALNHHNLLVCSVTDFYPAQIKVRWFRNDQEETAGVVSTSLIRNGDWTFQILVMLEITPQRGDIYTCQVEHPSLQSPITVEWRAQSESAQSKMLSGIGGFVLGLIFLGLGLIIRHRGQKGPRGPPPAGNISAMIQSGERAQA

SEQ ID NO: 15192 - DNA, 1290 bp, Homo sapiens
aggaaattaagaaaaagcaggaaaatgagagaacatattaccaagtaaataaagcatacattaaatatttactataattttacactaaagaaataaaggaaatgcagtaaaatggccagagaggtaaaggttaagatgtataaaatatgcagggaaaggtgtgtcatttttgaccatgagcagcgctctgagaagataaaggaattgagttatgggcaaacatgatgtttgatcagtgttagtttttttcaaggcctgcctacttttccttcaaatattacaaacttttgaaataacattcaattttttggtctctgttactagattgcaagttctataaaggcaggaaccagggtttgttgtttatttttggattctcagtgattgtcaaatttatatttgttgaaggaaccttaatccaagacttggactccaggtatctttctattctggttccaaggagggaccttcctcacagcaggcgtgctgtgtggtctcacatctcactcctatatctttccctgtctgttactgccctcagtggagcccacagtgaccatctccccatccaggacagaggccctcaaccaccacaacctgctggtctgctcggtgacagatttctatccagcccagatcaaagtccggtggtttcggaatgaccaggaggagacagccggtgttgtgtccacctccctcattaggaatggtgactggaccttccagattctggtgatgctggaaataactccccagcgtggagacatctacacctgccaagtggagcaccccagcctccagagccccatcaccgtggagtggcgggctcagtctgaatctgcccagagcaagatgctgagtggcattggaggcttcgtgctggggctgatcttcctcgggctgggccttatcatccgtcacaggggtcagaaaggactcctgcactgactcctgaggacttttgtctgggattggtcatcactcttctgtaatgcccacctgcccctgcccagaattcctagctgcctgtgtcaccctgtcccactgaggtcagagtcctacagtggctcatgcagccacaggtcaccttctgtgatccccatcccaaggcactggtggtgactctgcttcctgcactgacccagagcctctgcctgtgcactgcaagctgtgtctactcaggccccaaggggcatctctgtttccattctccccccacagacctgtcaagagaagcatgacaaacaaaatcatttacctgactttagtgctttttcccataattaaacc

SEQ ID NO: 15193 - protein, 70 aa, Homo sapiens
MLEITPQRGDIYTCQVEHPSLQSPITVEWRAQSESAQSKMLSGIGGFVLGLIFLGLGLIIRHRGQKGLLH

SEQ ID NO: 15194 - DNA, 1085 bp, Homo sapiens
tccggcaggtacataagatccattaggtttgagctgtgttgactaccactgctttttccttggtctcacttacgtcttggaagatggctctgcagatccctggaggcttttgggcagcagctgtgaccgtgatgctggtgatgctgagcaccccagtggctgaggccagagactttcccaaggatttcttggtccagtttaagggcatgtgctacttcaccaacgggacagagcgcgtgcgcggtgtggccagatacatctataaccgcgaggagtacgggcgcttcgacagcgacgttggggagttccaggcggtgaccgagctggggcggagcatcgaggactggaacaactataaggacttcttggagcaggagcgggccgcggtggacaaggtgtgcagacacaactacgaggcggagctgcgcacgaccttgcagcggcaagtggagcccacagtgaccatctccccatccaggacagaggccctcaaccaccacaacctgctggtctgctcggtgacagatttctatccagcccagatcaaagtccggtggtttcggaatgaccaggaggagacagccggtgttgtgtccacctccctcattaggaatggtgactggaccttccagattctggtgatgctggaaataactccccagcgtggagacatctacacctgccaagtggagcaccccagcctccagagccccatcaccgtggagtggcgactcctgcactgactcctgaggacttttgtctgggattggtcatcactcttctgtaatgcccacctgcccctgcccagaattcctagctgcctgtgtcaccctgtcccactgaggtcagagtcctacagtggctcatgcagccacaggtcaccttctgtgatccccatcccaaggcactggtggtgactctgcttcctgcactgacccagagcctctgcctgtgcactgcaagctgtgtctactcaggccccaaggggcatctctgtttccattctccccccacagacctgtcaagagaagcatgacaaacaaaatcatttacctgactttagtgctttttcccataattaaacc

SEQ ID NO: 15195 - protein, 219 aa, Homo sapiens
MALQIPGGFWAAAVTVMLVMLSTPVAEARDFPKDFLVQFKGMCYFTNGTERVRGVARYIYNREEYGRFDSDVGEFQAVTELGRSIEDWNNYKDFLEQERAAVDKVCRHNYEAELRTTLQRQVEPTVTISPSRTEALNHHNLLVCSVTDFYPAQIKVRWFRNDQEETAGVVSTSLIRNGDWTFQILVMLEITPQRGDIYTCQVEHPSLQSPITVEWRLLH

SEQ ID NO: 15196 - DNA, 1702 bp, Homo sapiens
acgcgtagcattcctgccgtccctggaaaagtgctagaggcccacagtttcagtctcatctgcctccactcggcctcagttcctcatcactgttcctgtgctcacagtcatcaattatagaccccacaacatgcgccctgaagacagaatgttccatatcagagctgtgatcttgagagccctctccttggctttcctgctgagtctccgaggagctggggccatcaaggcggaccatgtgtcaacttatgccgcgtttgtacagacgcatagaccaacaggggagtttatgtttgaatttgatgaagatgagatgttctatgtggatctggacaagaaggagaccgtctggcatctggaggagtttggccaagccttttcctttgaggctcagggcgggctggctaacattgctatattgaacaacaacttgaataccttgatccagcgttccaaccacactcaggccaccaacgatccccctgaggtgaccgtgtttcccaaggagcctgtggagctgggccagcccaacaccctcatctgccacattgacaagttcttcccaccagtgctcaacgtcacgtggctgtgcaacggggagctggtcactgagggtgtcgctgagagcctcttcctgcccagaacagattacagcttccacaagttccattacctgacctttgtgccctcagcagaggacttctatgactgcagggtggagcactggggcttggaccagccgctcctcaagcactgggaggcccaagagccaatccagatgcctgagacaacggagactgtgctctgtgccctgggcctggtgctgggcctagtcggcatcatcgtgggcaccgtcctcatcataaagtctctgcgttctggccatgacccccgggcccaggggaccctgtgaaatactgtaaaggtgacaaaatatctgaacagaagaggacttaggagagatctgaactccagctgccctacaaactccatctcagcttttcttctcacttcatgtgaaaactactccagtggctgactgaattgctgacccttcaagctctgtccttatccattacctcaaagcagtcattccttagtaaagtttccaacaaatagaaattaatgacactttggtagcactaatatggagattatcctttcattgagccttttatcctctgttctcctttgaagaacccctcactgtcaccttcccgagaataccctaagaccaataaatacttcagtatttcagagcggggagactctgagtcattcttactggaagtctaggaccaggtcacatgtgaatactatttcttgaaggtgtggtttcaacctctgttgccgatgtggttactaaaggttctgatcccacttgaacggaaaggtctgaggatattgattcagtcctgggtttttccctaactacaggatagggtggggtagagaaaggatatttgggggaaattttacttggatgaagattttcttggatgtagtttgaagactgcagtgtttgaagtctctgagggaagagatttggtctgtctggatcaagatttcaggcagattaggattccattcacagcccctgagcttccttcccaaggctgtattgtaattatagcaatatttcatggaggatttttctacatgataaactaagagccaagaaataaaatttttaaaatgccct

SEQ ID NO: 15197 - protein, 260 aa, Homo sapiens
MRPEDRMFHIRAVILRALSLAFLLSLRGAGAIKADHVSTYAAFVQTHRPTGEFMFEFDEDEMFYVDLDKKETVWHLEEFGQAFSFEAQGGLANIAILNNNLNTLIQRSNHTQATNDPPEVTVFPKEPVELGQPNTLICHIDKFFPPVLNVTWLCNGELVTEGVAESLFLPRTDYSFHKFHYLTFVPSAEDFYDCRVEHWGLDQPLLKHWEAQEPIQMPETTETVLCALGLVLGLVGIIVGTVLIIKSLRSGHDPRAQGTL

SEQ ID NO: 15198 - DNA, 1260 bp, Homo sapiens
acgcgtagcattcctgccgtccctggaaaagtgctagaggcccacagtttcagtctcatctgcctccactcggcctcagttcctcatcactgttcctgtgctcacagtcatcaattatagaccccacaacatgcgccctgaagacagaatgttccatatcagagctgtgatcttgagagccctctccttggctttcctgctgagtctccgaggagctggggccatcaaggcggaccatgtgtcaacttatgccgcgtttgtacagacgcatagaccaacaggggagtttatgtttgaatttgatgaagatgagatgttctatgtggatctggacaagaaggagaccgtctggcatctggaggagtttggccaagccttttcctttgaggctcagggcgggctggctaacattgctatattgaacaacaacttgaataccttgatccagcgttccaaccacactcaggccaccaacgatccccctgaggtgaccgtgtttcccaaggagcctgtggagctgggccagcccaacaccctcatctgccacattgacaagttcttcccaccagtgctcaacgtcacgtggctgtgcaacggggagctggtcactgagggtgtcgctgagagcctcttcctgcccagaacagattacagcttccacaagttccattacctgacctttgtgccctcagcagaggacttctatgactgcagggtggagcactggggcttggaccagccgctcctcaagcactgggaggcccaagagccaatccagatgcctgagacaacggagactgtgctctgtgccctgggcctggtgctgggcctagtcggcatcatcgtgggcaccgtcctcatcataaagtctctgcgttctggccatgacccccgggcccaggggaccctgtgaaatactgtaaaggtgacaaaatatctgaacagaagaggacttaggagagatctgaactccagctgccctacaaactccatctcagcttttcttctcacttcatgtgaaaactactccagtggctgactgaattgctgacccttcaagctctgtccttatccattacctcaaagcagtcattccttagtaaagtttccaacaaatagaaattaatgacactttggtagcactaatatggagattatcctttcattgagccttttatcctctgttctcctttgaagaacccctcactgtcaccttcccgagaataccctaagaccaataaatacttcagtatttcagag

SEQ ID NO: 15199 - protein, 260 aa, Homo sapiens; identical to SEQ ID NO: 15197

SEQ ID NO: 15200 - DNA, 1112 bp, Homo sapiens
acttgggttcatggtctctaatatttcaaacaggagctccctttagcgagtccttcttttcctgactgcagctcttttcattttgccatccttttccagctccatgatggttctgcaggtttctgcggccccccggacagtggctctgacggcgttactgatggtgctgctcacatctgtggtccagggcagggccactccagagaattaccttttccagggacggcaggaatgctacgcgtttaatgggacacagcgcttcctggagagatacatctacaaccgggaggagttcgcgcgcttcgacagcgacgtgggggagttccgggcggtgacggagctggggcggcctgctgcggagtactggaacagccagaaggacatcctggaggagaagcgggcagtgccggacaggatgtgcagacacaactacgagctgggcgggcccatgaccctgcagcgccgagtccagcctagggtgaatgtttccccctccaagaaggggcccttgcagcaccacaacctgcttgtctgccacgtgacggatttctacccaggcagcattcaagtccgatggttcctgaatggacaggaggaaacagctggggtcgtgtccaccaacctgatccgtaatggagactggaccttccagatcctggtgatgctggaaatgaccccccagcagggagatgtctacacctgccaagtggagcacaccagcctggatagtcctgtcaccgtggagtggaaggcacagtctgattctgcccggagtaagacattgacgggagctgggggcttcgtgctggggctcatcatctgtggagtgggcatcttcatgcacaggaggagcaagaaagggttcctgagctcactgaaaagactattgtgccttaggaaaagcatttgctgtgtttcgttagcatctggctccaggacagaccttcaacttccaaattggatactgctgccaagaagttgctctgaagtcagtttctatcattctgctctttgattcaaagcactgtttctctcactgggcctccaaccatgttcccttcttcttagcaccacaaataatcaaaacccaacatgactgtttgttttccttt

SEQ ID NO: 15201 - protein, 303 aa, Homo sapiens
MMVLQVSAAPRTVALTALLMVLLTSVVQGRATPENYLFQGRQECYAFNGTQRFLERYIYNREEFARFDSDVGEFRAVTELGRPAAEYWNSQKDILEEKRAVPDRMCRHNYELGGPMTLQRRVQPRVNVSPSKKGPLQHHNLLVCHVTDFYPGSIQVRWFLNGQEETAGVVSTNLIRNGDWTFQILVMLEMTPQQGDVYTCQVEHTSLDSPVTVEWKAQSDSARSKTLTGAGGFVLGLIICGVGIFMHRRSKKGFLSSLKRLLCLRKSICCVSLASGSRTDLQLPNWILLPRSCSEVSFYHSAL

SEQ ID NO: 15202 - DNA, 1154 bp, Homo sapiens
acttgggttcatggtctctaatatttcaaacaggagctccctttagcgagtccttcttttcctgactgcagctcttttcattttgccatccttttccagctccatgatggttctgcaggtttctgcggccccccggacagtggctctgacggcgttactgatggtgctgctcacatctgtggtccagggcagggccactccagagaattaccttttccagggacggcaggaatgctacgcgtttaatgggacacagcgcttcctggagagatacatctacaaccgggaggagttcgcgcgcttcgacagcgacgtgggggagttccgggcggtgacggagctggggcggcctgctgcggagtactggaacagccagaaggacatcctggaggagaagcgggcagtgccggacaggatgtgcagacacaactacgagctgggcgggcccatgaccctgcagcgccgagtccagcctagggtgaatgtttccccctccaagaaggggcccttgcagcaccacaacctgcttgtctgccacgtgacggatttctacccaggcagcattcaagtccgatggttcctgaatggacaggaggaaacagctggggtcgtgtccaccaacctgatccgtaatggagactggaccttccagatcctggtgatgctggaaatgaccccccagcagggagatgtctacacctgccaagtggagcacaccagcctggatagtcctgtcaccgtggagtggaaggcacagtctgattctgcccggagtaagacattgacgggagctgggggcttcgtgctggggctcatcatctgtggagtgggcatcttcatgcacaggaggagcaagaaagttcaacgaggatctgcataaacagggttcctgagctcactgaaaagactattgtgccttaggaaaagcatttgctgtgtttcgttagcatctggctccaggacagaccttcaacttccaaattggatactgctgccaagaagttgctctgaagtcagtttctatcattctgctctttgattcaaagcactgtttctctcactgggcctccaaccatgttcccttcttcttagcaccacaaataatcaaaacccaacatgactgtttgttttcctttaaaaatatgcaccaaatc

SEQ ID NO: 15203 - protein, 258 aa, Homo sapiens; identical to SEQ ID NO: 1697

SEQ ID NO: 15204 - DNA, 2385 bp, Homo sapiens
acttgggttcatggtctctaatatttcaaacaggagctccctttagcgagtccttcttttcctgactgcagctcttttcattttgccatccttttccagctccatgatggttctgcaggtttctgcggccccccggacagtggctctgacggcgttactgatggtgctgctcacatctgtggtccagggcagggccactccagagaattaccttttccagggacggcaggaatgctacgcgtttaatgggacacagcgcttcctggagagatacatctacaaccgggaggagttcgcgcgcttcgacagcgacgtgggggagttccgggcggtgacggagctggggcggcctgctgcggagtactggaacagccagaaggacatcctggaggagaagcgggcagtgccggacaggatgtgcagacacaactacgagctgggcgggcccatgaccctgcagcgccgagtccagcctagggtgaatgtttccccctccaagaaggggcccttgcagcaccacaacctgcttgtctgccacgtgacggatttctacccaggcagcattcaagtccgatggttcctgaatggacaggaggaaacagctggggtcgtgtccaccaacctgatccgtaatggagactggaccttccagatcctggtgatgctggaaatgaccccccagcagggagatgtctacacctgccaagtggagcacaccagcctggatagtcctgtcaccgtggagtggaaggcacagtctgattctgcccggagtaagacattgacgggagctgggggcttcgtgctggggctcatcatctgtggagtgggcatcttcatgcacaggaggagcaagaaagggttcctgagctcactgaaaagactattgtgccttaggaaaagcatttgctgtgtttcgttagcatctggctccaggacagaccttcaacttccaaattggatactgctgccaagaagttgctctgaagtcagtttctatcattctgctctttgattcaaagcactgtttctctcactgggcctccaaccatgttcccttcttcttagcaccacaaataatcaaaacccaacatgactgtttgttttcctttaaaaatatgcaccaaatcatctctcatcacttttctctgagggttttagtagacagtaggagttaataaagaagttcattttggtttaaacataggaaagaagagaaccatgaaaatggggatatgttaactattgtataatggggcctgttacacatgacactcttctgaattgactgtatttcagtgagctgcccccaaatcaagtttagtgccctcatccatttatgtctcagaccactattcttaactattcaatggtgagcagactgcaaatctgcctgataggacccatattcccacagcactaattcaacatataccttactgagagcatgttttatcattaccattaagaagttaaatgaacatcagaatttaaaatcataaatataatctaatacactttaaccattttctttgtgtgccatcacaaatactccttaaccaaatacggcttggacttttgaatgcatccaatagacgtcatttgtcgtctaagtctgcattcatccaccagcctaggcctcctgtcttaattttcatacagacagaaatgactccccactggggaaagagcaaagcaatacatgtagcactctttttcaaacactggtctttttttttttcttaacaatccaacattgttatgtgttttgcgtctcatattgacaccttttggtcaaggtagaggacatgtttgttgtaagctttctttttcgtgtagaggatggattcttcactcctgatacacacaatcagtgcacagcagctctcttatacatccagttgatgccttcagtctccctggcttcttacaagcatcttctgggccttgtgtgtccctgggcacctgtccctggtcaattcccgaaagctactgtgctcctcttgcccatctccccttgcaaataatatcttccatcgggggaccggcttcctccaatttcaggagaggtggggctgaaggcacagacttgggcgtcactggcacagatataagtaaatacagctggagtctgcagagaggctggactgagtcagggagtcaggaaagagaagccacacacaaggacaaccaatcatgtttctcataatcttcttaacctagggaataggacacaatcattttttctttttaaaacatctttatccctgatcagcctcatttcctcaaaaactataaaggaaaatgctgctgacttgtttttgcgtagtaatttcagctgtcacataataagctaaggaagacagtatatagtaaataaggacc

SEQ ID NO: 15205 - protein, 303 aa, Homo sapiens; identical to SEQ ID NO: 15201

SEQ ID NO: 15206 - DNA, 2409 bp, Homo sapiens
acttgggttcatggtctctaatatttcaaacaggagctccctttagcgagtccttcttttcctgactgcagctcttttcattttgccatccttttccagctccatgatggttctgcaggtttctgcggccccccggacagtggctctgacggcgttactgatggtgctgctcacatctgtggtccagggcagggccactccagagaattaccttttccagggacggcaggaatgctacgcgtttaatgggacacagcgcttcctggagagatacatctacaaccgggaggagttcgcgcgcttcgacagcgacgtgggggagttccgggcggtgacggagctggggcggcctgctgcggagtactggaacagccagaaggacatcctggaggagaagcgggcagtgccggacaggatgtgcagacacaactacgagctgggcgggcccatgaccctgcagcgccgagtccagcctagggtgaatgtttccccctccaagaaggggcccttgcagcaccacaacctgcttgtctgccacgtgacggatttctacccaggcagcattcaagtccgatggttcctgaatggacaggaggaaacagctggggtcgtgtccaccaacctgatccgtaatggagactggaccttccagatcctggtgatgctggaaatgaccccccagcagggagatgtctacacctgccaagtggagcacaccagcctggatagtcctgtcaccgtggagtggaaggcacagtctgattctgcccggagtaagacattgacgggagctgggggcttcgtgctggggctcatcatctgtggagtgggcatcttcatgcacaggaggagcaagaaagttcaacgaggatctgcataaacagggttcctgagctcactgaaaagactattgtgccttaggaaaagcatttgctgtgtttcgttagcatctggctccaggacagaccttcaacttccaaattggatactgctgccaagaagttgctctgaagtcagtttctatcattctgctctttgattcaaagcactgtttctctcactgggcctccaaccatgttcccttcttcttagcaccacaaataatcaaaacccaacatgactgtttgttttcctttaaaaatatgcaccaaatcatctctcatcacttttctctgagggttttagtagacagtaggagttaataaagaagttcattttggtttaaacataggaaagaagagaaccatgaaaatggggatatgttaactattgtataatggggcctgttacacatgacactcttctgaattgactgtatttcagtgagctgcccccaaatcaagtttagtgccctcatccatttatgtctcagaccactattcttaactattcaatggtgagcagactgcaaatctgcctgataggacccatattcccacagcactaattcaacatataccttactgagagcatgttttatcattaccattaagaagttaaatgaacatcagaatttaaaatcataaatataatctaatacactttaaccattttctttgtgtgccatcacaaatactccttaaccaaatacggcttggacttttgaatgcatccaatagacgtcatttgtcgtctaagtctgcattcatccaccagcctaggcctcctgtcttaattttcatacagacagaaatgactccccactggggaaagagcaaagcaatacatgtagcactctttttcaaacactggtctttttttttttcttaacaatccaacattgttatgtgttttgcgtctcatattgacaccttttggtcaaggtagaggacatgtttgttgtaagctttctttttcgtgtagaggatggattcttcactcctgatacacacaatcagtgcacagcagctctcttatacatccagttgatgccttcagtctccctggcttcttacaagcatcttctgggccttgtgtgtccctgggcacctgtccctggtcaattcccgaaagctactgtgctcctcttgcccatctccccttgcaaataatatcttccatcgggggaccggcttcctccaatttcaggagaggtggggctgaaggcacagacttgggcgtcactggcacagatataagtaaatacagctggagtctgcagagaggctggactgagtcagggagtcaggaaagagaagccacacacaaggacaaccaatcatgtttctcataatcttcttaacctagggaataggacacaatcattttttctttttaaaacatctttatccctgatcagcctcatttcctcaaaaactataaaggaaaatgctgctgacttgtttttgcgtagtaatttcagctgtcacataataagctaaggaagacagtatatagtaaataaggacc

SEQ ID NO: 15207 - protein, 258 aa, Homo sapiens; identical to SEQ ID NO: 1697

SEQ ID NO: 15208 - DNA, 896 bp, Homo sapiens
acttgggttcatggtctctaatatttcaaacaggagctccctttagcgagtccttcttttcctgactgcagctcttttcattttgccatccttttccagctccatgatggttctgcaggtttctgcggccccccggacagtggctctgacggcgttactgatggtgctgctcacatctgtggtccagggcagggccactccagagaattaccttttccagggacggcaggaatgctacgcgtttaatgggacacagcgcttcctggagagatacatctacaaccgggaggagttcgcgcgcttcgacagcgacgtgggggagttccgggcggtgacggagctggggcggcctgctgcggagtactggaacagccagaaggacatcctggaggagaagcgggcagtgccggacaggatgtgcagacacaactacgagctgggcgggcccatgaccctgcagcgccgagtccagcctagggtgaatgtttccccctccaagaaggggcccttgcagcaccacaacctgcttgtctgccacgtgacggatttctacccaggcagcattcaagtccgatggttcctgaatggacaggaggaaacagctggggtcgtgtccaccaacctgatccgtaatggagactggaccttccagatcctggtgatgctggaaatgaccccccagcagggagatgtctacacctgccaagtggagcacaccagcctggatagtcctgtcaccgtggagtggaaggcacagtctgattctgcccggagtaagacattgacgggagctgggggcttcgtgctggggctcatcatctgtggagtgggcatcttcatgcacaggaggagcaagaaagttcaacaaggatctgcataaacaggcaatattcctg

SEQ ID NO: 15209 - protein, 258 aa, Homo sapiens [sequence omitted]

SEQ ID NO: 15210 - DNA, 634 bp, Homo sapiens
atggtctctaatatttcaaacaggagctccctttagcgagtccttcttttcctgactgcagctcttttcattttgccatccttttccagctccatgatggttctgcaggtttctgcggccccccggacagtggctctgacggcgttactgatggtgctgctcacatctgtggtccagggcagggccactccagagaattaccttttccagggacggcaggaatgctacgcgtttaatgggacacagcgcttcctggagagatacatctacaaccgggaggagttcgcgcgcttcgacagcgacgtgggggagttccgggcggtgacggagctggggcggcctgctgcggagtactggaacagccagaaggacatcctggaggagaagcgggcagtgccggacaggatgtgcagacacaactacgagctgggcgggcccatgaccctgcagcgccgaggctggagtgctgtggcaccatcatggctcactgcagcctcaacctcctgggctcaagtgatcctcctgcctcagcctcccatgtagctagaactacagatacacgtaccaccatgtctggctaatttatttttctttttagagatgggttctcactatgttgcccaggccggtctca

SEQ ID NO: 15211 - protein, 149 aa, Homo sapiens
MMVLQVSAAPRTVALTALLMVLLTSVVQGRATPENYLFQGRQECYAFNGTQRFLERYIYNREEFARFDSDVGEFRAVTELGRPAAEYWNSQKDILEEKRAVPDRMCRHNYELGGPMTLQRRGWSAVAPSWLTAASTSWAQVILLPQPPM

SEQ ID NO: 15212 - DNA, 1054 bp, Homo sapiens
atggtctctaatatttcaaacaggagctccctttagcgagtccttcttttcctgactgcagctcttttcattttgccatccttttccagctccatgatggttctgcaggtttctgcggccccccggacagtggctctgacggcgttactgatggtgctgctcacatctgtggtccagggcagggccactccagagaattaccttttccagggacggcaggaatgctacgcgtttaatgggacacagcgcttcctggagagatacatctacaaccgggaggagttcgcgcgcttcgacagcgacgtgggggagttccgggcggtgacggagctggggcggcctgctgcggagtactggaacagccagaaggacatcctggaggagaagcgggcagtgccggacaggatgtgcagacacaactacgagctgggcgggcccatgaccctgcagcgccgaggcagcattcaagtccgatggttcctgaatggacaggaggaaacagctggggtcgtgtccaccaacctgatccgtaatggagactggaccttccagatcctggtgatgctggaaatgaccccccagcagggagatgtctacacctgccaagtggagcacaccagcctggatagtcctgtcaccgtggagtggaaggcacagtctgattctgcccggagtaagacattgacgggagctgggggcttcgtgctggggctcatcatctgtggagtgggcatcttcatgcacaggaggagcaagaaagttcaacgaggatctgcataaacagggttcctgagctcactgaaaagactattgtgccttaggaaaagcatttgctgtgtttcgttagcatctggctccaggacagaccttcaacttccaaattggatactgctgccaagaagttgctctgaagtcagtttctatcattctgctctttgattcaaagcactgtttctctcactgggcctccaaccatgttcccttcttcttagcaccacaaataatcaaaacccaacatgactgtttgttttcctttaaaaatatgcaccaaatc

SEQ ID NO: 15213 - protein, 228 aa, Homo sapiens
MMVLQVSAAPRTVALTALLMVLLTSVVQGRATPENYLFQGRQECYAFNGTQRFLERYIYNREEFARFDSDVGEFRAVTELGRPAAEYWNSQKDILEEKRAVPDRMCRHNYELGGPMTLQRRGSIQVRWFLNGQEETAGVVSTNLIRNGDWTFQILVMLEMTPQQGDVYTCQVEHTSLDSPVTVEWKAQSDSARSKTLTGAGGFVLGLIICGVGIFMHRRSKKVQRGSA

SEQ ID NO: 15214 - DNA, 2309 bp, Homo sapiens
atggtctctaatatttcaaacaggagctccctttagcgagtccttcttttcctgactgcagctcttttcattttgccatccttttccagctccatgatggttctgcaggtttctgcggccccccggacagtggctctgacggcgttactgatggtgctgctcacatctgtggtccagggcagggccactccagagaattaccttttccagggacggcaggaatgctacgcgtttaatgggacacagcgcttcctggagagatacatctacaaccgggaggagttcgcgcgcttcgacagcgacgtgggggagttccgggcggtgacggagctggggcggcctgctgcggagtactggaacagccagaaggacatcctggaggagaagcgggcagtgccggacaggatgtgcagacacaactacgagctgggcgggcccatgaccctgcagcgccgaggcagcattcaagtccgatggttcctgaatggacaggaggaaacagctggggtcgtgtccaccaacctgatccgtaatggagactggaccttccagatcctggtgatgctggaaatgaccccccagcagggagatgtctacacctgccaagtggagcacaccagcctggatagtcctgtcaccgtggagtggaaggcacagtctgattctgcccggagtaagacattgacgggagctgggggcttcgtgctggggctcatcatctgtggagtgggcatcttcatgcacaggaggagcaagaaagttcaacgaggatctgcataaacagggttcctgagctcactgaaaagactattgtgccttaggaaaagcatttgctgtgtttcgttagcatctggctccaggacagaccttcaacttccaaattggatactgctgccaagaagttgctctgaagtcagtttctatcattctgctctttgattcaaagcactgtttctctcactgggcctccaaccatgttcccttcttcttagcaccacaaataatcaaaacccaacatgactgtttgttttcctttaaaaatatgcaccaaatcatctctcatcacttttctctgagggttttagtagacagtaggagttaataaagaagttcattttggtttaaacataggaaagaagagaaccatgaaaatggggatatgttaactattgtataatggggcctgttacacatgacactcttctgaattgactgtatttcagtgagctgcccccaaatcaagtttagtgccctcatccatttatgtctcagaccactattcttaactattcaatggtgagcagactgcaaatctgcctgataggacccatattcccacagcactaattcaacatataccttactgagagcatgttttatcattaccattaagaagttaaatgaacatcagaatttaaaatcataaatataatctaatacactttaaccattttctttgtgtgccatcacaaatactccttaaccaaatacggcttggacttttgaatgcatccaatagacgtcatttgtcgtctaagtctgcattcatccaccagcctaggcctcctgtcttaattttcatacagacagaaatgactccccactggggaaagagcaaagcaatacatgtagcactctttttcaaacactggtctttttttttttcttaacaatccaacattgttatgtgttttgcgtctcatattgacaccttttggtcaaggtagaggacatgtttgttgtaagctttctttttcgtgtagaggatggattcttcactcctgatacacacaatcagtgcacagcagctctcttatacatccagttgatgccttcagtctccctggcttcttacaagcatcttctgggccttgtgtgtccctgggcacctgtccctggtcaattcccgaaagctactgtgctcctcttgcccatctccccttgcaaataatatcttccatcgggggaccggcttcctccaatttcaggagaggtggggctgaaggcacagacttgggcgtcactggcacagatataagtaaatacagctggagtctgcagagaggctggactgagtcagggagtcaggaaagagaagccacacacaaggacaaccaatcatgtttctcataatcttcttaacctagggaataggacacaatcattttttctttttaaaacatctttatccctgatcagcctcatttcctcaaaaactataaaggaaaatgctgctgacttgtttttgcgtagtaatttcagctgtcacataataagctaaggaagacagtatatagtaaataaggacc

SEQ ID NO: 15215 - protein, 228 aa, Homo sapiens; identical to SEQ ID NO: 15213

SEQ ID NO: 15216 - DNA, 2235 bp, Homo sapiens
caaacaggagctccctttagcgagtccttcttttcctgactgcagctcttttcattttgccatccttttccagctccatgatggttctgcaggtttctgcggccccccggacagtggctctgacggcgttactgatggtgctgctcacatctgtggtccagggcagggccactccagagaattaccttttccagggacggcaggaatgctacgcgtttaatgggacacagcgcttcctggagagatacatctacaaccgggaggagttcgcgcgcttcgacagcgacgtgggggagttccgggcggtgacggagctggggcggcctgctgcggagtactggaacagccagaaggacatcctggaggagaagcgggcagtgccggacaggatgtgcagacacaactacgagctgggcgggcccatgaccctgcagcgccgaggtgagtgagggctttgggccggcggtcccagggcagccccgcgggcccgtgcccagggcgcaggagcagccgggttggcctaagggaccttagtgccgggcggaaaggggactttgggttggggattcatggggggagcccatctggagcttgtcaggggagcgagcgcggggacctggactgggctgagcatggagtgaggaggacgagagcagagagacccccgggacttcatcaggcctggcagctgactgcatgtggggtgaaaaaaggaagccacaggacagcgcacaagggtatggtgtggagatggaggtggagatggcacagcaggccacacagagaagaaacctacagggaggtagctgggtttgaggtgcttgaggggcagatgggtggtctgatgggcaggtagacagaagggtctgcagccggggaggagactgagatacatgagaccatccagggagaggggacccagggggaagagcaaaggaccggatcctgggaactggacagttgtgatttggccaagacagaaaagcctgtgaaagagaccaaaaaaacccaagtgcagtgtgaggagaggcccgcagagaagagtcttggaagctgaggggaggtgacctcagcagcacagtggacagcggtgccagtgacttgggaaggtcagaaaacagaagatggaaagtgggtttggaaaccagggagacctggggagagcaggttggccgcagcggcaggagctggaatgggagggggtgcatgaggctgagtgtggcgcatcctcctcggggctgagatggattttacttgtcttgggttccccacggctgtcacagggcagtgtctcagttcattcgtctttttccttcaggaagtctgggtgtaaagggatggagagaggtgaggtgtgtgcagtaagaggatttctcaaggatgggacaggaaggccttggagctttggcttcctcctgtgaacttgtggggtggggagcctggtgcaccaacctgagggacttgagggagtagtatcaggatgtgggattgagccctggaccttttttctagaaagaggaaaaaaatgaagggaggaggaggaggaagctggggagatcacacctttgattttcttgttcctggaaagtgaaaggaagttcacctgctatgagtgagaaggtggacacactgggtggggatgaggtgagtgacatgagcttaggaaagttgctgaggtaattggttgagagaggtgttcaaataaaaataacgcaattggcaaaaactgttactaagactttgtagaggcaccaatcagtgacatggcagcattttctttcacagtaatcaactgccagattgcagacagccctgatgccagcctaaggagtgtgggtttctcctccaggcccgcaggtccccaacctcactcctctgaagactcttctggagatcctctgtgatgcacagatctccagactcagtgcccccagactcagattccctgggtggggaggtctggggatctctgcttgtaatcagctccctagaggttcccatgtagccagataagtattgtcagaacactgaagatttttgaaaaatgaaaaagagaaggttggagatgtgtcttcagaagactactaagggtgctggctagaggagggaccagaggcagggagatgaggtaggaaactgctattatttgtcagggaaattgcaatcaaggcatgagttagaacagggaaaacacagaggcaagggagaggtggaagggggaggaaagaagtagtg

SEQ ID NO: 15217 - protein, 123 aa, Homo sapiens
MMVLQVSAAPRTVALTALLMVLLTSVVQGRATPENYLFQGRQECYAFNGTQRFLERYIYNREEFARFDSDVGEFRAVTELGRPAAEYWNSQKDILEEKRAVPDRMCRHNYELGGPMTLQRRGE

SEQ ID NO: 15218 - DNA, 845 bp, Homo sapiens
agcagaagggactgccttcccctcagtgctcgcccctccctagtgatcactcagtgcccctgagctcattcttttcagtaaattctctctctgcgtggtgagaaaacaggcctggagaggctctgcgacccgcttaggaccacagaactcgagaattaccttttccagggacggcaggaatgctacgcgtttaatgggacacagcgcttcctggagagatacatctacaaccgggaggagttcgcgcgcttcgacagcgacgtgggggagttccgggcggtgacggagctggggcggcctgctgcggagtactggaacagccagaaggacatcctggaggagaagcgggcagtgccggacaggatgtgcagacacaactacgagctgggcgggcccatgaccctgcagcgccgaggctggagtgctgtggcaccatcatggctcactgcagcctcaacctcctgggctcaagtgatcctcctgcctcagcctcccatgtagctagaactacagatacacgtaccaccatgtctggctaatttatttttctttttagagatgggttctcactatgttgcccaggccggtctcaaaaccctgggctcaagtgatcctcatgcctcaacctcccaaagtgctaagattataggcatgaccaccatgcctggccttttctgctttctgaggaggaaaaaggtactggtggcagagatccaaaagaaaagttgccagtggcagtgtggaaattcacctgagaacaacaggacaagctggggcacaaatgcaaagatgcagagggaggcaacacctggtcatctgtgagaccttcatgggacctgaagacg

SEQ ID NO: 15219 - protein, 45 aa, Homo sapiens
MCRHNYELGGPMTLQRRGWSAVAPSWLTAASTSWAQVILLPQPPM

SEQ ID NO: 15220 - DNA, 787 bp, Homo sapiens
gagtgagggctttgggccggcggtcccagggcagccccgcgggcccgtgcccagggcgcaggagcagccgggttggcctaagggaccttagtgccgggcggaaaggggactttgggttggggattcatggggggagcccatctggagcttgtcaggggagcgagcgcggggacctggactgggctgagcatggagtgaggaggacgagagcagagagacccccgggacttcatcaggcctggcagctgactgcatgtggggtgaaaaaaggaagccacaggacagcgcacaaggaaagaggaaaaaaatgaagggaggaggaggaggaagctggggagatcacacctttgattttcttgttcctggaaagtgaaaggaagttcacctgctatgagtgagaaggtggacacactgggtggggatgaggctggagtgctgtggcaccatcatggctcactgcagcctcaacctcctgggctcaagtgatcctcctgcctcagcctcccatgtagctagaactacagatacacgtaccaccatgtctggctaatttatttttctttttagagatgggttctcactatgttgcccaggccggtctcaaaaccctgggctcaagtgatcctcatgcctcaacctcccaaagtgctaagattataggcatgaccaccatgcctggccttttctgctttctgaggaggaaaaaggtactggtggcagagatccaaaagaaaagttgccagtggcagtgtggaaattcacctgagaacaacaggacaagctgggg

SEQ ID NO: 15221 - protein, 42 aa, Homo sapiens
MRLECCGTIMAHCSLNLLGSSDPPASASHVARTTDTRTTMSG

SEQ ID NO: 15222 - DNA, 1188 bp, Homo sapiens
ccctttaatgagttcttgttttcctgactgcagctctcttcattctgccaaccttttccaactccatgatgatcctgcaggtttcagggggcccctggacagtggctctgacagcattactgatggtgctgctcatatctgtggtccagagcagggccactccagagaattccgtctaccaggaacggcaggaatgctatgcgttcaatgggactcagcgcgttgtggacgggctcatctacaaccgggaggaatacgtgcattttgacagcgcagtgggggagttcctagcagtgatggagctggggcggcccataggcgagtacttcaatagccagaaggactttatggaacggaagcgagccgaggtggacaaggtgtgcagacacaagtacgagctgatggagccactcatccggcagcgccgaggagacgtaaccataactgctgttagggggtgttggacgacgattctttctggctacttcctgctgaaaaggggcgtcgtgtcggggggctgcagttggggctcctcctgaggttgatctaaggcttcttggaagaatggcatgtccatgtgtggctttgtttgcagcaccatttgaagtttgattgcttctaggcaaaaagagataaattttacaagaaggtttaaaatatagggttaccatatgagtattaagattaccacctatagactgtaactatggcagtagagtttgatacctgttacaccaatggattgtaatactggtttgtctccactagatgtcgctgtacattaccagaaacgttaatataaaagcatcatttcctttgagaaaacatgtttcccccttgacttgctattagggcataatttttggtttaggccattctttataacttatgatatgattgggagaaaaacgttattgggtggctaaaataactttggtgttaatcttggcaattcctttcctttaattattaaatttcttaattattaaattctttcatgactttcacagaccctcttacaatgtactcaactttctgacttgtcttaaacaaccagtcatttccttttaggacaagaatttactatacaagatcctttcttatataaaatccctttatttgtaaccttctttccatagcttagagtgcaccatttaccaatcttcaataaaaaagtcctatcaaact

SEQ ID NO: 15223 - protein, 157 aa, Homo sapiens [sequence omitted]

SEQ ID NO: 15224 - DNA, 805 bp, Homo sapiens
atgatgatcctgcaggtttcagggggcccctggacagtggctctgacagcattactgatggtgctgctcatatctgtggtccagagcagggccactccagagaattccgtctaccaggaacggcaggaatgctatgcgttcaatgggactcagcgcgttgtggacgggctcatctacaaccgggaggaatacgtgcattttgacagcgcagtgggggagttcctagcagtgatggagctggggcggcccataggcgagtacttcaatagccagaaggactttatggaacggaagcgagccgaggtggacaaggtgtgcagacacaagtacgagctgatggagccactcatccggcagcgccgagtccagcctagggtgaacatctcccctccaagaaggagccccagcagcaccacgacctgcttgtctaccacgtgacagatttctacccagacagcattcaagtccgatgcttcctgaatggacaggaggaaacagctggggtcgtgtccaccaacctgatccgtaatggagactggaccttccagatcctggagatgctggaaatgaccccccagcagggaaacatctacacctgccaagtggagcaccccagcctggacagtcctgtcaccgtggagtggaaggcacagtctgattctgtgcagagcaagatgctgacaggagccaggggcttcatgctggggctcatcatctgtggagtggacatcttcacgcacagaaggaggaagaaagttcaacaaggatctgcataaacaggcaatattcctgctttgatttcctt

SEQ ID NO: 15225 - protein, 145 aa, Homo sapiens
MMILQVSGGPWTVALTALLMVLLISVVQSRATPENSVYQERQECYAFNGTQRVVDGLIYNREEYVHFDSAVGEFLAVMELGRPIGEYFNSQKDFMERKRAEVDKVCRHKYELMEPLIRQRRVQPRVNISPPRRSPSSTTTCLSTT

SEQ ID NO: 15226 - DNA, 732 bp, Homo sapiens
agtgtattttcaccaggtaaagaaagctttttatggttcactgactgaggacaatcaaccccttcacaatctagaacctgaagattggatcttctgagaacatcagagaaagactgcccttgccatccacactgcagtaaacatcagaaccgtgaactttggcttcatgatctcacaactgagaaggatccctccacattcttggaaatatacacccattggaacccgtaagcagaccatgtgtcaacgtatgcagagtttgtgcagacacacagaccctctggggagtatatgtttgaatctgatgaagatgagcagttatttgtgcacctggacaagaaggagatggtctggcatctgtgagagtttattcacactgtgtcaaactttctcagtcagaagttgacataaggaagtcaccagcttcggtctcctttaaatctccaggcctaactttcttttgaatctctgctcttcaaccacaatgacttatgtaccccaagacccctctacctcctggctgcctatgatcctcctgcacctagcactcagcaaagggtctgacatttagatagcactcaatcaatatgaagaatttaaagtgtagtgacaaggtggtgcccacactggatggtctgtatgctgtggtctcatcagggacctttctctgcactgcatttttcctgagaaatcccagagttcaataaatacctgtgtatgtcagagctagac

SEQ ID NO: 15227 - protein, 79 aa, Homo sapiens
MISQLRRIPPHSWKYTPIGTRKQTMCQRMQSLCRHTDPLGSICLNLMKMSSYLCTWTRRRWSGICESLFTLCQTFSVRS

SEQ ID NO: 15228 - DNA, 1997 bp, Homo sapiens
aaaaccaaagcccacaagcccacagatccacagtcccacacactgcaggcctgggccagctgtgtttgcttgggtttgggatggattggagggcgtccgaggcatggatggtccccagggccccaaagggagcttgggaccccagggagagccaggacctcctggacaacagggcacccctgggacccagggtcttcccgggccccagggtgccatcggccctcatggagagaagggtcctcaagggaagccagggctccccggcatgcctgggtcccccaggcgaggtgatccagccactgcccattcagatgcccaagaagactcggcgctcggtggatggaagccgtctgatgcaggaagatgaggccataccgaccgggggagcccccggcagtcctggggggctggaggagatctttggctcactcgactccctgcgggaggagatcgagcagatgaggcggccaacagggacccaggacagccctgctcgcacctgccaggacctgaagctgtgccacccagagcttcccgatggagagtactgggtcgaccccaaccagggctgtgctcgggatgccttccgagttttctgcaacttcacagcagggggtgagacctgtgtgacgcctagggatgacgtcacgcagttctcttacgtggactcagagggctccccagtgggtgtggtccagctcaccttcctgcggctgctcagcgtctcagcccaccaggacgtctcctacccctgctctggagcagcccgtgacggtcccctgagactccgtggggccaatgaggatgagctgagcccggagactagcccctatgtcaaagaattcagagatggctgccagacacagcaaggccggacggtgctggaggtgcgaacgcctgtgctggagcagctgccagtgctggatgcctccttctcagacctgggagccccaccgaggcggggaggggtgctgctggggcctgtctgcttcatgggataggaccgtctctgtctgatcctgtccattcggaaccaggcccacctggaatcccacaacatcagctctgtgccacctcccaagagggctcctcactatctagggagccctgggccagggcgtggagagccctcagtcggggcaggccaggggaggggtgaagtggttgcctggacaccccacgggaggagtggcatctggggctcttggccctcccacctggagcctgttacccgttagagagctgagacccttatttaaaactcacctcccaatcaccccaaacaaatggaagagaagagaaaggacatggcgtattttgtatttaaaagtaattgtattaattatttaaagtgtggaaagcaaaataacaaaaaagagaaacgccaacaaaaatcagcagatgttgaagacaggggtctcgggggtgggctccggcacccacatcctggagtcaggactttcctcagtgactgtgtgtaggggggtttcagggctgaaccccacctccctcccaccttcctcccacctcacctgtcgcacccactgtgaaagttggaatatgtggtctccctggcctcagggctctgactctgccagggtggggctctctaacccacaggtgttggctgcctggcccatgtgcccactgtctcttccacttggtctgggtttggcaggcactgcctgctacttgagggccaggatgctcccccagggaagaaacggaatagtgtggggtgtgtgcagggctgcatcccgcagatggctggaatattaaaattcttctatattggctggtaaattgccatggccctgagccactgagtatgttcattgccacccctgtccctcccctgggcacccctcactttccctgatcctgcaattaaagggttaatgtgtggcatatggaagggactcccaggaccctgtgcccagcttccatgctgactgatggttaaataatgtgattgtctcctcccaggtgtctgtgtc

SEQ ID NO: 15229 - protein, 306 aa, Homo sapiens
MDWRASEAWMVPRAPKGAWDPRESQDLLDNRAPLGPRVFPGPRVPSALMERRVLKGSQGSPACLGPPGEVIQPLPIQMPKKTRRSVDGSRLMQEDEAIPTGGAPGSPGGLEEIFGSLDSLREEIEQMRRPTGTQDSPARTCQDLKLCHPELPDGEYWVDPNQGCARDAFRVFCNFTAGGETCVTPRDDVTQFSYVDSEGSPVGVVQLTFLRLLSVSAHQDVSYPCSGAARDGPLRLRGANEDELSPETSPYVKEFRDGCQTQQGRTVLEVRTPVLEQLPVLDASFSDLGAPPRRGGVLLGPVCFMG

SEQ ID NO: 15230 - DNA, 6435 bp, Homo sapiens
cacacagaagcggcagccaccgaggagggagcagtgccgggagccccgacggcgccttgctgcatggagctgggccgctgacagctgtcgctgcccgcagcctctgacctccctgggaccccggcgtctgaggctcatagtctgctccctgtcttctgtcagcctcagggcatccagcgtctcaggccgacctgggtccctgggacccggcgtttcggcttctcagccatggagcggtgcagccgctgccatcgcctcctcctcctcctacctctggtgctggggctgagcgcggccccaggctgggcaggtgcaccccctgtggatgtgctccgggccctgaggttcccctccctccctgatggtgtccggagagcgaaaggcatctgtccagctgatgtggcctaccgagtggcacgacctgcccagctcagtgcacccactcgccagcttttcccaggaggatttcccaaagatttctctctgctgactgttgtccggacccgccctggtctccaagctcccctcctgactctctacagtgcccagggtgtccgacagctgggcctggagctgggccgacctgtccgcttcctgtatgaagaccagactgggcggcctcaacctccctctcagccagtcttccgaggcctcagcctagcagatggcaagtggcaccgtgtggctgtggctgtgaagggccagtctgtcaccctcattgttgactgcaagaagcgagtcacccggcctctcccccgaagtgctcgtccagtattggacacccatggagtgatcatctttggtgcccgtattctggatgaagaagtctttgagggtgatgtccaggagctggccattgtcccaggggtccaggcagcctatgaatcatgtgaacagaaggagctggaatgcgaggggggccagagggaaagaccccaaaaccaacagcctcacagagcccagagatctccacagcagcaaccatcaagacttcacaggccacaaaatcaggaaccccagagccagcccactgagtctctctactatgactacgagcccccctattatgatgtgatgactacggggacaacccctgattatcaggaccccaccccaggtgaagaggaagaaatcctggagtcgagcctcttgccaccccttgaggaggagcagacagatctccaggtcccccccacagccgacaggttccaggcagaggaatatggggagggtggcacagacccccctgaagggccctacgattacacctatggctatggggatgattatcgtgaggagacagagcttggccctgccctctctgcggagacagcccactcaggagccgctgcccatggaccccgagggctgaagggagagaaaggagagcctgcagtgttggaacctggtatgctcgtggaggggccccctggcccagaaggccctgcgggattgattggtccccctggcatccaggggaacccaggcccagttggagaccctggagagaggggcccccctggccgagcagggctccctggatcagatggggctcctggtcctcctggcacatctctcatgctcccattccggtttggcagtggtgggggtgacaagggccctgtggtggcggcccaggaggctcaggcccaggcgatcctgcagcaggcgaggctggcgctccgtggaccccctggccccatgggatacacagggcgccctggacccttgggccaacctgggagccctggcctgaaaggagagtctggagacttaggacctcagggccccagaggacctcagggcctcacaggccctcctggcaaggctgggcgaaggggccgggcaggtgctgatggagcccgagggatgcctggagatcctggagtgaagggtgaccgaggttttgatggactcccagggctccctggagagaagggccataggggtgatactggtgcccagggccttcctggtccccctggtgaggatggagagaggggagatgacggggagattgggcctcgagggctgcctggagagtcgggacctcgaggtctccttggccccaaaggcccacctggtattcctggaccccctggcgtccgaggcatggatggtccccagggccccaaagggagcttgggaccccagggagagccaggacctcctggacaacagggcacccctgggacccagggtcttcccgggccccagggtgccatcggccctcatggagagaagggtcctcaagggaagccagggctccccggcatgcctggctcagacggacccccgggtcacccagggaaggaaggtccccctggaaccaaaggaaaccagggtccctctggacctcagggacctctaggatacccaggacctcgaggggtcaagggtgtggacggaattcggggtctgaagggtcataagggtgagaagggtgaggatggctttcctgggttcaaaggtgacataggcgtgaaaggtgacaggggcgaagttggagtccctggttccaggggagaggatggtcctgaggggccaaagggacgcactggaccgactggagaccctgggcccccagggctcatgggcgagaagggcaagctgggtgttcctggtctgcctggctatcctggacgtcagggacccaaggggtccctaggatttcctggctttcctggtgccagtggagagaagggagcccggggcctgtcggggaagtcagggcctcggggagaacggggccccacgggtccacggggtcagcggggaccccgaggtgccactgggaagtctggagctaagggaacatctggtggtgatggcccccatgggccccctggagagaggggcctccctggacctcagggtcccaacgggtttcctggaccgaaaggacccccgggcccccctgggaaggatgggctgccgggacacccaggccaaagaggagaagtgggtttccaagggaagaccggcccccctggtcctccaggagtggtgggacctcagggagcagcaggagaaaccggccctatgggggagagaggtcacccaggccccccggggccccctggagagcagggactacctgggacagctggaaaagaaggaacaaagggtgaccctggtccccctggggccccagggaaggatggtcctgctggtctgaggggattcccaggagagagaggcctcccaggcactgctggtggacctggtttgaaggggaatgaaggtccgtctggcccccctggccctgcaggctcccctggggaacgaggtgcagcaggatcagggggacccattggtccgccagggcgcccaggcccgcagggtccccctggagcagcaggagagaaaggtgtcccaggtgagaagggccccattggcccgactggccgagatggagtgcagggtcctgtggggcttcctggtcctgctgggcctccaggtgtggctggagaggatggagacaagggtgaggtgggggaccccggacagaagggcaccaaagggaacaagggtgaacatggccctcctggaccccctggacccattggtcctgtggggcagcctggagcagcgggagcagatggggagcccggagctcggggaccccagggacactttggagccaaaggtgatgaaggaacaagaggattcaatgggcccccaggacccattggcctacagggtttgccaggcccctctggggagaagggagaaacaggagatgtgggtcctatgggaccacctggccccccaggacctcgaggtccagctggacccaatggcgctgatggcccacaaggtcccccaggaggtgttgggaacctgggtccccctggagagaagggggaaccaggagagtcaggatctccagggatccagggcgagccaggtgtcaagggtccacgcggggaacgtggagagaaaggagagtcggggcagccaggagagccagggccaccagggcctaaaggccccacaggcgatgatggccccaaagggaaccctggtcctgttggttttcctggtgaccctggcccccctggagaaggtggccctcggggccaggatggtgctaagggtgaccgaggcgaggatggtgagccaggacagcctggatcccctggtcccaccggggagaatggacccccagggccacttggaaagcgaggtcctgctggctcgcctggttccgaggggcgacaaggagggaagggagccaagggagatcctggcgctataggtgccccggggaagacaggcccggtgggtcctgcaggcccagcagggaaacctggccctgatggtctgagggggctcccaggctcagtgggtcagcaaggccgacctggagctacaggccaggctgggcccccaggtcctgtgggacccccagggctgcctggtctccggggcgatgctggagccaagggagagaagggccacccaggtctcattggactgattgggcccccgggtgagcagggagagaagggagatcggggacttcctgggcctcagggctcccctgggcagaagggtgagatgggtatcccaggagcatccggccccattggtcctggaggtccccccggcctccccggacctgctggccccaaaggagccaaaggagccacaggcccaggcggacccaagggagagaagggtgtgcagggccctccaggacacccgggtcccccaggcgaggtgatccagccactgcccattcagatgcccaagaagactcggcgctcggtggatggaagccgtctgatgcaggaagatgaggccataccgaccgggggagcccccggcagtcctggggggctggaggagatctttggctcactcgactccctgcgggaggagatcgagcagatgaggcggccaacagggacccaggacagccctgctcgcacctgccaggacctgaagctgtgccacccagagcttcccgatggagagtactgggtcgaccccaaccagggctgtgctcgggatgccttccgagttttctgcaacttcacagcagggggtgagacctgtgtgacgcctagggatgacgtcacgcagttctcttacgtggactcagagggctccccagtgggtgtggtccagctcaccttcctgcggctgctcagcgtctcagcccaccaggacgtctcctacccctgctctggagcagcccgtgacggtcccctgagactccgtggggccaatgaggatgagctgagcccggagactagcccctatgtcaaagaattcagagatggctgccagacacagcaaggccggacggtgctggaggtgcgaacgcctgtgctggagcagctgccagtgctggatgcctccttctcagacctgggagccccaccgaggcggggaggggtgctgctggggcctgtctgcttcatgggataggaccgtctctgtctgatcctgtccattcggaaccaggcccacctggaatcccacaacatcagctctgtgccacctcccaagagggctcctcactatctagggagccctgggccagggcgtggagagccctcagtcggggcaggccaggggaggggtgaagtggttgcctggacaccccacgggaggagtggcatctggggctcttggccctcccacctggagcctgttacccgttagagagctgagacccttatttaaaactcacctcccaatcaccccaaacaaatggaagagaagagaaaggacatggcgtattttgtatttaaaagtaattgtattaattatttaaagtgtggaaagcaaaataacaaaaaagagaaacgccaacaaaaatcagcagatgttgaagacaggggtctcgggggtgggctccggcacccacatcctggagtcaggactttcctcagtgactgtgtgtaggggggtttcagggctgaaccccacctccctcccaccttcctcccacctcacctgtcgcacccactgtgaaagttggaatatgtggtctccctggcctcagggctctgactctgccagggtggggctctctaacccacaggtgttggctgcctggcccatgtgcccactgtctcttccacttggtctgggtttggcaggcactgcctgctacttgagggccaggatgctcccccagggaagaaacggaatagtgtggggtgtgtgcagggctgcatcccgcagatggctggaatattaaaattcttctatattggctggtaaattgccatggccctgagccactgagtatgttcattgccacccctgtccctcccctgggcacccctcactttccctgatcctgcaattaaagggttaatgtgtggcatatggaagggactcccaggaccctgtgcccagcttccatgctgactgatggttaaataatgtgattgtctcctcccaggtgtctgtgtc

SEQ ID NO: 15231 - protein, 1736 aa, Homo sapiens
MERCSRCHRLLLLLPLVLGLSAAPGWAGAPPVDVLRALRFPSLPDGVRRAKGICPADVAYRVARPAQLSAPTRQLFPGGFPKDFSLLTVVRTRPGLQAPLLTLYSAQGVRQLGLELGRPVRFLYEDQTGRPQPPSQPVFRGLSLADGKWHRVAVAVKGQSVTLIVDCKKRVTRPLPRSARPVLDTHGVIIFGARILDEEVFEGDVQELAIVPGVQAAYESCEQKELECEGGQRERPQNQQPHRAQRSPQQQPSRLHRPQNQEPQSQPTESLYYDYEPPYYDVMTTGTTPDYQDPTPGEEEEILESSLLPPLEEEQTDLQVPPTADRFQAEEYGEGGTDPPEGPYDYTYGYGDDYREETELGPALSAETAHSGAAAHGPRGLKGEKGEPAVLEPGMLVEGPPGPEGPAGLIGPPGIQGNPGPVGDPGERGPPGRAGLPGSDGAPGPPGTSLMLPFRFGSGGGDKGPVVAAQEAQAQAILQQARLALRGPPGPMGYTGRPGPLGQPGSPGLKGESGDLGPQGPRGPQGLTGPPGKAGRRGRAGADGARGMPGDPGVKGDRGFDGLPGLPGEKGHRGDTGAQGLPGPPGEDGERGDDGEIGPRGLPGESGPRGLLGPKGPPGIPGPPGVRGMDGPQGPKGSLGPQGEPGPPGQQGTPGTQGLPGPQGAIGPHGEKGPQGKPGLPGMPGSDGPPGHPGKEGPPGTKGNQGPSGPQGPLGYPGPRGVKGVDGIRGLKGHKGEKGEDGFPGFKGDIGVKGDRGEVGVPGSRGEDGPEGPKGRTGPTGDPGPPGLMGEKGKLGVPGLPGYPGRQGPKGSLGFPGFPGASGEKGARGLSGKSGPRGERGPTGPRGQRGPRGATGKSGAKGTSGGDGPHGPPGERGLPGPQGPNGFPGPKGPPGPPGKDGLPGHPGQRGEVGFQGKTGPPGPPGVVGPQGAAGETGPMGERGHPGPPGPPGEQGLPGTAGKEGTKGDPGPPGAPGKDGPAGLRGFPGERGLPGTAGGPGLKGNEGPSGPPGPAGSPGERGAAGSGGPIGPPGRPGPQGPPGAAGEKGVPGEKGPIGPTGRDGVQGPVGLPGPAGPPGVAGEDGDKGEVGDPGQKGTKGNKGEHGPPGPPGPIGPVGQPGAAGADGEPGARGPQGHFGAKGDEGTRGFNGPPGPIGLQGLPGPSGEKGETGDVGPMGPPGPPGPRGPAGPNGADGPQGPPGGVGNLGPPGEKGEPGESGSPGIQGEPGVKGPRGERGEKGESGQPGEPGPPGPKGPTGDDGPKGNPGPVGFPGDPGPPGEGGPRGQDGAKGDRGEDGEPGQPGSPGPTGENGPPGPLGKRGPAGSPGSEGRQGGKGAKGDPGAIGAPGKTGPVGPAGPAGKPGPDGLRGLPGSVGQQGRPGATGQAGPPGPVGPPGLPGLRGDAGAKGEKGHPGLIGLIGPPGEQGEKGDRGLPGPQGSPGQKGEMGIPGASGPIGPGGPPGLPGPAGPKGAKGATGPGGPKGEKGVQGPPGHPGPPGEVIQPLPIQMPKKTRRSVDGSRLMQEDEAIPTGGAPGSPGGLEEIFGSLDSLREEIEQMRRPTGTQDSPARTCQDLKLCHPELPDGEYWVDPNQGCARDAFRVFCNFTAGGETCVTPRDDVTQFSYVDSEGSPVGVVQLTFLRLLSVSAHQDVSYPCSGAARDGPLRLRGANEDELSPETSPYVKEFRDGCQTQQGRTVLEVRTPVLEQLPVLDASFSDLGAPPRRGGVLLGPVCFMG

SEQ ID NO: 15232 - DNA, 6177 bp, Homo sapiens
cacacagaagcggcagccaccgaggagggagcagtgccgggagccccgacggcgccttgctgcatggagctgggccgctgacagctgtcgctgcccgcagcctctgacctccctgggaccccggcgtctgaggctcatagtctgctccctgtcttctgtcagcctcagggcatccagcgtctcaggccgacctgggtccctgggacccggcgtttcggcttctcagccatggagcggtgcagccgctgccatcgcctcctcctcctcctacctctggtgctggggctgagcgcggccccaggctgggcaggtgcaccccctgtggatgtgctccgggccctgaggttcccctccctccctgatggtgtccggagagcgaaaggcatctgtccagctgatgtggcctaccgagtggcacgacctgcccagctcagtgcacccactcgccagcttttcccaggaggatttcccaaagatttctctctgctgactgttgtccggacccgccctggtctccaagctcccctcctgactctctacagtgcccagggtgtccgacagctgggcctggagctgggccgacctgtccgcttcctgtatgaagaccagactgggcggcctcaacctccctctcagccagtcttccgaggcctcagcctagcagatggcaagtggcaccgtgtggctgtggctgtgaagggccagtctgtcaccctcattgttgactgcaagaagcgagtcacccggcctctcccccgaagtgctcgtccagtattggacacccatggagtgatcatctttggtgcccgtattctggatgaagaagtctttgagggtgatgtccaggagctggccattgtcccaggggtccaggcagcctatgaatcatgtgaacagaaggagctggaatgcgaggggggccagagggaaagaccccaaaaccaacagcctcacagagcccagagatctccacagcagcaaccatcaagacttcacaggccacaaaatcaggaaccccagagccaggaccccaccccaggtgaagaggaagaaatcctggagtcgagcctcttgccaccccttgaggaggctgcccatggaccccgagggctgaagggagagaaaggagagcctgcagtgttggaacctggtatgctcgtggaggggccccctggcccagaaggccctgcgggattgattggtccccctggcatccaggggaacccaggcccagttggagaccctggagagaggggcccccctggccgagcagggctccctggatcagatggggctcctggtcctcctggcacatctctcatgctcccattccggtttggcagtggtgggggtgacaagggccctgtggtggcggcccaggaggctcaggcccaggcgatcctgcagcaggcgaggctggcgctccgtggaccccctggccccatgggatacacagggcgccctggacccttgggccaacctgggagccctggcctgaaaggagagtctggagacttaggacctcagggccccagaggacctcagggcctcacaggccctcctggcaaggctgggcgaaggggccgggcaggtgctgatggagcccgagggatgcctggagatcctggagtgaagggtgaccgaggttttgatggactcccagggctccctggagagaagggccataggggtgatactggtgcccagggccttcctggtccccctggtgaggatggagagaggggagatgacggggagattgggcctcgagggctgcctggagagtcgggacctcgaggtctccttggccccaaaggcccacctggtattcctggaccccctggcgtccgaggcatggatggtccccagggccccaaagggagcttgggaccccagggagagccaggacctcctggacaacagggcacccctgggacccagggtcttcccgggccccagggtgccatcggccctcatggagagaagggtcctcaagggaagccagggctccccggcatgcctggctcagacggacccccgggtcacccagggaaggaaggtccccctggaaccaaaggaaaccagggtccctctggacctcagggacctctaggatacccaggacctcgaggggtcaagggtgtggacggaattcggggtctgaagggtcataagggtgagaagggtgaggatggctttcctgggttcaaaggtgacataggcgtgaaaggtgacaggggcgaagttggagtccctggttccaggggagaggatggtcctgaggggccaaagggacgcactggaccgactggagaccctgggcccccagggctcatgggcgagaagggcaagctgggtgttcctggtctgcctggctatcctggacgtcagggacccaaggggtccctaggatttcctggctttcctggtgccagtggagagaagggagcccggggcctgtcggggaagtcagggcctcggggagaacggggccccacgggtccacggggtcagcggggaccccgaggtgccactgggaagtctggagctaagggaacatctggtggtgatggcccccatgggccccctggagagaggggcctccctggacctcagggtcccaacgggtttcctggaccgaaaggacccccgggcccccctgggaaggatgggctgccgggacacccaggccaaagaggagaagtgggtttccaagggaagaccggcccccctggtcctccaggagtggtgggacctcagggagcagcaggagaaaccggccctatgggggagagaggtcacccaggccccccggggccccctggagagcagggactacctgggacagctggaaaagaaggaacaaagggtgaccctggtccccctggggccccagggaaggatggtcctgctggtctgaggggattcccaggagagagaggcctcccaggcactgctggtggacctggtttgaaggggaatgaaggtccgtctggcccccctggccctgcaggctcccctggggaacgaggtgcagcaggatcagggggacccattggtccgccagggcgcccaggcccgcagggtccccctggagcagcaggagagaaaggtgtcccaggtgagaagggccccattggcccgactggccgagatggagtgcagggtcctgtggggcttcctggtcctgctgggcctccaggtgtggctggagaggatggagacaagggtgaggtgggggaccccggacagaagggcaccaaagggaacaagggtgaacatggccctcctggaccccctggacccattggtcctgtggggcagcctggagcagcgggagcagatggggagcccggagctcggggaccccagggacactttggagccaaaggtgatgaaggaacaagaggattcaatgggcccccaggacccattggcctacagggtttgccaggcccctctggggagaagggagaaacaggagatgtgggtcctatgggaccacctggccccccaggacctcgaggtccagctggacccaatggcgctgatggcccacaaggtcccccaggaggtgttgggaacctgggtccccctggagagaagggggaaccaggagagtcaggatctccagggatccagggcgagccaggtgtcaagggtccacgcggggaacgtggagagaaaggagagtcggggcagccaggagagccagggccaccagggcctaaaggccccacaggcgatgatggccccaaagggaaccctggtcctgttggttttcctggtgaccctggcccccctggagaaggtggccctcggggccaggatggtgctaagggtgaccgaggcgaggatggtgagccaggacagcctggatcccctggtcccaccggggagaatggacccccagggccacttggaaagcgaggtcctgctggctcgcctggttccgaggggcgacaaggagggaagggagccaagggagatcctggcgctataggtgccccggggaagacaggcccggtgggtcctgcaggcccagcagggaaacctggccctgatggtctgagggggctcccaggctcagtgggtcagcaaggccgacctggagctacaggccaggctgggcccccaggtcctgtgggacccccagggctgcctggtctccggggcgatgctggagccaagggagagaagggccacccaggtctcattggactgattgggcccccgggtgagcagggagagaagggagatcggggacttcctgggcctcagggctcccctgggcagaagggtgagatgggtatcccaggagcatccggccccattggtcctggaggtccccccggcctccccggacctgctggccccaaaggagccaaaggagccacaggcccaggcggacccaagggagagaagggtgtgcagggccctccaggacacccgggtcccccaggcgaggtgatccagccactgcccattcagatgcccaagaagactcggcgctcggtggatggaagccgtctgatgcaggaagatgaggccataccgaccgggggagcccccggcagtcctggggggctggaggagatctttggctcactcgactccctgcgggaggagatcgagcagatgaggcggccaacagggacccaggacagccctgctcgcacctgccaggacctgaagctgtgccacccagagcttcccgatggagagtactgggtcgaccccaaccagggctgtgctcgggatgccttccgagttttctgcaacttcacagcagggggtgagacctgtgtgacgcctagggatgacgtcacgcagttctcttacgtggactcagagggctccccagtgggtgtggtccagctcaccttcctgcggctgctcagcgtctcagcccaccaggacgtctcctacccctgctctggagcagcccgtgacggtcccctgagactccgtggggccaatgaggatgagctgagcccggagactagcccctatgtcaaagaattcagagatggctgccagacacagcaaggccggacggtgctggaggtgcgaacgcctgtgctggagcagctgccagtgctggatgcctccttctcagacctgggagccccaccgaggcggggaggggtgctgctggggcctgtctgcttcatgggataggaccgtctctgtctgatcctgtccattcggaaccaggcccacctggaatcccacaacatcagctctgtgccacctcccaagagggctcctcactatctagggagccctgggccagggcgtggagagccctcagtcggggcaggccaggggaggggtgaagtggttgcctggacaccccacgggaggagtggcatctggggctcttggccctcccacctggagcctgttacccgttagagagctgagacccttatttaaaactcacctcccaatcaccccaaacaaatggaagagaagagaaaggacatggcgtattttgtatttaaaagtaattgtattaattatttaaagtgtggaaagcaaaataacaaaaaagagaaacgccaacaaaaatcagcagatgttgaagacaggggtctcgggggtgggctccggcacccacatcctggagtcaggactttcctcagtgactgtgtgtaggggggtttcagggctgaaccccacctccctcccaccttcctcccacctcacctgtcgcacccactgtgaaagttggaatatgtggtctccctggcctcagggctctgactctgccagggtggggctctctaacccacaggtgttggctgcctggcccatgtgcccactgtctcttccacttggtctgggtttggcaggcactgcctgctacttgagggccaggatgctcccccagggaagaaacggaatagtgtggggtgtgtgcagggctgcatcccgcagatggctggaatattaaaattcttctatattggctggtaaattgccatggccctgagccactgagtatgttcattgccacccctgtccctcccctgggcacccctcactttccctgatcctgcaattaaagggttaatgtgtggcatatggaagggactcccaggaccctgtgcccagcttccatgctgactgatggttaaataatgtgattgtctcctcccaggtgtctgtgtc

SEQ ID NO: 15233 - protein, 1650 aa, Homo sapiens
MERCSRCHRLLLLLPLVLGLSAAPGWAGAPPVDVLRALRFPSLPDGVRRAKGICPADVAYRVARPAQLSAPTRQLFPGGFPKDFSLLTVVRTRPGLQAPLLTLYSAQGVRQLGLELGRPVRFLYEDQTGRPQPPSQPVFRGLSLADGKWHRVAVAVKGQSVTLIVDCKKRVTRPLPRSARPVLDTHGVIIFGARILDEEVFEGDVQELAIVPGVQAAYESCEQKELECEGGQRERPQNQQPHRAQRSPQQQPSRLHRPQNQEPQSQDPTPGEEEEILESSLLPPLEEAAHGPRGLKGEKGEPAVLEPGMLVEGPPGPEGPAGLIGPPGIQGNPGPVGDPGERGPPGRAGLPGSDGAPGPPGTSLMLPFRFGSGGGDKGPVVAAQEAQAQAILQQARLALRGPPGPMGYTGRPGPLGQPGSPGLKGESGDLGPQGPRGPQGLTGPPGKAGRRGRAGADGARGMPGDPGVKGDRGFDGLPGLPGEKGHRGDTGAQGLPGPPGEDGERGDDGEIGPRGLPGESGPRGLLGPKGPPGIPGPPGVRGMDGPQGPKGSLGPQGEPGPPGQQGTPGTQGLPGPQGAIGPHGEKGPQGKPGLPGMPGSDGPPGHPGKEGPPGTKGNQGPSGPQGPLGYPGPRGVKGVDGIRGLKGHKGEKGEDGFPGFKGDIGVKGDRGEVGVPGSRGEDGPEGPKGRTGPTGDPGPPGLMGEKGKLGVPGLPGYPGRQGPKGSLGFPGFPGASGEKGARGLSGKSGPRGERGPTGPRGQRGPRGATGKSGAKGTSGGDGPHGPPGERGLPGPQGPNGFPGPKGPPGPPGKDGLPGHPGQRGEVGFQGKTGPPGPPGVVGPQGAAGETGPMGERGHPGPPGPPGEQGLPGTAGKEGTKGDPGPPGAPGKDGPAGLRGFPGERGLPGTAGGPGLKGNEGPSGPPGPAGSPGERGAAGSGGPIGPPGRPGPQGPPGAAGEKGVPGEKGPIGPTGRDGVQGPVGLPGPAGPPGVAGEDGDKGEVGDPGQKGTKGNKGEHGPPGPPGPIGPVGQPGAAGADGEPGARGPQGHFGAKGDEGTRGFNGPPGPIGLQGLPGPSGEKGETGDVGPMGPPGPPGPRGPAGPNGADGPQGPPGGVGNLGPPGEKGEPGESGSPGIQGEPGVKGPRGERGEKGESGQPGEPGPPGPKGPTGDDGPKGNPGPVGFPGDPGPPGEGGPRGQDGAKGDRGEDGEPGQPGSPGPTGENGPPGPLGKRGPAGSPGSEGRQGGKGAKGDPGAIGAPGKTGPVGPAGPAGKPGPDGLRGLPGSVGQQGRPGATGQAGPPGPVGPPGLPGLRGDAGAKGEKGHPGLIGLIGPPGEQGEKGDRGLPGPQGSPGQKGEMGIPGASGPIGPGGPPGLPGPAGPKGAKGATGPGGPKGEKGVQGPPGHPGPPGEVIQPLPIQMPKKTRRSVDGSRLMQEDEAIPTGGAPGSPGGLEEIFGSLDSLREEIEQMRRPTGTQDSPARTCQDLKLCHPELPDGEYWVDPNQGCARDAFRVFCNFTAGGETCVTPRDDVTQFSYVDSEGSPVGVVQLTFLRLLSVSAHQDVSYPCSGAARDGPLRLRGANEDELSPETSPYVKEFRDGCQTQQGRTVLEVRTPVLEQLPVLDASFSDLGAPPRRGGVLLGPVCFMG

SEQ ID NO: 15234 - DNA, 6114 bp, Homo sapiens
cacacagaagcggcagccaccgaggagggagcagtgccgggagccccgacggcgccttgctgcatggagctgggccgctgacagctgtcgctgcccgcagcctctgacctccctgggaccccggcgtctgaggctcatagtctgctccctgtcttctgtcagcctcagggcatccagcgtctcaggccgacctgggtccctgggacccggcgtttcggcttctcagccatggagcggtgcagccgctgccatcgcctcctcctcctcctacctctggtgctggggctgagcgcggccccaggctgggcaggtgcaccccctgtggatgtgctccgggccctgaggttcccctccctccctgatggtgtccggagagcgaaaggcatctgtccagctgatgtggcctaccgagtggcacgacctgcccagctcagtgcacccactcgccagcttttcccaggaggatttcccaaagatttctctctgctgactgttgtccggacccgccctggtctccaagctcccctcctgactctctacagtgcccagggtgtccgacagctgggcctggagctgggccgacctgtccgcttcctgtatgaagaccagactgggcggcctcaacctccctctcagccagtcttccgaggcctcagcctagcagatggcaagtggcaccgtgtggctgtggctgtgaagggccagtctgtcaccctcattgttgactgcaagaagcgagtcacccggcctctcccccgaagtgctcgtccagtattggacacccatggagtgatcatctttggtgcccgtattctggatgaagaagtctttgagggtgatgtccaggagctggccattgtcccaggggtccaggcagcctatgaatcatgtgaacagaaggagctggaatgcgaggggggccagagggaaagaccccaaaaccaacagcctcacagagcccagagatctccacagcagcaaccatcaagacttcacaggccacaaaatcaggaaccccagagccaggctgcccatggaccccgagggctgaagggagagaaaggagagcctgcagtgttggaacctggtatgctcgtggaggggccccctggcccagaaggccctgcgggattgattggtccccctggcatccaggggaacccaggcccagttggagaccctggagagaggggcccccctggccgagcagggctccctggatcagatggggctcctggtcctcctggcacatctctcatgctcccattccggtttggcagtggtgggggtgacaagggccctgtggtggcggcccaggaggctcaggcccaggcgatcctgcagcaggcgaggctggcgctccgtggaccccctggccccatgggatacacagggcgccctggacccttgggccaacctgggagccctggcctgaaaggagagtctggagacttaggacctcagggccccagaggacctcagggcctcacaggccctcctggcaaggctgggcgaaggggccgggcaggtgctgatggagcccgagggatgcctggagatcctggagtgaagggtgaccgaggttttgatggactcccagggctccctggagagaagggccataggggtgatactggtgcccagggccttcctggtccccctggtgaggatggagagaggggagatgacggggagattgggcctcgagggctgcctggagagtcgggacctcgaggtctccttggccccaaaggcccacctggtattcctggaccccctggcgtccgaggcatggatggtccccagggccccaaagggagcttgggaccccagggagagccaggacctcctggacaacagggcacccctgggacccagggtcttcccgggccccagggtgccatcggccctcatggagagaagggtcctcaagggaagccagggctccccggcatgcctggctcagacggacccccgggtcacccagggaaggaaggtccccctggaaccaaaggaaaccagggtccctctggacctcagggacctctaggatacccaggacctcgaggggtcaagggtgtggacggaattcggggtctgaagggtcataagggtgagaagggtgaggatggctttcctgggttcaaaggtgacataggcgtgaaaggtgacaggggcgaagttggagtccctggttccaggggagaggatggtcctgaggggccaaagggacgcactggaccgactggagaccctgggcccccagggctcatgggcgagaagggcaagctgggtgttcctggtctgcctggctatcctggacgtcagggacccaaggggtccctaggatttcctggctttcctggtgccagtggagagaagggagcccggggcctgtcggggaagtcagggcctcggggagaacggggccccacgggtccacggggtcagcggggaccccgaggtgccactgggaagtctggagctaagggaacatctggtggtgatggcccccatgggccccctggagagaggggcctccctggacctcagggtcccaacgggtttcctggaccgaaaggacccccgggcccccctgggaaggatgggctgccgggacacccaggccaaagaggagaagtgggtttccaagggaagaccggcccccctggtcctccaggagtggtgggacctcagggagcagcaggagaaaccggccctatgggggagagaggtcacccaggccccccggggccccctggagagcagggactacctgggacagctggaaaagaaggaacaaagggtgaccctggtccccctggggccccagggaaggatggtcctgctggtctgaggggattcccaggagagagaggcctcccaggcactgctggtggacctggtttgaaggggaatgaaggtccgtctggcccccctggccctgcaggctcccctggggaacgaggtgcagcaggatcagggggacccattggtccgccagggcgcccaggcccgcagggtccccctggagcagcaggagagaaaggtgtcccaggtgagaagggccccattggcccgactggccgagatggagtgcagggtcctgtggggcttcctggtcctgctgggcctccaggtgtggctggagaggatggagacaagggtgaggtgggggaccccggacagaagggcaccaaagggaacaagggtgaacatggccctcctggaccccctggacccattggtcctgtggggcagcctggagcagcgggagcagatggggagcccggagctcggggaccccagggacactttggagccaaaggtgatgaaggaacaagaggattcaatgggcccccaggacccattggcctacagggtttgccaggcccctctggggagaagggagaaacaggagatgtgggtcctatgggaccacctggccccccaggacctcgaggtccagctggacccaatggcgctgatggcccacaaggtcccccaggaggtgttgggaacctgggtccccctggagagaagggggaaccaggagagtcaggatctccagggatccagggcgagccaggtgtcaagggtccacgcggggaacgtggagagaaaggagagtcggggcagccaggagagccagggccaccagggcctaaaggccccacaggcgatgatggccccaaagggaaccctggtcctgttggttttcctggtgaccctggcccccctggagaaggtggccctcggggccaggatggtgctaagggtgaccgaggcgaggatggtgagccaggacagcctggatcccctggtcccaccggggagaatggacccccagggccacttggaaagcgaggtcctgctggctcgcctggttccgaggggcgacaaggagggaagggagccaagggagatcctggcgctataggtgccccggggaagacaggcccggtgggtcctgcaggcccagcagggaaacctggccctgatggtctgagggggctcccaggctcagtgggtcagcaaggccgacctggagctacaggccaggctgggcccccaggtcctgtgggacccccagggctgcctggtctccggggcgatgctggagccaagggagagaagggccacccaggtctcattggactgattgggcccccgggtgagcagggagagaagggagatcggggacttcctgggcctcagggctcccctgggcagaagggtgagatgggtatcccaggagcatccggccccattggtcctggaggtccccccggcctccccggacctgctggccccaaaggagccaaaggagccacaggcccaggcggacccaagggagagaagggtgtgcagggccctccaggacacccgggtcccccaggcgaggtgatccagccactgcccattcagatgcccaagaagactcggcgctcggtggatggaagccgtctgatgcaggaagatgaggccataccgaccgggggagcccccggcagtcctggggggctggaggagatctttggctcactcgactccctgcgggaggagatcgagcagatgaggcggccaacagggacccaggacagccctgctcgcacctgccaggacctgaagctgtgccacccagagcttcccgatggagagtactgggtcgaccccaaccagggctgtgctcgggatgccttccgagttttctgcaacttcacagcagggggtgagacctgtgtgacgcctagggatgacgtcacgcagttctcttacgtggactcagagggctccccagtgggtgtggtccagctcaccttcctgcggctgctcagcgtctcagcccaccaggacgtctcctacccctgctctggagcagcccgtgacggtcccctgagactccgtggggccaatgaggatgagctgagcccggagactagcccctatgtcaaagaattcagagatggctgccagacacagcaaggccggacggtgctggaggtgcgaacgcctgtgctggagcagctgccagtgctggatgcctccttctcagacctgggagccccaccgaggcggggaggggtgctgctggggcctgtctgcttcatgggataggaccgtctctgtctgatcctgtccattcggaaccaggcccacctggaatcccacaacatcagctctgtgccacctcccaagagggctcctcactatctagggagccctgggccagggcgtggagagccctcagtcggggcaggccaggggaggggtgaagtggttgcctggacaccccacgggaggagtggcatctggggctcttggccctcccacctggagcctgttacccgttagagagctgagacccttatttaaaactcacctcccaatcaccccaaacaaatggaagagaagagaaaggacatggcgtattttgtatttaaaagtaattgtattaattatttaaagtgtggaaagcaaaataacaaaaaagagaaacgccaacaaaaatcagcagatgttgaagacaggggtctcgggggtgggctccggcacccacatcctggagtcaggactttcctcagtgactgtgtgtaggggggtttcagggctgaaccccacctccctcccaccttcctcccacctcacctgtcgcacccactgtgaaagttggaatatgtggtctccctggcctcagggctctgactctgccagggtggggctctctaacccacaggtgttggctgcctggcccatgtgcccactgtctcttccacttggtctgggtttggcaggcactgcctgctacttgagggccaggatgctcccccagggaagaaacggaatagtgtggggtgtgtgcagggctgcatcccgcagatggctggaatattaaaattcttctatattggctggtaaattgccatggccctgagccactgagtatgttcattgccacccctgtccctcccctgggcacccctcactttccctgatcctgcaattaaagggttaatgtgtggcatatggaagggactcccaggaccctgtgcccagcttccatgctgactgatggttaaataatgtgattgtctcctcccaggtgtctgtgtc

SEQ ID NO: 15235 - protein, 1629 aa, Homo sapiens
MERCSRCHRLLLLLPLVLGLSAAPGWAGAPPVDVLRALRFPSLPDGVRRAKGICPADVAYRVARPAQLSAPTRQLFPGGFPKDFSLLTVVRTRPGLQAPLLTLYSAQGVRQLGLELGRPVRFLYEDQTGRPQPPSQPVFRGLSLADGKWHRVAVAVKGQSVTLIVDCKKRVTRPLPRSARPVLDTHGVIIFGARILDEEVFEGDVQELAIVPGVQAAYESCEQKELECEGGQRERPQNQQPHRAQRSPQQQPSRLHRPQNQEPQSQAAHGPRGLKGEKGEPAVLEPGMLVEGPPGPEGPAGLIGPPGIQGNPGPVGDPGERGPPGRAGLPGSDGAPGPPGTSLMLPFRFGSGGGDKGPVVAAQEAQAQAILQQARLALRGPPGPMGYTGRPGPLGQPGSPGLKGESGDLGPQGPRGPQGLTGPPGKAGRRGRAGADGARGMPGDPGVKGDRGFDGLPGLPGEKGHRGDTGAQGLPGPPGEDGERGDDGEIGPRGLPGESGPRGLLGPKGPPGIPGPPGVRGMDGPQGPKGSLGPQGEPGPPGQQGTPGTQGLPGPQGAIGPHGEKGPQGKPGLPGMPGSDGPPGHPGKEGPPGTKGNQGPSGPQGPLGYPGPRGVKGVDGIRGLKGHKGEKGEDGFPGFKGDIGVKGDRGEVGVPGSRGEDGPEGPKGRTGPTGDPGPPGLMGEKGKLGVPGLPGYPGRQGPKGSLGFPGFPGASGEKGARGLSGKSGPRGERGPTGPRGQRGPRGATGKSGAKGTSGGDGPHGPPGERGLPGPQGPNGFPGPKGPPGPPGKDGLPGHPGQRGEVGFQGKTGPPGPPGVVGPQGAAGETGPMGERGHPGPPGPPGEQGLPGTAGKEGTKGDPGPPGAPGKDGPAGLRGFPGERGLPGTAGGPGLKGNEGPSGPPGPAGSPGERGAAGSGGPIGPPGRPGPQGPPGAAGEKGVPGEKGPIGPTGRDGVQGPVGLPGPAGPPGVAGEDGDKGEVGDPGQKGTKGNKGEHGPPGPPGPIGPVGQPGAAGADGEPGARGPQGHFGAKGDEGTRGFNGPPGPIGLQGLPGPSGEKGETGDVGPMGPPGPPGPRGPAGPNGADGPQGPPGGVGNLGPPGEKGEPGESGSPGIQGEPGVKGPRGERGEKGESGQPGEPGPPGPKGPTGDDGPKGNPGPVGFPGDPGPPGEGGPRGQDGAKGDRGEDGEPGQPGSPGPTGENGPPGPLGKRGPAGSPGSEGRQGGKGAKGDPGAIGAPGKTGPVGPAGPAGKPGPDGLRGLPGSVGQQGRPGATGQAGPPGPVGPPGLPGLRGDAGAKGEKGHPGLIGLIGPPGEQGEKGDRGLPGPQGSPGQKGEMGIPGASGPIGPGGPPGLPGPAGPKGAKGATGPGGPKGEKGVQGPPGHPGPPGEVIQPLPIQMPKKTRRSVDGSRLMQEDEAIPTGGAPGSPGGLEEIFGSLDSLREEIEQMRRPTGTQDSPARTCQDLKLCHPELPDGEYWVDPNQGCARDAFRVFCNFTAGGETCVTPRDDVTQFSYVDSEGSPVGVVQLTFLRLLSVSAHQDVSYPCSGAARDGPLRLRGANEDELSPETSPYVKEFRDGCQTQQGRTVLEVRTPVLEQLPVLDASFSDLGAPPRRGGVLLGPVCFMG

SEQ ID NO: 15236 - DNA, 1193 bp, Homo sapiens
agccaccgaggagggagcagtgccgggagccccgacggcgccttgctgcatggagctgggccgctgacagctgtcgctgcccgcagcctctgacctccctgggaccccggcgtctgaggctcatagtctgctccctgtcttctgtcagcctcagggcatccagcgtctcaggccgacctgggtccctgggacccggcgtttcggcttctcagccatggagcggtgcagccgctgccatcgcctcctcctcctcctacctctggtgctggggctgagcgcggccccaggctgggcaggtgcaccccctgtggatgtgctccgggccctgaggttcccctccctccctgatggtgtccggagagcgaaaggcatctgtccagctgatgtggcctaccgagtggcacgacctgcccagctcagtgcacccactcgccagcttttcccaggaggatttcccaaagatttctctctgctgactgttgtccggacccgccctggtctccaagctcccctcctgactctctacagtgcccagggtgtccgacagctgggcctggagctgggccgacctgtccgcttcctgtatgaagaccagactgggcggcctcaacctccctctcagccagtcttccgaggcctcagcctagcagatggcaagtggcaccgtgtggctgtggctgtgaagggccagtctgtcaccctcattgttgactgcaagaagcgagtcacccggcctctcccccgaagtgctcgtccagtattggacacccatggagtgatcatctttggtgcccgtattctggatgaagaagtctttgagggtgatgtccaggagctggccattgtcccaggggtccaggcagcctatgaatcatgtgaacagaaggagctggaatgcgaggggggccagagggaaagaccccaaaaccaacagcctcacagagcccagagatctccacagcagcaaccatcaagacttcacaggccacaaaatcaggaaccccagagccaggtgagggagctgggagaacccccaagtgcagcacaccccagagagggaagacacccaggcatctctcctccttagttgtcctccccaccctcatctccctattcccatcaccccctcctcctagtcctcattcatcagcctttttattttcatctaaaaataaaaagagttgttatgaaga

SEQ ID NO: 15237 - protein, 290 aa, Homo sapiens
MERCSRCHRLLLLLPLVLGLSAAPGWAGAPPVDVLRALRFPSLPDGVRRAKGICPADVAYRVARPAQLSAPTRQLFPGGFPKDFSLLTVVRTRPGLQAPLLTLYSAQGVRQLGLELGRPVRFLYEDQTGRPQPPSQPVFRGLSLADGKWHRVAVAVKGQSVTLIVDCKKRVTRPLPRSARPVLDTHGVIIFGARILDEEVFEGDVQELAIVPGVQAAYESCEQKELECEGGQRERPQNQQPHRAQRSPQQQPSRLHRPQNQEPQSQVRELGEPPSAAHPREGRHPGISPP

SEQ ID NO: 15238 - DNA, 2897 bp, Homo sapiens
ccgagacttcccgtctgtacaaagatggctgccacattggcgctgtcattttggtactgagcagagcgacgggcttaattcgacccaatccaggccagagtctttctctcaggggcttcctcgtgctcagctaatcctccgatcaatccttgggaatccctgggacctcttcggtatccctactctcagccagggatcatgtcttgggccgctcgcccgcccttcctccctcagcggcatgccgcagggcagtgtgggccggtgggggtgcgaaaagaaatgcattgtggggtcgcgtcccggtggcggcggcgacggccctggctggatcccgcagcggcggcggcggcggcggtggcaggcggagaacaacaaaccccggagccggagccaggggaggctggacgggacgggatgggcgacagcgggcgggactcccgaagcccagacagctcctccccaaatccccttccccagggagtccctcccccttctcctcctgggccacccctacccccttcaacagctccatcccttggaggctctggggccccacccccacccccgatgccaccacccccactgggctctccctttccagtcatcagttcttccatggggtcccctggtctgccccctccagctcccccaggattctccgggcctgtcagcagcccccagattaactcaacagtgtcactccctgggggtgggtctggcccccctgaagatgtgaagccaccagtcttaggggtccggggcctgcactgtccaccccctccaggtggccctggggctggcaaacggctatgtgcaatctgcggggacagaagctcaggcaaacactacggggtttacagctgtgagggttgcaagggcttcttcaaacgcaccatccgcaaagaccttacatactcttgccgggacaacaaagactgcacagtggacaagcgccagcggaaccgctgtcagtactgccgctatcagaagtgcctggccactggcatgaagagggaggcggtacaggaggagcgtcagcggggaaaggacaaggatggggatggggagggggctgggggagcccccgaggagatgcctgtggacaggatcctggaggcagagcttgctgtggaacagaagagtgaccagggcgttgagggtcctgggggaaccgggggtagcggcagcagcccaaatgaccctgtgactaacatctgtcaggcagctgacaaacagctattcacgcttgttgagtgggcgaagaggatcccacacttttcctccttgcctctggatgatcaggtcatattgctgcgggcaggctggaatgaactcctcattgcctccttctcacaccgatccattgatgttcgagatggcatcctccttgccacaggtcttcacgtgcaccgcaactcagcccattcagcaggagtaggagccatctttgatcgggtgctgacagagctagtgtccaaaatgcgtgacatgaggatggacaagacagagcttggctgcctgagggcaatcattctgtttaatccagatgccaagggcctctccaaccctagtgaggtggaggtcctgcgggagaaagtgtatgcatcactggagacctactgcaaacagaagtaccctgagcagcagggacggtttgccaagctgctgctacgtcttcctgccctccggtccattggccttaagtgtctagagcatctgtttttcttcaagctcattggtgacacccccatcgacaccttcctcatggagatgcttgaggctccccatcaactggcctgagctcagacccagacgtggtgcttctcacactggaggagcacacatccaagagggactccaagccctggggcagggtggggggccatgttcccagaaccttgatggggtgagaagtacagggcagaaccaagaacataaaccctccaagggatctgcttgatatcccaagttggaagggaccccagatacctgtgaggactggttgtctctcttcggtggccttgagtctctgaatttgtcgggttctcccatgatttggggtgatttctcaccctctgtccttcccccagcacaaagcactggccttgcctccaggaccttgcttccttctcatcttgcctcattttgcttcccatctgaagagtggaaatggggaactcccccagaggtggatactggggggcaggcctcccaagctgatggacatgagagtagggccctgacaggccttcctcctctcaaacctggcagatgggggcctctctggaagagggaggggccctgtcactgtccagagtctctttttacacttcacctccttctgcagtcagactgaaatataaaaaaggtggtggtggtggtgaaggggctggtggagatgtaggaaccgatctgctatttttaatttcctgtgaggatagagacttgcagttagactcaaagaagtactgtactttcccaggttgactaagaaatgccagtggtggaggtgggtgtttgggaaaggcagggccctgaaatggcctgtccctagggctctccaagcactagccttcccagcttcccgccgccccccctatctcttcctgtctaacttggggaaggggcctgggctgtgaggacagggcccccacaggggatggtttcacgagtgtagtcccggaggccttccctttacagctctcctccagccctgggcacatagcataggctggggacacaggatcctggcctgagaattgaggggaggtggccagcccgcagaggtggggtgctggggctgcatgatttttgccctgcgtcccttctctttggggctcctttcccctctcatacataaaatcgctttcaaattaaaatcgctgttttctggactg

SEQ ID NO: 15239 - protein, 533 aa, Homo sapiens; identical to SEQ ID NO: 1706

SEQ ID NO: 15240 - DNA, 1485 bp, Homo sapiens
ttggggttgtgctccagggatggcctttcacatagactgcagtgtaaatgacagcctctggaatgtgcattgcagggccttgcttagtggtagggaatgatttccatcacttctgtgacattctgcttcccaataagtcttcctgtgacttccctatttcccccatcccagattaactcaacagtgtcactccctgggggtgggtctggcccccctgaagatgtgaagccaccagtcttaggggtccggggcctgcactgtccaccccctccaggtggccctggggctggcaaacggctatgtgcaatctgcggggacagaagctcaggcaaacactacggggtttacagctgtgagggttgcaagggcttcttcaaacgcaccatccgcaaagaccttacatactcttgccgggacaacaaagactgcacagtggacaagcgccagcggaaccgctgtcagtactgccgctatcagaagtgcctggccactggcatgaagagggaggcggtacaggaggagcgtcagcggggaaaggacaaggatggggatggggagggggctgggggagcccccgaggagatgcctgtggacaggatcctggaggcagagcttgctgtggaacagaagagtgaccagggcgttgagggtcctgggggaaccgggggtagcggcagcagcgtgagtgttggggtcaatccactctccttcgtgatgggggttgggggaggcagtctaggtctgttctacatcccctccccctcctttcccctcataaccttcctaacactacttgggactggaggtgctgccaaacaaggtctttcaaacatctgaggtggatgtgatagctccttctgtctccactccccaaacaacccactggcagaaccataggcatgtcccaaataaataattgtttgcactaatgccagaagagaagactcacttacagggattggtttggatggggctcacaggaagactatatgtaaggagggggtgtcaaaagcctcttacaagggggctcccagcatatctcaaaatcttccataactcttacccccgtcccctgcagccaaatgaccctgtgactaacatctgtcaggcagctgacaaacagctattcacgcttgttgagtgggcgaagaggatcccacacttttcctccttgcctctggatgatcaggtcatattgctgcgggcaggtcagtgaccttggatccctttgacttcttgacatttgacccctctttgacttcccgatctttagtgaccccagtggccttaccttgcgtacccagggagccaaacttgctgacctcgccacctcttttctccttctcttccactgatgtgctttgaatcccttggcctgatttctggctcctgacccttgctgccccacccaggctggaatgaactcctcattgcctccttctcacaccgatccattgatgttcgagatggcatcctccttgccac

SEQ ID NO: 15241 - protein, 246 aa, Homo sapiens [sequence omitted]

SEQ ID NO: 15242 - DNA, 2152 bp, Homo sapiens
atattggtaaaggcattagggcgaaggtggaacggaacttcctgttctcgcgggatctaaaggcgggactgccacgtccaagcaaaccgggaaaggagaggatcccggagccgcgtgatggccagaggcctgggggccccccactgggtggccgtgggactgctgacctgggcgaccttggggcttctggtggctggactcgggggtcatgacgacctgcacgacgatctgcaagaggacttccatggccacagccacaggcactcacatgaagatttccaccatggccacagccatgcccatggccatggccacactcacgagagcatctggcatggacatacccacgatcacgaccatggacattcacatgaggatttacaccatggccatagccatggctactcccatgagagcctctaccacagaggacatggacatgaccatgagcatagccatggaggctatggggagtctggggctccaggcatcaagcaggacctggatgctgtcactctctgggcttatgcactgggggccacagtgctgatctcagcagctccattttttgtcctcttccttatccccgtggagtcgaactctccccggcatcgctctctacttcagatcttgctcagttttgcttccggtgggctcctgggagatgctttcctgcacctcattcctcatgctcttgaacctcattctcaccacactctggagcaacccggacatggacactcccacagtggccagggccccattctgtctgtgggactgtgggttctcagtggaattgttgcctttcttgtcgtggagaaatttgtgagacatgtgaaaggaggacatggtcacagtcatggacatggacacgctcacagtcatacacgtggaagtcatggacatggaagacaagagcgttctaccaaggagaagcagagctcagaggaagaagaaaaggaaacaagaggggttcagaagaggcgaggagggagcacagtacccaaagatgggccagtgagacctcagaacgctgaagaagaaaaaagaggcttagacctgcgtgtgtcggggtacctgaatctggctgctgacttggcacacaacttcactgatggtctggccattggggcttcctttcgagggggccggggactagggatcctgaccacaatgactgtcctgctacatgaagtgccccacgaggtcggagactttgccatcttggtccagtctggctgcagcaaaaagcaggcgatgcgtctgcaactactgacagcagtaggggcactggcaggcacagcctgtgcccttctcactgaaggaggagcagtgggcagtgaaattgcaggtggtgcaggtcctggctgggtcctgccatttactgcaggtggctttatctacgtagcaacagtgtctgtgttgcccgagctgctgagggaggcatcaccattgcaatcacttctggaggtgctggggctgctggggggagttatcatgatggtgctgattgcccaccttgagtgaggggtggataaactacccctgccccaaacctctacccctaactccaggtcaggggtgcgtagaggttgggggccctggccagggacatctgccaaaggaaggaactgtagcctgggagaatggttactttggcattagggccttcaagggctggcagtcttacagaggctggagcggtgagaatgagaggccagagggaccatagtgttgggcactgtctgaccatgttgcatttggaaggctaaatggggccatgaagaaggctggaagggacagggggtgatggcagcctacctggtgtcccctaccccacctgttctcggagaaccaagttgctacacaggaagttctccaaggtccagtttcctttctcccaccagttggtggaggcttcagggaagaccagagtcctggacagagagggtaacaggaggagtcggggataaacatcaaacatcaatcgtgtgtcctgatttgggagtgattggggggatggggtgggagagggttagttggtattctcatggcctgattttttttgtttctattccttttatatcactgtgtttgaatcgagggggaggggtggtaaccggaaataaagacctccgatcttccgccccac

SEQ ID NO: 15243 - protein, 469 aa, Homo sapiens
MARGLGAPHWVAVGLLTWATLGLLVAGLGGHDDLHDDLQEDFHGHSHRHSHEDFHHGHSHAHGHGHTHESIWHGHTHDHDHGHSHEDLHHGHSHGYSHESLYHRGHGHDHEHSHGGYGESGAPGIKQDLDAVTLWAYALGATVLISAAPFFVLFLIPVESNSPRHRSLLQILLSFASGGLLGDAFLHLIPHALEPHSHHTLEQPGHGHSHSGQGPILSVGLWVLSGIVAFLVVEKFVRHVKGGHGHSHGHGHAHSHTRGSHGHGRQERSTKEKQSSEEEEKETRGVQKRRGGSTVPKDGPVRPQNAEEEKRGLDLRVSGYLNLAADLAHNFTDGLAIGASFRGGRGLGILTTMTVLLHEVPHEVGDFAILVQSGCSKKQAMRLQLLTAVGALAGTACALLTEGGAVGSEIAGGAGPGWVLPFTAGGFIYVATVSVLPELLREASPLQSLLEVLGLLGGVIMMVLIAHLE

SEQ ID NO: 15244 - DNA, 2408 bp, Homo sapiens
tcgcgggatctaaaggcgggactgccacgtccaagcaaaccgggaaaggagaggatcccggagccggtgagaattctctgttttttctctaccatcctttccaggccttttcctcacctaatgagtcgtagagacgagggcccagagagtctgtaaagtggctggtgaaagattagtgtcccagggccctacatccgggaggtggttcgggataaagagaactagtcttgggaacaatgtaggtgggaacttaagggaatgggagagcggcccatagaggtggacggagggcgcgattggagtaaagcggaccctgtgtaggtatagagttgagtcaagtggagtcactgcctctgtccctctggtcagcgtgatggccagaggcctgggggccccccactgggtggccgtgggactgctgacctgggcgaccttggggcttctggtggctggactcgggggtcatgacgacctgcacgacgatctgcaagaggacttccatggccacagccacaggcactcacatgaagatttccaccatggccacagccatgcccatggccatggccacactcacgagagcatctggcatggacatacccacgatcacgaccatggacattcacatgaggatttacaccatggccatagccatggctactcccatgagagcctctaccacagaggacatggacatgaccatgagcatagccatggaggctatggggagtctggggctccaggcatcaagcaggacctggatgctgtcactctctgggcttatgcactgggggccacagtgctgatctcagcagctccattttttgtcctcttccttatccccgtggagtcgaactctccccggcatcgctctctacttcagatcttgctcagttttgcttccggtgggctcctgggagatgctttcctgcacctcattcctcatgctcttgaacctcattctcaccacactctggagcaacccggacatggacactcccacagtggccagggccccattctgtctgtgggactgtgggttctcagtggaattgttgcctttcttgtcgtggagaaatttgtgagacatgtgaaaggaggacatggtcacagtcatggacatggacacgctcacagtcatacacgtggaagtcatggacatggaagacaagagcgttctaccaaggagaagcagagctcagaggaagaagaaaaggaaacaagaggggttcagaagaggcgaggagggagcacagtacccaaagatgggccagtgagacctcagaacgctgaagaagaaaaaagaggcttagacctgcgtgtgtcggggtacctgaatctggctgctgacttggcacacaacttcactgatggtctggccattggggcttcctttcgagggggccggggactagggatcctgaccacaatgactgtcctgctacatgaagtgccccacgaggtcggagactttgccatcttggtccagtctggctgcagcaaaaagcaggcgatgcgtctgcaactactgacagcagtaggggcactggcaggcacagcctgtgcccttctcactgaaggaggagcagtgggcagtgaaattgcaggtggtgcaggtcctggctgggtcctgccatttactgcaggtggctttatctacgtagcaacagtgtctgtgttgcccgagctgctgagggaggcatcaccattgcaatcacttctggaggtgctggggctgctggggggagttatcatgatggtgctgattgcccaccttgagtgaggggtggataaactacccctgccccaaacctctacccctaactccaggtcaggggtgcgtagaggttgggggccctggccagggacatctgccaaaggaaggaactgtagcctgggagaatggttactttggcattagggccttcaagggctggcagtcttacagaggctggagcggtgagaatgagaggccagagggaccatagtgttgggcactgtctgaccatgttgcatttggaaggctaaatggggccatgaagaaggctggaagggacagggggtgatggcagcctacctggtgtcccctaccccacctgttctcggagaaccaagttgctacacaggaagttctccaaggtccagtttcctttctcccaccagttggtggaggcttcagggaagaccagagtcctggacagagagggtaacaggaggagtcggggataaacatcaaacatcaatcgtgtgtcctgatttgggagtgattggggggatggggtgggagagggttagttggtattctcatggcctgattttttttgtttctattccttttatatcactgtgtttgaatcgagggggaggggtggtaaccggaaataaagacctccgatcttccgccccac

SEQ ID NO: 15245 - protein, 469 aa, Homo sapiens; identical to SEQ ID NO: 15243

SEQ ID NO: 15246 - DNA, 2739 bp, Homo sapiens
tcgcgggatctaaaggcgggactgccacgtccaagcaaaccgggaaaggagaggatcccggagccggtgagaattctctgttttttctctaccatcctttccaggccttttcctcacctaatgagtcgtagagacgagggcccagagagtctgtaaagtggctggtgaaagattagtgtcccagggccctacatccgggaggtggttcgggataaagagaactagtcttgggaacaatgtaggtgggaacttaagggaatgggagagcggcccatagaggtggacggagggcgcgattggagtaaagcggaccctgtgtaggtatagagttgagtcaagtggagtcactgcctctgtccctctggtcagcgtgatggccagaggcctgggggccccccactgggtggccgtgggactgctgacctgggcgaccttggggcttctggtggctggactcgggggtcatgacgacctgcacgacgatctgcaagaggacttccatggccacagccacaggcactcacatgaagatttccaccatggccacagccatgcccatggccatggccacactcacgagagcatctggcatggacatacccacgatcacgaccatggacattcacatgaggatttacaccatggccatagccatggctactcccatgagagcctctaccacagaggacatggacatgaccatgagcatagccatggaggctatggggagtctggggctccaggcatcaagcaggacctggatgctgtcactctctgggcttatgcactgggggccacagtgctgatctcagcagctccattttttgtcctcttccttatccccgtggagtcgaactctccccggcatcgctctctacttcagatcttgctcagttttgcttccggtgggctcctgggagatgctttcctgcacctcattcctcatgctcttgaacctcattctcaccacactctggagcaacccggacatggacactcccacagtggccagggccccattctgtctgtgggactgtgggttctcagtggaattgttgcctttcttgtcgtggagaaatttgtgagacatgtgaaaggaggacatggtcacagtcatggacatggacacgctcacagtcatacacgtggaagtcatggacatggaagacaagagcgttctaccaaggagaagcagagctcagaggaagaagaaaaggaaacaagaggggttcagaagaggcgaggagggagcacagtacccaaagatgggccagtgagacctcagaacgctgaagaagaaaaaagaggcttagacctgcgtgtgtcggggtacctgaatctggctgctgacttggcacacaacttcactgatggtctggccattggggcttcctttcgagggggccggggactagggatcctgaccacaatgactgtcctgctacatgaagtgccccacgaggtcggagactttgccatcttggtccagtctggctgcagcaaaaagcaggcgatgcgtctgcaactactgacagcagtaggggcactggcaggcacagcctgtgcccttctcactgaaggaggagcagtgggcagtgaaattgcaggtggtgcaggtcctggctgggtcctgccatttactgcaggtggctttatctacgtagcaacagtgtctgtgttgcccgagctgctgagggaggcatcaccattgcaatcacttctggaggtgctggggctgctggggggagttatcatgatggtgctgattgcccaccttgagtgaggggtggataaactacccctgccccaaacctctacccctaactccaggtcaggggtgcgtagaggttgggggccctggccagggacatctgccaaaggaaggaactgtagcctgggagaatggttactttggcattagggccttcaagggctggcagtcttacagaggctggagcggtgagaatgagaggccagagggaccatagtgttgggcactgtctgaccatgttgcatttggaaggctaaatggggccatgaagaaggctggaagggacagggggtgatggcagcctacctggtgtcccctaccccacctgttctcggagaaccaagttgctacacaggaagttctccaaggtccagtttcctttctcccaccagttggtggaggcttcagggaagaccagagtcctggacagagagggtaacaggaggagtcggggataaacatcaaacatcaatcgtgtgtcctgatttgggagtgattggggggatggggtgggagagggttagttggtattctcatggcctgattttttttgtttctattccttttatatcactgtgtttgaatcgagggggaggggtggtaaccggaaataaagacctccgatcttccgccccacatgcagtctttgtctttttggggggaatggggccccttgtcttctccacacccggggcccctaagcagcagtgtcgggccacgccccctcggtgggaggtcggcctgcgctggtggccgcagatggcctaaggctggcgggcctttgattggccccggctttgcccttgccacgcccctctgcgctgggattggcttagtgctgggattcccacccacccacagcccgccatggcgtctcagctccagaaccgactccgctccgcactggccttggtcacaggttgagggggttctttccccgggcggtttggggtattggagtgaggtca

SEQ ID NO: 15247 - protein, 469 aa, Homo sapiens; identical to SEQ ID NO: 15243

SEQ ID NO: 15248 - DNA, 760 bp, Homo sapiens
cgggatctaaaggcgggactgccacgtccaagcaaaccgggaaaggagaggatcccggagccggtgagaattctctgttttttctctaccatcctttccaggccttttcctcacctaatgagtcgtagagacgagggcccagagagtctgtaaagtggctggtgaaagattagtgtcccagggccctacatccgggaggtggttcgggataaagagaactagtcttgggaacaatgtaggtgggaacttaagggaatgggagagcggcccatagaggtggacggagggcgcgattggagtaaagcggaccctgtgtaggtatagagttgagtcaagtggagtcactgcctctgtccctctggtcagcgtgatggccagaggcctgggggccccccactgggtggccgtgggactgctgacctgggcgaccttggggcttctggtggctggactcgggggtcatgacgacctgcacgacgatctgcaagaggacttccatggccacagccacaggcactcacatgaagatttccaccatggccacagccatgcccatggccatggccacactcacgagagcatctggcatggacatacccacgatcacgaccatggacattcacatgaggatttacaccatggccatagccatggctactcccatgagagcctctaccacagatgctgatctcagcagctccattttttgtcctcttccttatccccgtggagtcgaactctccccggcatcgctctctac

SEQ ID NO: 15249 - protein, 105 aa, Homo sapiens
MARGLGAPHWVAVGLLTWATLGLLVAGLGGHDDLHDDLQEDFHGHSHRHSHEDFHHGHSHAHGHGHTHESIWHGHTHDHDHGHSHEDLHHGHSHGYSHESLYHRC

SEQ ID NO: 15250 - DNA, 997 bp, Homo sapiens
cgggatctaaaggcgggactgccacgtccaagcaaaccgggaaaggagaggatcccggagccggtgagaattctctgttttttctctaccatcctttccaggccttttcctcacctaatgagtcgtagagacgagggcccagagagtctgtaaagtggctggtgaaagattagtgtcccagggccctacatccgggaggtggttcgggataaagagaactagtcttgggaacaatgtaggtgggaacttaagggaatgggagagcggcccatagaggtggacggagggcgcgattggagtaaagcggaccctgtgtaggtatagagttgagtcaagtggagtcactgcctctgtccctctggtcagcgtgatggccagaggcctgggggccccccactgggtggccgtgggactgctgacctgggcgaccttggggcttctggtggctggactcgggggtcatgacgacctgcacgacgatctgcaagaggacttccatggccacagccacaggcactcacatgaagatttccaccatggccacagccatgcccatggccatggccacactcacgagagcatctggcatggacatacccacgatcacgaccatggacattcacatgaggatttacaccatggccatagccatggctactcccatgagagcctctaccacagaggacatggacatgaccatgagcatagccatggaggctatggggagtctggggctccaggcatcaagcaggacctggatgctgtcactctctgggcttatgcactgggggccacagtgctgatctcagcagctccattttttgtcctcttccttatccccgtggagtcgaactctccccggcatcgctctctacttcagatcttgctcagttttgcttccggtgggctcctgggagatgctttcctgcacctcattcctcatgctcttgaacctcattctcaccacactctggagcaacccggacatggacactcc

SEQ ID NO: 15251 - protein, 208 aa, Homo sapiens
MARGLGAPHWVAVGLLTWATLGLLVAGLGGHDDLHDDLQEDFHGHSHRHSHEDFHHGHSHAHGHGHTHESIWHGHTHDHDHGHSHEDLHHGHSHGYSHESLYHRGHGHDHEHSHGGYGESGAPGIKQDLDAVTLWAYALGATVLISAAPFFVLFLIPVESNSPRHRSLLQILLSFASGGLLGDAFLHLIPHALEPHSHHTLEQPGHGH

SEQ ID NO: 15252 - DNA, 989 bp, Homo sapiens; identical to SEQ ID NO: 1709

SEQ ID NO: 15253 - protein, 261 aa, Homo sapiens; identical to SEQ ID NO: 1710

SEQ ID NO: 15254 - DNA, 1016 bp, Homo sapiens
gggattcccacccacccacagcccgccatggcgtctcagctccagaaccgactccgctccgcactggccttggtcacaggtgcggggagcggcatcggccgagcggtcagtgtacgcctggccggagagggggccaccgtagctgcctgcgacctggaccgggcagcggcacaggagacggtgcggctgctgggcgggccagggagcaaggaggggccgccccgagggaaccatgctgccttccaggctgacgtgtctgaggccagggccgccaggtgcctgctggaacaagtgcaggcctgcttttctcgcccaccatctgtcgttgtgtcctgtgcgggcatcacccaggatgagtttctgctgcacatgtctgaggatgactgggacaaagtcatagctgtcaacctcaagggcaccttcctagtcactcaggctgcagcacaagccctggtgtccaatggttgtcgtggttccatcatcaacatcagtagcatcgtaggaaaggtggggaacgtggggcagacaaactatgcagcatccaaggctggagtgattgggctgacccagaccgcagcccgggagcttggacgacatgggatccgctgtaactctgtcctcccagggttcattgcaacacccatgacacagaaagtgccacagaaagtggtggacaagattactgaaatgatcccgatgggacacttgggggaccctgaggatgtggcagatgtggtcgcattcttggcatctgaagatagtggatacatcacagggacctcagtggaagtcactggaggtcttttcatgtaactgcctcaaggaccctggactctgctcacccccccaccactctgcctggcctcctgctgatgaggactctaagttcccaggatacaaaaggggtggcagtgtatggttcaggaatgctgaatatgggaagcaggggtgcttgtgaccctaataaattccaagtcctcttccctgccacctccggctcttcttgtgtccaagcc

SEQ ID NO: 15255 - protein, 261 aa, Homo sapiens; identical to SEQ ID NO: 1710

SEQ ID NO: 15256 - DNA, 195 bp, Homo sapiens
acaaagtcatagctgtcaacctcaagggcaccttcctagtcactcaggctgcagcacaagccctggtgtccaatggttgtcgtggttccatcatcaacatcagtagcatcgtaggaaaggtcaggttgagttggacgaggtcagccagccaagtggtatagagaggagaacccctccttgagactcctgactcat

SEQ ID NO: 15257 - protein, 52 aa, Homo sapiens
KVIAVNLKGTFLVTQAAAQALVSNGCRGSIINISSIVGKVRLSWTRSASQVV

SEQ ID NO: 15258 - DNA, 623 bp, Homo sapiens
ccacagacatgggatccgctgtaactctgtcctcccagggttcattgcaacacccatgacacagaaagtgccacagaaagtggtggacaaggtaggaggctgtgggtggagggcagaatcattcagagactcaatctctctgggcttcacagagagagagagagagagagagagagaatactgggcacagttcctggcaaacattaaatattcaatgaatgtatgagaaatgaagacaaaaaagggtcacagactcagtcttcaaaaaaatccataaaagaagctttcacccacatgagtatttccttacagattactgaaatgatcccgatgggacacttgggggaccctgaggatgtggcagatgtggtcgcattcttggcatctgaagatagtggatacatcacagggacctcagtggaagtcactggaggtcttttcatgtaactgcctcaaggaccctggactctgctcacccccccaccactctgcctggcctcctgctgatgaggactctaagttcccaggatacaaaaggggtggcagtgtatggttcaggaatgctgaatatgggaagcaggggtgcttgtgaccctaataaattccaagtcctcttccctgcc

SEQ ID NO: 15259 - protein, 78 aa, Homo sapiens
MWQMWSHSWHLKIVDTSQGPQWKSLEVFSCNCLKDPGLCSPPHHSAWPPADEDSKFPGYKRGGSVWFRNAEYGKQGCL

SEQ ID NO: 15260 - DNA, 650 bp, Homo sapiens
ccacagacatgggatccgctgtaactctgtcctcccagggttcattgcaacacccatgacacagaaagtgccacagaaagtggtggacaaggtaggaggctgtgggtggagggcagaatcattcagagactcaatctctctgggcttcacagagagagagagagagagagagagagaatactgggcacagttcctggcaaacattaaatattcaatgaatgtatgagaaatgaagacaaaaaagggtcacagactcagtcttcaaaaaaatccataaaagaagctttcacccacatgagtatttccttacagattactgaaatgatcccgatgggacacttgggggaccctgaggatgtggcagatgtggtcgcattcttggcatctgaagatagtggatacatcacagggacctcagtggaagtcactggaggtcttttcatgtaactgcctcaaggaccctggactctgctcacccccccaccactctgcctggcctcctgctgatgaggactctaagttcccaggatacaaaaggggtggcagtgtatggttcaggaatgctgaatatgggaagcaggggtgcttgtgaccctaataaattccaagtcctcttccctgccacctccggctcttcttgtgtccaagcc

SEQ ID NO: 15261 - protein, 78 aa, Homo sapiens; identical to SEQ ID NO: 15259

SEQ ID NO: 15262 - DNA, 1750 bp, Homo sapiens
gacgtagggccccagcgcccgggccatggcggcggcggtggcgggagctgctgtctgagcagcggttgcggaccgagcgaacttggcccaggagcccgggcctagggagaggcgcggcggcggcgggagcgcgaacggctggagctggccttcttcgccttctcctcggctgtggagccctggtggggggtctgcgcccggtcaccatgacgacgccggcgaatgcccagaatgccagcaaaacgtgggaactgagtctgtatgagctgcaccggaccccgcaggaagccataatggatggcacagagattgctgtttcccctcggtcactgcattcagaactcatgtgccctatctgcctggacatgctgaagaatacgatgaccaccaaggagtgcctccacagattctgctctgactgcattgtcacagccctacggagcgggaacaaggagtgtcctacctgccgaaagaagctggtgtccaagcgatccctacggccagaccccaactttgatgccctgatctctaagatctatcctagccgggaggaatacgaggcccatcaagaccgagtgcttatccgcctgagccgcctgcacaaccagcaggcattgagctccagcattgaggaggggctacgcatgcaggccatgcacagggcccagcgtgtgaggcggccgataccagggtcagatcagaccacaacgatgagtgggggggaaggagagcccggggagggagaaggggatggagaagatgtgagctcagactccgcccctgactctgccccaggccctgctcccaagcgaccccgtggagggggcgcaggggggagcagtgtagggacagggggaggcggcactggtggggtgggtgggggtgccggttcggaagactctggtgaccggggagggactctgggagggggaacgctgggccccccaagccctcctggggcccccagccccccagagccaggtggagaaattgagctcgtgttccggccccaccccctgctcgtggagaagggagaatactgccagacgaggtatgtgaagacaactgggaatgccacagtggaccacctctccaagtacttggccctgcgcattgccctcgagcggaggcaacagcaggaagcaggggagccaggagggcctggagggggcgcctctgacaccggaggacctgatgggtgtggcggggagggtgggggtgccggaggaggtgacggtcctgaggagcctgctttgcccagcctggagggcgtcagtgaaaagcagtacaccatctacatcgcacctggaggcggggcgttcacgacgttgaatggctcgctgaccctggagctggtgaatgagaaattctggaaggtgtcccggccactggagctgtgctatgctcccaccaaggatccaaagtgaccccaccaggggacagccagaggaaggggaccatggggtatccctgtgtcctggtctatcaccccagcttctttgtcccccagtacccccagcccagccagccaataagaggacacaaatgaggacacgtggcttttatacaaagtatctatatgagattcttctatattgtacagagtggggcaaaacacgcccccatctgctgccttttctattgccctgcaacgtcccatctatacgaggtgttggagaaggtgaagaaccctcccattcacgcccgcctaccaacaacaaacgtgcttttttcctctttgaaacctgca

SEQ ID NO: 15263 - protein, 406 aa, Homo sapiens; identical to SEQ ID NO: 1712

SEQ ID NO: 15264 - DNA, 1983 bp, Homo sapiens
gccatggcggcggcggtggcgggagctgctgtctgagcagcggttgcggaccgagcgaacttggcccaggagcccgggcctagggagaggcgcggcggcggcgggagcgcgaacggctggagctggccttcttcgccttctcctcggctgtggagccctggtggggggtctgcgcccggtcaccatgacgacgccggcgaatgcccagaatgccagcaaaacgtgggaactgagtctgtatgagctgcaccggaccccgcaggaagccataatggatggcacagagattgctgtttcccctcggtcactgcattcagaactcatgtgccctatctgcctggacatgctgaagaatacgatgaccaccaaggagtgcctccacagattctgctctgactgcattgtcacagccctacggagcgggtaataggagagacatgtttgagatgagatgaaggggtacaaagttagggccctctcactggtcttggttcagcctaggcttcagttcccttgactgaccactcagggcttcccttctcctaccccaggaacaaggagtgtcctacctgccgaaagaagctggtgtccaagcgatccctacggccagaccccaactttgatgccctgatctctaagatctatcctagccgggaggaatacgaggcccatcaagaccgagtgcttatccgcctgagccgcctgcacaaccagcaggcattgagctccagcattgaggaggggctacgcatgcaggccatgcacaggtgtgagggtcaggagagaagcagaactgatgggatgggtccgtgggtcagtccttgttgcctgctagcttctaagcctcagcatcctaggagctgaccacagactgatcattagggctggaaatcatgggtgtaaattgcagtttcttagtaaacaactggccctgctcttcttaagaaaaatatagggctgggcacagtgactcacatctgtaatcccagcactttgggaggtgaggatgggaggatcacttgagcccaggagtttgagaccaccttgaataacatagggaaatctcatctctacaacaaattaaacatttagctgggcatggtggcacatgcctgtagtcctaccttcttgggaggctgaggtaataggatcacttgagcctgggaagaaagtggatgttgcagtgaaccatgatcacaccactgcacactgcactccagcctgctgggcgacagaacaaggccctgtcacaaaaaaaaaaaaaggaaaaatgtagtttaccccatgactttctagaagttagaacagtagagcgattttgagaataagccccggattcatactgctggaagttaaatcacctcctaggccagcatctctcagtctttcatgtgtatccagattacctgtagatcttcagatgcaaactgtgattcagtaggtctagagttgggcccgagagtctgcatttcacaagctcacaggggatgtgtatgctgctaccgcactttgagaggtgacagcctatgatcactaacaagttacttaacctctctaagcctcagtttcctcagccataaaatagaggtaatataattacctgtgtcataggattcattgtattaggtaaggggattggtgcaaaacacttagtatactgagtgcttagcacattgtgtttaataaatattaggtatcgtcattaggatttttcttatctcttaattctctgaagtttaaagtctaagccctttatcctggatgccttctaaccttaaccacttgcttctacagggcccagcgtgtgaggcggccgataccagggtcagatcagaccacaacgatgagtgggggggaaggagagcccggggagggagaaggggatggagaagatgtgagctcagactccgcccctgactctgccccaggccctgctcccaagcgaccccgtggagggggcgcaggggggagcagtgtagggac

SEQ ID NO: 15265 - protein, 80 aa, Homo sapiens
MTTPANAQNASKTWELSLYELHRTPQEAIMDGTEIAVSPRSLHSELMCPICLDMLKNTMTTKECLHRFCSDCIVTALRSG

SEQ ID NO: 15266 - DNA, 1532 bp, Homo sapiens
ggctgctgtttctaaaacccctttccctctaacccacaccacctttctactcactgatgccttcaggaagccataatggatggcacagagattgctgtttcccctcggtcactgcattcagaactcatgtgccctatctgcctggacatgctgaagaatacgatgaccaccaaggagtgcctccacagattctgctctgactgcattgtcacagccctacggagcgggaacaaggagtgtcctacctgccgaaagaagctggtgtccaagcgatccctacggccagaccccaactttgatgccctgatctctaagatctatcctagccgggaggaatacgaggcccatcaagaccgagtgcttatccgcctgagccgcctgcacaaccagcaggcattgagctccagcattgaggaggggctacgcatgcaggccatgcacagggcccagcgtgtgaggcggccgataccagggtcagatcagaccacaacgatgagtgggggggaaggagagcccggggagggagaaggggatggagaagatgtgagctcagactccgcccctgactctgccccaggccctgctcccaagcgaccccgtggagggggcgcaggggggagcagtgtagggacagggggaggcggcactggtggggtgggtgggggtgccggttcggaagactctggtgaccggggagggactctgggagggggaacgctgggccccccaagccctcctggggcccccagccccccagagccaggtggagaaattgagctcgtgttccggccccaccccctgctcgtggagaagggagaatactgccagacgaggtatgtgaagacaactgggaatgccacagtggaccacctctccaagtacttggccctgcgcattgccctcgagcggaggcaacagcaggaagcaggggagccaggagggcctggagggggcgcctctgacaccggaggacctgatgggtgtggcggggagggtgggggtgccggaggaggtgacggtcctgaggagcctgctttgcccagcctggagggcgtcagtgaaaagcagtacaccatctacatcgcacctggaggcggggcgttcacgacgttgaatggctcgctgaccctggagctggtgaatgagaaattctggaaggtgtcccggccactggagctgtgctatgctcccaccaaggatccaaagtgaccccaccaggggacagccagaggaaggggaccatggggtatccctgtgtcctggtctatcaccccagcttctttgtcccccagtacccccagcccagccagccaataagaggacacaaatgaggacacgtggcttttatacaaagtatctatatgagattcttctatattgtacagagtggggcaaaacacgcccccatctgctgccttttctattgccctgcaacgtcccatctatacgaggtgttggagaaggtgaagaaccctcccattcacgcccgcctaccaacaacaaacgtgcttttttcctctttgaaacctgca

SEQ ID NO: 15267 - protein, 377 aa, Homo sapiens
MDGTEIAVSPRSLHSELMCPICLDMLKNTMTTKECLHRFCSDCIVTALRSGNKECPTCRKKLVSKRSLRPDPNFDALISKIYPSREEYEAHQDRVLIRLSRLHNQQALSSSIEEGLRMQAMHRAQRVRRPIPGSDQTTTMSGGEGEPGEGEGDGEDVSSDSAPDSAPGPAPKRPRGGGAGGSSVGTGGGGTGGVGGGAGSEDSGDRGGTLGGGTLGPPSPPGAPSPPEPGGEIELVFRPHPLLVEKGEYCQTRYVKTTGNATVDHLSKYLALRIALERRQQQEAGEPGGPGGGASDTGGPDGCGGEGGGAGGGDGPEEPALPSLEGVSEKQYTIYIAPGGGAFTTLNGSLTLELVNEKFWKVSRPLELCYAPTKDPK

SEQ ID NO: 15268 - DNA, 1045 bp, Homo sapiens
gggtgccggttcggaagactctggtgaccggggagggactctgggagggggaacgctgggccccccaagccctcctggggcccccagccccccagagccaggtggagaaattgagctcgtgttccggccccaccccctgctcgtggagaagggagaatactgccagacgaggtgaggagccctgtctttccccagccactgagaaaccaaagatcacctagatttccatcagaagtgggctttgcccaaacccaaaataccaccccaacccagaatccattttggaaagcccctacctccagtcctcatctgaggcgctctggctctaagcctgtcctccctcccattccaggtatgtgaagacaactgggaatgccacagtggaccacctctccaagtacttggccctgcgcattgccctcgagcggaggcaacagcaggaagcaggggagccaggagggcctggagggggcgcctctgacaccggaggacctgatgggtgtggcggggagggtgggggtgccggaggaggtgacggtcctgaggagcctgctttgcccagcctggagggcgtcagtgaaaagcagtacaccatctacatcgcacctggaggcggggcgttcacgacgttgaatggctcgctgaccctggagctggtgaatgagaaattctggaaggtgtcccggccactggagctgtgctatgctcccaccaaggatccaaagtgaccccaccaggggacagccagaggaaggggaccatggggtatccctgtgtcctggtctatcaccccagcttctttgtcccccagtacccccagcccagccagccaataagaggacacaaatgaggacacgtggcttttatacaaagtatctatatgagattcttctatattgtacagagtggggcaaaacacgcccccatctgctgccttttctattgccctgcaacgtcccatctatacgaggtgttggagaaggtgaagaaccctcccattcacgcccgcctaccaacaacaaacgtgcttttttcctctttgaaa

SEQ ID NO: 15269 - protein, 86 aa, Homo sapiens
MPQWTTSPSTWPCALPSSGGNSRKQGSQEGLEGAPLTPEDLMGVAGRVGVPEEVTVLRSLLCPAWRASVKSSTPSTSHLEAGRSRR

SEQ ID NO: 15270 - DNA, 594 bp, Homo sapiens
gtgataggcactgcggattcagcagagactaaatcaaagtccttgatctcggagagcacatatttcatctaattgaattcacataccagccttatgaggaggtgttcttcctgtttcagaactgaaggaaaagctgaacaggcggtctttggaaaggacagaagccaggatagttccagcatccaggcagcagacaccaatggtcagtgcttctactttggatcaaaaagagagaactccaataggcttagggtgggtcaggtgctcacactcatctgaggaaggggagggtcccttgaggaatagtaccatagactacccaatgttggaggataatggccccaacgcaaaaatgggatcttgccaccagacaaatgggatatagatgccaggctgcaaaatccaacaaatgtacacgtgcccaaatcccgactccatcactaatagccatgcaatcctctgactatcaattagattaattgacactcttttttctctcgctactgtggtacatgcagtagttacctttattcttcactttgttttctcataagactaacaagcagttttttaaaataaagaaataaaagcaaa

SEQ ID NO: 15271 - protein, 61 aa, Homo sapiens
MRRCSSCFRTEGKAEQAVFGKDRSQDSSSIQAADTNGQCFYFGSKRENSNRLRVGQVLTLI

SEQ ID NO: 15272 - DNA, 659 bp, Homo sapiens
aggagagcccggagccggatccactctcagcctcaggaagcagcagcctccgctccgcggcgggtgtgctcggcagtcacagacccactcaggacacctcccgttgccgacgggctagacctgccttaaaggggtccccgtgtctctccagtctagagcctaagttcaaacgaggcgtataggcgaggacagcaggaaggctccaagtcaaacaaacggatgggaagtggtcttgggaaacctgaagacactgggatattcagaaggccaaggggatccagcttatcctgttgggcaaggtgctgggagtgaaggcaggtcacctgaatgatactggtgccatttctgaagttggtgaaactccgcattacatcctgactcagagattccactgatgatttccaggaactaccaaagccacggatcagctgagttacccgggctaatagcaggaggaaacagtgtcagagagggatctggctgatcttcaactccactaagttctccccaagggtcttgctccatcacccacgctggagtgcagtggcacaatcacagctcactacaacctcaactttcctggctcagtgattatcccacctcagcctcctgagtagctgggactaacaggcatgtgccaacatgtcccactcattttt

SEQ ID NO: 15273 - protein, 30 aa, Homo sapiens
MGSGLGKPEDTGIFRRPRGSSLSCWARCWE

SEQ ID NO: 15274 - DNA, 863 bp, Homo sapiens
cgctccgcggcgggtgtgctcggcagtcacagacccactcaggacacctcccgttgccgacgggctagacctgccttaaaggggtccccgtgtctctccagtctagagcctaagttcaaacgaggcgtataggcgaggacagcaggaaggctccaagtcaaacaaacggatgggaagtggtcttgggaaacctgaagacactgggatattcagaaggccaaggggatccagcttatcctgttgggcaaggtgctgggagtgaaggcaggtcacctgaatgatactggtgccatttctgaagttggtgaaactccgcattacatcctgactcagagattccactgatgatttccaggaactaccaaagccacggatcagctgagttacccgggctaatagcaggaggaaacagtgtcagagagggatctggctgatcttcaactccactaagttctccccaaggtatagccatccttatcatcaaaccctcttttctggtattctctcaatccagtctttcatactctattcccccaccatgtaatctgcatcctttcatttttcttttccacttcccttaccactgatcccatcattaccatattttcctcataccttcttcccctcgaagtcgctcagcctgtccacgctcaatcaaagcctcagcctccttcacaaatgccactaaacccccaaaagggggagacagcaactcttcaatgaattcctggaaagacacaaacacatatacacaggtgtcctggtgtcagcagatttgcccaattctggcatcatgactaatgtagatccatctgaatggcatctttcagctgctgcaaaagttaaggaaaatcctctatgga

SEQ ID NO: 15275 - protein, 30 aa, Homo sapiens; identical to SEQ ID NO: 15273

SEQ ID NO: 15276 - DNA, 608 bp, Homo sapiens
ggtgtgctcggcagtcacagacccactcaggacacctcccgttgccgacgggctagacctgccttaaaggggtccccgtgtctctccagtctagagcctaagttcaaacgaggcgtataggcgaggacagcaggaaggctccaagtcaaacaaacggatgggaagtggtcttgggaaacctgaagacactgggatattcagaaggccaaggggatccagcttatcctgttgggcaaggtgctgggagtgaaggcaggaactaccaaagccacggatcagctgagttacccgggctaatagcaggaggaaacagtgtcagagagggatctggctgatcttcaactccactaagttctccccaagggtcttgctccatcacccacgctggagtgcagtggcacaatcacagctcactacaacctcaactttcctggctcagtgattatcccacctcagcctcctgagtagctgggactaacaggcatgtgccaacatgtcccactcattttttttttattttttgtagagatggggtttcaccatgttgtccaggctggtctcaaactcctgggctcaagcgatcctccctgccttggcctgtgctggga

SEQ ID NO: 15277 - protein, 30 aa, Homo sapiens; identical to SEQ ID NO: 15273

SEQ ID NO: 15278 - DNA, 1077 bp, Homo sapiens
ggggacatcctgaagtgaaggactgctttccccaaactagacatttccctttgtcttcccttaggagcgggctgcagatgacagcaaagaggttgagagcttccagcagctgctcaatgctcggacacaggaattcattgaagagttgctgtctcccccttttgggggtttagtggcatttgtgaaggaggctgaggctttgattgagcgtggacaggctgagcgacttcgaggggaagaagcccgggtaactcagctgatccgtggctttggtagttcctggaaatcatcagtggaatctctgagtcaggatgtaatgcggagtttcaccaacttcagaaatggcaccagtatcattcagggagcgctgacccagctgatccagctctatcatcgcttccaccgggtgctgtcccagccgcagctccgagccctccctgcccgggctgagctcatcaacattcaccaccttatggtggagctcaagaagcataagcccaacttctgatgtgccagaaaccgccctgagatctgccggtcatctccatggacttctgcaccccattccatacccttcttcacctggggtaccccttccagttttccccttgcttcccaggcccttgacatggcttacctgccttcactcccagcaccttgcccaacaggataagctggatccccttggccttctgaatatcccagtgtcttcaggtttcccaagaccacttccctgtgggcttccaaaatggcctttatcatttctccagtctgtcaccctcctttcctgctcccatacacccaaggcttgtttcttcccctgtaaaaaccactgcctcaatctctggttcactcaactagtcaccatgtcctgaggcatgaagcctcctcagctcttggaattgctggcaaggggtgactgcctctgagtcattgtgtttttcaaagtgatttcttttctgtagctttttgacctaagatctcagcaatttgaacactaacctctcccctcctggctcaagaattactccgaagtcagtctgcagaaaataaatatttagtatgacatgacactta

SEQ ID NO: 15279 - protein, 63 aa, Homo sapiens
MRSFTNFRNGTSIIQGALTQLIQLYHRFHRVLSQPQLRALPARAELINIHHLMVELKKHKPNF

SEQ ID NO: 15280 - DNA, 3338 bp, Homo sapiens
agtttgtgtttcagacttccatatttccatttgcagttgggtgaagtggttagagctgaaaggggacagctggagtcaaacaacttaactcaaatatctgggaacgatttcgcgctgaggaagaccctttgggacttgtagctccactccggggaacggactcgccgggactgacagttgccggaagtgaggctgcggggaatggccgccgctgcgaccatggcggctgcggcccgggaactggtgttgcgggctgggacctcagatatggaggaggaagagggcccgctggtgagagcgcggagctgtttctcctccgtagttccggtgctcctagcttcagaaagacctgagctgggtttaggcacaagggtgggaacttggctgctacccgtgatattacctgtttggctccccgtacccttccctgtgatcagacccgaccctgagcgggaccctagtggctgaaactcatgttctggggcacaaaatttcaacttcactccacattttggggtagagtcacgaagtagtatagtgtaaaggttaagaacatggcctctgaagccagactgcctgagttctatctctgccacttacacgctgtgtgcccttgggcaagttaaccagcttctctgtgccatcatttctcacacctttaaggtgaggaagatagaacctattgtatacatcgtcgttaggattagatgaatatgtgtaagattgcacctggcatgcaggcgggtggtcctgggctccaggaaccactgcaacttggggagttggatatcacttctgatgaattcatcctggatgaagtggatgggtgtagatctccgtcactattcaaagcaagttgagctggagctacagcagattgaacagaaatccattcgggattatattcaagagagtgagaatatagcatctctacacaaccagatcacagcctgtgatgctgtcctggagcgaatggagcagatgttgggagcttttcagagtgacctcagctccatcagctctgagatccggacactgcaggaacagtcaggagccatgaacattcgacttcgaaatcgccaggcagttcgggggaaacttggggagcttgttgatggtctggtggtgccttctgctctggtcacggcaattctggaggctccagtgacagagcccaggttcttggagcagctacaggagctggatgccaaggcagccgcagtcagagagcaggaagctagaggcacagcagcctgcgcagatgtcagaggcgtgctcgatcggctccgggtcaaggcagtgacgaagatccgagagtttatcctccagaagatttattccttcaggaaacccatgaccaactatcagatcccccagacggccctgctgaagtacaggttcttctatcagtttctgctgggcaatgaacgagcaacagcaaaggagatcagggatgaatatgtggagacgctgagcaagatttacctgtcttactaccgctcttacctggggcggctcatgaaggtgcagtatgaggaagtcgctgagaaagatgatctaatgggtgtggaagatacagcaaagaaaggattcttctcaaagccatcgctccgcagcaggaacaccattttcaccctaggaacccgcggctctgtcatctcccccactgaacttgaggcccccatcctggtgcctcacacagcgcagcgcggagagcagaggtatccatttgaggccctcttccgcagccagcactacgccctcctagacaattcctgccgcgaataccttttcatctgtgaattttttgttgtgtctggcccagctgcacacgacctgttccatgctgtcatgggccgtacactcagcatgaccctgaaacacctggattcttatctagctgactgctacgatgccattgctgtttttctctgtatccacattgttctccggttccgtaacattgcagcaaagagggatgttcctgccctggacaggtactgggaacaggtgcttgccttgctatggccacggtttgaactgatcctggagatgaatgttcagagcgtccgaagcactgacccccagcgcctaggggggttggatactcggccccactatatcacacgccgctatgcagagttctcctccgctcttgtcagtatcaaccagacaattcctaatgaacggaccatgcaattgctgggacagctgcaggtggaggtggagaattttgtcctccgagtggcagctgagttctcctcaaggaaggagcagcttgtgtttctgatcaacaactatgacatgatgctgggtgtgctgatggagcgggctgcagatgacagcaaagaggttgagagcttccagcagctgctcaatgctcggacacaggaattcattgaagagttgctgtctcccccttttgggggtttagtggcatttgtgaaggaggctgaggctttgattgagcgtggacaggctgagcgacttcgaggggaagaagcccgggtaactcagctgatccgtggctttggtagttcctggaaatcatcagtggaatctctgagtcaggatgtaatgcggagtttcaccaacttcagaaatggcaccagtatcattcagggagcgctgacccagctgatccagctctatcatcgcttccaccgggtgctgtcccagccgcagctccgagccctccctgcccgggctgagctcatcaacattcaccaccttatggtggagctcaagaagcataagcccaacttctgatgtgccagaaaccgccctgagatctgccggtcatctccatggacttctgcaccccattccatacccttcttcacctggggtaccccttccagttttccccttgcttcccaggcccttgacatggcttacctgccttcactcccagcaccttgcccaacaggataagctggatccccttggccttctgaatatcccagtgtcttcaggtttcccaagaccacttccctgtgggcttccaaaatggcctttatcatttctccagtctgtcaccctcctttcctgctcccatacacccaaggcttgtttcttcccctgtaaaaaccactgcctcaatctctggttcactcaactagtcaccatgtcctgaggcatgaagcctcctcagctcttggaattgctggcaaggggtgactgcctctgagtcattgtgtttttcaaagtgatttcttttctgtagctttttgacctaagatctcagcaatttgaacactaacctctcccctcctggctcaagaattactccgaagtcagtctgcagaaaataaatatttagtatgacatgacactta

SEQ ID NO: 15281 - protein, 656 aa, Homo sapiens
MNSSWMKWMGVDLRHYSKQVELELQQIEQKSIRDYIQESENIASLHNQITACDAVLERMEQMLGAFQSDLSSISSEIRTLQEQSGAMNIRLRNRQAVRGKLGELVDGLVVPSALVTAILEAPVTEPRFLEQLQELDAKAAAVREQEARGTAACADVRGVLDRLRVKAVTKIREFILQKIYSFRKPMTNYQIPQTALLKYRFFYQFLLGNERATAKEIRDEYVETLSKIYLSYYRSYLGRLMKVQYEEVAEKDDLMGVEDTAKKGFFSKPSLRSRNTIFTLGTRGSVISPTELEAPILVPHTAQRGEQRYPFEALFRSQHYALLDNSCREYLFICEFFVVSGPAAHDLFHAVMGRTLSMTLKHLDSYLADCYDAIAVFLCIHIVLRFRNIAAKRDVPALDRYWEQVLALLWPRFELILEMNVQSVRSTDPQRLGGLDTRPHYITRRYAEFSSALVSINQTIPNERTMQLLGQLQVEVENFVLRVAAEFSSRKEQLVFLINNYDMMLGVLMERAADDSKEVESFQQLLNARTQEFIEELLSPPFGGLVAFVKEAEALIERGQAERLRGEEARVTQLIRGFGSSWKSSVESLSQDVMRSFTNFRNGTSIIQGALTQLIQLYHRFHRVLSQPQLRALPARAELINIHHLMVELKKHKPNF

SEQ ID NO: 15282 - DNA, 2793 bp, Homo sapiens
tcgtaaggttcataggtaagagaacagcgaaggttccggggctagtttgtgtttcagacttccatatttccatttgcagttgggtgaagtggttagagctgaaaggggacagctggagtcaaacaacttaactcaaatatctgggaacgatttcgcgctgaggaagaccctttgggacttgtagctccactccggggaacggactcgccgggactgacagttgccggaagtgaggctgcggggaatggccgccgctgcgaccatggcggctgcggcccgggaactggtgttgcgggctgggacctcagatatggaggaggaagagggcccgctggcgggtggtcctgggctccaggaaccactgcaacttggggagttggatatcacttctgatgaattcatcctggatgaagtggatgttcacattcaggcaaatctggaggatgagttagtaaaggaagctcttaaaacgggtgtagatctccgtcactattcaaagcaagttgagctggagctacagcagattgaacagaaatccattcgggattatattcaagagagtgagaatatagcatctctacacaaccagatcacagcctgtgatgctgtcctggagcgaatggagcagatgttgggagcttttcagagtgacctcagctccatcagctctgagatccggacactgcaggaacagtcaggagccatgaacattcgacttcgaaatcgccaggcagttcgggggaaacttggggagcttgttgatggtctggtggtgccttctgctctggtcacggcaattctggaggctccagtgacagagcccaggttcttggagcagctacaggagctggatgccaaggcagccgcagtcagagagcaggaagctagaggcacagcagcctgcgcagatgtcagaggcgtgctcgatcggctccgggtcaaggcagtgacgaagatccgagagtttatcctccagaagatttattccttcaggaaacccatgaccaactatcagatcccccagacggccctgctgaagtacaggttcttctatcagtttctgctgggcaatgaacgagcaacagcaaaggagatcagggatgaatatgtggagacgctgagcaagatttacctgtcttactaccgctcttacctggggcggctcatgaaggtgcagtatccatttgaggccctcttccgcagccagcactacgccctcctagacaattcctgccgcgaataccttttcatctgtgaattttttgttgtgtctggcccagctgcacacgacctgttccatgctgtcatgggccgtacactcagcatgaccctgaaacacctggattcttatctagctgactgctacgatgccattgctgtttttctctgtatccacattgttctccggttccgtaacattgcagcaaagagggatgttcctgccctggacaggtactgggaacaggtgcttgccttgctatggccacggtttgaactgatcctggagatgaatgttcagagcgtccgaagcactgacccccagcgcctaggggggttggatactcggccccactatatcacacgccgctatgcagagttctcctccgctcttgtcagtatcaaccagacaattcctaatgaacggaccatgcaattgctgggacagctgcaggtggaggtggagaattttgtcctccgagtggcagctgagttctcctcaaggaaggagcagcttgtgtttctgatcaacaactatgacatgatgctgggtgtgctgatggagcgggctgcagatgacagcaaagaggttgagagcttccagcagctgctcaatgctcggacacaggaattcattgaagagttgctgtctcccccttttgggggtttagtggcatttgtgaaggaggctgaggctttgattgagcgtggacaggctgagcgacttcgaggggaagaagcccgggtaactcagctgatccgtggctttggtagttcctggaaatcatcagtggaatctctgagtcaggatgtaatgcggagtttcaccaacttcagaaatggcaccagtatcattcagggagcgctgacccagctgatccagctctatcatcgcttccaccgggtgctgtcccagccgcagctccgagccctccctgcccgggctgagctcatcaacattcaccaccttatggtggagctcaagaagcataagcccaacttctgatgtgccagaaaccgccctgagatctgccggtcatctccatggacttctgcaccccattccatacccttcttcacctggggtaccccttccagttttccccttgcttcccaggcccttgacatggcttacctgccttcactcccagcaccttgcccaacaggataagctggatccccttggccttctgaatatcccagtgtcttcaggtttcccaagaccacttccctgtgggcttccaaaatggcctttatcatttctccagtctgtcaccctcctttcctgctcccatacacccaaggcttgtttcttcccctgtaaaaaccactgcctcaatctctggttcactcaactagtcaccatgtcctgaggcatgaagcctcctcagctcttggaattgctggcaaggggtgactgcctctgagtcattgtgtttttcaaagtgatttcttttctgtagctttttgacctaagatctcagcaatttgaacactaacctctcccctcctggctcaagaattactccgaagtcagtctgcagaaaataaatatttagtatgacatgacactta

SEQ ID NO: 15283 - protein, 659 aa, Homo sapiens
MAAAATMAAAARELVLRAGTSDMEEEEGPLAGGPGLQEPLQLGELDITSDEFILDEVDVHIQANLEDELVKEALKTGVDLRHYSKQVELELQQIEQKSIRDYIQESENIASLHNQITACDAVLERMEQMLGAFQSDLSSISSEIRTLQEQSGAMNIRLRNRQAVRGKLGELVDGLVVPSALVTAILEAPVTEPRFLEQLQELDAKAAAVREQEARGTAACADVRGVLDRLRVKAVTKIREFILQKIYSFRKPMTNYQIPQTALLKYRFFYQFLLGNERATAKEIRDEYVETLSKIYLSYYRSYLGRLMKVQYPFEALFRSQHYALLDNSCREYLFICEFFVVSGPAAHDLFHAVMGRTLSMTLKHLDSYLADCYDAIAVFLCIHIVLRFRNIAAKRDVPALDRYWEQVLALLWPRFELILEMNVQSVRSTDPQRLGGLDTRPHYITRRYAEFSSALVSINQTIPNERTMQLLGQLQVEVENFVLRVAAEFSSRKEQLVFLINNYDMMLGVLMERAADDSKEVESFQQLLNARTQEFIEELLSPPFGGLVAFVKEAEALIERGQAERLRGEEARVTQLIRGFGSSWKSSVESLSQDVMRSFTNFRNGTSIIQGALTQLIQLYHRFHRVLSQPQLRALPARAELINIHHLMVELKKHKPNF

SEQ ID NO: 15284 - DNA, 2985 bp, Homo sapiens
tcgtaaggttcataggtaagagaacagcgaaggttccggggctagtttgtgtttcagacttccatatttccatttgcagttgggtgaagtggttagagctgaaaggggacagctggagtcaaacaacttaactcaaatatctgggaacgatttcgcgctgaggaagaccctttgggacttgtagctccactccggggaacggactcgccgggactgacagttgccggaagtgaggctgcggggaatggccgccgctgcgaccatggcggctgcggcccgggaactggtgttgcgggctgggacctcagatatggaggaggaagagggcccgctggcgggtggtcctgggctccaggaaccactgcaacttggggagttggatatcacttctgatgaattcatcctggatgaagtggatgttcacattcaggcaaatctggaggatgagttagtaaaggaagctcttaaaacgggtgtagatctccgtcactattcaaagcaagttgagctggagctacagcagattgaacagaaatccattcgggattatattcaagagagtgagaatatagcatctctacacaaccagatcacagcctgtgatgctgtcctggagcgaatggagcagatgttgggagcttttcagagtgacctcagctccatcagctctgagatccggacactgcaggaacagtcaggagccatgaacattcgacttcgaaatcgccaggcagttcgggggaaacttggggagcttgttgatggtctggtggtgccttctgctctggtcacggcaattctggaggctccagtgacagagcccaggttcttggagcagctacaggagctggatgccaaggcagccgcagtcagagagcaggaagctagaggcacagcagcctgcgcagatgtcagaggcgtgctcgatcggctccgggtcaaggcagtgacgaagatccgagagtttatcctccagaagatttattccttcaggaaacccatgaccaactatcagatcccccagacggccctgctgaagtacaggttcttctatcagtttctgctgggcaatgaacgagcaacagcaaaggagatcagggatgaatatgtggagacgctgagcaagatttacctgtcttactaccgctcttacctggggcggctcatgaaggtgcagtatgaggaagtcgctgagaaagatgatctaatgggtgtggaagatacagcaaagaaaggattcttctcaaagccatcgctccgcagcaggaacaccattttcaccctaggaacccgcggctctgtcatctcccccactgaacttgaggcccccatcctggtgcctcacacagcgcagcgcggagagcagaggtatccatttgaggccctcttccgcagccagcactacgccctcctagacaattcctgccgcgaataccttttcatctgtgaattttttgttgtgtctggcccagctgcacacgacctgttccatgctgtcatgggccgtacactcagcatgaccctgaaacacctggattcttatctagctgactgctacgatgccattgctgtttttctctgtatccacattgttctccggttccgtaacattgcagcaaagagggatgttcctgccctggacaggtactgggaacaggtgcttgccttgctatggccacggtttgaactgatcctggagatgaatgttcagagcgtccgaagcactgacccccagcgcctaggggggttggatactcggccccactatatcacacgccgctatgcagagttctcctccgctcttgtcagtatcaaccagacaattcctaatgaacggaccatgcaattgctgggacagctgcaggtggaggtggagaattttgtcctccgagtggcagctgagttctcctcaaggaaggagcagcttgtgtttctgatcaacaactatgacatgatgctgggtgtgctgatggagcgggctgcagatgacagcaaagaggttgagagcttccagcagctgctcaatgctcggacacaggaattcattgaagagttgctgtctcccccttttgggggtttagtggcatttgtgaaggaggctgaggctttgattgagcgtggacaggctgagcgacttcgaggggaagaagcccgggtaactcagctgatccgtggctttggtagttcctggaaatcatcagtggaatctctgagtcaggatgtaatgcggagtttcaccaacttcagaaatggcaccagtatcattcagggagcgctgacccagctgatccagctctatcatcgcttccaccgggtgctgtcccagccgcagctccgagccctccctgcccgggctgagctcatcaacattcaccaccttatggtggagctcaagaagcataagcccaacttctgatgtgccagaaaccgccctgagatctgccggtcatctccatggacttctgcaccccattccatacccttcttcacctggggtaccccttccagttttccccttgcttcccaggcccttgacatggcttacctgccttcactcccagcaccttgcccaacaggataagctggatccccttggccttctgaatatcccagtgtcttcaggtttcccaagaccacttccctgtgggcttccaaaatggcctttatcatttctccagtctgtcaccctcctttcctgctcccatacacccaaggcttgtttcttcccctgtaaaaaccactgcctcaatctctggttcactcaactagtcaccatgtcctgaggcatgaagcctcctcagctcttggaattgctggcaaggggtgactgcctctgagtcattgtgtttttcaaagtgatttcttttctgtagctttttgacctaagatctcagcaatttgaacactaacctctcccctcctggctcaagaattactccgaagtcagtctgcagaaaataaatatttagtatgacatgacactta

SEQ ID NO: 15285 - protein, 723 aa, Homo sapiens; identical to SEQ ID NO: 1714

SEQ ID NO: 15286 - DNA, 2602 bp, Homo sapiens
agcttccaggaggaagaggcggtgcgatctaggagaagtgcttccggaaactgtttcagcgcgacctggctggatttatgagagtatggcttgggtaccacaacttccggtgcgcctttctttacagttcgtaaggttcataggcgggtggtcctgggctccaggaaccactgcaacttggggagttggatatcacttctgatgaattcatcctggatgaagtggatgttcacattcaggcaaatctggaggatgagttagtaaaggaagctcttaaaacgggtgtagatctccgtcactattcaaagcaagttgagctggagctacagcagattgaacagaaatccattcgggattatattcaagagagtgagaatatagcatctctacacaaccagatcacagcctgtgatgctgtcctggagcgaatggagcagatgttgggagcttttcagagtgacctcagctccatcagctctgagatccggacactgcaggaacagtcaggagccatgaacattcgacttcgaaatcgccaggcagttcgggggaaacttggggagcttgttgatggtctggtggtgccttctgctctggtcacggcaattctggaggctccagtgacagagcccaggttcttggagcagctacaggagctggatgccaaggcagccgcagtcagagagcaggaagctagaggcacagcagcctgcgcagatgtcagaggcgtgctcgatcggctccgggtcaaggcagtgacgaagatccgagagtttatcctccagaagatttattccttcaggaaacccatgaccaactatcagatcccccagacggccctgctgaagtacaggttcttctatcagtttctgctgggcaatgaacgagcaacagcaaaggagatcagggatgaatatgtggagacgctgagcaagatttacctgtcttactaccgctcttacctggggcggctcatgaaggtgcagtatccatttgaggccctcttccgcagccagcactacgccctcctagacaattcctgccgcgaataccttttcatctgtgaattttttgttgtgtctggcccagctgcacacgacctgttccatgctgtcatgggccgtacactcagcatgaccctgaaacacctggattcttatctagctgactgctacgatgccattgctgtttttctctgtatccacattgttctccggttccgtaacattgcagcaaagagggatgttcctgccctggacaggtactgggaacaggtgcttgccttgctatggccacggtttgaactgatcctggagatgaatgttcagagcgtccgaagcactgacccccagcgcctaggggggttggatactcggccccactatatcacacgccgctatgcagagttctcctccgctcttgtcagtatcaaccagacaattcctaatgaacggaccatgcaattgctgggacagctgcaggtggaggtggagaattttgtcctccgagtggcagctgagttctcctcaaggaaggagcagcttgtgtttctgatcaacaactatgacatgatgctgggtgtgctgatggagcgggctgcagatgacagcaaagaggttgagagcttccagcagctgctcaatgctcggacacaggaattcattgaagagttgctgtctcccccttttgggggtttagtggcatttgtgaaggaggctgaggctttgattgagcgtggacaggctgagcgacttcgaggggaagaagcccgggtaactcagctgatccgtggctttggtagttcctggaaatcatcagtggaatctctgagtcaggatgtaatgcggagtttcaccaacttcagaaatggcaccagtatcattcagggagcgctgacccagctgatccagctctatcatcgcttccaccgggtgctgtcccagccgcagctccgagccctccctgcccgggctgagctcatcaacattcaccaccttatggtggagctcaagaagcataagcccaacttctgatgtgccagaaaccgccctgagatctgccggtcatctccatggacttctgcaccccattccatacccttcttcacctggggtaccccttccagttttccccttgcttcccaggcccttgacatggcttacctgccttcactcccagcaccttgcccaacaggataagctggatccccttggccttctgaatatcccagtgtcttcaggtttcccaagaccacttccctgtgggcttccaaaatggcctttatcatttctccagtctgtcaccctcctttcctgctcccatacacccaaggcttgtttcttcccctgtaaaaaccactgcctcaatctctggttcactcaactagtcaccatgtcctgaggcatgaagcctcctcagctcttggaattgctggcaaggggtgactgcctctgagtcattgtgtttttcaaagtgatttcttttctgtagctttttgacctaagatctcagcaatttgaacactaacctctcccctcctggctcaagaattactccgaagtcagtctgcagaaaataaatatttagtatgacatgacactta

SEQ ID NO: 15287 - protein, 534 aa, Homo sapiens
MEQMLGAFQSDLSSISSEIRTLQEQSGAMNIRLRNRQAVRGKLGELVDGLVVPSALVTAILEAPVTEPRFLEQLQELDAKAAAVREQEARGTAACADVRGVLDRLRVKAVTKIREFILQKIYSFRKPMTNYQIPQTALLKYRFFYQFLLGNERATAKEIRDEYVETLSKIYLSYYRSYLGRLMKVQYPFEALFRSQHYALLDNSCREYLFICEFFVVSGPAAHDLFHAVMGRTLSMTLKHLDSYLADCYDAIAVFLCIHIVLRFRNIAAKRDVPALDRYWEQVLALLWPRFELILEMNVQSVRSTDPQRLGGLDTRPHYITRRYAEFSSALVSINQTIPNERTMQLLGQLQVEVENFVLRVAAEFSSRKEQLVFLINNYDMMLGVLMERAADDSKEVESFQQLLNARTQEFIEELLSPPFGGLVAFVKEAEALIERGQAERLRGEEARVTQLIRGFGSSWKSSVESLSQDVMRSFTNFRNGTSIIQGALTQLIQLYHRFHRVLSQPQLRALPARAELINIHHLMVELKKHKPNF

SEQ ID NO: 15288 - DNA, 627 bp, Homo sapiens
atttgcagttgggtgaagtggttagagctgaaaggggacagctggagtcaaacaacttaactcaaatatctgggaacgatttcgcgctgaggaagaccctttgggacttgtagctccactccggggaacggactcgccgggactgacagttgccggaagtgaggctgcggggaatggccgccgctgcgaccatggcggctgcggcccgggaactggtgttgcgggctgggacctcagatatggaggaggaagagggcccgctggcgggtggtcctgggctccaggaaccactgcaacttggggagttggatatcacttctgatgaattcatcctggatgaagtggatgacacccaaggcttgtttcttcccctgtaaaaaccactgcctcaatctctggttcactcaactagtcaccatgtcctgaggcatgaagcctcctcagctcttggaattgctggcaaggggtgactgcctctgagtcattgtgtttttcaaagtgatttcttttctgtagctttttgacctaagatctcagcaatttgaacactaacctctcccctcctggctcaagaattactccgaagtcagtctgcagaaaataaatatttagtatgacatgacactt

SEQ ID NO: 15289 - protein, 67 aa, Homo sapiens
MAAAATMAAAARELVLRAGTSDMEEEEGPLAGGPGLQEPLQLGELDITSDEFILDEVDDTQGLFLPL

SEQ ID NO: 15290 - DNA, 475 bp, Homo sapiens
catgtcatactaaatatttattttctgcagactgacttcggagtaattcttgagccaggaggggagaggttagtgttcaaattgctgagatcttaggtcaaaaagctacagaaaagaaatcactttgaaaaacacaatgactcagaggcagtcaccccttgccagcaattccaagagctgaggaggcttcatgcctcaggacatggtgactagttgagtgaaccagagattgaggcagtggtttttacaggggaagaaacaagccttgggtgtatgggagcaggaaaggagggtgacagactggagaaatgataaaggccattttggaagcccacagggaagtggtcttgggaaacctgaagacactgggatattcagaaggccaaggggatccagcttatcctgttgggcaaggtgctgggagtgaaggcaggaactaccaaagccacggatcagctgagttacccgggctaat

SEQ ID NO: 15291 - protein, 54 aa, Homo sapiens
MIKAILEAHREVVLGNLKTLGYSEGQGDPAYPVGQGAGSEGRNYQSHGSAELPG

SEQ ID NO: 15292 - DNA, 853 bp, Homo sapiens
gaaacacctggattcttatctagctgactgctacgatgccattgctgtttttctctgtatccacattgttctccggttccgtaacattgcagcaaagagggatgttcctgccctggacaggtcactgaattctggtccttgatgcccaacaggccacgaactctcttggtcttgcatgactctgccctgaccttagactcctactgacctggtatcatcaacctttattcccattcatttgctccggaggcagtagtgctgctttttgactcacctttctccaaccactgccccccaacccccacaactagctattgaccattaaactgaatgatgccccactccctcccatccccctccaacattccttgctggctgacctctgattctgattaagcccacaggtactgggaacaggtgcttgccttgctatggccacggtttgaactgatcctggagatgaatgttcagagcgtccgaagcactgacccccagcgcctaggggggttggatactcggccccactatatcacacgccgctatgcagagttctcctccgctcttgtcagtatcaaccagacaattcctaatgaacggaccatgcaattgctgggacagctgcaggtggaggtggagaattttgtcctccgagtggcagctgagttctcctcaaggaaggagcagcttgtgtttctgatcaacaactatgacatgatgctgggtgtgctgatggagcgggctgcagatgacagcaaagaggttgagagcttccagcagctgctcaatgctcggacacaggaattcattgaagagttgctgtctcccccttttgggggtttagtggcatttgtga

SEQ ID NO: 15293 - protein, 130 aa, Homo sapiens
MNVQSVRSTDPQRLGGLDTRPHYITRRYAEFSSALVSINQTIPNERTMQLLGQLQVEVENFVLRVAAEFSSRKEQLVFLINNYDMMLGVLMERAADDSKEVESFQQLLNARTQEFIEELLSPPFGGLVAF

SEQ ID NO: 15294 - DNA, 551 bp, Homo sapiens
ctgtgggtaggagggactgaaggtagagtcacatcacatggaggtgggttggctaaggaagttgggaggttgtgttggttgggccaggaggtgggtgtgattttccttcccactctctcctagatcacacgccgctatgcagagttctcctccgctcttgtcagtatcaaccagacaattcctaatgaacggaccatgcaattgctgggacagctgcaggtggaggtggagaattttgtcctccgagtggcagctgagttctcctcaaggaaggagcagcttgtgtttctgatcaacaactatgacatgatgctgggtgtgctgatggtaataggtgctccttctccttgccttcctacccagaaaattcggtttcccccactgctgttagctctgtgagggcagagatgatgcctgtcttgttcagtgttttactcttggagtctggcacagtgtccagcttagtacaataagtgtggaatgaaggggacatcctgaagtgaaggactgctttccccaaactagacatttccctttgtcttcccttagga

SEQ ID NO: 15295 - protein, 67 aa, Homo sapiens [sequence omitted]

SEQ ID NO: 15296 - DNA, 1055 bp, Homo sapiens
aagagctgggaaccattgacttaagggcatgcagaggggagagactggatgaggggaatgacagtcagaggcaggtgttgaggtggatgcaggagtagcaacagcaggtgggtgtaggccctttttgtacccctatgttcccccaccttttcagtgcccattcagcttgctcttagacagcccggacctagatagatgcgaagggtctgcctagctcttattactcaggtttactgattttccagccatatccatgggaagtcagtgttggggtccatcccttctgtttttcttctttactcctcctctcccagtatccatttgaggccctcttccgcagccagcactacgccctcctagacaattcctgccgcgaataccttttcatctgtgaattttttgttgtgtctggcccagctgcacacgacctgttccatgctgtcatgggccgtacactcagcatgaccctgaaacacctggattcttatctagctgactgctacgatgccattgctgtttttctctgtatccacattgttctccggttccgtaacattgcagcaaagagggatgttcctgccctggacaggtcactgaattctggtccttgatgcccaacaggccacgaactctcttggtcttgcatgactctgccctgaccttagactcctactgacctggtatcatcaacctttattcccattcatttgctccggaggcagtagtgctgctttttgactcacctttctccaaccactgccccccaacccccacaactagctattgaccattaaactgaatgatgccccactccctcccatccccctccaacattccttgctggctgacctctgattctgattaagcccacaggtactgggaacaggtgcttgccttgctatggccacggtttgaactgatcctggagatgaatgttcagagcgtccgaagcactgacccccagcgcctaggggggttggatactcggccccactatgtgagggagggcaagggtaacaaagggttcttgaaaggcagggctctaagcatcattg

SEQ ID NO: 15297 - protein, 55 aa, Homo sapiens
MGRTLSMTLKHLDSYLADCYDAIAVFLCIHIVLRFRNIAAKRDVPALDRSLNSGP

SEQ ID NO: 15298 - DNA, 589 bp, Homo sapiens
ctctcttccacaggaggcctacacgccgccgcttgtgctgcagccatgtttactgtgtctgatttcttcccccgtactttttcaactagtctctagtgatccctgaaaagttccagcatattttgcgagtactcaacaccaacatcgatgggcggcggaaaatagcctttgccatcactgccattaagggtgtgggccgaagatatgctcatgtggtgttgaggaaagcagacattgacctcaccaagagggcgggagaactcactgaggatgaggtggaacgtgtgatcaccattatgcagaatccacgccagtacaagatcccagactggttcttgaacagacagaaggatgtaaaggatggaaaatacagccaggtcctagccaatggtctggacaacaagctccgtgaagacctggagcgactgaagaagattcgggcccatagagggctgcgtcacttctggggccttcgtgtccgaggccagcacaccaagaccactggccgccgtggccgcaccgtgggtgtgtccaagaagaaataagtctgtaggccttgtctgttaataaatagtttatatacctatgg

SEQ ID NO: 15299 - protein, 82 aa, Homo sapiens
MQNPRQYKIPDWFLNRQKDVKDGKYSQVLANGLDNKLREDLERLKKIRAHRGLRHFWGLRVRGQHTKTTGRRGRTVGVSKKK

SEQ ID NO: 15300 - DNA, 548 bp, Homo sapiens
ctctcttccacaggaggcctacacgccgccgcttgtgctgcagccatgtctctagtgatccctgaaaagttccagcatattttgcgagtactcaacaccaacatcgatgggcggcggaaaatagcctttgccatcactgccattaagggtgtgggccgaagatatgctcatgtggtgttgaggaaagcagacattgacctcaccaagagggcgggagaactcactgaggatgaggtggaacgtgtgatcaccattatgcagaatccacgccagtacaagatcccagactggttcttgaacagacagaaggatgtaaaggatggaaaatacagccaggtcctagccaatggtctggacaacaagctccgtgaagacctggagcgactgaagaagattcgggcccatagagggctgcgtcacttctggggccttcgtgtccgaggccagcacaccaagaccactggccgccgtggccgcaccgtgggtgtgtccaagaagaaataagtctgtaggccttgtctgttaataaatagtttatatacctatgg

SEQ ID NO: 15301 - protein, 152 aa, Homo sapiens [sequence omitted]

SEQ ID NO: 15302 - DNA, 651 bp, Homo sapiens
ctcttccacaggaggcctacacgccgccgcttgtgctgcagccatgtctctagtgatccctgaaaagttccagcatattttgcgagtactcaacaccaacatcgatgggcggcggaaaatagcctttgccatcactgccattaagggtgtgggccgaagatatgctcatgtggtgttgaggaaagcagacattgacctcaccaagagggcgggagaactcactgaggatgaggtggaacgtgtgatcaccattatgcagaatccacgccagtacaagatcccagactggttcttgaacagacagaaggatgtaaaggatggaaaatacagccaggtgtgtactgaaatgagggcaggattagaggaagggtggagggtcctaacagaattgggcataggaggtcaggggataaaacatcccttgccccctcctctgaatccaggtcctagccaatggtctggacaacaagctccgtgaagacctggagcgactgaagaagattcgggcccatagagggctgcgtcacttctggggccttcgtgtccgaggccagcacaccaagaccactggccgccgtggccgcaccgtgggtgtgtccaagaagaaataagtctgtaggccttgtctgttaataaatagtttatatacct

SEQ ID NO: 15303 - protein, 144 aa, Homo sapiens
MSLVIPEKFQHILRVLNTNIDGRRKIAFAITAIKGVGRRYAHVVLRKADIDLTKRAGELTEDEVERVITIMQNPRQYKIPDWFLNRQKDVKDGKYSQVCTEMRAGLEEGWRVLTELGIGGQGIKHPLPPPLNPGPSQWSGQQAP

SEQ ID NO: 15304 - DNA, 779 bp, Homo sapiens
ctcttccacaggaggcctacacgccgccgcttgtgctgcagccatgtctctagtgatccctgaaaagttccagcatattttgcgagtactcaacaccaacatcgatgggcggcggaaaatagcctttgccatcactgccattaagggtgtgggccgaagatatgctcatgtggtgttgaggaaagcagacattgacctcaccaagagggcgggagaactcactgaggatgaggtggaacgtgtgatcaccattatgcagaatccacgccagtacaagatcccagactggttcttgaacagacagaaggatgtaaaggatggaaaatacagccaggtgtgtactgaaatgagggcaggattagaggaagggtggagggtcctaacagaattgggcataggaggtcaggggataaaacatcccttgccccctcctctgaatccaggtcctagccaatggtctggacaacaagctccgtgaagacctggagcgactgaagaagattcgggcccatagagggctgcgtcacttctgggggtgagtggggggtctcatctccctgcctacctcgactcagcattcctcctactcgctcttctttttccccaaccttttgtttctgctgtgcatgacctgtgactcttctctttttacctgcagccttcgtgtccgaggccagcacaccaagaccactggccgccgtggccgcaccgtgggtgtgtccaagaagaaataagtctgtaggccttgtctgttaataaatagtttatatacctatggc

SEQ ID NO: 15305 - protein, 144 aa, Homo sapiens; identical to SEQ ID NO: 15303

SEQ ID NO: 15306 - DNA, 644 bp, Homo sapiens
gccgccgcttgtgctgcagccatgtctctagtgatccctgaaaagttccagcatattttgcgagtactcaacaccaacatcgatgggcggcggaaaatagcctttgccatcactgccattaagggtgtgggccgaagatatgctcatgtggtgttgaggaaagcagacattgacctcaccaagagggcgggagaactcactgaggatgaggtggaacgtgtgatcaccattatgcagaatccacgccagtacaagatcccagactggttcttgaacagacagaaggatgtaaaggatggaaaatacagccaggtcctagccaatggtctggacaacaagctccgtgaagacctggagcgactgaagaagattcgggcccatagagggctgcgtcacttctgggggtgagtggggggtctcatctccctgcctacctcgactcagcattcctcctactcgctcttctttttccccaaccttttgtttctgctgtgcatgacctgtgactcttctctttttacctgcagccttcgtgtccgaggccagcacaccaagaccactggccgccgtggccgcaccgtgggtgtgtccaagaagaaataagtctgtaggccttgtctgttaataaatagtttatataccta

SEQ ID NO: 15307 - protein, 128 aa, Homo sapiens
MSLVIPEKFQHILRVLNTNIDGRRKIAFAITAIKGVGRRYAHVVLRKADIDLTKRAGELTEDEVERVITIMQNPRQYKIPDWFLNRQKDVKDGKYSQVLANGLDNKLREDLERLKKIRAHRGLRHFWG

SEQ ID NO: 15308 - DNA, 1023 bp, Homo sapiens
gcttgtgctgcagccatggtaagactggaatccgtgccgtgatccagcggcatcgcagctcgggcaaggaaagccggctgtcagggttctggaaacgtcctgccctgagggcctgcgactttctgtatggagccttggatcgcgtccctggaaagggacaccaaagatttccaattccggagagcgggcccgaggaagggtcactgctcgggcgcacgaaagctgtctaaggcttgggcgtatatggggaactctggcttttgccacgcacttttgggaatgggcaggagacctgcttcctctctccagaggttgcattttcccaagcttgaacgcttcatgtgcctactctgcaggactgaggagtttgctctgtggtgtgaaaacctaaggaatggggggcgggtgtcttgccacttgtgtgacaggcttaacctttttgtatgaagttcgtttgccttatcggccttactgtttgatagtttactgtgtctgatttcttcccccgtactttttcaactagtctctagtgatccctgaaaagttccagcatattttgcgagtactcaacaccaacatcgatgggcggcggaaaatagcctttgccatcactgccattaagggtgtgggccgaagatatgctcatgtggtgttgaggaaagcagacattgacctcaccaagagggcgggagaactcactgaggatgaggtggaacgtgtgatcaccattatgcagaatccacgccagtacaagatcccagactggttcttgaacagacagaaggatgtaaaggatggaaaatacagccaggtcctagccaatggtctggacaacaagctccgtgaagacctggagcgactgaagaagattcgggcccatagagggctgcgtcacttctggggccttcgtgtccgaggccagcacaccaagaccactggccgccgtggccgcaccgtgggtgtgtccaagaagaaataagtctgtaggccttgtctgttaataaatagtttatatacctatgg

SEQ ID NO: 15309 - protein, 82 aa, Homo sapiens; identical to SEQ ID NO: 15299

SEQ ID NO: 15310 - DNA, 459 bp, Homo sapiens
gctataaaggaatttaaaaatcagattcaacactaattccgaaacccctcacttcattcagggtgtgggccgaagatatgctcatgtggtgttgaggaaagcagacattgacctcaccaagagggcgggagaactcactgaggatgaggtggaacgtgtgatcaccattatgcagaatccacgccagtacaagatcccagactggttcttgaacagacagaaggatgtaaaggatggaaaatacagccaggtcctagccaatggtctggacaacaagctccgtgaagacctggagcgactgaagaagattcgggcccatagagggctgcgtcacttctggggccttcgtgtccgaggccagcacaccaagaccactggccgccgtggccgcaccgtgggtgtgtccaagaagaaataagtctgtaggccttgtctgttaataaatagtttatataccta

SEQ ID NO: 15311 - protein, 82 aa, Homo sapiens; identical to SEQ ID NO: 15299

SEQ ID NO: 15312 - DNA, 1735 bp, Homo sapiens
ggatgggagcgcgcaacgcggaagcgggcggcagaccggccgccggggcgaggcgggggaggggccgtgagtgccgcagtcggccagccatggagcggagcttgctggcggcgaggccgcggcgacaaggtagccacccccgcagcatgcctcgaccgcggtccgcagctgcaccgcctctccccgccccccagggtgcgctggtcccggtcgcgcgctcagacctccgcatcccgggcgtggtcggttaagtccccggccgtgacccaggcccggggagctagtctccgcccttcgctcttacggatcccctcggagtacgccgcaccatgcagctcaggctcttccggcgcctccttctcgccgctttgctgctggtgatcgtctggaccctcttcgggccttcggggttgggggaggagctgctgagcctctcactagcctccctgctcccagcccccgcctcaccggggccgcccctggccctgccccgcctcttgatccccaaccaggaagcttgcagtggtcccggggcccctcccttcctgctcatcctggtgtgcacggctccggagaacctgaaccagagaaacgccattcgggcttcgtggggcgggctgcgcgaggcccgggggctcagggtacagacgctattcttgctgggagagccgaacgcacagcaccccgtgtggggttcccaggggagtgacctggcctcggagtcagcagcccagggggatatcttgcaggccgccttccaggactcctaccgcaacctcaccctaaagaccctcagcgggctgaactgggctgagaaacactgccccatggcccgatacgtcctcaagacggacgatgatgtgtatgtcaacgtccctgaactggtatcagagctggtcttgcgagggggccgttgggggcaatgggagagaagcacggaaccccagagagaggctgagcaggaaggaggccaggttttgcacagcgaggaagtgcctcttctgtacttgggccgggtgcactggcgcgtgaacccctctcggacaccggggggcaggcaccgcgtatcagaggagcagtggcctcacacctggggcccctttccaccctatgcctcaggcacggggtatgtgctgtcagcgtctgctgtgcagctcattctcaaggtggccagccgggcaccccttctcccattagaggatgtctttgtgggggtaagtgcccgacgaggaggcctcgccccaacacagtgtgtcaagctggctggtgccacccactacccgctagaccggtgctgctatgggaaattcctgctgacgtcccacaggctggacccctggaagatgcaggaagcctggaagctggtgggtggctctgacggggaaaggactgcgcccttttgctcctggttccagggagtcctgggcatcctgcggtgtcgagcaatagcctggcttcagagctgagagtgcctggggccacaggaaaggcaggaacaggaccttctctctcccaggcccaacgcaggggccctcactggctgcagctgatctgtttccttataccagatcctcagtctcactaaagacagcgatatgggagacacccaggggcctggcccgccagcccaaaagatggtcatcgggaagagaaaaagaaaaaaatgctgcagttgttctctcaagctagggcagaagaggggtgtcaagctcctcaataaacttgtctccacttc

SEQ ID NO: 15313 - protein, 378 aa, Homo sapiens; identical to SEQ ID NO: 1718

SEQ ID NO: 15314 - DNA, 1622 bp, Homo sapiens
ctcaccctaaagaccctcagcgggctgaactgggctgagaaacactgccccatggcccgatacgtcctcaagacggacgatgatgtgtatgtcaacgtccctgaactggtatcagagctggtcttgcgagggggccgttgggggcaatgggagagaagcacggaaccccagagagaggctgagcaggaaggaggccaggttttgcacagcgaggaagtgcctcttctgtacttgggccgggtgcactggcgcgtgaacccctctcggacaccggggggcaggcaccgcgtatcagaggagcagtggcctcacacctggggcccctttccaccctatgcctcaggcacggggtatgtgctgtcagcgtctgctgtgcagctcattctcaaggtggccagccgggcaccccttctcccattagaggatgtctttgtgggggtaagtgcccgacgaggaggcctcgccccaacacagtgtgtcaagctggctggtgccacccactacccgctagaccggtgctgctatgggaaattcctgctgacgtcccacaggctggacccctggaagatgcaggaagcctggaagctggtgggtggctctgacggggaaaggactgcgcccttttgctcctggttccagggagtcctgggcatcctgcggtgtcgagcaatagcctggcttcagagctgagagtgcctggggccacaggaaaggcaggaacaggaccttctctctcccaggcccaacgcaggggccctcactggctgcagctgatctgtttccttataccagatcctcagtctcactaaagacagcgatatgggagacacccaggggcctggcccgccagcccaaaagatggtcatcgggaagagaaaaagaaaaaaatgctgcagttgttctctcaagctagggcagaagaggggtgtcaagctcctcaataaacttgtctccacttcttcgagtgcagtgtggtcttcaccaggacccccagaacaccacaaacctggagagcccagaggctgccagaccctgctgcatgggaaggacatctccagggacatgggagagaggacagcctctctgaggaggaaggcccctaaaaggcaaagctaaggccacagcagccacaagaacctcagcgcagagccctgcccacagcaggtgcccagtgaatacctgatgacaaaaggaatcagaggaaaatacaaatcagacagaaaagctgtggaaaatgcagatactccctcaggaacagcagaaatccaaagcagacaccacctccacccctcacatcagccagacctggagagaacgatcatcttgaatgacaatgatgaacacagcgctccctattttgctaagcgctgtgctaaactatatgccttaactcatcttaatgtctacaacagcttatatgagggctttaaaccaaggcttggtaaactactgcccatgggccaaacctggcccatcatctagttctgtatagcccacaagccaagaatggtttttacatttttaagtggttgaaaaaaaatcaaaagaatattttgagactgtgaaaaccgtatgaaattcaaattccaatatccaacaaataaagttttattggaacgggg

SEQ ID NO: 15315 - protein, 212 aa, Homo sapiens
MARYVLKTDDDVYVNVPELVSELVLRGGRWGQWERSTEPQREAEQEGGQVLHSEEVPLLYLGRVHWRVNPSRTPGGRHRVSEEQWPHTWGPFPPYASGTGYVLSASAVQLILKVASRAPLLPLEDVFVGVSARRGGLAPTQCVKLAGATHYPLDRCCYGKFLLTSHRLDPWKMQEAWKLVGGSDGERTAPFCSWFQGVLGILRCRAIAWLQS

SEQ ID NO: 15316 - DNA, 826 bp, Homo sapiens
gaactgggctgagaaacactgccccatggcccgatacgtcctcaagacggacgatgatgtgtatgtcaacgtccctgaactggtatcagagctggtcttgcgagggggccgttgggggcaatgggagagaagcacggaaccccagagagaggctgagcaggaaggaggccaggttttgcacagcgaggaagtgcctcttctgtacttgggccgggtgcactggcgcgtgaacccctctcggacaccggggggcaggcaccgcgtatcagaggagcagtggcctcacacctggggcccctttccaccctatgcctcaggcacggggtatgtgctgtcagcgtctgctgtgcagctcattctcaaggtggccagccgggcaccccttctcccattagaggatgtctttgtgggggtaagtgcccgacgaggaggcctcgccccaacacagtgtgtcaagctggctggtgccacccactacccgctagaccggtgctgctatgggaaattcctgggcatcctgcggtgtcgagcaatagcctggcttcagagctgagagtgcctggggccacaggaaaggcaggaacaggaccttctctctcccaggcccaacgcaggggccctcactggctgcagctgatctgtttccttataccagatcctcagtctcactaaagacagcgatatgggagacacccaggggcctggcccgccagcccaaaagatggtcatcgggaagagaaaaagaaaaaaatgctgcagttgttctctcaagctagggcagaagaggggtgtcaagctcctcaataaacttgtctccacttcttcg

SEQ ID NO: 15317 - protein, 175 aa, Homo sapiens
MARYVLKTDDDVYVNVPELVSELVLRGGRWGQWERSTEPQREAEQEGGQVLHSEEVPLLYLGRVHWRVNPSRTPGGRHRVSEEQWPHTWGPFPPYASGTGYVLSASAVQLILKVASRAPLLPLEDVFVGVSARRGGLAPTQCVKLAGATHYPLDRCCYGKFLGILRCRAIAWLQS

SEQ ID NO: 15318 - DNA, 818 bp, Homo sapiens
cggaccctgccccatggagcagggcacctggccttctcccagaggggactgctggtggcgggaatgggtgacgttgtcaacatctgggcagggcagggggccggtgagcccaacttcgatggcctggagagtaatccatacagaagccggaagcagcgccaggagtgggaggtgaaggccctgctagagaaggtacctgcagagcttatttgtctggacccacgagccctggccgaggtggatgtcatctccctggagcagggaaagaaggagcagatagagaggctgggctatgacccgcaggctaaggctcccttccagccaaagccaaagcagaagggccgcagctccacggcaagcctggtgaagaggaagaggaaggtcatggatgaggaacacagggacaaggtccggcagagccttcagcagcagcatcataaggaggcgaaggccaagcccacgggggcccggccatctgccctggacagatttgtgcgctgagccagactccagggttgcctgggaacagtctctccccaagatcacctgtagggaaatgagtgttccctggaacaaggaggtgggggcagtgtggccccttccccaactgggggtggacagctgtctcctggggtgggttggtattaaagaggaaagcgattttttggataatgtgtctggatcatcttgtggacctgttcccctcccccttgccaagcatgaggccattctaggatcggaggggtcagtgtcctgcctctacccccaccccataccttgtggctgctgtggccttagctttgccttttaggggcctt

SEQ ID NO: 15319 - protein, 145 aa, Homo sapiens
MGDVVNIWAGQGAGEPNFDGLESNPYRSRKQRQEWEVKALLEKVPAELICLDPRALAEVDVISLEQGKKEQIERLGYDPQAKAPFQPKPKQKGRSSTASLVKRKRKVMDEEHRDKVRQSLQQQHHKEAKAKPTGARPSALDRFVR

SEQ ID NO: 15320 - DNA, 571 bp, Homo sapiens
gaggaagagaccgttccgaccacagccggagcctctccagggcctcctcgtaacaagaagaatcgggagctccgtcctcagagaccaaaaaatgcttacatcttaaagaagtctcggatctctaagaagcctcaggtcccgaagaaaccccgagaatggaagaacccggaagccttcagcagcagcatcataaggaggcgaaggccaagcccacgggggcccggccatctgccctggacagatttgtgcgctgagccagactccagggttgcctgggaacagtctctccccaagatcacctgtagggaaatgagtgttccctggaacaaggaggtgggggcagtgtggccccttccccaactgggggtggacagctgtctcctggggtgggttggtattaaagaggaaagcgattttttggataatgtgtctggatcatcttgtggacctgttcccctcccccttgccaagcatgaggccattctaggatcggaggggtcagtgtcctgcctctacccccaccccataccttgtggctgctgtggccttagctttgccttttaggggcctt

SEQ ID NO: 15321 - protein, 32 aa, Homo sapiens
MEEPGSLQQQHHKEAKAKPTGARPSALDRFVR

SEQ ID NO: 15322 - DNA, 507 bp, Homo sapiens
agaaaccgcggcgatactgggaggaagagaccgttccgaccacagccggagcctctccagggcctcctcgtaacaagaagaatcgggagctccgtcctcagagaccaaaaaatgcttacatcttaaagaagtctcggatctctaagaagcgggggcccggccatctgccctggacagatttgtgcgctgagccagactccagggttgcctgggaacagtctctccccaagatcacctgtagggaaatgagtgttccctggaacaaggaggtgggggcagtgtggccccttccccaactgggggtggacagctgtctcctggggtgggttggtattaaagaggaaagcgattttttggataatgtgtctggatcatcttgtggacctgttcccctcccccttgccaagcatgaggccattctaggatcggaggggtcagtgtcctgcctctacccccaccccataccttgtggctgctgtggccttagctttgccttttaggggcctt

SEQ ID NO: 15323 - protein, 84 aa, Homo sapiens [sequence omitted]

SEQ ID NO: 15324 - DNA, 670 bp, Homo sapiens
cggaccctgccccatggagcagggcacctggccttctcccagaggggactgctggtggcgggaatgggtgacgttgtcaacatctgggcagggcagggggccggtgagcccaacttcgatggcctggagagtaatccatacagaagccggaagcagcgccaggagtgggaggtgaaggccctgctagagaaggtacctgcagagcttatttgtctggacccacgagccctggccgaggtggatgtcatctccctggagcagggaaagaaggagcagatagagaggctgggctatgacccgcaggctaaggctcccttccagccaaagccaaagcagaagggccgcagctccacggcaagcctggtgaagaggaagaggaaggtcatggatgaggaacacagggacaaggtccggcagagccttcagcagcagcatcataaggaggcgaaggccaagcccacgggggcccggccatctgccctggacagatttgtgcgctgagccagactccagggttgcctgggaacagtctctccccaagatcacctgtagggaaatgagtgttccctggaacaaggaggtgggggcagtgtggccccttccccaactgggggtggacagctgtctcctggggtgggttggtattaaagaggaaagcgattttttggat

SEQ ID NO: 15325 - protein, 145 aa, Homo sapiens; identical to SEQ ID NO: 15319

SEQ ID NO: 15326 - DNA, 2332 bp, Homo sapiens
gttctgctaaaaagactagactaggacatttttaggcaagatggggaaactaatccagaaaaagaaaccgcaccgctacttagcccctggctccggacctgcctttcttttttaaatcactcttgcataagctgccgctcgcgataaggtgccaaaaactgttccgcccctctaaggagagcgtgccctcactcaagatggcacctagagagcttcatacctggtacgctgctgattggatgaaggacagagggcttccgggagttttcaagccgactgtgtggcagctgagaggagttttgcacgtggatcgccgttcgggtgggcgagatggagacagcccccaagccgggcaaggatgtcccgcccaagaaagacaaacttcagaccaagagaaagaaaccgcggcgatactgggaggaagagaccgttccgaccacagccggagcctctccagggcctcctcgtaacaagaagaatcgggagctccgtcctcagagaccaaaaaatgcttacatcttaaagaagtctcggatctctaagaagcctcaggtcccgaagaaaccccgagaatggaagaacccggagtcccagcgcggcttgtccgggacccaagatccattcccaggccccgcccccgtccctgtggaagtggtccagaagttctgtcgcattgacaaatcccgaaagctaccacattctaaagccaaaactcgaagccgacttgaggtggctgaagctgaggaagaggaaacaagtatcaaagctgctcgttctgagctgctgcttgctgaagaacctgggtttctggaaggggaggatggggaagacacagcaaagatatgccaggctgacattgtggaggctgtggacattgcaagtgcagccaagcactttgacttgaatctgcggcagtttggaccctacagactaaactactctcgaactggaagacacctggcttttggagggcgccgaggtcatgtggctgcccttgattgggtaacaaagaagcttatgtgcgagatcaacgtcatggaggcggtgcgggacatccggtttctccattctgaggcactgcttgctgttgctcagaaccgctggctccacatctatgacaatcagggcattgagctccactgtatccgccgctgtgaccgagtaacacggcttgagttcctgcccttccacttcctcctggctacagcttcagaaacagggtttctaacctacctggatgtgtcagtggggaagattgtggcagctctgaatgctcgagctgggcggctcgatgttatgagtcagaacccttacaatgccgtcatccatctcggacacagcaatggtactgtgtctttatggagtccagctatgaaggagccactggcaaagattctctgtcatcgtggtggggtccgggctgtggcagtagattctacaggcacgtacatggccacctctggcctagaccaccagctgaagatctttgacttgcgagggacgtaccagcctctgagcactcggaccctgccccatggagcagggcacctggccttctcccagaggggactgctggtggcgggaatgggtgacgttgtcaacatctgggcagggcagggcaaggccagcccaccctcccttgaacagccctacctcacccaccggctctcaggccctgtgcatggccttcagttctgcccctttgaagatgtgctgggggtggggcacactgggggcatcaccagcatgctggtccctggggccggtgagcccaacttcgatggcctggagagtaatccatacagaagccggaagcagcgccaggagtgggaggtgaaggccctgctagagaaggtacctgcagagcttatttgtctggacccacgagccctggccgaggtggatgtcatctccctggagcagggaaagaaggagcagatagagaggctgggctatgacccgcaggctaaggctcccttccagccaaagccaaagcagaagggccgcagctccacggcaagcctggtgaagaggaagaggaaggtcatggatgaggaacacagggacaaggtccggcagagccttcagcagcagcatcataaggaggcgaaggccaagcccacgggggcccggccatctgccctggacagatttgtgcgctgagccagactccagggttgcctgggaacagtctctccccaagatcacctgtagggaaatgagtgttccctggaacaaggaggtgggggcagtgtggccccttccccaactgggggtggacagctgtctcctggggtgggttggtattaaagaggaaagcgattttttggat

SEQ ID NO: 15327 - protein, 610 aa, Homo sapiens
METAPKPGKDVPPKKDKLQTKRKKPRRYWEEETVPTTAGASPGPPRNKKNRELRPQRPKNAYILKKSRISKKPQVPKKPREWKNPESQRGLSGTQDPFPGPAPVPVEVVQKFCRIDKSRKLPHSKAKTRSRLEVAEAEEEETSIKAARSELLLAEEPGFLEGEDGEDTAKICQADIVEAVDIASAAKHFDLNLRQFGPYRLNYSRTGRHLAFGGRRGHVAALDWVTKKLMCEINVMEAVRDIRFLHSEALLAVAQNRWLHIYDNQGIELHCIRRCDRVTRLEFLPFHFLLATASETGFLTYLDVSVGKIVAALNARAGRLDVMSQNPYNAVIHLGHSNGTVSLWSPAMKEPLAKILCHRGGVRAVAVDSTGTYMATSGLDHQLKIFDLRGTYQPLSTRTLPHGAGHLAFSQRGLLVAGMGDVVNIWAGQGKASPPSLEQPYLTHRLSGPVHGLQFCPFEDVLGVGHTGGITSMLVPGAGEPNFDGLESNPYRSRKQRQEWEVKALLEKVPAELICLDPRALAEVDVISLEQGKKEQIERLGYDPQAKAPFQPKPKQKGRSSTASLVKRKRKVMDEEHRDKVRQSLQQQHHKEAKAKPTGARPSALDRFVR

SEQ ID NO: 15328 - DNA, 2464 bp, Homo sapiens
catgcacagggcctgagagccggtgggtgaggtagggctgttcaagggagggtgggctggccttgccctgccctgcccagatgttgacaacgtcacccattcccgccaccagcagtcccctctgggagaaggccaggtgccctgctccatggggcagggtccgagtgctcagaggctggtacgtccctcgcaagtcaaagatcttcagctggtggtctaggccagaggtggccatgtacctggtgagagaagagggatcaattaatatgtcagtaaatgggtttaccaagcaagctgtggccaagtccaggcatcaagtctggctggggagaaaaagattaatagtaataaccactgccatcaccctgaacactccacaggcatcctctcagttaagctgcacacaactcatactatttttatttccctttaagaggtgaggaaactgaagctcagggaaaggaaagctaggtcagtgaatggtcaggcctgtctctttagcatctgcctctaacctgctaacaccacacagccctctcaagacacgggcgtcaaaaggaacgcccacacgacaggctgcacccaaatgtgatgtccccctgtacacacatgcagcacacagcccagcaaggggaaggagcatgtgcagtggtcagaaaggcttcatgggaaaggtgggatttgagccattctagataattctcaaaaaattacaggaagtagatacacagcaggttcaaatgcattaacaccagagtgttgagactgagagggaagcagaggtttgttaggattggtgggaaacatggtcaggaaaatcaggagcagacaatttgtgaggtttctttaaagtcagactgaggacccacagctcatgatcccaacattgctctctggcagtgacaaatcacaaagtgaaggctccaaggacttgagaagacctactcagggaagtggtgaagtaatgcactggaggcccttgccctgcccctctgtgtgctttccctggaaggaaggagggaaggttggtgaccaaatcctctccaggaatcatgtactgcataagttgtttactttcagaagttggagttccttttctttttttgagacagggtctctctgttgcccaagctggagtgcagtggcatgaccctggctcactgcagcctctgcctccctggttcaagtgattctcgtgcctcagcctcccaagtagctgggattacaggcatgcgccaccaccgctaatttttagtagagccagggtttcgccatgttgaccacgctggtcttgaactcctggcctcaaatgacctgcccaccttggcctcccagacatcctggagactttgaataagctggtggccaagctggatgtggtggctcacagtaattactctgtaatcccagcactttgggaggccgaggtgggtggatcacctgaggtcaggagtttgagaccagccaagccaacatggcaaaaccccatctctactaaaaatacaaaaattagcgcatgcagtggcatgcacttgtactcccagctacttggaggctgaggcagaacaatcacttgagcctaggaggcggaggttgtaatgaaccgagatcgcgccactgcactccagcctgggtgatagatcaagactccgtctcgaaaaatagtaataaaataaataaatgcatcacctggccaatcattctcaaaaaccatagccatggccgggtgcagtggctcacgcctgtaatcccaacacttgcactttgggaggccgaagcaggtggatcacgatgtcaggagttcaagatcagcctggccaagatggtgaaaccccatctctactaaacattaaaaaattaactgggcgtggttcgtgggcgcctgtaatcccagctactcaggaggctgaggcaggagaatcgcttgaaccccggggggcagaggttgtggtgagctgagattgtgccactgcactccagcctgggtgacagatcaagactctgtctcaaaaaaaaaaaaaaaatagccacaagtttttatacctaaaggataacgggagcaccacaccagggcaggctcaacgattcatccttttgtctccagaacctcagcgcagagccctgcccacagcaggtgcccagtgaatacctgatgacaaaaggaatcagaggaaaatacaaatcagacagaaaagctgtggaaaatgcagatactccctcaggaacagcagaaatccaaagcagacaccacctccacccctcacatcagccagacctggagagaacgatcatcttgaatgacaatgatgaacacagcgctccctattttgctaagcgctgtgctaaactatatgccttaactcatcttaatgtctacaacagcttatatgagggctttaaaccaaggcttggtaaactactgcccatgggccaaacctggcccatcatctagttctgtatagcc

SEQ ID NO: 15329 - protein, 119 aa, Homo sapiens
MLTTSPIPATSSPLWEKARCPAPWGRVRVLRGWYVPRKSKIFSWWSRPEVAMYLVREEGSINMSVNGFTKQAVAKSRHQVWLGRKRLIVITTAITLNTPQASSQLSCTQLILFLFPFKR

SEQ ID NO: 15330 - DNA, 893 bp, Homo sapiens
atcttgagtgagggcacgctctccttagaggggcggaacagtttttggcaccttatcgcgagcggcagcttatgcaagagtgatttaaaaaagaaaggcaggtccggagccaggggctaagtagcggtgcggtttctttttctggattagtttccccatcttgcctaaaaatgtcctagtctagtctttttagcagaactccactccctaaacatgtcagaactacacttcccatcaagggtcagaaagaaacttccggcacagtcttttcccagcattccttgtttacttccgggtttattactactgaaggaagaacgtgagtaggccagatcagaaaagggagctcaggtaccttccagagagtgagacccagcgcccttgtctcgcacccagtaggctttcatccccgccatggcggagctgatccagaagaagctacagggagaagtggagaaatatcaacagctacagaaggacttaagtaaatccatgtcggggaggcagaaacttgaagcacaactaacagaaaataatatcgtgaaagaggaactggccctgctggatgggtccaacgtggtctttaaacttctgggtccggtgctagtcaaacaggagctgggggaggctcgggccacagtagggaagaggctggactatatcacagctgaaattaagcgatacgaatcccagcttcgggatcttgagcggcagtcagagcaacagagggagacccttgctcagctgcagcaggagttccagcgggcccaggcagcaaaggcaggggctcctggcaaggcctgaccccatggtggggggaggggaggggaggggagggaatgaggcagctctaggatctatactgtagctaataaaatgtaaaaacacctggc

SEQ ID NO: 15331 - protein, 129 aa, Homo sapiens; identical to SEQ ID NO: 1722

SEQ ID NO: 15332 - DNA, 1380 bp, Homo sapiens
atcttgagtgagggcacgctctccttagaggggcggaacagtttttggcaccttatcgcgagcggcagcttatgcaagagtgatttaaaaaagaaaggcaggtccggagccaggggctaagtagcggtgcggtttctttttctggattagtttccccatcttgcctaaaaatgtcctagtctagtctttttagcagaactccactccctaaacatgtcagaactacacttcccatcaagggtcagaaagaaacttccggcacagtcttttcccagcattccttgtttacttccgggtttattactactgaaggaagaacgtgagtaggccagatcagaaaagggagctcaggtaccttccagagagtgagacccagcgcccttgtctcgcacccagtaggctttcatccccgccatggcggagctgatccagaagaagctacagggagaagtggagaaatatcaacagctacagaaggacttaagtaaatccatgtcggggaggcagaaacttgaagcacaactaacagaaaataatatcgtgaaagaggaactggccctgctggatgggtccaacgtggtctttaaacttctgggtccggtgctagtcaaacaggagctgggggaggctcgggccacagtagggaagaggctggactatatcacagctgaaattaagcgatacgaatcccagcttcgggatcttgagcggcagtcagagcaacagagggagacccttgctcagctgcagcaggagttccagcgggcccaggcagcaaaggcaggggctcctggcaaggcctgaccccatggtggggggaggggaggggaggggagggaatgaggcagctctaggatctatactgtagctaataaaatgtaaaaacacctggctctgtttcctgaccaggcacttctgtcatatccccacagccccttccaccttaacacacaccacctgtattaccccctcaggttcaaactcttgcacttggaatctctttgtggcacagtgttctttcttgaaagtgaaatcctaaatgtcttcaaacctacttcttgcctgtatatacaacccttaactctccctcatcttggttggcatgattcttttggaagggcatttgcaacataccatattgctaggaatgtcggtttaattgaaaaagaatacacagttctctaacctgaggccccaggatgaaatgtggttaccctccttgccaacagccctggcatctctattagtacttttcagcctctgtcttcctagaatttgcttgaatgtagctttaaactgacttaaaatcccagcatgtaatgctttatggtattataagtcctcccaagtttatatgttgtccataaagttgttctgcca

SEQ ID NO: 15333 - protein, 129 aa, Homo sapiens; identical to SEQ ID NO: 1722

SEQ ID NO: 15334 - DNA, 864 bp, Homo sapiens
ggtttattactactgaaggaagaacgtgagtaggccagatcagaaaagggagctcaggtaccttccagagagtgagacccagcgcccttgtctcgcacccagtaggctttcatccccgccatggcggagctgatccagaagaagctacagggagaagtggagaaatatcaacagctacagaaggacttaagtaaatccatgtcggggaggcagaaacttgaagcacaactaacagaaaataatatcgtgaaagaggaactggccctgctggatgggtccaacgtggtctttaaacttctgggtccggtgctagtcaaacaggagctgggggaggctcgggccacagtagggaagaggctggactatatcacagctgaaatgtgagtttttattccaccaccgtgtgctgcaccctgtgatgcaagtgaaccattggagtagaggtgttgaaccattgcagaacagctctccatagtggcccctagtcctccagttcctccaaccctttccttcccttttaaccccccttcttctccctcccctggatctcaagttttccacctatctctttcttgcgtttagcactctccatagtgagtcctactaatttctccctttctgcttgtctcccttgtctctccttagtaagcgatacgaatcccagcttcgggatcttgagcggcagtcagagcaacagagggagacccttgctcagctgcagcaggagttccagcgggcccaggcagcaaaggcaggggctcctggcaaggcctgaccccatggtggggggaggggaggggaggggagggaatgaggcagctctaggatctatactgtagctaataaaatgtaaaaacacctggc

SEQ ID NO: 15335 - protein, 87 aa, Homo sapiens
MAELIQKKLQGEVEKYQQLQKDLSKSMSGRQKLEAQLTENNIVKEELALLDGSNVVFKLLGPVLVKQELGEARATVGKRLDYITAEM

SEQ ID NO: 15336 - DNA, 1351 bp, Homo sapiens
ggtttattactactgaaggaagaacgtgagtaggccagatcagaaaagggagctcaggtaccttccagagagtgagacccagcgcccttgtctcgcacccagtaggctttcatccccgccatggcggagctgatccagaagaagctacagggagaagtggagaaatatcaacagctacagaaggacttaagtaaatccatgtcggggaggcagaaacttgaagcacaactaacagaaaataatatcgtgaaagaggaactggccctgctggatgggtccaacgtggtctttaaacttctgggtccggtgctagtcaaacaggagctgggggaggctcgggccacagtagggaagaggctggactatatcacagctgaaatgtgagtttttattccaccaccgtgtgctgcaccctgtgatgcaagtgaaccattggagtagaggtgttgaaccattgcagaacagctctccatagtggcccctagtcctccagttcctccaaccctttccttcccttttaaccccccttcttctccctcccctggatctcaagttttccacctatctctttcttgcgtttagcactctccatagtgagtcctactaatttctccctttctgcttgtctcccttgtctctccttagtaagcgatacgaatcccagcttcgggatcttgagcggcagtcagagcaacagagggagacccttgctcagctgcagcaggagttccagcgggcccaggcagcaaaggcaggggctcctggcaaggcctgaccccatggtggggggaggggaggggaggggagggaatgaggcagctctaggatctatactgtagctaataaaatgtaaaaacacctggctctgtttcctgaccaggcacttctgtcatatccccacagccccttccaccttaacacacaccacctgtattaccccctcaggttcaaactcttgcacttggaatctctttgtggcacagtgttctttcttgaaagtgaaatcctaaatgtcttcaaacctacttcttgcctgtatatacaacccttaactctccctcatcttggttggcatgattcttttggaagggcatttgcaacataccatattgctaggaatgtcggtttaattgaaaaagaatacacagttctctaacctgaggccccaggatgaaatgtggttaccctccttgccaacagccctggcatctctattagtacttttcagcctctgtcttcctagaatttgcttgaatgtagctttaaactgacttaaaatcccagcatgtaatgctttatggtattataagtcctcccaagtttatatgttgtccataaagttgttctgcca

SEQ ID NO: 15337 - protein, 87 aa, Homo sapiens; identical to SEQ ID NO: 15335

SEQ ID NO: 15338 - DNA, 1055 bp, Homo sapiens
aggttaggatttcggttgagaggcttggggtcttgcgtttcgcccaccatctcctggggacagggtggagtcgatatccgggacgggggggaggttgcggtgcccctcagggctacctctcaagagtgctatcatttccgcaggccagatcagaaaagggagctcaggtaccttccagagagtgagacccagcgcccttgtctcgcacccagtaggctttcatccccgccatggcggagctgatccagaagaagctacagggagaagtggagaaatatcaacagctacagaaggacttaagtaaatccatgtcggggaggcagaaacttgaagcacaactaacagaaaataatatcgtgaaagaggtgagggactgggatttgtggggcgaggagggacctgtactagccatggttctgatcacatatgtcccatccctccatcaggaactggccctgctggatgggtccaacgtggtctttaaacttctgggtccggtgctagtcaaacaggagctgggggaggctcgggccacagtagggaagaggctggactatatcacagctgaaatgtgagtttttattccaccaccgtgtgctgcaccctgtgatgcaagtgaaccattggagtagaggtgttgaaccattgcagaacagctctccatagtggcccctagtcctccagttcctccaaccctttccttcccttttaaccccccttcttctccctcccctggatctcaagttttccacctatctctttcttgcgtttagcactctccatagtgagtcctactaatttctccctttctgcttgtctcccttgtctctccttagtaagcgatacgaatcccagcttcgggatcttgagcggcagtcagagcaacagagggagacccttgctcagctgcagcaggagttccagcgggcccaggcagcaaaggcaggggctcctggcaaggcctgaccccatggtggggggaggggaggggaggggagggaatgaggcagctctaggatctatactgtagctaataaaatgtaaaaacacctggc

SEQ ID NO: 15339 - protein, 114 aa, Homo sapiens
MAELIQKKLQGEVEKYQQLQKDLSKSMSGRQKLEAQLTENNIVKEVRDWDLWGEEGPVLAMVLITYVPSLHQELALLDGSNVVFKLLGPVLVKQELGEARATVGKRLDYITAEM

SEQ ID NO: 15340 - DNA, 1542 bp, Homo sapiens
aggttaggatttcggttgagaggcttggggtcttgcgtttcgcccaccatctcctggggacagggtggagtcgatatccgggacgggggggaggttgcggtgcccctcagggctacctctcaagagtgctatcatttccgcaggccagatcagaaaagggagctcaggtaccttccagagagtgagacccagcgcccttgtctcgcacccagtaggctttcatccccgccatggcggagctgatccagaagaagctacagggagaagtggagaaatatcaacagctacagaaggacttaagtaaatccatgtcggggaggcagaaacttgaagcacaactaacagaaaataatatcgtgaaagaggtgagggactgggatttgtggggcgaggagggacctgtactagccatggttctgatcacatatgtcccatccctccatcaggaactggccctgctggatgggtccaacgtggtctttaaacttctgggtccggtgctagtcaaacaggagctgggggaggctcgggccacagtagggaagaggctggactatatcacagctgaaatgtgagtttttattccaccaccgtgtgctgcaccctgtgatgcaagtgaaccattggagtagaggtgttgaaccattgcagaacagctctccatagtggcccctagtcctccagttcctccaaccctttccttcccttttaaccccccttcttctccctcccctggatctcaagttttccacctatctctttcttgcgtttagcactctccatagtgagtcctactaatttctccctttctgcttgtctcccttgtctctccttagtaagcgatacgaatcccagcttcgggatcttgagcggcagtcagagcaacagagggagacccttgctcagctgcagcaggagttccagcgggcccaggcagcaaaggcaggggctcctggcaaggcctgaccccatggtggggggaggggaggggaggggagggaatgaggcagctctaggatctatactgtagctaataaaatgtaaaaacacctggctctgtttcctgaccaggcacttctgtcatatccccacagccccttccaccttaacacacaccacctgtattaccccctcaggttcaaactcttgcacttggaatctctttgtggcacagtgttctttcttgaaagtgaaatcctaaatgtcttcaaacctacttcttgcctgtatatacaacccttaactctccctcatcttggttggcatgattcttttggaagggcatttgcaacataccatattgctaggaatgtcggtttaattgaaaaagaatacacagttctctaacctgaggccccaggatgaaatgtggttaccctccttgccaacagccctggcatctctattagtacttttcagcctctgtcttcctagaatttgcttgaatgtagctttaaactgacttaaaatcccagcatgtaatgctttatggtattataagtcctcccaagtttatatgttgtccataaagttgttctgcca

SEQ ID NO: 15341 - protein, 114 aa, Homo sapiens; identical to SEQ ID NO: 15339

SEQ ID NO: 15342 - DNA, 700 bp, Homo sapiens
atttcggttgagaggcttggggtcttgcgtttcgcccaccatctcctggggacagggtggagtcgatatccgggacgggggggaggttgcggtgcccctcagggctacctctcaagagtgctatcatttccgcaggccagatcagaaaagggagctcaggtaccttccagagagtgagacccagcgcccttgtctcgcacccagtaggctttcatccccgccatggcggagctgatccagaagaagctacagggagaagtggagaaatatcaacagctacagaaggacttaagtaaatccatgtcggggaggcagaaacttgaagcacaactaacagaaaataatatcgtgaaagaggaactggccctgctggatgggtccaacgtggtctttaaacttctgggtccggtgctagtcaaacaggagctgggggaggctcgggccacagtagggaagaggctggactatatcacagctgaaattaagcgatacgaatcccagcttcgggatcttgagcggcagtcagagcaacagagggagacccttgctcagctgcagcaggagttccagcgggcccaggcagcaaaggcaggggctcctggcaaggcctgaccccatggtggggggaggggaggggaggggagggaatgaggcagctctaggatctatactgtagctaataaaatgtaaaaacacctgg

SEQ ID NO: 15343 - protein, 129 aa, Homo sapiens; identical to SEQ ID NO: 1722

SEQ ID NO: 15344 - DNA, 1188 bp, Homo sapiens
atttcggttgagaggcttggggtcttgcgtttcgcccaccatctcctggggacagggtggagtcgatatccgggacgggggggaggttgcggtgcccctcagggctacctctcaagagtgctatcatttccgcaggccagatcagaaaagggagctcaggtaccttccagagagtgagacccagcgcccttgtctcgcacccagtaggctttcatccccgccatggcggagctgatccagaagaagctacagggagaagtggagaaatatcaacagctacagaaggacttaagtaaatccatgtcggggaggcagaaacttgaagcacaactaacagaaaataatatcgtgaaagaggaactggccctgctggatgggtccaacgtggtctttaaacttctgggtccggtgctagtcaaacaggagctgggggaggctcgggccacagtagggaagaggctggactatatcacagctgaaattaagcgatacgaatcccagcttcgggatcttgagcggcagtcagagcaacagagggagacccttgctcagctgcagcaggagttccagcgggcccaggcagcaaaggcaggggctcctggcaaggcctgaccccatggtggggggaggggaggggaggggagggaatgaggcagctctaggatctatactgtagctaataaaatgtaaaaacacctggctctgtttcctgaccaggcacttctgtcatatccccacagccccttccaccttaacacacaccacctgtattaccccctcaggttcaaactcttgcacttggaatctctttgtggcacagtgttctttcttgaaagtgaaatcctaaatgtcttcaaacctacttcttgcctgtatatacaacccttaactctccctcatcttggttggcatgattcttttggaagggcatttgcaacataccatattgctaggaatgtcggtttaattgaaaaagaatacacagttctctaacctgaggccccaggatgaaatgtggttaccctccttgccaacagccctggcatctctattagtacttttcagcctctgtcttcctagaatttgcttgaatgtagctttaaactgacttaaaatcccagcatgtaatgctttatggtattataagtcctcccaagtttatatgttgtccataaagttgttctgcca

SEQ ID NO: 15345 - protein, 129 aa, Homo sapiens; identical to SEQ ID NO: 1722

SEQ ID NO: 15346 - DNA, 774 bp, Homo sapiens
gccagatcagaaaagggagctcaggtaccttccagagagtgagacccagcgcccttgtctcgcacccagtaggctttcatccccgccatggcggagctgatccagaagaagctacagggagaagtggagaaatatcaacagctacagaaggacttaagtaaatccatgtcggggaggcagaaacttgaagcacaactaacagaaattctgggtccggtgctagtcaaacaggagctgggggaggctcgggccacagtagggaagaggctggactatatcacagctgaaatgtgagtttttattccaccaccgtgtgctgcaccctgtgatgcaagtgaaccattggagtagaggtgttgaaccattgcagaacagctctccatagtggcccctagtcctccagttcctccaaccctttccttcccttttaaccccccttcttctccctcccctggatctcaagttttccacctatctctttcttgcgtttagcactctccatagtgagtcctactaatttctccctttctgcttgtctcccttgtctctccttagtaagcgatacgaatcccagcttcgggatcttgagcggcagtcagagcaacagagggagacccttgctcagctgcagcaggagttccagcgggcccaggcagcaaaggcaggggctcctggcaaggcctgaccccatggtggggggaggggaggggaggggagggaatgaggcagctctaggatctatactgtagctaataaaatgtaaaaacacctggc

SEQ ID NO: 15347 - protein, 68 aa, Homo sapiens
MAELIQKKLQGEVEKYQQLQKDLSKSMSGRQKLEAQLTEILGPVLVKQELGEARATVGKRLDYITAEM

SEQ ID NO: 15348 - DNA, 1261 bp, Homo sapiens
gccagatcagaaaagggagctcaggtaccttccagagagtgagacccagcgcccttgtctcgcacccagtaggctttcatccccgccatggcggagctgatccagaagaagctacagggagaagtggagaaatatcaacagctacagaaggacttaagtaaatccatgtcggggaggcagaaacttgaagcacaactaacagaaattctgggtccggtgctagtcaaacaggagctgggggaggctcgggccacagtagggaagaggctggactatatcacagctgaaatgtgagtttttattccaccaccgtgtgctgcaccctgtgatgcaagtgaaccattggagtagaggtgttgaaccattgcagaacagctctccatagtggcccctagtcctccagttcctccaaccctttccttcccttttaaccccccttcttctccctcccctggatctcaagttttccacctatctctttcttgcgtttagcactctccatagtgagtcctactaatttctccctttctgcttgtctcccttgtctctccttagtaagcgatacgaatcccagcttcgggatcttgagcggcagtcagagcaacagagggagacccttgctcagctgcagcaggagttccagcgggcccaggcagcaaaggcaggggctcctggcaaggcctgaccccatggtggggggaggggaggggaggggagggaatgaggcagctctaggatctatactgtagctaataaaatgtaaaaacacctggctctgtttcctgaccaggcacttctgtcatatccccacagccccttccaccttaacacacaccacctgtattaccccctcaggttcaaactcttgcacttggaatctctttgtggcacagtgttctttcttgaaagtgaaatcctaaatgtcttcaaacctacttcttgcctgtatatacaacccttaactctccctcatcttggttggcatgattcttttggaagggcatttgcaacataccatattgctaggaatgtcggtttaattgaaaaagaatacacagttctctaacctgaggccccaggatgaaatgtggttaccctccttgccaacagccctggcatctctattagtacttttcagcctctgtcttcctagaatttgcttgaatgtagctttaaactgacttaaaatcccagcatgtaatgctttatggtattataagtcctcccaagtttatatgttgtccataaagttgttctgcca

SEQ ID NO: 15349 - protein, 68 aa, Homo sapiens; identical to SEQ ID NO: 15347

SEQ ID NO: 15350 - DNA, 223 bp, Homo sapiens
aggctttcatccccgccatggcggagctgatccagaagaagctacagggagaagtggagaaatatcaacagagccctggcatctctattagtacttttcagcctctgtcttcctagaatttgcttgaatgtagctttaaactgacttaaaatcccagcatgtaatgctttatggtattataagtcctcccaagtttatatgttgtccataaagttgttctgcc

SEQ ID NO: 15351 - protein, 32 aa, Homo sapiens
MAELIQKKLQGEVEKYQQSPGISISTFQPLSS

SEQ ID NO: 15352 - DNA, 228 bp, Homo sapiens
cgtgaaagagtaagcgatacgaatcccagcttcgggatcttgagcggcagtcagagcaacagagggagacccttgctcagctgcagcaggagttccagcgggcccaggcagcaaaggcaggggctcctggcaaggcctgaccccatggtggggggaggggaggggaggggagggaatgaggcagctctaggatctatactgtagctaataaaatgtaaaaacacctgg

SEQ ID NO: 15353 - protein, 44 aa, Homo sapiens
KSKRYESQLRDLERQSEQQRETLAQLQQEFQRAQAAKAGAPGKA

SEQ ID NO: 15354 - DNA, 716 bp, Homo sapiens
cgtgaaagagtaagcgatacgaatcccagcttcgggatcttgagcggcagtcagagcaacagagggagacccttgctcagctgcagcaggagttccagcgggcccaggcagcaaaggcaggggctcctggcaaggcctgaccccatggtggggggaggggaggggaggggagggaatgaggcagctctaggatctatactgtagctaataaaatgtaaaaacacctggctctgtttcctgaccaggcacttctgtcatatccccacagccccttccaccttaacacacaccacctgtattaccccctcaggttcaaactcttgcacttggaatctctttgtggcacagtgttctttcttgaaagtgaaatcctaaatgtcttcaaacctacttcttgcctgtatatacaacccttaactctccctcatcttggttggcatgattcttttggaagggcatttgcaacataccatattgctaggaatgtcggtttaattgaaaaagaatacacagttctctaacctgaggccccaggatgaaatgtggttaccctccttgccaacagccctggcatctctattagtacttttcagcctctgtcttcctagaatttgcttgaatgtagctttaaactgacttaaaatcccagcatgtaatgctttatggtattataagtcctcccaagtttatatgttgtccataaagttgttctgcca

SEQ ID NO: 15355 - protein, 31 aa, Homo sapiens
MWLPSLPTALASLLVLFSLCLPRICLNVALN

SEQ ID NO: 15356 - DNA, 4817 bp, Homo sapiens
aacgcttcccgcgggagttttagccgtgttattgttggggaagggaatgtcaaattctgctcctgccttcccccaggggctggagactggaatctttattccagttcattgcgggtcgacgtggtctccagaatccccgagtgtagaggcggaggacagtggagctggggactcgggcgcctgggtcctggtccctgagcgtccagcgctcccctagtccgcggccctggctcctgtcctcacttccttccccttttggctcctgctctcggagcgggcggacgcgggggggagcggaaagggcgggagggcccaggagcccggcgggggggttcaagggggtacggaaaagccggggaggggactcggtccggggccggagaccgacggcaacagcggctcaggacccacgctgcccccacccctcccgagcaggcgcccccatggcccgaccccgctgattccttcactcggccatgctcccgcggcccctgcggctgcttttggacacgagcccccccgggggagtcgtactgagcagcttccgaagccgggaccccgaagagggtgggggcccaggtggcctggtcgtgggcggggggcaggaggaagaggaggaggaagaagaagaggcccctgtgtccgtctgggatgaggaggaggatggtgccgtgtttaccgtcacaagccgccaatatcgacctcttgatcccttggtccctatgcctcccccacgttcctcccgacggctccgagctggcactctggaggccctggtcagacacctactggatacccggacatcagggactgatgtgagcttcatgtcagccttcctggctacccaccgggccttcacctccacgcctgccttgctagggcttatggctgacaggctggaagcccttgaatctcatcctaccgacgaactagagaggacaacagaggtagccatctctgtactgtcaacctggctggcctctcaccctgaggattttggctctgaggccaagggtcagcttgaccggcttgagagcttcttacttcagacagggtatgcagcagggaagggtgttggggggggcagcgctgacctcatccgcaatctccggtcccgggtggacccccaggcccccgaccttcctaagcccctggccctccccggcgatccccctgctgaccccacggatgtcctggtgttcctcgctgaccacttggccgaacagctgaccctgctagatgcggtgagaccctgacctctggcccctatgccccctgaccccttactaacctctccttgactccagatcctttccttgcttccaccccttcctgatccagctcctagcctcctccacctaccattttgattctccccttttccctttggtcgttacccttcaaaccctgtgcccctctggttccttggccacctgagatcctcagatccctgatattggaaggctgacctcacttgactatgaactttaacctctgacctctaccctgcaggaactttttctcaatttgatcccctctcagtgcctgggaggcctgtggggtcacagagaccggccaggacattctcacctctgcccatctgtccgagctactgtcacacagtttaacaaggtggcaggggcagtggttagttctgtcctgggggctacttccactggagagggacctggggaggtgaccatacggccactccgtcccccacagagggcccggctcctggagaagtggatccgcgtggcagaggagtgccggctgctccgaaacttctcttcagtttatgccgtggtgtcagccctgcagtccagccccatccacaggcttcgggcagcctggggggaagcaaccagggacagcctcagagtcttttccagcctctgccagattttctccgaggaggataattattcccagagtcgggagctgctcgtgcaggaggtgaagctgcagtctcctctggagccacactccaagaaggccccgaggtctggctcccggggtgggggtgtggtcccataccttggcaccttcctgaaggaccttgtgatgctggatgcagcctccaaggatgagttggagaatggatacatcaattttgacaagcggaggaaggagtttgcagtcctttctgagttgcgacggctccagaatgaatgtcgtggctataacctccaacctgaccatgatatccagaggtggctacaggggctccggccactgacagaggctcagagccatcgtgtatcctgtgaggtggagccacctggttccagtgaccctcctgccccacgggtgcttcggccaacattggtcatctcgcagtggacagaggttttgggctctgttggggtccctaccccgcttgtgtcctgtgaccggcccagtactgggggagatgaggcgcctacaactcctgctcctctgctgactcggctggcccagcacatgaagtggccatctgtctcgtcactagactctgccttggaaagcagtccatccctgcacagtccagctgaccccagccacctctccccaccagcctcctcccctaggccttctcgaggtcaccgccgctcagcctcctgtggctccccgctgagtgggggtgcagaagaggcctccggggggactggatatgggggagagggatctgggccaggggcctctgattgccgtatcatccgagtccagatggagttgggggaagatggcagtgtctataagagcattttggtgacaagccaggacaaggctccaagtgtcatcagtcgtgtccttaagaaaaacaatcgtgactctgcagtggcttcagagtatgagctggtacagctgctaccaggggagcgagagctgactatcccagcctcggctaatgtattctacgccatggatggagcttcacacgatttcctcctgcggcagcggcgaaggtcctctactgctacacctggcgtcaccagtggcccgtctgcctcaggaactcctccgagtgagggaggagggggctcctttcccaggatcaaggccacagggaggaagattgcacgggcactgttctgaggaggaagccccgttggcttacagaagtcatggtgttcataccagatgtgggtagccatcctgaatggtggcaattatatcacattgagacagaaattcagaaagggagccagccaccctggggcagtgaagtgccactggtttaccagacagctgagaaatccagccctgtgggaactggtgtcttataaccaagttggatacctgtgtatagcttcccaccttccatgagtgcagcacacaggtagtgctggaaaaacgcatcagtttctgattcttggccatatcctaacatgcaagggccaagcaaaggcttcaaggctctgagccccagggcagaggggaatggcaaaatgtaggtcctcgcaggagctcttcttcccactctgggggtttctatcactgtgacaacactaagataataaaccaaaacactacctgaattctactcccctgtccttgcagtacatatgaactggctgctatgagtgggggtggggaattggctgaaggtagatgccatggaacaggaaggggcacaatgttttctgtccccatgaacagagcaaaaagtgaggtattggtgaaaaaagtttcctcagaacagtttctctccagtaacctctctaccactggtcccttgctgcaaatgtgtataaaacaattttaggacaaggaaatggcagaacaactttatggacaacatataaacttgggaggacttataataccataaagcattacatgctgggattttaagtcagtttaaagctacattcaagcaaattctaggaagacagaggctgaaaagtactaatagagatgccagggctgttggcaaggagggtaaccacatttcatcctggggcctcaggttagagaactgtgtattctttttcaattaaaccgacattcctagcaatatggtatgttgcaaatgcccttccaaaagaatcatgccaaccaagatgagggagagttaagggttgtatatacaggcaagaagtaggtttgaagacatttaggatttcactttcaagaaagaacactgtgccacaaagagattccaagtgcaagagtttgaacctgagggggtaatacaggtggtgtgtgttaaggtggaaggggctgtggggatatgacagaagtgcctggtcaggaaacagagccaggtgtttttacattttattagctacagtatagatcctagagctgcctcattccctcccctcccctcccctccccccaccatggggtcaggccttgccaggagcccctgcctttgctgcctgggcccgctggaactcctgctgcagctgagcaagggtctccctctgttgctctgactgccgctcaagatcccgaagctgggattcgtatcgcttactaaggagagacaagggagacaagcagaaagggagaaattagtaggactcactatggagagtgctaaacgcaagaaagagataggtggaaaacttgagatccaggggagggagaagaaggggggttaaaagggaaggaaagggttggaggaactggaggactaggggccactatggagagctgttctgcaatggttcaacacctctactccaatggttcacttgcatcacagggtgcagcacacggtggtggaataaaaactcacatttcagctgtgatatagtccagcctcttccctactgtggcccgagcctcccccagctcctgtttgactagcaccggacccagaagtt

SEQ ID NO: 15357 - protein, 337 aa, Homo sapiens
MLDAASKDELENGYINFDKRRKEFAVLSELRRLQNECRGYNLQPDHDIQRWLQGLRPLTEAQSHRVSCEVEPPGSSDPPAPRVLRPTLVISQWTEVLGSVGVPTPLVSCDRPSTGGDEAPTTPAPLLTRLAQHMKWPSVSSLDSALESSPSLHSPADPSHLSPPASSPRPSRGHRRSASCGSPLSGGAEEASGGTGYGGEGSGPGASDCRIIRVQMELGEDGSVYKSILVTSQDKAPSVISRVLKKNNRDSAVASEYELVQLLPGERELTIPASANVFYAMDGASHDFLLRQRRRSSTATPGVTSGPSASGTPPSEGGGGSFPRIKATGRKIARALF

SEQ ID NO: 15358 - DNA, 3060 bp, Homo sapiens
aacgcttcccgcgggagttttagccgtgttattgttggggaagggaatgtcaaattctgctcctgccttcccccaggggctggagactggaatctttattccagttcattgcgggtcgacgtggtctccagaatccccgagtgtagaggcggaggacagtggagctggggactcgggcgcctgggtcctggtccctgagcgtccagcgctcccctagtccgcggccctggctcctgtcctcacttccttccccttttggctcctgctctcggagcgggcggacgcgggggggagcggaaagggcgggagggcccaggagcccggcgggggggttcaagggggtacggaaaagccggggaggggactcggtccggggccggagaccgacggcaacagcggctcaggacccacgctgcccccacccctcccgagcaggcccctgtgtccgtctgggatgaggaggaggatggtgccgtgtttaccgtcacaagccgccaatatcgacctcttgatcccttggtccctatgcctcccccacgttcctcccgacggctccgagctggcactctggaggccctggtcagacacctactggatacccggacatcagggactgatgtgagcttcatgtcagccttcctggctacccaccgggccttcacctccacgcctgccttgctagggcttatggctgacaggctggaagcccttgaatctcatcctaccgacgaactagagaggacaacagaggtagccatctctgtactgtcaacctggctggcctctcaccctgaggattttggctctgaggccaagggtcagcttgaccggcttgagagcttcttacttcagacagggtatgcagcagggaagggtgttggggggggcagcgctgacctcatccgcaatctccggtcccgggtggacccccaggcccccgaccttcctaagcccctggccctccccggcgatccccctgctgaccccacggatgtcctggtgttcctcgctgaccacttggccgaacagctgaccctgctagatgcggaactttttctcaatttgatcccctctcagtgcctgggaggcctgtggggtcacagagaccggccaggacattctcacctctgcccatctgtccgagctactgtcacacagtttaacaaggtggcaggggcagtggttagttctgtcctgggggctacttccactggagagggacctggggaggtgaccatacggccactccgtcccccacagagggcccggctcctggagaagtggatccgcgtggcagaggagtgccggctgctccgaaacttctcttcagtttatgccgtggtgtcagccctgcagtccagccccatccacaggcttcgggcagcctggggggaagcaaccagggacagcctcagagtcttttccagcctctgccagattttctccgaggaggataattattcccagagtcgggagctgctcgtgcaggaggtgaagctgcagtctcctctggagccacactccaagaaggccccgaggtctggctcccggggtgggggtgtggtcccataccttggcaccttcctgaaggaccttgtgatgctggatgcagcctccaaggatgagttggagaatggatacatcaattttgacaagcggaggaaggagtttgcagtcctttctgagttgcgacggctccagaatgaatgtcgtggctataacctccaacctgaccatgatatccagaggtggctacaggggctccggccactgacagaggctcagagccatcgtgtatcctgtgaggtggagccacctggttccagtgaccctcctgccccacgggtgcttcggccaacattggtcatctcgcagtggacagaggttttgggctctgttggggtccctaccccgcttgtgtcctgtgaccggcccagtactgggggagatgaggcgcctacaactcctgctcctctgctgactcggctggcccagcacatgaagtggccatctgtctcgtcactagactctgccttggaaagcagtccatccctgcacagtccagctgaccccagccacctctccccaccagcctcctcccctaggccttctcgaggtcaccgccgctcagcctcctgtggctccccgctgagtgggggtgcagaagaggcctccggggggactggatatgggggagagggatctgggccaggggcctctgattgccgtatcatccgagtccagatggagttgggggaagatggcagtgtctataagagcattttggtgacaagccaggacaaggctccaagtgtcatcagtcgtgtccttaagaaaaacaatcgtgactctgcagtggcttcagagtatgagctggtacagctgctaccaggggagcgagagctgactatcccagcctcggctaatgtattctacgccatggatggagcttcacacgatttcctcctgcggcagcggcgaaggtcctctactgctacacctggcgtcaccagtggcccgtctgcctcaggaactcctccgagtgagggaggagggggctcctttcccaggatcaaggccacagggaggaagattgcacgggcactgttctgaggaggaagccccgttggcttacagaagtcatggtgttcataccagatgtgggtagccatcctgaatggtggcaattatatcacattgagacagaaattcagaaagggagccagccaccctggggcagtgaagtgccactggtttaccagacagctgagaaatccagccctgtgggaactggtgtcttataaccaagttggatacctgtgtatagcttcccaccttccatgagtgcagcacacaggtagtgctggaaaaacgcatcagtttctgattcttggccatatcctaacatgcaagggccaagcaaaggcttcaaggctctgagccccagggcagaggggaatggcaaaatgtaggtcctcgcaggagctcttcttcccactctgggggtttctatcactgtgacaacactaagataataaaccaaaacactacctgaattct

SEQ ID NO: 15359 - protein, 695 aa, Homo sapiens
MPPPRSSRRLRAGTLEALVRHLLDTRTSGTDVSFMSAFLATHRAFTSTPALLGLMADRLEALESHPTDELERTTEVAISVLSTWLASHPEDFGSEAKGQLDRLESFLLQTGYAAGKGVGGGSADLIRNLRSRVDPQAPDLPKPLALPGDPPADPTDVLVFLADHLAEQLTLLDAELFLNLIPSQCLGGLWGHRDRPGHSHLCPSVRATVTQFNKVAGAVVSSVLGATSTGEGPGEVTIRPLRPPQRARLLEKWIRVAEECRLLRNFSSVYAVVSALQSSPIHRLRAAWGEATRDSLRVFSSLCQIFSEEDNYSQSRELLVQEVKLQSPLEPHSKKAPRSGSRGGGVVPYLGTFLKDLVMLDAASKDELENGYINFDKRRKEFAVLSELRRLQNECRGYNLQPDHDIQRWLQGLRPLTEAQSHRVSCEVEPPGSSDPPAPRVLRPTLVISQWTEVLGSVGVPTPLVSCDRPSTGGDEAPTTPAPLLTRLAQHMKWPSVSSLDSALESSPSLHSPADPSHLSPPASSPRPSRGHRRSASCGSPLSGGAEEASGGTGYGGEGSGPGASDCRIIRVQMELGEDGSVYKSILVTSQDKAPSVISRVLKKNNRDSAVASEYELVQLLPGERELTIPASANVFYAMDGASHDFLLRQRRRSSTATPGVTSGPSASGTPPSEGGGGSFPRIKATGRKIARALF

SEQ ID NO: 15360 - DNA, 3525 bp, Homo sapiens
aacgcttcccgcgggagttttagccgtgttattgttggggaagggaatgtcaaattctgctcctgccttcccccaggggctggagactggaatctttattccagttcattgcgggtcgacgtggtctccagaatccccgagtgtagaggcggaggacagtggagctggggactcgggcgcctgggtcctggtccctgagcgtccagcgctcccctagtccgcggccctggctcctgtcctcacttccttccccttttggctcctgctctcggagcgggcggacgcgggggggagcggaaagggcgggagggcccaggagcccggcgggggggttcaagggggtacggaaaagccggggaggggactcggtccggggccggagaccgacggcaacagcggctcaggacccacgctgcccccacccctcccgagcaggcgcccccatggcccgaccccgctgattccttcactcggccatgctcccgcggcccctgcggctgcttttggacacgagcccccccgggggagtcgtactgagcagcttccgaagccgggaccccgaagagggtgggggcccaggtggcctggtcgtgggcggggggcaggaggaagaggaggaggaagaagaagaggcccctgtgtccgtctgggatgaggaggaggatggtgccgtgtttaccgtcacaagccgccaatatcgacctcttgatcccttggtccctatgcctcccccacgttcctcccgacggctccgagctggcactctggaggccctggtcagacacctactggatacccggacatcagggactgatgtgagcttcatgtcagccttcctggctacccaccgggccttcacctccacgcctgccttgctagggcttatggctgacaggctggaagcccttgaatctcatcctaccgacgaactagagaggacaacagaggtagccatctctgtactgtcaacctggctggcctctcaccctgaggattttggctctgaggccaagggtcagcttgaccggcttgagagcttcttacttcagacagggtatgcagcagggaagggtgttggggggggcagcgctgacctcatccgcaatctccggtcccgggtggacccccaggcccccgaccttcctaagcccctggccctccccggcgatccccctgctgaccccacggatgtcctggtgttcctcgctgaccacttggccgaacagctgaccctgctagatgcggtgagaccctgacctctggcccctatgccccctgaccccttactaacctctccttgactccagatcctttccttgcttccaccccttcctgatccagctcctagcctcctccacctaccattttgattctccccttttccctttggtcgttacccttcaaaccctgtgcccctctggttccttggccacctgagatcctcagatccctgatattggaaggctgacctcacttgactatgaactttaacctctgacctctaccctgcaggaactttttctcaatttgatcccctctcagtgcctgggaggcctgtggggtcacagagaccggccaggacattctcacctctgcccatctgtccgagctactgtcacacagtttaacaaggtggcaggggcagtggttagttctgtcctgggggctacttccactggagagggacctggggaggtgaccatacggccactccgtcccccacagagggcccggctcctggagaagtggatccgcgtggcagaggagtgccggctgctccgaaacttctcttcagtttatgccgtggtgtcagccctgcagtccagccccatccacaggcttcgggcagcctggggggaagcaaccagggacagcctcagagtcttttccagcctctgccagattttctccgaggaggataattattcccagagtcgggagctgctcgtgcaggaggtgaagctgcagtctcctctggagccacactccaagaaggccccgaggtctggctcccggggtgggggtgtggtcccataccttggcaccttcctgaaggaccttgtgatgctggatgcagcctccaaggatgagttggagaatggatacatcaattttgacaagcggaggaaggagtttgcagtcctttctgagttgcgacggctccagaatgaatgtcgtggctataacctccaacctgaccatgatatccagaggtggctacaggggctccggccactgacagaggctcagagccatcgtgtatcctgtgaggtggagccacctggttccagtgaccctcctgccccacgggtgcttcggccaacattggtcatctcgcagtggacagaggttttgggctctgttggggtccctaccccgcttgtgtcctgtgaccggcccagtactgggggagatgaggcgcctacaactcctgctcctctgctgactcggctggcccagcacatgaagtggccatctgtctcgtcactagactctgccttggaaagcagtccatccctgcacagtccagctgaccccagccacctctccccaccagcctcctcccctaggccttctcgaggtcaccgccgctcagcctcctgtggctccccgctgagtgggggtgcagaagaggcctccggggggactggatatgggggagagggatctgggccaggggcctctgattgccgtatcatccgagtccagatggagttgggggaagatggcagtgtctataagagcattttggtgacaagccaggacaaggctccaagtgtcatcagtcgtgtccttaagaaaaacaatcgtgactctgcagtggcttcagagtatgagctggtacagctgctaccaggggagcgagagctgactatcccagcctcggctaatgtattctacgccatggatggagcttcacacgatttcctcctgcggcagcggcgaaggtcctctactgctacacctggcgtcaccagtggcccgtctgcctcaggaactcctccgagtgagggaggagggggctcctttcccaggatcaaggccacagggaggaagattgcacgggcactgttctgaggaggaagccccgttggcttacagaagtcatggtgttcataccagatgtgggtagccatcctgaatggtggcaattatatcacattgagacagaaattcagaaagggagccagccaccctggggcagtgaagtgccactggtttaccagacagctgagaaatccagccctgtgggaactggtgtcttataaccaagttggatacctgtgtatagcttcccaccttccatgagtgcagcacacaggtagtgctggaaaaacgcatcagtttctgattcttggccatatcctaacatgcaagggccaagcaaaggcttcaaggctctgagccccagggcagaggggaatggcaaaatgtaggtcctcgcaggagctcttcttcccactctgggggtttctatcactgtgacaacactaagataataaaccaaaacactacctgaattct

SEQ ID NO: 15361 - protein, 337 aa, Homo sapiens; identical to SEQ ID NO: 15357

SEQ ID NO: 15362 - DNA, 3257 bp, Homo sapiens
aacgcttcccgcgggagttttagccgtgttattgttggggaagggaatgtcaaattctgctcctgccttcccccaggggctggagactggaatctttattccagttcattgcgggtcgacgtggtctccagaatccccgagtgtagaggcggaggacagtggagctggggactcgggcgcctgggtcctggtccctgagcgtccagcgctcccctagtccgcggccctggctcctgtcctcacttccttccccttttggctcctgctctcggagcgggcggacgcgggggggagcggaaagggcgggagggcccaggagcccggcgggggggttcaagggggtacggaaaagccggggaggggactcggtccggggccggagaccgacggcaacagcggctcaggacccacgctgcccccacccctcccgagcaggcgcccccatggcccgaccccgctgattccttcactcggccatgctcccgcggcccctgcggctgcttttggacacgagcccccccgggggagtcgtactgagcagcttccgaagccgggaccccgaagagggtgggggcccaggtggcctggtcgtgggcggggggcaggaggaagaggaggaggaagaagaagaggcccctgtgtccgtctgggatgaggaggaggatggtgccgtgtttaccgtcacaagccgccaatatcgacctcttgatcccttggtccctatgcctcccccacgttcctcccgacggctccgagctggcactctggaggccctggtcagacacctactggatacccggacatcagggactgatgtgagcttcatgtcagccttcctggctacccaccgggccttcacctccacgcctgccttgctagggcttatggctgacaggctggaagcccttgaatctcatcctaccgacgaactagagaggacaacagaggtagccatctctgtactgtcaacctggctggcctctcaccctgaggattttggctctgaggccaagggtcagcttgaccggcttgagagcttcttacttcagacagggtatgcagcagggaagggtgttggggggggcagcgctgacctcatccgcaatctccggtcccgggtggacccccaggcccccgaccttcctaagcccctggccctccccggcgatccccctgctgaccccacggatgtcctggtgttcctcgctgaccacttggccgaacagctgaccctgctagatgcggaactttttctcaatttgatcccctctcagtgcctgggaggcctgtggggtcacagagaccggccaggacattctcacctctgcccatctgtccgagctactgtcacacagtttaacaaggtggcaggggcagtggttagttctgtcctgggggctacttccactggagagggacctggggaggtgaccatacggccactccgtcccccacagagggcccggctcctggagaagtggatccgcgtggcagaggagtgccggctgctccgaaacttctcttcagtttatgccgtggtgtcagccctgcagtccagccccatccacaggcttcgggcagcctggggggaagcaaccagggacagcctcagagtcttttccagcctctgccagattttctccgaggaggataattattcccagagtcgggagctgctcgtgcaggaggtgaagctgcagtctcctctggagccacactccaagaaggccccgaggtctggctcccggggtgggggtgtggtcccataccttggcaccttcctgaaggaccttgtgatgctggatgcagcctccaaggatgagttggagaatggatacatcaattttgacaagcggaggaaggagtttgcagtcctttctgagttgcgacggctccagaatgaatgtcgtggctataacctccaacctgaccatgatatccagaggtggctacaggggctccggccactgacagaggctcagagccatcgtgtatcctgtgaggtggagccacctggttccagtgaccctcctgccccacgggtgcttcggccaacattggtcatctcgcagtggacagaggttttgggctctgttggggtccctaccccgcttgtgtcctgtgaccggcccagtactgggggagatgaggcgcctacaactcctgctcctctgctgactcggctggcccagcacatgaagtggccatctgtctcgtcactagactctgccttggaaagcagtccatccctgcacagtccagctgaccccagccacctctccccaccagcctcctcccctaggccttctcgaggtcaccgccgctcagcctcctgtggctccccgctgagtgggggtgcagaagaggcctccggggggactggatatgggggagagggatctgggccaggggcctctgattgccgtatcatccgagtccagatggagttgggggaagatggcagtgtctataagagcattttggtgacaagccaggacaaggctccaagtgtcatcagtcgtgtccttaagaaaaacaatcgtgactctgcagtggcttcagagtatgagctggtacagctgctaccaggggagcgagagctgactatcccagcctcggctaatgtattctacgccatggatggagcttcacacgatttcctcctgcggcagcggcgaaggtcctctactgctacacctggcgtcaccagtggcccgtctgcctcaggaactcctccgagtgagggaggagggggctcctttcccaggatcaaggccacagggaggaagattgcacgggcactgttctgaggaggaagccccgttggcttacagaagtcatggtgttcataccagatgtgggtagccatcctgaatggtggcaattatatcacattgagacagaaattcagaaagggagccagccaccctggggcagtgaagtgccactggtttaccagacagctgagaaatccagccctgtgggaactggtgtcttataaccaagttggatacctgtgtatagcttcccaccttccatgagtgcagcacacaggtagtgctggaaaaacgcatcagtttctgattcttggccatatcctaacatgcaagggccaagcaaaggcttcaaggctctgagccccagggcagaggggaatggcaaaatgtaggtcctcgcaggagctcttcttcccactctgggggtttctatcactgtgacaacactaagataataaaccaaaacactacctgaattct

SEQ ID NO: 15363 - protein, 777 aa, Homo sapiens; identical to SEQ ID NO: 1724

SEQ ID NO: 15364 - DNA, 837 bp, Homo sapiens
aatgtgggtggtggctgtcatattggacagcggagcctgagaggacttttaggaggattaaggaagacagtgtatctccttaagaagatgcaggagatacagcactcagcagtgtctggagggcagaaaatattagcctcatccttctcccatcatctgtgcccatgatagtttatatgtctctaaactgaccatgtacacctcaactgccttttaatatcctgaattcctttcctccaatgaaccaaacgcctcccgcccacctccaggtcccagtcctctgttccctttgcctggtccacccttgccctccctgggtcgcagacgaggtcggcctcgtcattccccgcagaccgccgcgcgtccctcttgtgcggttcaccacagttgtatttaagtgatcgtgtgagtcgtcgttaaatgcctgtctccccgcggatcatgggctcctcgaggacagggactggcctgtctgtccactgctgtaaccccgcgccggcatagggacctaaggcccactggagggcgctcatcaagtagctgctggatgttgacgaaggaagcggcggcgcagctcagggatctccgagtcaggacggtcggccagacccacggggtaacgggtctaatcgtgtaggaataaagctgtattccagtgcttccaaacggttctctcattccaacccctttccaagctcaatgaatattccaatcacctctggtcccttccagtgaccctgaaccgctcagagaacgccccgtcgacaccgttcggggcgggcgccactactggcgcatgagatgcgctcaagcagagggtactccaccagcgaggat

SEQ ID NO: 15365 - protein, 53 aa, Homo sapiens
MNQTPPAHLQVPVLCSLCLVHPCPPWVADEVGLVIPRRPPRVPLVRFTTVVFK

SEQ ID NO: 15366 - DNA, 357 bp, Homo sapiens
gccaaatccattcttcttgccctggctcacttgtcccccccaccgcgccgcgcgtccctcttgtgcggttcaccacagttgtatttaagtgatcgtgtgagtcgtcgttaaatgcctgtctccccgcggatcatgggctcctcgaggacagggactggcctgtctgtccactgctgtaaccccgcgccggcatagggacctaaggcccactggagggcgctcatcaagtagctgctggatgttgacgaaggaagcggcggcgcagctcagggatctccgagtcaggacggtcggccagacccacggggtaacgggtctaatcgtgtaggaataaagctgtattccagtgcttccaaa

SEQ ID NO: 15367 - protein, 36 aa, Homo sapiens
AKSILLALAHLSPPPRRASLLCGSPQLYLSDRVSRR

SEQ ID NO: 15368 - DNA, 498 bp, Homo sapiens
cggcgaaacacgatattgtactaacatcttaattttgttataaaatctcacaaaccccctgacatagtctcagagatctgtagggccgaggttacatttggagaacccgtactctagggccaaatccattcttcttgccctggctcacttgtcccccccaccgccccgcgctggagccactgcctagttcttcagccctagatgtgcggttcaccacagttgtatttaagtgatcgtgtgagtcgtcgttaaatgcctgtctccccgcggatcatgggctcctcgaggacagggactggcctgtctgtccactgctgtaaccccgcgccggcatagggacctaaggcccactggagggcgctcatcaagtagctgctggatgttgacgaaggaagcggcggcgcagctcagggatctccgagtcaggacggtcggccagacccacggggtaacgggtctaatcgtgtaggaataaagctgtattccagtgcttccaaa

SEQ ID NO: 15369 - protein, 49 aa, Homo sapiens [sequence omitted]

SEQ ID NO: 15370 - DNA, 451 bp, Homo sapiens
ttacaggcgtgagccaccgcgcccggcggcgaaacacgatattgtactaacatcttaattttgttataaaatctcacaaaccccctgacatagtctcagagatctgtagggccgaggttacatttggagaacccgtactctagggccaaatccattcttcttgccctggctcacttgtcccccccaccgccccgcgctggagccactgcctgtctccccgcggatcatgggctcctcgaggacagggactggcctgtctgtccactgctgtaaccccgcgccggcatagggacctaaggcccactggagggcgctcatcaagtagctgctggatgttgacgaaggaagcggcggcgcagctcagggatctccgagtcaggacggtcggccagacccacggggtaacgggtctaatcgtgtaggaataaagctgtattccagtgcttccaaa

SEQ ID NO: 15371 - protein, 59 aa, Homo sapiens
SQRSVGPRLHLENPYSRAKSILLALAHLSPPPPRAGATACLPADHGLLEDRDWPVCPLL

SEQ ID NO: 15372 - DNA, 1052 bp, Homo sapiens
ggcgcgatctcggctcactgcaagctccgcctctcgggttcacgccattctcctgcctcagcctcccaagtagctcggactacaggcgtcctccaccatgcctggctaatattttgtattttttagtagagacggggtttcaccgtgttagccaggatggtctcgatctcctaacctggtgatccgcccgcctcggcctcccaaagtattgggattacccgcgtgagccaccgcgcccggctgcaaataatctttctttttttctgagacagagtctcgctctgttgcccaggctggagtgcagtggcacgatctcggctcacggcacgctccgcctcccgggttcacgccattctcctgcctcagcttcccgagtagctgggactacaggggcccgccaccacgcccggctaactttttgtgtttttagtagagacggggtttcaccgtgttagccaggatggtctcgatctcctgaccttgtgatctgcccgcctcggcctcccaaagtgctgggattacaggcgtgagccaccgcgcccggcggcgaaacacgatattgtactaacatcttaattttgttataaaatctcacaaaccccctgacatagtctcagagatctgtagggccgaggttacatttggagaacccgtactctagggccaaatccattcttcttgccctggctcacttgtcccccccaccgccccgcgctggagccactgcctagttcttcagccctagatggtgctcgccagacctcctctcaatgctcatcacacacagggctattcctttcctccaatgaaccaaacgcctcccgcccacctccaggtcccagtcctctgttccctttgcctggtccacccttgccctccctgggtcgcagacgaggtcggcctcgtcattccccgcagaccgccgcgcgtccctcttgtgcggttcaccacagttgtatttaagtgatcgtgtgagtcgtcgttaaatgcctgtctccccacggggtaacgggtctaatcgtgtaggaataaagctgtattccagtgcttcc

SEQ ID NO: 15373 - protein, 73 aa, Homo sapiens
MVLARPPLNAHHTQGYSFPPMNQTPPAHLQVPVLCSLCLVHPCPPWVADEVGLVIPRRPPRVPLVRFTTVVFK

SEQ ID NO: 15374 - DNA, 663 bp, Homo sapiens
aatgtgggtggtggctgtcatattggacagcggagcctgagaggacttttaggaggattaaggaagacagtgtatctccttaagaagatgcaggagatacagcactcagcagtgtctggagggcagaaaatattagcctcatccttctcccatcatctgtgcccatgatagtttatatgtctctaaactgaccatgtacacctcaactgccttttaatatcctgaattcctttcctccaatgaaccaaacgcctcccgcccacctccaggtcccagtcctctgttccctttgcctggtccacccttgccctccctgggtcgcagacgaggtcggcctcgtcattccccgcagaccgccgcgcgtccctcttgtgcggttcaccacagttgtatttaagtgatcgtgtgagtcgtcgttaaatgcctgtctccccgcggatcatgggctcctcgaggacagggactggcctgtctgtccactgctgtaaccccgcgccggcatagggacctaaggcccactggagggcgctcatcaagtagctgctggatgttgacgaaggaagcggcggcgcagctcagggatctccgagtcaggacggtcggccagacccacggggtaacgggtctaatcgtgtaggaataaagctgtattccagtgcttcc

SEQ ID NO: 15375 - protein, 53 aa, Homo sapiens; identical to SEQ ID NO: 15365

SEQ ID NO: 15376 - DNA, 2884 bp, Homo sapiens
aggagggcgcggtaaggctggggtgtcctggtgagaactggagaggatctacccgggtccctgcctggccagtggggaaacaccggtcccccaggcaccttcacctaaccagagcggggatttccaccgcccctcatgccgccctttggaggaaagtgaaagtgaaaggaggaagaggaggcttcatggctgaggaggtcgcagcgccatgaagtccctgtctctgctcctcgctgtggctttgggcctggcgaccgccgtctcagcaggacccgcggtgatcgagtgttggttcgtggaggatgcgagcggaaagggcctggccaagagacccggtgcactgctgttgcgccagggaccgggggaaccgccgccccggccggacctcgaccctgagctctatctcagtgtacacgaccccgcgggcgccctccaggctgccttcaggcggtatccccggggcgcccccgcaccacactgcgagatgagccgcttcgtgcctctccccgcctctgcgaaatgggccagcggcctgacccccgcgcagaactgcccgcgggccctggatggggcttggctgatggtcagcatatccacagcatggggcacgctatgcctgtcgaattcaccatcccagcctgcctgcctcggggcgcagcgctgaggtcaccctggaggtagcaggtctttcagggccctcccttgaggacagcgtaggccttttcctgtctgcctttcttctgcttgggctcttcaaggcactgggctgggctgctgtctacctgtccacctgcaaggattcaaagaagaaagcagagtgagggcactcactgccatcctgtggaagccaccatcatctctggcccaagcttctgtagtagctccctaaaataataccctatcatctgctcctaatccctccaatctctctccactgagtggctggaatgcttttttttttttctttcacttatataagggataatttttcttttttttttttttttgagacggagtctcactcttccgcccaggctgcagtgcagtggcatgatcttggcttactgcaacctccgcctcctgggttcaagcaattctgtggcttcagcctccggagtagctgggattacaggcacatgccaccacacccagtgaatttttgtatttttagtagagacggggtttcaccatgttggccaggctggtcttgaattcctgacctcaggtgatctgcccacctcagcctcccaaagtgctgggattacaggcgtgagccaccacaccaggcccgagaaatgcttttttaaaaaacacacatcttatggcattcaccttcttggagctctaggacagtggttctcaaaatttttttctctcaggacctcttaaaaatcatcaaggaccccaaaaagcttttgggtatgtgggttatagctatcaatatttatggtactagaacttaaaagtgagaaaaatttaaaacacgagaatacataggcacacattctattcatcgtgggaaccatggtgtcaatacatatcatgtagcttctgaaaaactccactgtacacttatagaatgaagaaggcaaaaaacttttttttttttttttttgagacggagtctcgctctgtcgcccaggctggagtgcagtggcgcgatctcggctcactgcaagctccgcctctcgggttcacgccattctcctgcctcagcctcccaagtagctcggactacaggcgtcctccaccatgcctggctaatattttgtattttttagtagagacggggtttcaccgtgttagccaggatggtctcgatctcctaacctggtgatccgcccgcctcggcctcccaaagtattgggattacccgcgtgagccaccgcgcccggctgcaaataatctttctttttttctgagacagagtctcgctctgttgcccaggctggagtgcagtggcacgatctcggctcacggcacgctccgcctcccgggttcacgccattctcctgcctcagcttcccgagtagctgggactacaggggcccgccaccacgcccggctaactttttgtgtttttagtagagacggggtttcaccgtgttagccaggatggtctcgatctcctgaccttgtgatctgcccgcctcggcctcccaaagtgctgggattacaggcgtgagccaccgcgcccggcggcgaaacacgatattgtactaacatcttaattttgttataaaatctcacaaaccccctgacatagtctcagagatctgtagggccgaggttacatttggagaacccgtactctagggccaaatccattcttcttgccctggctcacttgtcccccccaccgccccgcgctggagccactgcctagttcttcagccctagatggtgctcgccagacctcctctcaatgctcatcacacacagggctattcctttcctccaatgaaccaaacgcctcccgcccacctccaggtcccagtcctctgttccctttgcctggtccacccttgccctccctgggtcgcagacgaggtcggcctcgtcattccccgcagaccgccgcgcgtccctcttgtgcggttcaccacagttgtatttaagtgatcgtgtgagtcgtcgttaaatgcctgtctccccgcggatcatgggctcctcgaggacagggactggcctgtctgtccactgctgtaaccccgcgccggcatagggacctaaggcccactggagggcgctcatcaagtagctgctggatgttgacgaaggaagcggcggcgcagctcagggatctccgagtcaggacggtcggccagacccacggggtaacgggtctaatcgtgtaggaataaagctgtattccagtgcttcc

SEQ ID NO: 15377 - protein, 151 aa, Homo sapiens [sequence omitted]

SEQ ID NO: 15378 - DNA, 3756 bp, Homo sapiens
ggggacgcggcacagatagggggaagccggagtaatggttttcgggcaagtggatgttggagagcacacacaggagttggggggcgggggagggcctggggttggggagggctcgaactcggggctgctgggtagtccaggagggcgcggtaaggctggggtgtcctggtgagaactggagaggatctacccgggtccctgcctggccagtggggaaacaccggtcccccaggcaccttcacctaaccagagcggggatttccaccgcccctcatgccgccctttggaggaaagtgaaagtgaaaggaggaagaggaggcttcatggctgaggaggtcgcagcgccatgaagtccctgtctctgctcctcgctgtggctttgggcctggcgaccgccgtctcagcaggacccgcggtgatcgagtgttggttcgtggaggatgcgagcggaaagggcctggccaagagacccggtgcactgctgttgcgccagggaccgggggaaccgccgccccggccggacctcgaccctgagctctatctcagtgtacacgaccccgcgggcgccctccaggctgccttcaggcggtatccccggggcgcccccgcaccacactgcgagatgagccgcttcgtgcctctccccgcctctgcgaaatgggccagcggcctgacccccgcgcagaactgcccgcgggccctggatggggcttggctgatggtcagcatatccagcccagtcctcagcctctccagcctcttgcgaccacagccagagcctcagcaggagcctgttctcatcaccatggcaacagtggtactgactgtcctcacccacacccctgcccctcgagtgagactgggacaagatgctctgctggacttgagctttgcctacatgccccccacctccgaggccgcctcatctctggctccgggtccccctccctttgggctagagtggcgacgccagcacctgggtaagggacatctgctcctggctgcaactcctgggctgaatggccagatgccagcagcccaagaaggggccgtggcatttgctgcttgggatgatgatgagccatggggcccatggaccggaaatgggaccttctggctgcctacagttcaaccctttcaggagggcacctatctggccaccatacacctgccatacctgcaaggacaggtcaccctggagcttgctgtgtacaaaccccccaaagtgtccctgatgccagcaacccttgcacgggccgccccaggggaggcacccccggaattgctctgccttgtgtcccacttctacccttctgggggcctggaggtggagtgggaactccggggtggcccagggggccgctctcagaaggccgaggggcagaggtggctctcggccctgcgccaccattccgatggctctgtcagcctctctgggcacttgcagccgcccccagtcaccactgagcagcatggggcacgctatgcctgtcgaattcaccatcccagcctgcctgcctcggggcgcagcgctgaggtcaccctggaggtagcaggtctttcagggccctcccttgaggacagcgtaggccttttcctgtctgcctttcttctgcttgggctcttcaaggcactgggctgggctgctgtctacctgtccacctgcaaggattcaaagaagaaagcagagtgagggcactcactgccatcctgtggaagccaccatcatctctggcccaagcttctgtagtagctccctaaaataataccctatcatctgctcctaatccctccaatctctctccactgagtggctggaatgcttttttttttttctttcacttatataagggataatttttcttttttttttttttttgagacggagtctcactcttccgcccaggctgcagtgcagtggcatgatcttggcttactgcaacctccgcctcctgggttcaagcaattctgtggcttcagcctccggagtagctgggattacaggcacatgccaccacacccagtgaatttttgtatttttagtagagacggggtttcaccatgttggccaggctggtcttgaattcctgacctcaggtgatctgcccacctcagcctcccaaagtgctgggattacaggcgtgagccaccacaccaggcccgagaaatgcttttttaaaaaacacacatcttatggcattcaccttcttggagctctaggacagtggttctcaaaatttttttctctcaggacctcttaaaaatcatcaaggaccccaaaaagcttttgggtatgtgggttatagctatcaatatttatggtactagaacttaaaagtgagaaaaatttaaaacacgagaatacataggcacacattctattcatcgtgggaaccatggtgtcaatacatatcatgtagcttctgaaaaactccactgtacacttatagaatgaagaaggcaaaaaacttttttttttttttttttgagacggagtctcgctctgtcgcccaggctggagtgcagtggcgcgatctcggctcactgcaagctccgcctctcgggttcacgccattctcctgcctcagcctcccaagtagctcggactacaggcgtcctccaccatgcctggctaatattttgtattttttagtagagacggggtttcaccgtgttagccaggatggtctcgatctcctaacctggtgatccgcccgcctcggcctcccaaagtattgggattacccgcgtgagccaccgcgcccggctgcaaataatctttctttttttctgagacagagtctcgctctgttgcccaggctggagtgcagtggcacgatctcggctcacggcacgctccgcctcccgggttcacgccattctcctgcctcagcttcccgagtagctgggactacaggggcccgccaccacgcccggctaactttttgtgtttttagtagagacggggtttcaccgtgttagccaggatggtctcgatctcctgaccttgtgatctgcccgcctcggcctcccaaagtgctgggattacaggcgtgagccaccgcgcccggcggcgaaacacgatattgtactaacatcttaattttgttataaaatctcacaaaccccctgacatagtctcagagatctgtagggccgaggttacatttggagaacccgtactctagggccaaatccattcttcttgccctggctcacttgtcccccccaccgccccgcgctggagccactgcctagttcttcagccctagatggtgctcgccagacctcctctcaatgctcatcacacacagggctattcctttcctccaatgaaccaaacgcctcccgcccacctccaggtcccagtcctctgttccctttgcctggtccacccttgccctccctgggtcgcagacgaggtcggcctcgtcattccccgcagaccgccgcgcgtccctcttgtgcggttcaccacagttgtatttaagtgatcgtgtgagtcgtcgttaaatgcctgtctccccgcggatcatgggctcctcgaggacagggactggcctgtctgtccactgctgtaaccccgcgccggcatagggacctaaggcccactggagggcgctcatcaagtagctgctggatgttgacgaaggaagcggcggcgcagctcagggatctccgagtcaggacggtcggccagacccacggggtaacgggtctaatcgtgtaggaataaagctgtattccagtgcttcc

SEQ ID NO: 15379 - protein, 448 aa, Homo sapiens; identical to SEQ ID NO: 1726

SEQ ID NO: 15380 - DNA, 1805 bp, Homo sapiens
ggggacgcggcacagatagggggaagccggagtaatggttttcgggcaagtggatgttggagagcacacacaggagttggggggcgggggagggcctggggttggggagggctcgaactcggggctgctgggtagtccaggagggcgcggtaaggctggggtgtcctggtgagaactggagaggatctacccgggtccctgcctggccagtggggaaacaccggtcccccaggcaccttcacctaaccagagcggggatttccaccgcccctcatgccgccctttggaggaaagtgaaagtgaaaggaggaagaggaggcttcatggctgaggaggtcgcagcgccatgaagtccctgtctctgctcctcgctgtggctttgggcctggcgaccgccgtctcagcaggacccgcggtgatcgagtgttggttcgtggaggatgcgagcggaaagggcctggccaagagacccggtgcactgctgttgcgccagggaccgggggaaccgccgccccggccggacctcgaccctgagctctatctcagtgtacacgaccccgcgggcgccctccaggctgccttcaggcggtatccccggggcgcccccgcaccacactgcgagatgagccgcttcgtgcctctccccgcctctgcgaaatgggccagcggcctgacccccgcgcagaactgcccgcgggccctggatggggcttggctgatggtcagcatatccagcccagtcctcagcctctccagcctcttgcgaccacagccagagcctcagcaggagcctgttctcatcaccatggcaacagtggtactgactgtcctcacccacacccctgcccctcgagtgagactgggacaagatgctctgctggacttgagctttgcctacatgccccccacctccgaggccgcctcatctctggctccgggtccccctccctttgggctagagtggcgacgccagcacctgggtaagggacatctgctcctggctgcaactcctgggctgaatggccagatgccagcagcccaagaaggggccgtggcatttgctgcttgggatgatgatgagccatggggcccatggaccggaaatgggaccttctggctgcctacagttcaaccctttcaggagggcacctatctggccaccatacacctgccatacctgcaaggacaggtcaccctggagcttgctgtgtacaaaccccccaaagtgtccctgatgccagcaacccttgcacgggccgccccaggggaggcacccccggaattgctctgccttgtgtcccacttctacccttctgggggcctggaggtggagtgggaactccggggtggcccagggggccgctctcagaaggccgaggggcagaggtggctctcggccctgcgccaccattccgatggctctgtcagcctctctgggcacttgcagccgcccccagtcaccactgagcagcatggggcacgctatgcctgtcgaattcaccatcccagcctgcctgcctcggggcgcagcgctgaggtcaccctggaggtagcaggtctttcagggccctcccttgaggacagcgtaggccttttcctgtctgcctttcttctgcttgggctcttcaaggcactgggctgggctgctgtctacctgtccacctgcaaggattcaaagaagaaagcagagtgagggcactcactgccatcctgtggaagccaccatcatctctggcccaagcttctgtagtagctccctaaaataataccctatcatctgctcctaatccctccaatctctctcc

SEQ ID NO: 15381 - protein, 448 aa, Homo sapiens; identical to SEQ ID NO: 1726

SEQ ID NO: 15382 - DNA, 1836 bp, Homo sapiens
ggggacgcggcacagatagggggaagccggagtaatggttttcgggcaagtggatgttggagagcacacacaggagttggggggcgggggagggcctggggttggggagggctcgaactcggggctgctgggtagtccaggagggcgcggtaaggctggggtgtcctggtgagaactggagaggatctacccgggtccctgcctggccagtggggaaacaccggtcccccaggcaccttcacctaaccagagcggggatttccaccgcccctcatgccgccctttggaggaaagtgaaagtgaaaggaggaagaggaggcttcatggctgaggaggtcgcagcgccatgaagtccctgtctctgctcctcgctgtggctttgggcctggcgaccgccgtctcagcaggacccgcggtgatcgagtgttggttcgtggaggatgcgagcggaaagggcctggccaagagacccggtgcactgctgttgcgccagggaccgggggaaccgccgccccggccggacctcgaccctgagctctatctcagtgtacacgaccccgcgggcgccctccaggctgccttcaggcggtatccccggggcgcccccgcaccacactgcgagatgagccgcttcgtgcctctccccgcctctgcgaaatgggccagcggcctgacccccgcgcagaactgcccgcgggccctggatggggcttggctgatggtcagcatatccagcccagtcctcagcctctccagcctcttgcgaccacagccagagcctcagcaggagcctgttctcatcaccatggcaacagtggtactgactgtcctcacccacacccctgcccctcgagtgagactgggacaagatgctctgctggacttgagctttgcctacatgccccccacctccgaggccgcctcatctctggctccgggtccccctccctttgggctagagtggcgacgccagcacctgggtaagggacatctgctcctggctgcaactcctgggctgaatggccagatgccagcagcccaagaaggggccgtggcatttgctgcttgggatgatgatgagccatggggcccatggaccggaaatgggaccttctggctgcctacagttcaaccctttcaggagggcacctatctggccaccatacacctgccatacctgcaaggacaggtcaccctggagcttgctgtgtacaaaccccccaaagtgtccctgatgccagcaacccttgcacgggccgccccaggggaggcacccccggaattgctctgccttgtgtcccacttctacccttctgggggcctggaggtggagtgggaactccggggtggcccagggggccgctctcagaaggccgaggggcagaggtggctctcggccctgcgccaccattccgatggctctgtcagcctctctgggcacttgcagccgcccccagtcaccactgagcagcatggggcacgctatgcctgtcgaattcaccatcccagcctgcctgcctcggggcgcagcgctgaggtcaccctggaggtagcaggtctttcagggccctcccttgaggacagcgtaggccttttcctgtctgcctttcttctgcttgggctcttcaaggcactgggctgggctgctgtctacctgtccacctgcaaggattcaaagaagaaaattagccagatgtgacggcacctgtaatcccagctactcgggagactggggcaggagaatcgcttgaacctgggaggcagaggttgcagtgagctgagatcacaccattgcactccagcctgggtgacaaaaggaaaacttcgtctcaacaa

SEQ ID NO: 15383 - protein, 450 aa, Homo sapiens
MKSLSLLLAVALGLATAVSAGPAVIECWFVEDASGKGLAKRPGALLLRQGPGEPPPRPDLDPELYLSVHDPAGALQAAFRRYPRGAPAPHCEMSRFVPLPASAKWASGLTPAQNCPRALDGAWLMVSISSPVLSLSSLLRPQPEPQQEPVLITMATVVLTVLTHTPAPRVRLGQDALLDLSFAYMPPTSEAASSLAPGPPPFGLEWRRQHLGKGHLLLAATPGLNGQMPAAQEGAVAFAAWDDDEPWGPWTGNGTFWLPTVQPFQEGTYLATIHLPYLQGQVTLELAVYKPPKVSLMPATLARAAPGEAPPELLCLVSHFYPSGGLEVEWELRGGPGGRSQKAEGQRWLSALRHHSDGSVSLSGHLQPPPVTTEQHGARYACRIHHPSLPASGRSAEVTLEVAGLSGPSLEDSVGLFLSAFLLLGLFKALGWAAVYLSTCKDSKKKISQM

SEQ ID NO: 15384 - DNA, 2178 bp, Homo sapiens
ggggacgcggcacagatagggggaagccggagtaatggttttcgggcaagtggatgttggagagcacacacaggagttggggggcgggggagggcctggggttggggagggctcgaactcggggctgctgggtagtccaggagggcgcggtaaggctggggtgtcctggtgagaactggagaggatctacccgggtccctgcctggccagtggggaaacaccggtcccccaggcaccttcacctaaccagagcggggatttccaccgcccctcatgccgccctttggaggaaagtgaaagtgaaaggaggaagaggaggcttcatggctgaggaggtcgcagcgccatgaagtccctgtctctgctcctcgctgtggctttgggcctggcgaccgccgtctcagcaggacccgcggtgatcgagtgttggttcgtggaggatgcgagcggaaagggcctggccaagagacccggtgcactgctgttgcgccagggaccgggggaaccgccgccccggccggacctcgaccctgagctctatctcagtgtacacgaccccgcgggcgccctccaggctgccttcaggcggtatccccggggcgcccccgcaccacactgcgagatgagccgcttcgtgcctctccccgcctctgcgaaatgggccagcggcctgacccccgcgcagaactgcccgcgggccctggatggggcttggctgatggtcagcatatccagcccagtcctcagcctctccagcctcttgcgaccacagccagagcctcagcaggagcctgttctcatcaccatggcaacagtggtactgactgtcctcacccacacccctgcccctcgagtgagactgggacaagatgctctgctggacttgagctttgcctacatgccccccacctccgaggccgcctcatctctggctccgggtccccctccctttgggctagagtggcgacgccagcacctgggtaagggacatctgctcctggctgcaactcctgggctgaatggccagatgccagcagcccaagaaggggccgtggcatttgctgcttgggatgatgatgagccatggggcccatggaccggaaatgggaccttctggctgcctacagttcaaccctttcaggagggcacctatctggccaccatacacctgccatacctgcaaggacaggtcaccctggagcttgctgtgtacaaaccccccaaagtgtccctgatgccagcaacccttgcacgggccgccccaggggaggcacccccggaattgctctgccttgtgtcccacttctacccttctgggggcctggaggtggagtgggaactccggggtggcccagggggccgctctcagaaggccgaggggcagaggtggctctcggccctgcgccaccattccgatggctctgtcagcctctctgggcacttgcagccgcccccagtcaccactgagcagcatggggcacgctatgcctgtcgaattcaccatcccagcctgcctgcctcggggcgcagcgctgaggtcaccctggaggtagcaggtctttcagggccctcccttgaggacagcgtaggccttttcctgtctgcctttcttctgcttgggctcttcaaggcactgggctgggctgctgtctacctgtccacctgcaaggattcaaagaaggtacagtgctccacctctctgtatctttcccttgtcactttatctcctcatcctatctcaaaacccatggagggaggctgctggtgtggtaggcagaacctaggcttggaattcacactgatctgggttaaaacctggcactatatcctaactgtaggactctttgagcatgctacttaatctatatgtttccttgggtgtagggattttaaaaagttacttaggcagtgctgtccaatagaaagataatgcaagccacatatgtaaatttaaatactctagtactcacattaaaaaaataagcagaaacaggtaaaattaacttaataatataccttatttaatctaataattctggtcccttatctgaaatgcttgggtcagaagtgtttttggatgttggattttttcagactttggaatatttgcatatatttaatatctttgggatcagacccaaatctaaacacagaaatcatttatgtttcctatacacc

SEQ ID NO: 15385 - protein, 504 aa, Homo sapiens
MKSLSLLLAVALGLATAVSAGPAVIECWFVEDASGKGLAKRPGALLLRQGPGEPPPRPDLDPELYLSVHDPAGALQAAFRRYPRGAPAPHCEMSRFVPLPASAKWASGLTPAQNCPRALDGAWLMVSISSPVLSLSSLLRPQPEPQQEPVLITMATVVLTVLTHTPAPRVRLGQDALLDLSFAYMPPTSEAASSLAPGPPPFGLEWRRQHLGKGHLLLAATPGLNGQMPAAQEGAVAFAAWDDDEPWGPWTGNGTFWLPTVQPFQEGTYLATIHLPYLQGQVTLELAVYKPPKVSLMPATLARAAPGEAPPELLCLVSHFYPSGGLEVEWELRGGPGGRSQKAEGQRWLSALRHHSDGSVSLSGHLQPPPVTTEQHGARYACRIHHPSLPASGRSAEVTLEVAGLSGPSLEDSVGLFLSAFLLLGLFKALGWAAVYLSTCKDSKKVQCSTSLYLSLVTLSPHPISKPMEGGCWCGRQNLGLEFTLIWVKTWHYILTVGLFEHAT

SEQ ID NO: 15386 - DNA, 2745 bp, Homo sapiens
ggggacgcggcacagatagggggaagccggagtaatggttttcgggcaagtggatgttggagagcacacacaggagttggggggcgggggagggcctggggttggggagggctcgaactcggggctgctgggtagtccaggagggcgcggtaaggctggggtgtcctggtgagaactggagaggatctacccgggtccctgcctggccagtggggaaacaccggtcccccaggcaccttcacctaaccagagcggggatttccaccgcccctcatgccgccctttggaggaaagtgaaagtgaaaggaggaagaggaggcttcatggctgaggaggtcgcagcgccatgaagtccctgtctctgctcctcgctgtggctttgggcctggcgaccgccgtctcagcaggacccgcggtgatcgagtgttggttcgtggaggatgcgagcggaaagggcctggccaagagacccggtgcactgctgttgcgccagggaccgggggaaccgccgccccggccggacctcgaccctgagctctatctcagtgtacacgaccccgcgggcgccctccaggctgccttcaggcggtatccccggggcgcccccgcaccacactgcgagatgagccgcttcgtgcctctccccgcctctgcgaaatgggccagcggcctgacccccgcgcagaactgcccgcgggccctggatggggcttggctgatggtcagcatatccagcccagtcctcagcctctccagcctcttgcgaccacagccagagcctcagcaggagcctgttctcatcaccatggcaacagtggtactgactgtcctcacccacacccctgcccctcgagtgagactgggacaagatgctctgctggacttgagctttgcctacatgccccccacctccgaggccgcctcatctctggctccgggtccccctccctttgggctagagtggcgacgccagcacctgggtaagggacatctgctcctggctgcaactcctgggctgaatggccagatgccagcagcccaagaaggggccgtggcatttgctgcttgggatgatgatgagccatggggcccatggaccggaaatgggaccttctggctgcctacagttcaaccctttcaggagggcacctatctggccaccatacacctgccatacctgcaaggacaggtcaccctggagcttgctgtgtacagtgagttgggggacagaggtctccaggggtagagggtgggcactggattgtggggaccgtaatagggggagggatgatggataagagggtgcctgggcaagtaagtagagatagaaagaggttcctgggagttagaggggtaatgggaggctagaagtttcctggaaatttgaggggctttgacatgggtatttctgtgacgcaccaatggagagacagtgggttccctatttcaggagaagaaacctaaccttctttagttctgaggaagccagcaggcaaactgagggtctcttagggaggacagtatggactgatttccctatgctcatttcgtcctctttccccagaaccccccaaagtgtccctgatgccagcaacccttgcacgggccgccccaggggaggcacccccggaattgctctgccttgtgtcccacttctacccttctgggggcctggaggtggagtgggaactccggggtggcccagggggccgctctcagaaggccgaggggcagaggtggctctcggccctgcgccaccattccgatggctctgtcagcctctctgggcacttgcagccgcccccagtcaccactgagcagcatggggcacgctatgcctgtcgaattcaccatcccagcctgcctgcctcggggcgcagcgctgaggtcaccctggaggtagcaggtaagagctgggagctctgcggaatctgagccagcacccaggaagacaggagctcactctcaccccttctgcctgccaggtctttcagggccctcccttgaggacagcgtaggccttttcctgtctgcctttcttctgcttgggctcttcaaggcactgggctgggctggtaagtgtcagccctaccctgaccatgacctgaggttggtggactttccccacctactcccaagagcctgacacccatccctctgccctccacctctaccactccagcatcccatcccttctcaatctttccccacagctgtctacctgtccacctgcaaggattcaaagaaggtacagtgctccacctctctgtatctttcccttgtcactttatctcctcatcctatctcaaaacccatggagggaggctgctggtgtggtaggcagaacctaggcttggaattcacactgatctgggttaaaacctggcactatatcctaactgtaggactctttgagcatgctacttaatctatatgtttccttgggtgtagggattttaaaaagttacttaggcagtgctgtccaatagaaagataatgcaagccacatatgtaaatttaaatactctagtactcacattaaaaaaataagcagaaacaggtaaaattaacttaataatataccttatttaatctaataattctggtcccttatctgaaatgcttgggtcagaagtgtttttggatgttggattttttcagactttggaatatttgcatatatttaatatctttgggatcagacccaaatctaaacacagaaatcatttatgtttcctatacacc

SEQ ID NO: 15387 - protein, 299 aa, Homo sapiens; identical to SEQ ID NO: 1728

SEQ ID NO: 15388 - DNA, 1995 bp, Homo sapiens
ggggacgcggcacagatagggggaagccggagtaatggttttcgggcaagtggatgttggagagcacacacaggagttggggggcgggggagggcctggggttggggagggctcgaactcggggctgctgggtagtccaggagggcgcggtaaggctggggtgtcctggtgagaactggagaggatctacccgggtccctgcctggccagtggggaaacaccggtcccccaggcaccttcacctaaccagagcggggatttccaccgcccctcatgccgccctttggaggaaagtgaaagtgaaaggaggaagaggaggcttcatggctgaggaggtcgcagcgccatgaagtccctgtctctgctcctcgctgtggctttgggcctggcgaccgccgtctcagcaggacccgcggtgatcgagtgttggttcgtggaggatgcgagcggaaagggcctggccaagagacccggtgcactgctgttgcgccagggaccgggggaaccgccgccccggccggacctcgaccctgagctctatctcagtgtacacgaccccgcgggcgccctccaggctgccttcaggcggtatccccggggcgcccccgcaccacactgcgagatgagccgcttcgtgcctctccccgcctctgcgaaatgggccagcggcctgacccccgcgcagaactgcccgcgggccctggatggggcttggctgatggtcagcatatccagcccagtcctcagcctctccagcctcttgcgaccacagccagagcctcagcaggagcctgttctcatcaccatggcaacagtggtactgactgtcctcacccacacccctgcccctcgagtgagactgggacaagatgctctgctggacttgagctttgcctacatgccccccacctccgaggccgcctcatctctggctccgggtccccctccctttgggctagagtggcgacgccagcacctgggtaagggacatctgctcctggctgcaactcctgggctgaatggccagatgccagcagcccaagaaggggccgtggcatttgctgcttgggatgatgatgagccatggggcccatggaccggaaatgggaccttctggctgcctacagttcaaccctttcaggagggcacctatctggccaccatacacctgccatacctgcaaggacaggtcaccctggagcttgctgtgtacaaaccccccaaagtgtccctgatgccagcaacccttgcacgggccgccccaggggaggcacccccggaattgctctgccttgtgtcccacttctacccttctgggggcctggaggtggagtgggaactccggggtggcccagggggccgctctcagaaggccgaggggcagaggtggctctcggccctgcgccaccattccgatggctctgtcagcctctctgggcacttgcagccgcccccagtcaccactgagcagcatggggcacgctatgcctgtcgaattcaccatcccagcctgcctgcctcggggcgcagcgctgaggtcaccctggaggtagcaggtctttcagggccctcccttgaggacagcgtaggccttttcctgtctgcctttcttctgcttgggctcttcaaggcactgggctgggctgctgtctacctgtccacctgcaaggattcaaagaaggtacagtgctccacctctctgtatctttcccttgtcactttatctcctcatcctatctcaaaacccatggagggaggctgctggtgtggtaggcagaacctaggcttggaattcacactgatctgggttaaaacctggcactatatcctaactgtaggactctttgagcatgctacttaatctatatgtttccttgggtgtagggattttaaaaagttacttaggcagtgctgtccaatagaaagataatgcaagccacatatgtaaatttaaatactctagtactcacattaaaaaaataagcagaaacaggt

SEQ ID NO: 15389 - protein, 504 aa, Homo sapiens; identical to SEQ ID NO: 15385

SEQ ID NO: 15390 - DNA, 2562 bp, Homo sapiens
ggggacgcggcacagatagggggaagccggagtaatggttttcgggcaagtggatgttggagagcacacacaggagttggggggcgggggagggcctggggttggggagggctcgaactcggggctgctgggtagtccaggagggcgcggtaaggctggggtgtcctggtgagaactggagaggatctacccgggtccctgcctggccagtggggaaacaccggtcccccaggcaccttcacctaaccagagcggggatttccaccgcccctcatgccgccctttggaggaaagtgaaagtgaaaggaggaagaggaggcttcatggctgaggaggtcgcagcgccatgaagtccctgtctctgctcctcgctgtggctttgggcctggcgaccgccgtctcagcaggacccgcggtgatcgagtgttggttcgtggaggatgcgagcggaaagggcctggccaagagacccggtgcactgctgttgcgccagggaccgggggaaccgccgccccggccggacctcgaccctgagctctatctcagtgtacacgaccccgcgggcgccctccaggctgccttcaggcggtatccccggggcgcccccgcaccacactgcgagatgagccgcttcgtgcctctccccgcctctgcgaaatgggccagcggcctgacccccgcgcagaactgcccgcgggccctggatggggcttggctgatggtcagcatatccagcccagtcctcagcctctccagcctcttgcgaccacagccagagcctcagcaggagcctgttctcatcaccatggcaacagtggtactgactgtcctcacccacacccctgcccctcgagtgagactgggacaagatgctctgctggacttgagctttgcctacatgccccccacctccgaggccgcctcatctctggctccgggtccccctccctttgggctagagtggcgacgccagcacctgggtaagggacatctgctcctggctgcaactcctgggctgaatggccagatgccagcagcccaagaaggggccgtggcatttgctgcttgggatgatgatgagccatggggcccatggaccggaaatgggaccttctggctgcctacagttcaaccctttcaggagggcacctatctggccaccatacacctgccatacctgcaaggacaggtcaccctggagcttgctgtgtacagtgagttgggggacagaggtctccaggggtagagggtgggcactggattgtggggaccgtaatagggggagggatgatggataagagggtgcctgggcaagtaagtagagatagaaagaggttcctgggagttagaggggtaatgggaggctagaagtttcctggaaatttgaggggctttgacatgggtatttctgtgacgcaccaatggagagacagtgggttccctatttcaggagaagaaacctaaccttctttagttctgaggaagccagcaggcaaactgagggtctcttagggaggacagtatggactgatttccctatgctcatttcgtcctctttccccagaaccccccaaagtgtccctgatgccagcaacccttgcacgggccgccccaggggaggcacccccggaattgctctgccttgtgtcccacttctacccttctgggggcctggaggtggagtgggaactccggggtggcccagggggccgctctcagaaggccgaggggcagaggtggctctcggccctgcgccaccattccgatggctctgtcagcctctctgggcacttgcagccgcccccagtcaccactgagcagcatggggcacgctatgcctgtcgaattcaccatcccagcctgcctgcctcggggcgcagcgctgaggtcaccctggaggtagcaggtaagagctgggagctctgcggaatctgagccagcacccaggaagacaggagctcactctcaccccttctgcctgccaggtctttcagggccctcccttgaggacagcgtaggccttttcctgtctgcctttcttctgcttgggctcttcaaggcactgggctgggctggtaagtgtcagccctaccctgaccatgacctgaggttggtggactttccccacctactcccaagagcctgacacccatccctctgccctccacctctaccactccagcatcccatcccttctcaatctttccccacagctgtctacctgtccacctgcaaggattcaaagaaggtacagtgctccacctctctgtatctttcccttgtcactttatctcctcatcctatctcaaaacccatggagggaggctgctggtgtggtaggcagaacctaggcttggaattcacactgatctgggttaaaacctggcactatatcctaactgtaggactctttgagcatgctacttaatctatatgtttccttgggtgtagggattttaaaaagttacttaggcagtgctgtccaatagaaagataatgcaagccacatatgtaaatttaaatactctagtactcacattaaaaaaataagcagaaacaggt

SEQ ID NO: 15391 - protein, 299 aa, Homo sapiens; identical to SEQ ID NO: 1728

SEQ ID NO: 15392 - DNA, 726 bp, Homo sapiens
gaggtggccccactggagccgatgccagggtgggagtggggcaggtcaccagacatacaaaccgctcctcactcgcgtccctatacgccaggcctggcgaccgccgtctcagcaggacccgcggtgatcgagtgttggttcgtggaggatgcgagcggaaagggcctggccaagagacccggtgcactgctgttgcgccagggaccgggggaaccgccgccccggccggacctcgaccctgagctctatctcagtgtacacgaccccgcgggcgccctccaggctgccttcaggcggtatccccggggcgcccccgcaccacactgcgagatgagccgcttcgtgcctctccccgcctctgcgaaatgggccagcggcctgacccccgcgcagaactgcccgcgggccctggatggggcttggctgatggtcagcatatccagcccagtcctcagcctctccagcctcttgcgaccacagccagagcctcagcaggagcctgttctcatcaccatggcaacaggtagctggggaggggaggtggagaagggtgggtagattctaagggtccagatcagccggtggtctcgctttatggacttgagcaagacatttcgccaatcggggttcagtttcctttttttgttaagagaggtggtttggctagaatgaatcaatctctaccgctccttctagccctcacccagttaaaaaaaaaaaacaaaa

SEQ ID NO: 15393 - protein, 178 aa, Homo sapiens
MPGWEWGRSPDIQTAPHSRPYTPGLATAVSAGPAVIECWFVEDASGKGLAKRPGALLLRQGPGEPPPRPDLDPELYLSVHDPAGALQAAFRRYPRGAPAPHCEMSRFVPLPASAKWASGLTPAQNCPRALDGAWLMVSISSPVLSLSSLLRPQPEPQQEPVLITMATGSWGGEVEKGG

SEQ ID NO: 15394 - DNA, 1287 bp, Homo sapiens
tatgagggtgggggtcctgtggcaggtcttgatgactcaggggggccaactccctcttcctatgccccctcccaccctcctcgaccgctccttcccttggacatgcagggcaaccagatcctggtcttcccgtcgtcgtcttcatcctcatcctcacaggctcctggccaaccaccagggaaccaagcagaacacggggcagtgaccgtggggggcacgtcggtggggagcctgggtgtgccgggtagcgttggtggggtccctggagggactggcagtggggacgggaataagatctttctgtgccattgtgggaaggccttctcccacaagagcatgcgggaccggcacgtgaacatgcacctcaatctgcggccgtttgactgccccgtgtgcaacaaaaagttcaagatgaagcaccatctgactgagcacatgaagacgcacacaggtctcaagccctacgagtgcggagtctgcgccaagaagttcatgtggcgagacagcttcatgcgccaccgaggacactgtgagcgccggcaccgcctgggcggggtcggggccgtacctgggcctgggactcccacggggccatccttgccgtccaacagacgtgtctggtccccacccagagtccacaaggtggagatgggcttcggtggaggtggaggagcaaactgaaggggcaggctactggggtggggtagctttcgggaaagggaataaggagcacgatgcaagggcgctgtggcccccgggtgatctcccaccacacttactgtcttcctttatctctgtggacttgtatatattctggaaggggaaccacagtttcaccatcgcccgcccattctactactcaacccctcccccccaaggtatttccagaactaaacccttcctttccctctgatgggtacactgaagcccctgctccacagagtagattgcacatggagggagggagagggggcgtgttgaacatcctgcagtcacagggtcaggggtcaggtggttgtagtctgtgcctgaagtctgtgtttgtgttgtcgtggagacaaggcctttgagccccacccttgtcctagaacctaccccctctcaaggatgcgctctttatttctaccctgtctctccccgccacccccgacttcccgtggaaattcccaactcggttctcatggaggagtgggtggagacaaggagggagtaagtcgtaggagtacaaggtttttattttttttaacagtgattaaaatatttattggtcatttacttggcttcccg

SEQ ID NO: 15395 - protein, 192 aa, Homo sapiens
MQGNQILVFPSSSSSSSSQAPGQPPGNQAEHGAVTVGGTSVGSLGVPGSVGGVPGGTGSGDGNKIFLCHCGKAFSHKSMRDRHVNMHLNLRPFDCPVCNKKFKMKHHLTEHMKTHTGLKPYECGVCAKKFMWRDSFMRHRGHCERRHRLGGVGAVPGPGTPTGPSLPSNRRVWSPPRVHKVEMGFGGGGGAN

SEQ ID NO: 15396 - DNA, 2663 bp, Homo sapiens
cgcaagatggcggcgggaggggcccaggttgctgctctggccgccgagtgaggggcggggggggcccgggggcgcgcggcccgagacccccccggccgccctcctcctttctttgttcctgtggctgggggggtatcccctccctccacaacatggagccatctcctctgtctcccagtggggcagcacttcccctgccgctgtcgctggctccgcccccactacccctgccagcagctgcagtggtacatgtgtccttccctgaggtgaccagtgccctcttggagtccctcaatcagcagcgtctgcagggccagctctgcgatgtatctatcagagtgcagggccgggagttccgggctcatcgggctgtcctggctgcctcctccccttacttccatgatcaggtcctactcaaaggcatgacctccatctcgctgcccagtgtcatggacccaggcgcctttgagactgtcctagcctccgcttacactggccgcctcagcatggctgctgctgacattgtcaacttccttacagtggggtctgtgctccaaatgtggcacattgtggacaagtgcactgaactactccgagaaggccgggcctcagctaccaccaccatcactactgctgcagccacctctgtcactgtccctggtgctggggtgccatccgggagtgggggcactgtggcccctgctaccatgggctctgcgcgctcccatgcctccagccgggccagtgagaatcaatctcccagcagcagcaactacttcagccccagggagtccactgatttctcatcttcctcccaagaggcatttgcagcttctgcagtgggcagtggggagcgtcgaggaggtggccctgtattcccagcccctgtcgttggcagtggaggggccacatctggaaagctgctgctggaggcagatgagctgtgcgatgatggtggggatgggaggggggcagtggttcctggggctgggctccggagacccacctacacaccccctagcatcatgccacagaaacactgggtatacgtgaagcgaggtggtaattgcccagcgccaacacccctggttccccaagacccagatctggaggaggaagaggaggaggaagatctggtgttgacctgtgaggatgatgaagatgaagaactagggggtagctccagggttccagtggggggagggcctgaggctaccctcagcataagtgatgtccgtaccctgagtgagcccccagacaagggggaggagcaggtcaacttctgtgagtcctccaatgactttggcccatatgagggtgggggtcctgtggcaggtcttgatgactcaggggggccaactccctcttcctatgccccctcccaccctcctcgaccgctccttcccttggacatgcagggcaaccagatcctggtcttcccgtcgtcgtcttcatcctcatcctcacaggctcctggccaaccaccagggaaccaagcagaacacggggcagtgaccgtggggggcacgtcggtggggagcctgggtgtgccgggtagcgttggtggggtccctggagggactggcagtggggacgggaataagatctttctgtgccattgtgggaaggccttctcccacaagagcatgcgggaccggcacgtgaacatgcacctcaatctgcggccgtttgactgccccgtgtgcaacaaaaagttcaagatgaagcaccatctgactgagcacatgaagacgcacacaggtctcaagccctacgagtgcggagtctgcgccaagaagttcatgtggcgagacagcttcatgcgccaccgaggacactgtgagcgccggcaccgcctgggcggggtcggggccgtacctgggcctgggactcccacggggccatccttgccgtccaagagagagtctcccggagtgggcgggggcagcggcgacgaagcgagtgcggccacgcccccgtccagcagacgtgtctggtccccacccagagtccacaaggtggagatgggcttcggtggaggtggaggagcaaactgaaggggcaggctactggggtggggtagctttcgggaaagggaataaggagcacgatgcaagggcgctgtggcccccgggtgatctcccaccacacttactgtcttcctttatctctgtggacttgtatatattctggaaggggaaccacagtttcaccatcgcccgcccattctactactcaacccctcccccccaaggtatttccagaactaaacccttcctttccctctgatgggtacactgaagcccctgctccacagagtagattgcacatggagggagggagagggggcgtgttgaacatcctgcagtcacagggtcaggggtcaggtggttgtagtctgtgcctgaagtctgtgtttgtgttgtcgtggagacaaggcctttgagccccacccttgtcctagaacctaccccctctcaaggatgcgctctttatttctaccctgtctctccccgccacccccgacttcccgtggaaattcccaactcggttctcatggaggagtgggtggagacaaggagggagtaagtcgtaggagtacaaggtttttattttttttaacagtgattaaaatatttattggtcatttacttggcttcccg

SEQ ID NO: 15397 - protein, 634 aa, Homo sapiens
MEPSPLSPSGAALPLPLSLAPPPLPLPAAAVVHVSFPEVTSALLESLNQQRLQGQLCDVSIRVQGREFRAHRAVLAASSPYFHDQVLLKGMTSISLPSVMDPGAFETVLASAYTGRLSMAAADIVNFLTVGSVLQMWHIVDKCTELLREGRASATTTITTAAATSVTVPGAGVPSGSGGTVAPATMGSARSHASSRASENQSPSSSNYFSPRESTDFSSSSQEAFAASAVGSGERRGGGPVFPAPVVGSGGATSGKLLLEADELCDDGGDGRGAVVPGAGLRRPTYTPPSIMPQKHWVYVKRGGNCPAPTPLVPQDPDLEEEEEEEDLVLTCEDDEDEELGGSSRVPVGGGPEATLSISDVRTLSEPPDKGEEQVNFCESSNDFGPYEGGGPVAGLDDSGGPTPSSYAPSHPPRPLLPLDMQGNQILVFPSSSSSSSSQAPGQPPGNQAEHGAVTVGGTSVGSLGVPGSVGGVPGGTGSGDGNKIFLCHCGKAFSHKSMRDRHVNMHLNLRPFDCPVCNKKFKMKHHLTEHMKTHTGLKPYECGVCAKKFMWRDSFMRHRGHCERRHRLGGVGAVPGPGTPTGPSLPSKRESPGVGGGSGDEASAATPPSSRRVWSPPRVHKVEMGFGGGGGAN

SEQ ID NO: 15398 - DNA, 664 bp, Homo sapiens
caagagccccatgtcctcactacagatctccaatgaaaagaacctggaacctggcaaacagatcagcagatcttcaggggagcagcaaaacaaaggacgcatagtgtcaccatcgttactgtcagaagaacccctggccccctccagcatagatgctgaaagcaatggagaacagcctgaggagctgaccctggaggaagaaagccctgtgtctcagctctttgagctagagattgaagctttgcccctggataccccttcctctgtggagacggacatttcctcttccaggaagcaatcagaggagcccttcaccactgtcttagagaatggagcaggcatggtctcttctaatcccttctccagcccggctgtcccaaaccccccattcacagcctcctcggcctggtacttgcaagacaagtgtggccacacaatgcgatccagaagagatcatcgtgctctcagactctgattagctgcctccccttctccctgcctccagaatgttctgggataacatttggaggaaggtgggaagcagatgactgaggaagggatggactaagctaatccccttttggtggtgtttctttaaaaaaaaaaaaaagcttaagttttacacagaaacattaataaacaataaagttcttttcttactgta

SEQ ID NO: 15399 - protein, 154 aa, Homo sapiens
MSSLQISNEKNLEPGKQISRSSGEQQNKGRIVSPSLLSEEPLAPSSIDAESNGEQPEELTLEEESPVSQLFELEIEALPLDTPSSVETDISSSRKQSEEPFTTVLENGAGMVSSNPFSSPAVPNPPFTASSAWYLQDKCGHTMRSRRDHRALRL

SEQ ID NO: 15400 - DNA, 2613 bp, Homo sapiens
gacaatatggcggcgcttagttgcatgaaggcggaaactctgtgacttccggtccgtagtggggcctgcggtgggagtgggaaggaaggcggagggaaccatgcgaggttctgagaattgcggcgagggtcgcctcgagagacggtttctgagcaggaattctgaaatccccaccacttcctccctccgggggatttgatcccctatggccaccgctaacagcatcatcgtgctggatgatgatgacgaagatgaagcagctgctcagccagggccctcccacccactccccaatgcggcctcacctggggcagaagcccctagctcctctgagcctcatggggccagaggaagcagtagttcgggcggcaagaaatgctacaagctggagaatgagaagctgttcgaagagttccttgaactttgtaagatgcagacagcagaccaccctgaggtggtcccattcctctataaccggcagcaacgtgcccactctctgtttttggcctcggcggagttctgcaacatcctctctagggtcctgtctcgggcccggagccggccagccaagctctatgtctacatcaatgagctctgcactgttctcaaggcccactcagccaaaaagaagctgaacttggcccctgccgccaccacctccaatgagccctctgggaataaccctcccacacacctctccttggaccccacaaatgctgaaaacactgcctctcagtctccaaggacccgtggttcccggcggcagatccagcgtttggagcagctgctggcgctctatgtggcagagatccggcggctgcaggaaaaggagttggatctctcagaattggatgacccagactccgcatacctgcaggaggcacggttgaagcgtaagctgatccgcctctttgggcgactatgtgagctgaaagactgctcttcactgaccggccgtgtcatagagcagcgcatcccctaccgtggcacccgctacccagaggttaacaggcgcattgagcggctcatcaacaagccagggcctgataccttccctgactatggggatgtgcttcgggctgtagagaaggcagctgcccgacacagccttggcctcccccgacagcagctccagctcatggctcaggatgccttccgagatgtgggcatcaggttacaggagcgacgtcacctcgatctcatctacaactttggctgccacctcacagatgactataggccaggcgttgaccctgcactatcagatcctgtgttggcccggcgccttcgggaaaaccggagtttggccatgagtcggctggatgaggtcatctccaaatatgcaatgttgcaagacaaaagtgaggagggcgagagaaaaaagagaagagctcggctccaaggcacctcttcccactctgcagacacccccgaagcctccttggattctggtgagggccctagtggaatggcatcccaggggtgcccttctgcctccagagctgagacagatgacgaagacgatgaggagagtgatgaggaagaggaggaggaggaggaagaagaagaggaggaggccacagattctgaagaggaggaggatctggaacagatgcaggagggtcaggaggatgatgaagaggaggacgaagaggaagaagcagcagcaggtaaagatggagacaagagccccatgtcctcactacagatctccaatgaaaagaacctggaacctggcaaacagatcagcagatcttcaggggagcagcaaaacaaaggacgcatagtgtcaccatcgttactgtcagaagaacccctggccccctccagcatagatgctgaaagcaatggagaacagcctgaggagctgaccctggaggaagaaagccctgtgtctcagctctttgagctagagattgaagctttgcccctggataccccttcctctgtggagacggacatttcctcttccaggaagcaatcagaggagcccttcaccactgtcttagagaatggagcaggcatggtctcttctacttccttcaatggaggcgtctctcctcacaactggggagattctggtcccccctgcaaaaaatctcggaaggagaagaagcaaacaggatcagggccattaggaaacagctatgtggaaaggcaaaggtcagtgcatgagaagaatgggaaaaagatatgtaccctgcccagcccaccttcccccttggcttccttggccccagttgctgattcctccacgagggtggactctcccagccatggcctggtgaccagctccctctgcatcccttctccagcccggctgtcccaaaccccccattcacagcctcctcggcctggtacttgcaagacaagtgtggccacacaatgcgatccagaagagatcatcgtgctctcagactctgattagctgcctccccttctccctgcctccagaatgttctgggataacatttggaggaaggtgggaagcagatgactgaggaagggatggactaagctaatccccttttggtggtgtttctttaaaaaaaaaaaaaagcttaagttttacacagaaacattaataaacaataaagttcttttcttactgta

SEQ ID NO: 15401 - protein, 740 aa, Homo sapiens; identical to SEQ ID NO: 1734

SEQ ID NO: 15402 - DNA, 334 bp, Homo sapiens
gagctgaccctggaggaagaaagccctgtgtctcagctctttgagctagagattgaagctttgcccctggataccccttcctctgtggagacaagtgtggccacacaatgcgatccagaagagatcatcgtgctctcagactctgattagctgcctccccttctccctgcctccagaatgttctgggataacatttggaggaaggtgggaagcagatgactgaggaagggatggactaagctaatccccttttggtggtgtttctttaaaaaaaaaaaaaagcttaagttttacacagaaacattaataaacaataaagttcttttcttactgt

SEQ ID NO: 15403 - protein, 57 aa, Homo sapiens
RLKLCPWIPLPLWRQVWPHNAIQKRSSCSQTLISCLPFSLPPECSGITFGGRWEADD

SEQ ID NO: 15404 - DNA, 518 bp, Homo sapiens
cagatctccaatgaaaagaacctggaacctggcaaacagatcagcagatcttcaggggagcagcaaaacaaaggacgcatagtgtcaccatcgttactgtcagaagaacccctggccccctccagcatagatgctgaaagcaatggagaacagctatgtggaaaggcaaaggtcagtgcatgagaagaatgggaaaaagatatgtaccctgcccagcccaccttcccccttggcttccttggccccagttgctgattcctccacgagggtggactctcccagccatggcctggtgaccagctccctctgcatcccttctccagcccggctgtcccaaaccccccttctccctgcctccagaatgttctgggataacatttggaggaaggtgggaagcagatgactgaggaagggatggactaagctaatccccttttggtggtgtttctttaaaaaaaaaaaaaagcttaagttttacacagaaacattaataaacaataaagttcttttcttactgt

SEQ ID NO: 15405 - protein, 90 aa, Homo sapiens
MLKAMENSYVERQRSVHEKNGKKICTLPSPPSPLASLAPVADSSTRVDSPSHGLVTSSLCIPSPARLSQTPLLPASRMFWDNIWRKVGSR

SEQ ID NO: 15406 - DNA, 2545 bp, Homo sapiens
gacaatatggcggcgcttagttgcatgaaggcggaaactctgtgacttccggtccgtagtggggcctgcggtgggagtgggaaggaaggcggagggaaccatgcgaggttctgagaattgcggcgagggtcgcctcgagagacggtttctgagcaggaattctgaaatccccaccacttcctccctccgggggatttgatcccctatggccaccgctaacagcatcatcgtgctggatgatgatgacgaagatgaagcagctgctcagccagggccctcccacccactccccaatgcggcctcacctggggcagaagcccctagctcctctgagcctcatggggccagaggaagcagtagttcgggcggcaagaaatgctacaagctggagaatgagaagctgttcgaagagttccttgaactttgtaagatgcagacagcagaccaccctgaggtggtcccattcctctataaccggcagcaacgtgcccactctctgtttttggcctcggcggagttctgcaacatcctctctagggtcctgtctcgggcccggagccggccagccaagctctatgtctacatcaatgagctctgcactgttctcaaggcccactcagccaaaaagaagctgaacttggcccctgccgccaccacctccaatgagccctctgggaataaccctcccacacacctctccttggaccccacaaatgctgaaaacactgcctctcagtctccaaggacccgtggttcccggcggcagatccagcgtttggagcagctgctggcgctctatgtggcagagatccggcggctgcaggaaaaggagttggatctctcagaattggatgacccagactccgcatacctgcaggaggcacggttgaagcgtaagctgatccgcctctttgggcgactatgtgagctgaaagactgctcttcactgaccggccgtgtcatagagcagcgcatcccctaccgtggcacccgctacccagaggttaacaggcgcattgagcggctcatcaacaagccagggcctgataccttccctgactatggggatgtgcttcgggctgtagagaaggcagctgcccgacacagccttggcctcccccgacagcagctccagctcatggctcaggatgccttccgagatgtgggcatcaggttacaggagcgacgtcacctcgatctcatctacaactttggctgccacctcacagatgactataggccaggcgttgaccctgcactatcagatcctgtgttggcccggcgccttcgggaaaaccggagtttggccatgagtcggctggatgaggtcatctccaaatatgcaatgttgcaagacaaaagtgaggagggcgagagaaaaaagagaagagctcggctccaaggcacctcttcccactctgcagacacccccgaagcctccttggattctggtgagggccctagtggaatggcatcccaggggtgcccttctgcctccagagctgagacagatgacgaagacgatgaggagagtgatgaggaagaggaggaggaggaggaagaagaagaggaggaggccacagattctgaagaggaggaggatctggaacagatgcaggagggtcaggaggatgatgaagaggaggacgaagaggaagaagcagcagcaggtaaagatggagacaagagccccatgtcctcactacagatctccaatgaaaagaacctggaacctggcaaacagatcagcagatcttcaggggagcagcaaaacaaaggacgcatagtgtcaccatcgttactgtcagaagaacccctggccccctccagcatagatgctgaaagcaatggagaacagcctgaggagctgaccctggaggaagaaagccctgtgtctcagctctttgagctagagattgaagctttgcccctggataccccttcctctgtggagacggacatttcctcttccaggaagcaatcagaggagcccttcaccactgtcttagagaatggagcaggcatggtctcttctacttccttcaatggaggcgtctctcctcacaactggggagattctggtcccccctgcaaaaaatctcggaaggagaagaagcaaacaggatcagggccattaggaaacagctatgtggaaaggcaaaggtcagtgcatgagaagaatgggaaaaagatatgtaccctgcccagcccaccttcccccttggcttccttggccccagttgctgattcctccacgagggtggactctcccagccatggcctggtgaccagctccctctgcatcccttctccagcccggctgtcccaaaccccccattcacagcctcctcggcctggtacttgcaagacaagtgtggccacacaatgcgatccagaagagatcatcgtgctctcagactctgattagctgcctccccttctccctgcctccagaatgttctgggataacatttggaggaaggtgggaagcagatgactgaggaagggatggactaagctaatccccttttggtggtgtttcttt

SEQ ID NO: 15407 - protein, 740 aa, Homo sapiens; identical to SEQ ID NO: 1734

SEQ ID NO: 15408 - DNA, 951 bp, Homo sapiens
ggtgggagtgggaaggaaggcggagggaaccatgcgaggttctgagaattgcggcgagggtcgcctcgagagacggtttctgagcaggaattctgaaatccccaccacttcctccctccgggggatttgatcccctatggccaccgctaacagcatcatcgtgctggatgatgatgacgaagatgaagcaggtgcccactctctgtttttggcctcggcggagttctgcaacatcctctctagggtcctgtctcgggcccggagccggccagccaagctctatgtctacatcaatgagctctgcactgttctcaaggcccactcagccaaaaagaagctgaacttggcccctgccgccaccacctccaatgagccctctgggaataaccctcccacacacctctccttggaccccacaaatgctgaaaacactgcctctcagtctccaaggacccgtggttcccggcggcagatccagcgtttggagcagctgctggcgctctatgtggcagagatccggcggctgcaggaaaaggagttggatctctcagaattggatgacccagactccgcatacctgcaggaggcacggttgaagcgtaagctgatccgcctctttgggcgactatgtgagctgaaagactgctcttcactgaccggccgtgtcatagagcagcgcatcccctaccgtggcacccgctacccagaggttaacaggcgcattgagcggctcatcaacaagccagggcctgataccttccctgactatggggatgtgcttcgggctgtagagaaggcagctgcccgacacagccttggcctcccccgacagcagctccagctcatggctcaggatgccttccgagatgtgggcatcaggttacaggagcgacgtcacctcgatctcatctacaactttggctgccacctcacagatgactataggccagg

SEQ ID NO: 15409 - protein, 270 aa, Homo sapiens
MATANSIIVLDDDDEDEAGAHSLFLASAEFCNILSRVLSRARSRPAKLYVYINELCTVLKAHSAKKKLNLAPAATTSNEPSGNNPPTHLSLDPTNAENTASQSPRTRGSRRQIQRLEQLLALYVAEIRRLQEKELDLSELDDPDSAYLQEARLKRKLIRLFGRLCELKDCSSLTGRVIEQRIPYRGTRYPEVNRRIERLINKPGPDTFPDYGDVLRAVEKAAARHSLGLPRQQLQLMAQDAFRDVGIRLQERRHLDLIYNFGCHLTDDYR

SEQ ID NO: 15410 - DNA, 463 bp, Homo sapiens
agtggggcctgcggtgggagtgggaaggaaggcggagggaaccatgcgaggttctgagaattgcggcgagggtcgcctcgagagacggtttctgagcaggaattctgaaatccccaccacttcctccctccgggggatttgatcccctatggccaccgctaacagcatcatcgtgctggatgatgatgacgaagatgaagcagctgctcagccagggccctcccacccactccccaatgcggcctcacctggggcagaagcccctagctcctctgagcctcatggggccagaggaagcagtagttcgggcggcaagaaatgctacaagctggagaatgagaagctgttcgaagaggtgagctttagcggggaagattgttgtaccccagggagggggatggctgactggttctcctgtcctttctttcccactaaccccacctcccctttctctcaaccccct

SEQ ID NO: 15411 - protein, 32 aa, Homo sapiens
MRGSENCGEGRLERRFLSRNSEIPTTSSLRGI

SEQ ID NO: 15412 - DNA, 573 bp, Homo sapiens
ggcagaggaaggtgatgtggacgaggcggatgtgttcctggcatttgcccagggtccctcccctcccaggggtcccgtgcgacgtgccttggacaaggctttctttatcttcctggccctcttcctgacactgctgatgctggaggctgcttataagctgctgtggttactactatgggcaaagttaggggactggctcctggggacacctcagaaggaggaggagctggaattgtgaccacctttcctataaacatcttctttccccaccaaggagctcacctctggacccagccttgcctccacgagtccctccagcctccctaaacacaacgagcagccctcgcagcggcaatttgcacaaactctcctccaagccccaccccatcatcgcccatccgcagaccctaggcctcccacgacaaagcacggccacctggtcagcacagacggcccttcgaggaccccctctggagaagaaccattcaggtcccaacggtctggctggtcattagttctgtggtgaagcttgaaaagcaaatcagcaacaatagtaataacaataacactttt

SEQ ID NO: 15413 - protein, 50 aa, Homo sapiens
MGKVRGLAPGDTSEGGGAGIVTTFPINIFFPHQGAHLWTQPCLHESLQPP

SEQ ID NO: 15414 - DNA, 1624 bp, Homo sapiens
gttccggcgggggcggccgagggggaagagtgtgtgtctgcgggagaaagaggagaatcacccaagcggcctcagaagtcccagggagtggaggcccctgccatggagccgtgtggtgtatgtgtggtaacaccatgtctgtgcccctgctcaacgatgctgccaccgtgtctggagctgagcgggaaacggccgtggttatttttttacatggacttggagacacagggcacagctgggctgacgccctctccaccattcggctccctcacgtcaagtacatctgttcccatgagcctaggatccctgtgaccctcaacatgaagatggtgatgccctcctggtttgacctgatggggctgagtccagatgccccagaggacgaggctggcatcaagaaggcagcagagaacatcaaggccttgattgagcatgaaatgaagaacgggatccctgccaatcaaatcatcctgggaggcttttcacagggccgggccctgtccctctacatggccctcacctgcccccaccctctggctggcatcctggctttgagctgctggccgcctctgcaccgggccttcccccaggcagctaatggcagtgccaaggacctggccatcctccagtgccatggggagctggaccccatggtgcccgtacggtttggggccctgatggctgagaagctccggtctgttgtcacacctgccagggtccagttccagacatacctgggtgtcatgcacagctcctgtcctcaggagatggcagctgtgaaggaatttcttgagaagctgctgcctcctgtctaactagtcgctggccccagtgcagtaccccagctcatgggggactcagcaagtaagcatggcaccatcttgggtctgagctggtcgagcccctgtccccacccttcctgacctgtccttttcccacaggcctctaggggcaggtggcaaggcctggctgggccttccttcctggcctcagccacctggctctgtctgcagtaggggcaggctgctttcttatcccatttccctggaggcgggcccccctggcagcagtattggaggggctacaggcagctggagaaagaggcccagccactgacccactcactcaggacctcactcactagccccactttgggccccctcctgtaaccttagggtttggcccatggggccctcccaggcccctgccccaactgattctgcccagataatcttgtgtctcctgcctccactcagctgcttctcagtcatgaacgtggccatggccccgggggtccccttgctgctgtgggctccctgtccctgggcaggagtgctggtgaggaggtggagccttttgaggggggccttccctcagctgtttccccacactggggggctgggccctgcctccccgttaccctccttccctgcaggcctggagcctgtagggctggactgaggttcaggtctccccccagctgtctcacccccactttgtccccactctagagcagggaggcagtgggggaggagttgtgtcttgtcttctgtctccatgtggtttttgggtgtttttcttcttgtgtcctggattctgataaaattaaagaaattgcttcctc

SEQ ID NO: 15415 - protein, 231 aa, Homo sapiens [sequence omitted]

SEQ ID NO: 15416 - DNA, 813 bp, Homo sapiens
gcggcgacgtccacgcattttctgacgtagcgagcgacggcggggagccgagcggaagtccagcactattgccgctagaggaggggaggggtgagaagcataagtggcaccggaagtggaattaatccgcctacctctcctgcgcctgcgaaacagaaaagacaaggcgcctgtcgggcggggtgtggcttcgggtggcggagaacgctgcgattggccctcggctgtggcgacagcgacgattggtccctgcgtgcagagcgcggtgagagtgggtggtggccgttggaattcaaaagtggcgggtgtggcgcggggctggtagcggccggagccgtgcgagttctctaccctgcttcgcgagcgggcgagagaacgcgagtcccaggatccccggcacccagttctcttccactgcattcccccggcgcgtgtgggaccgaggtggacatggatccgcagaggtcccccctattggaagtaaaggggaacatagaactgaagagacctctgattaaggccccttcccagctgcctctctcaggaagcagactcaagaggaggcctgaccagatggaagatggcctggagcctgagaagaaacggacaagaggcctgggtgcaacgaccaaaattaccacatcccacccaagagttccatccctcactacagtgccacagacacaaggccagaccacagctcaaaaagtttccaagaagacaggaccccggtgttccacagctattgccacagggctatcaaataaagaatagtttggttttttttttaaataaaggttttattagcatttg

SEQ ID NO: 15417 - protein, 107 aa, Homo sapiens
MDPQRSPLLEVKGNIELKRPLIKAPSQLPLSGSRLKRRPDQMEDGLEPEKKRTRGLGATTKITTSHPRVPSLTTVPQTQGQTTAQKVSKKTGPRCSTAIATGLSNKE

SEQ ID NO: 15418 - DNA, 2702 bp, Homo sapiens
gcggcgacgtccacgcattttctgacgtagcgagcgacggcggggagccgagcggaagtccagcactattgccgctagaggaggggaggggtgagaagcataagtggcaccggaagtggaattaatccgcctacctctcctgcgcctgcgaaacagaaaagacaaggcgcctgtcgggcggggtgtggcttcgggtggcggagaacgctgcgattggccctcggctgtggcgacagcgacgattggtccctgcgtgcagagcgcggtgagagtgggtggtggccgttggaattcaaaagtggcgggtgtggcgcggggctggtagcggccggagccgtgcgagttctctaccctgcttcgcgagcgggcgagagaacgcgagtcccaggatccccggcacccagttctcttccactgcattcccccggcgcgtgtgggaccgaggtggacatggatccgcagaggtcccccctattggaagtaaaggggaacatagaactgaagagacctctgattaaggccccttcccagctgcctctctcaggaagcagactcaagaggaggcctgaccagatggaagatggcctggagcctgagaagaaacggacaagaggcctgggtgcaacgaccaaaattaccacatcccacccaagagttccatccctcactacagtgccacagacacaaggccagaccacagctcaaaaagtttccaagaagacaggaccccggtgttccacagctattgccacagggttgaagaaccagaagccagttcctgctgttcctgtccagaagtctggcacatcaggtgttcctcccatggcaggagggaagaaacccagcaaacgtccagcctgggacttaaagggtcagttatgtgacctaaatgcagaactaaaacggtgccgtgagaggactcaaacgttggaccaagagaaccagcagcttcaggaccagctcagagatgcccagcagcaggtcaaggccctggggacagagcgcacaacactggaggggcatttagccaaggtacaggcccaggctgagcagggccaacaggagctgaagaacttgcgtgcttgtgtcctggagctggaagagcggctgagcacgcaggagggcttggtgcaagagcttcagaaaaaacaggtggaattgcaggaagaacggaggggactgatgtcccaactagaggagaaggagaggaggctgcagacatcagaagcagccctgtcaagcagccaagcagaggtggcatctctgcggcaggagactgtggcccaggcagccttactgactgagcgggaagaacgtcttcatgggctagaaatggagcgccggcgactgcacaaccagctgcaggaactcaagggcaacatccgtgtattctgccgggtccgccctgtcctgccgggggagcccactccaccccctggcctcctcctgtttccctctggccctggtgggccctctgatcctccaacccgccttagcctctcccggtctgacgagcggcgtgggaccctgagtggggcaccagctcccccaactcgccatgatttttcctttgaccgggtattcccaccaggaagtggacaggatgaagtgtttgaagagattgccatgcttgtccagtcagccctggatggctatccagtatgcatctttgcctatggccagacaggcagtggcaagaccttcacaatggagggtgggcctgggggagacccccagttggaggggctgatccctcgggccctgcggcacctcttctctgtggctcaggagctgagtggtcagggctggacctacagctttgtagcaagctacgtagagatctacaatgagactgtccgggacctgctggccactggaacccggaagggtcaagggggcgagtgtgagattcgccgtgcagggccagggagtgaggagctcactgtcaccaatgctcgatatgtccctgtctcctgtgagaaagaagtggacgccctgcttcatctggcccgccagaatcgggctgtggcccgcacagcccagaatgaacggtcatcacgcagccacagtgtattccagctacagatttctggggagcactccagccgaggcctgcagtgtggggcccccctcagtcttgtggacctggccgggagtgagcgacttgaccccggcttagccctcggccccggggagcgggaacgccttcgggaaacacaggccattaacagcagcctgtccacgctggggctggttatcatggccctgagcaacaaggagtcccacgtgccttaccggaacagcaaactgacctacctgctgcagaactctctgggtggtagtgctaagatgctcatgtttgtgaacatttctccactggaagagaacgtctccgagtccctcaactctctacgctttgcctccaaggtgaaccagtgtgttattggtactgctcaggccaacaggaagtgaagacggatccagatctgtgtgtgtgtgtgtgtgtgtgtgtgtgtgtgtgtgtgtgtgtgtgtgtccctatgtctatgtatcgggtgaggggtgggagggttgctggagggtgctttattgggtggagggcaccatgtcccagggctatcaaataaagaatagtttggttttttttttaaataaaggttttattagcatttgcccaagaaggcagatactttcatatctgt

SEQ ID NO: 15419 - protein, 673 aa, Homo sapiens
MDPQRSPLLEVKGNIELKRPLIKAPSQLPLSGSRLKRRPDQMEDGLEPEKKRTRGLGATTKITTSHPRVPSLTTVPQTQGQTTAQKVSKKTGPRCSTAIATGLKNQKPVPAVPVQKSGTSGVPPMAGGKKPSKRPAWDLKGQLCDLNAELKRCRERTQTLDQENQQLQDQLRDAQQQVKALGTERTTLEGHLAKVQAQAEQGQQELKNLRACVLELEERLSTQEGLVQELQKKQVELQEERRGLMSQLEEKERRLQTSEAALSSSQAEVASLRQETVAQAALLTEREERLHGLEMERRRLHNQLQELKGNIRVFCRVRPVLPGEPTPPPGLLLFPSGPGGPSDPPTRLSLSRSDERRGTLSGAPAPPTRHDFSFDRVFPPGSGQDEVFEEIAMLVQSALDGYPVCIFAYGQTGSGKTFTMEGGPGGDPQLEGLIPRALRHLFSVAQELSGQGWTYSFVASYVEIYNETVRDLLATGTRKGQGGECEIRRAGPGSEELTVTNARYVPVSCEKEVDALLHLARQNRAVARTAQNERSSRSHSVFQLQISGEHSSRGLQCGAPLSLVDLAGSERLDPGLALGPGERERLRETQAINSSLSTLGLVIMALSNKESHVPYRNSKLTYLLQNSLGGSAKMLMFVNISPLEENVSESLNSLRFASKVNQCVIGTAQANRK

SEQ ID NO: 15420 - DNA, 415 bp, Homo sapiens
ctcaacaacaacaacaaaaaaaagagcctccttcagattggtgccagtgtcctttagacagaactctagtagtcttttcagattcaacttgtacatttccttccccagacttcaactgatccattttctaaggagtcctagttcctaaatgggtgttattactattttatctcggtttaagtgttttacagtgggagaggttggaggtctctagtacagggtattgctggaaatgaaagcctcctttctctgctcctgtattttcttctggggcttccatctcttctcaagccttttcacctcctccaaacctagtgtgcagaggagaacaaaccataactggcaccatgtcccagggctatcaaataaagaatagtttggttttttttttaaataaaggttttattagcatttg

SEQ ID NO: 15421 - protein, 47 aa, Homo sapiens [sequence omitted]

SEQ ID NO: 15422 - DNA, 2320 bp, Homo sapiens
ccctcccccccaaccggtccgtccctcccctccctccctcccccccgccgcctcctcctcctgccgctgccgctgctttggctgctgcgtcatacgccccagagccgccgggacggaggggctgggcctggggaccccccggcctccgcctgcacgcccccccacgcccggacgtgccctctccgcgcgggggactcgcctaggtctcctacgtctgcccctgcccggctcccggcggccccagctgtcaccggcccccccaggatgcaatggcgcagcccccccggctgagccgctctggtgcctcctcactttgggacccagcttctcctgctcccacctctggccccaggcctcggctttgggagggtcaagatgtgctggccagatggactgatgggctgctatacttgggtaccatcaaaaaggtggacagtgctagggaggtgtgtctggtccagtttgaggatgattcgcagtttctggttctatggaaagacattagccctgctgccctccctggagaggaactcctctgttgtgtctgtcgctctgagactgtggtccctgggaaccggctggtcagctgtgagaagtgtcgccatgcttatcaccaggactgccatgttcccagggctccagcccctggagagggagagggcacatcctgggtatgccgccagtgtgtctttgcgatcgccaccaagaggggaggtgccctgaagaagggcccctatgcccgggccatgctgggtatgaagctttctctgccatatggactgaaggggctggactgggatgctggacatctgagcaaccgacagcagagttactgttactgtggtggccctggggagtggaacctgaaaatgctgcagtgccggagctgcctgcagtggttccatgaggcctgcacccagtgtctgagcaagcccctcctctatggggacaggttctatgaatttgaatgctgtgtgtgtcgcgggggccctgagaaagtccggagactacagcttcgctgggtggatgtggcccatcttgtcctgtatcacctcagtgtttgctgtaagaagaaatactttgattttgatcgtgagatcctccccttcacttctgagaattgggacagtttgctcctgggggagctttcagacacccccaaaggagaacgttcttccaggctcctctctgctcttaacagccacaaggaccgtttcatttcagggagagagattaagaagaggaaatgtttgtttggtctccatgctcggatgcctccccctgtggagccccctactggagatggagcactcaccagcttcccttcagggcagggccctgggggaggggtctcacgtcccctggggaagcgccggaggccggagccagagcccctgaggaggaggcagaaggggaaagtggaggagctggggccaccctcagcagtgcgcaatcagcccgagccccaggagcagagggagcgggctcatctgcagagggcactgcaggcctcagtgtctccaccatcccccagccctaaccagagttaccagggcagcagcggctacaacttccggcccacagatgcccgctgcctgcccagcagccccatccggatgtttgcttccttccacccttctgccagcaccgcagggacctctggggacagtggacccccagacaggtcacccctggaacttcacattggtttccccacagacatccctaaaagtgccccccactcgatgactgcctcatcttcctcagtttcatccccatccccaggtcttcctagacgctcagcacccccttctcccctgtgccgtagtttgtctcctgggactgggggaggagtccgaggtggggttggttacctgtcccgaggggaccctgtccgggtccttgctcggagagtacggcctgatggctctgtgcagtacctggttgagtggggaggagggggcatcttctgaacagcctgcctctgcccagctccccattcacacacaccggcactttcataccctgacctctgacctcacctacagctgggatgtacctggagagatagggggtagttctccctactgcccaggctggaatccaagagtggggagtggggaagaggccctcttctctaccctccttcatgattcctgacccctcccatccttcccatttcctttgatgttattttgttacagctttttaaatattttttaaaattatttaacccctgggggcagagactgaggagggaggatgataagggatcccggactctgtatgattgaaataaagagaaataaacaaatctagc

SEQ ID NO: 15423 - protein, 567 aa, Homo sapiens
MAQPPRLSRSGASSLWDPASPAPTSGPRPRLWEGQDVLARWTDGLLYLGTIKKVDSAREVCLVQFEDDSQFLVLWKDISPAALPGEELLCCVCRSETVVPGNRLVSCEKCRHAYHQDCHVPRAPAPGEGEGTSWVCRQCVFAIATKRGGALKKGPYARAMLGMKLSLPYGLKGLDWDAGHLSNRQQSYCYCGGPGEWNLKMLQCRSCLQWFHEACTQCLSKPLLYGDRFYEFECCVCRGGPEKVRRLQLRWVDVAHLVLYHLSVCCKKKYFDFDREILPFTSENWDSLLLGELSDTPKGERSSRLLSALNSHKDRFISGREIKKRKCLFGLHARMPPPVEPPTGDGALTSFPSGQGPGGGVSRPLGKRRRPEPEPLRRRQKGKVEELGPPSAVRNQPEPQEQRERAHLQRALQASVSPPSPSPNQSYQGSSGYNFRPTDARCLPSSPIRMFASFHPSASTAGTSGDSGPPDRSPLELHIGFPTDIPKSAPHSMTASSSSVSSPSPGLPRRSAPPSPLCRSLSPGTGGGVRGGVGYLSRGDPVRVLARRVRPDGSVQYLVEWGGGGIF

SEQ ID NO: 15424 - DNA, 2225 bp, Homo sapiens
ccctcccccccaaccggtccgtccctcccctccctccctcccccccgccgcctcctcctcctgccgctgccgctgctttggctgctgcgtcatacgccccagagccgccgggacggaggggctgggcctggggaccccccggcctccgcctgcacgcccccccacgcccggacgtgccctctccgcgcgggggactcgcctaggtctcctacgtctgcccctgcccggctcccggcggccccagctgtcaccggcccccccaggatgcaatggcgcagcccccccggctgagccgctctggtgcctcctcactttgggacccagcttctcctgctcccacctctggccccaggcctcggctttgggagggtcaagatgtgctggccagatggactgatgggctgctatacttgggtaccatcaaaaaggtggacagtgctagggaggtgtgtctggtccagtttgaggatgattcgcagtttctggttctatggaaagacattagccctgctgccctccctggagaggaactcctctgttgtgtctgtcgctctgagactgtggtccctgggaaccggctggtcagctgtgagaagtgtcgccatgcttatcaccaggactgccatgttcccagggctccagcccctggagagggagagggcacatcctgggtatgccgccagtgtgtctttgcgatcgccaccaagaggggaggtgccctgaagaagggcccctatgcccgggccatgctgggtatgaagctttctctgccatatggactgaaggggctggactgggatgctggacatctgagcaaccgacagcagagttactgttactgtggtggccctggggagtggaacctgaaaatgctgcagtgccggagctgcctgcagtggttccatgaggcctgcacccagtgtctgagcaagcccctcctctatggggacaggttctatgaatttgaatgctgtgtgtgtcgcgggggccctgagaaagtccggagactacagcttcgctgggtggatgtggcccatcttgtcctgtatcacctcagtgtttgctgtaagaagaaatactttgattttgatcgtgagatcctccccttcacttctgagaattgggacagtttgctcctgggggagctttcagacacccccaaaggagaacgttcttccaggctcctctctgctcttaacagccacaaggaccgtttcatttcagggagagagattaagaagaggaaatgtttgtttggtctccatgctcggatgcctccccctgtggagccccctactggagatggagcactcaccagcttcccttcagggcagggccctgggggaggggtctcacgtcccctggggaagcgccggaggccggagccagagcccctgaggaggaggcagaaggggaaagtggaggagctggggccaccctcagcagtgcgcaatcagcccgagccccaggagcagagggagcgggctcatctgcagagggcactgcagcagccccatccggatgtttgcttccttccacccttctgccagcaccgcagggacctctggggacagtggacccccagacaggtcacccctggaacttcacattggtttccccacagacatccctaaaagtgccccccactcgatgactgcctcatcttcctcagtttcatccccatccccaggtcttcctagacgctcagcacccccttctcccctgtgccgtagtttgtctcctgggactgggggaggagtccgaggtggggttggttacctgtcccgaggggaccctgtccgggtccttgctcggagagtacggcctgatggctctgtgcagtacctggttgagtggggaggagggggcatcttctgaacagcctgcctctgcccagctccccattcacacacaccggcactttcataccctgacctctgacctcacctacagctgggatgtacctggagagatagggggtagttctccctactgcccaggctggaatccaagagtggggagtggggaagaggccctcttctctaccctccttcatgattcctgacccctcccatccttcccatttcctttgatgttattttgttacagctttttaaatattttttaaaattatttaacccctgggggcagagactgaggagggaggatgataagggatcccggactctgtatgattgaaataaagagaaataaacaaatctagc

SEQ ID NO: 15425 - protein, 454 aa, Homo sapiens
MAQPPRLSRSGASSLWDPASPAPTSGPRPRLWEGQDVLARWTDGLLYLGTIKKVDSAREVCLVQFEDDSQFLVLWKDISPAALPGEELLCCVCRSETVVPGNRLVSCEKCRHAYHQDCHVPRAPAPGEGEGTSWVCRQCVFAIATKRGGALKKGPYARAMLGMKLSLPYGLKGLDWDAGHLSNRQQSYCYCGGPGEWNLKMLQCRSCLQWFHEACTQCLSKPLLYGDRFYEFECCVCRGGPEKVRRLQLRWVDVAHLVLYHLSVCCKKKYFDFDREILPFTSENWDSLLLGELSDTPKGERSSRLLSALNSHKDRFISGREIKKRKCLFGLHARMPPPVEPPTGDGALTSFPSGQGPGGGVSRPLGKRRRPEPEPLRRRQKGKVEELGPPSAVRNQPEPQEQRERAHLQRALQQPHPDVCFLPPFCQHRRDLWGQWTPRQVTPGTSHWFPHRHP

SEQ ID NO: 15426 - DNA, 2340 bp, Homo sapiens
ccctcccccccaaccggtccgtccctcccctccctccctcccccccgccgcctcctcctcctgccgctgccgctgctttggctgctgcgtcatacgccccagagccgccgggacggaggggctgggcctggggaccccccggcctccgcctgcacgcccccccacgcccggacgtgccctctccgcgcgggggactcgcctaggtctcctacgtctgcccctgcccggctcccggcggccccagctgtcaccggcccccccaggatgcaatggcgcagcccccccggctgagccgctctggtgcctcctcactttgggacccagcttctcctgctcccacctctggccccaggcctcggctttgggagggtcaagatgtgctggccagatggactgatgggctgctatacttgggtaccatcaaaaaggtggacagtgctagggaggtgtgtctggtccagtttgaggatgattcgcagtttctggttctatggaaagacattagccctgctgccctccctggagaggaactcctctgttgtgtctgtcgctctgagactgtggtccctgggaaccggctggtcagctgtgagaagtgtcgccatgcttatcaccaggactgccatgttcccagggctccagcccctggagagggagagggcacatcctgggtatgccgccagtgtgtctttgcgatcgccaccaagaggggaggtgccctgaagaagggcccctatgcccgggccatgctgggtatgaagctttctctgccatatggactgaaggggctggactgggatgctggacatctgagcaaccgacagcagagttactgttactgtggtggccctggggagtggaacctgaaaatgctgcagtgccggagctgcctgcagtggttccatgaggcctgcacccagtgtctgagcaagcccctcctctatggggacaggttctatgaatttgaatgctgtgtgtgtcgcgggggccctgagaaagtccggagactacagcttcgctgggtggatgtggcccatcttgtcctgtatcacctcagtgtttgctgtaagaagaaatactttgattttgatcgtgagatcctccccttcacttctgagaattgggacagtttgctcctgggggagctttcagacacccccaaaggagaacgttcttccaggctcctctctgctcttaacagccacaaggaccgtttcatttcagggagagagattaagaagaggaaatgtttgtttggtctccatgctcggatgcctccccctgtggagccccctactggagatggagcactcaccagcttcccttcagggcagggccctgggggaggggtctcacgtcccctggggaagcgccggaggccggagccagagcccctgaggaggaggcagaaggggaaagtggaggagctggggccaccctcagcagtgcgcaatcagcccgagccccaggagcagagggagcgggctcatctgcagagggcactgcaggcctcagtgtctccaccatcccccagccctaaccagagttaccagggcagcagcggctacaacttccggcccacagatgcccgctgcctgcccagcagccccatccggatgtttgcttccttccacccttctgccagcaccgcagggacctctggggacagtggacccccagacaggtcacccctggaacttcacattggtttccccacagacatccctaaaagtgccccccactcgatgactgcctcatcttcctcagtttcatccccatccccaggtcttcctagacgctcagcacccccttctcccctgtgccgtagtttgtctcctgggactgggggaggagtccgaggtggggttggttacctgtcccgaggggaccctgtccgggtccttgctcggagagtacggcctgatggctctgtgcagtacctggttgagtggggaggagggggcatcttctgaacagcctgcctctgcccagctccccattcacacacaccggcactttcataccctgacctctgacctcacctacagctgggatgtacctggagagatagggggtagttctccctactgcccaggctggaatccaagagtggggagtggggaagaggccctcttctctaccctccttcatgattcctgacccctcccatccttcccatttcctttgatgttattttgttacagctttttaaatattttttaaaattatttaacccctgggggcagagactgaggagggaggatgataagggatcccggactctgtatgattgaaataaagagaaataaacaaatctagcagctctgagtcattctgaaa

SEQ ID NO: 15427 - protein, 567 aa, Homo sapiens; identical to SEQ ID NO: 15423

SEQ ID NO: 15428 - DNA, 395 bp, Homo sapiens
cgcctgcacgcccccccacgcccggacgtgccctctccgcgcgggggactcgcctaggtctcctacgtctgcccctgcccggctcccggcggccccagctgtcaccggcccccccaggatgcaatggcgcagcccccccggctgagccgctctggtgcctcctcactttgggacccagcttctccaagagtggggagtggggaagaggccctcttctctaccctccttcatgattcctgacccctcccatccttcccatttcctttgatgttattttgttacagctttttaaatattttttaaaattatttaacccctgggggcagagactgaggagggaggatgataagggatcccggactctgtatgattgaaataaagagaaataaacaaat

SEQ ID NO: 15429 - protein, 38 aa, Homo sapiens
MAQPPRLSRSGASSLWDPASPRVGSGEEALFSTLLHDS

SEQ ID NO: 15430 - DNA, 1058 bp, Homo sapiens
ggacatctgagcaaccgacagcagagttactgttactgtggtggccctggggagtgagtaatgagaggggagcagactgtggaatgaatgatgtggtggtggatcccaggaaatgaaggaaaaagaacaggatgagggaggaggcagaaggggaaagtggaggagctggggccaccctcagcagtgcgcaatcagcccgagccccaggagcagagggagcgggctcatctgcagagggcactgcaggcctcagtgtctccaccatcccccagccctaaccagagttaccagggcagcagcggctacaacttccggcccacagatgcccgctgcctgcccagcagccccatccggatgtttgcttccttccacccttctgccagcaccgcagggacctctggggacagtggacccccagacaggtcacccctggaacttcacattggtttccccacagacatccctaaaagtgccccccactcgatgactgcctcatcttcctcagtttcatccccatccccaggtcttcctagacgctcagcacccccttctcccctgtgccgtagtttgtctcctgggactgggggaggagtccgaggtggggttggttacctgtcccgaggggaccctgtccgggtccttgctcggagagtacggcctgatggctctgtgcagtacctggttgagtggggaggagggggcatcttctgaacagcctgcctctgcccagctccccattcacacacaccggcactttcataccctgacctctgacctcacctacagctgggatgtacctggagagatagggggtagttctccctactgcccaggctggaatccaagagtggggagtggggaagaggccctcttctctaccctccttcatgattcctgacccctcccatccttcccatttcctttgatgttattttgttacagctttttaaatattttttaaaattatttaacccctgggggcagagactgaggagggaggatgataagggatcccggactctgtatgattgaaataaagagaaataaacaaatctagc

SEQ ID NO: 15431 - protein, 124 aa, Homo sapiens
MKEKEQDEGGGRRGKWRSWGHPQQCAISPSPRSRGSGLICRGHCRPQCLHHPPALTRVTRAAAATTSGPQMPAACPAAPSGCLLPSTLLPAPQGPLGTVDPQTGHPWNFTLVSPQTSLKVPPTR

SEQ ID NO: 15432 - DNA, 1078 bp, Homo sapiens
ggacatctgagcaaccgacagcagagttactgttactgtggtggccctggggagtgagtaatgagaggggagcagactgtggaatgaatgatgtggtggtggatcccaggaaatgaaggaaaaagaacaggatgagggaggaggcagaaggggaaagtggaggagctggggccaccctcagcagtgcgcaatcagcccgagccccaggagcagagggagcgggctcatctgcagagggcactgcaggcctcagtgtctccaccatcccccagccctaaccagagttaccagggcagcagcggctacaacttccggcccacagatgcccgctgcctgcccagcagccccatccggatgtttgcttccttccacccttctgccagcaccgcagggacctctggggacagtggacccccagacaggtcacccctggaacttcacattggtttccccacagacatccctaaaagtgccccccactcgatgactgcctcatcttcctcagtttcatccccatccccaggtcttcctagacgctcagcacccccttctcccctgtgccgtagtttgtctcctgggactgggggaggagtccgaggtggggttggttacctgtcccgaggggaccctgtccgggtccttgctcggagagtacggcctgatggctctgtgcagtacctggttgagtggggaggagggggcatcttctgaacagcctgcctctgcccagctccccattcacacacaccggcactttcataccctgacctctgacctcacctacagctgggatgtacctggagagatagggggtagttctccctactgcccaggctggaatccaagagtggggagtggggaagaggccctcttctctaccctccttcatgattcctgacccctcccatccttcccatttcctttgatgttattttgttacagctttttaaatattttttaaaattatttaacccctgggggcagagactgaggagggaggatgataagggatcccggactctgtatgattgaaataaagagaaataaacaaatctagcagctctgagtcattctgaaa

SEQ ID NO: 15433 - protein, 124 aa, Homo sapiens; identical to SEQ ID NO: 15431

SEQ ID NO: 15434 - DNA, 564 bp, Homo sapiens
gaaatcactgctcccctggccccatttttcttcatttctcccagctttcagacacccccttctcccctgtgccgtagtttgtctcctgggactgggggaggagtccgaggtggggttggttacctgtcccgaggggaccctgtccgggtccttgctcggagagtacggcctgatggctctgtgcagtacctggttgagtggggaggagggggcatcttctgaacagcctgcctctgcccagctccccattcacacacaccggcactttcataccctgacctctgacctcacctacagctgggatgtacctggagagatagggggtagttctccctactgcccaggctggaatccaagagtggggagtggggaagaggccctcttctctaccctccttcatgattcctgacccctcccatccttcccatttcctttgatgttattttgttacagctttttaaatattttttaaaattatttaacccctgggggcagagactgaggagggaggatgataagggatcccggactctgtatgattgaaataaagagaaataaacaaat

SEQ ID NO: 15435 - protein, 78 aa, Homo sapiens
MALCSTWLSGEEGASSEQPASAQLPIHTHRHFHTLTSDLTYSWDVPGEIGGSSPYCPGWNPRVGSGEEALFSTLLHDS

SEQ ID NO: 15436 - DNA, 1066 bp, Homo sapiens
gtgtctccaccatcccccagccctaaccagagttaccagggcagcagcggctacaacttccggcccacagatgcccgctgcctgcccaggtcagtgctcctctgcccctcccccacaaaatatgctcccaattattcacatcttctggactttatcacccagaattcttttccctctcccccttggctacccacttcttggcctagaccgacttctagaactagtgtctggtagccagtattctggggaagggagtcccttgggggtagtgtttgagctctgcacttcccagggggagaaggtcctgttcccctgcttcaggtcctgactttccccactccaaccccagcagccccatccggatgtttgcttccttccacccttctgccagcaccgcagggacctctggggacagtggacccccagacaggtcacccctggaacttcacattggtttccccacagacatccctaaaagtgccccccactcgatgactgcctcatcttcctcagtttcatccccatccccaggtcttcctagacgctcagcacccccttctcccctgtgccgtagtttgtctcctgggactgggggaggagtccgaggtggggttggttacctgtcccgaggggaccctgtccgggtccttgctcggagagtacggcctgatggctctgtgcagtacctggttgagtggggaggagggggcatcttctgaacagcctgcctctgcccagctccccattcacacacaccggcactttcataccctgacctctgacctcacctacagctgggatgtacctggagagatagggggtagttctccctactgcccaggctggaatccaagagtggggagtggggaagaggccctcttctctaccctccttcatgattcctgacccctcccatccttcccatttcctttgatgttattttgttacagctttttaaatattttttaaaattatttaacccctgggggcagagactgaggagggaggatgataagggatcccggactctgtatgattgaaataaagagaaataaacaaatctagc

SEQ ID NO: 15437 - protein, 118 aa, Homo sapiens
MFASFHPSASTAGTSGDSGPPDRSPLELHIGFPTDIPKSAPHSMTASSSSVSSPSPGLPRRSAPPSPLCRSLSPGTGGGVRGGVGYLSRGDPVRVLARRVRPDGSVQYLVEWGGGGIF

SEQ ID NO: 15438 - DNA, 1086 bp, Homo sapiens
gtgtctccaccatcccccagccctaaccagagttaccagggcagcagcggctacaacttccggcccacagatgcccgctgcctgcccaggtcagtgctcctctgcccctcccccacaaaatatgctcccaattattcacatcttctggactttatcacccagaattcttttccctctcccccttggctacccacttcttggcctagaccgacttctagaactagtgtctggtagccagtattctggggaagggagtcccttgggggtagtgtttgagctctgcacttcccagggggagaaggtcctgttcccctgcttcaggtcctgactttccccactccaaccccagcagccccatccggatgtttgcttccttccacccttctgccagcaccgcagggacctctggggacagtggacccccagacaggtcacccctggaacttcacattggtttccccacagacatccctaaaagtgccccccactcgatgactgcctcatcttcctcagtttcatccccatccccaggtcttcctagacgctcagcacccccttctcccctgtgccgtagtttgtctcctgggactgggggaggagtccgaggtggggttggttacctgtcccgaggggaccctgtccgggtccttgctcggagagtacggcctgatggctctgtgcagtacctggttgagtggggaggagggggcatcttctgaacagcctgcctctgcccagctccccattcacacacaccggcactttcataccctgacctctgacctcacctacagctgggatgtacctggagagatagggggtagttctccctactgcccaggctggaatccaagagtggggagtggggaagaggccctcttctctaccctccttcatgattcctgacccctcccatccttcccatttcctttgatgttattttgttacagctttttaaatattttttaaaattatttaacccctgggggcagagactgaggagggaggatgataagggatcccggactctgtatgattgaaataaagagaaataaacaaatctagcagctctgagtcattctgaaa

SEQ ID NO: 15439 - protein, 118 aa, Homo sapiens; identical to SEQ ID NO: 15437

SEQ ID NO: 15440 - DNA, 474 bp, Homo sapiens
gatgactgcctcatcttcctcagtttcatccccatccccaggtcttcctagacgctcagcacccccttctcccggcctgatggctctgtgcagtacctggttgagtggggaggagggggcatcttctgaacagcctgcctctgcccagctccccattcacacacaccggcactttcataccctgacctctgacctcacctacagctgggatgtacctggagagatagggggtagttctccctactgcccaggctggaatccaagagtggggagtggggaagaggccctcttctctaccctccttcatgattcctgacccctcccatccttcccatttcctttgatgttattttgttacagctttttaaatattttttaaaattatttaacccctgggggcagagactgaggagggaggatgataagggatcccggactctgtatgattgaaataaagagaaataaacaaatcta

SEQ ID NO: 15441 - protein, 104 aa, Homo sapiens
MTASSSSVSSPSPGLPRRSAPPSPGLMALCSTWLSGEEGASSEQPASAQLPIHTHRHFHTLTSDLTYSWDVPGEIGGSSPYCPGWNPRVGSGEEALFSTLLHDS

SEQ ID NO: 15442 - DNA, 1120 bp, Homo sapiens
tctaatcacgtggctgccacccaggtaagaagaggccgctcttcctggggttgtttctccgtgtgacgtgtggcctttgagatcaactctcctgtaccagcgtaggccgcatgagtggggggcgggctcccgcggtcctgctcggcggagtggtgagtgaccggccccgccccgccccttccggtcctcgaagcctcgaccgctacccgcaccctaaatcccagaggttggccccctgaggtgtgagtgaaatgagcttttgctttattttccaagtttctctctcaccttcaggggcattcttcgggggtgcatcagagggagggcagagcctgaggatctaagcgaaggcttccccgggtgtaatttcctgggctgtttgtgaggagagatcgaattcgcctcctgctctcaggcctctctgctcctgtcttttgtttggatgccggcgctgctgcctgtggcctcccgccttttgttgctaccccgagtcttgctgaccatggcctctggaagccctccgacccagccctcgccggcctcggattccggctctggctacgttccgggctcggtctctgcagcctttgttacttgccccaacgagaaggtcgccaaggagatcgccagggccgtggtggagaagcgcctagcagcctgcgtcaacctcatccctcagattacatccatctatgagtggaaagggaagatcgaggaagacagtgaggtgctgatgatgattaaaacccaaagttccttggtcccagctttgacagattttgttcgttctgtgcacccttacgaagtggccgaggtaattgcattgcctgtggaacaggggaactttccgtacctgcagtgggtgcgccaggtcacagagtcagtttctgactctatcacagtcctgccatgatgagccctgttcctgctcatcatgaagatccccgcgatacttcaacgccttctgacttccaggtgatgactgggcccccaataaatcccgtctttgggtctctctgccttttgcctgttttttgtcatgtatgcaaatttgttgggagaatataagtgcttctagtccctgtattctctacatctttcagaatgactcagagctgct

SEQ ID NO: 15443 - protein, 156 aa, Homo sapiens; identical to SEQ ID NO: 1746

SEQ ID NO: 15444 - DNA, 947 bp, Homo sapiens
tctaatcacgtggctgccacccaggtaagaagaggccgctcttcctggggttgtttctccgtgtgacgtgtggcctttgagatcaactctcctgtaccagcgtaggccgcatgagtggggggcgggctcccgcggtcctgctcggcggagtggtgagtgaccggccccgccccgccccttccggtcctcgaagcctcgaccgctacccgcaccctaaatcccagaggttggccccctgaggtgcctctctgctcctgtcttttgtttggatgccggcgctgctgcctgtggcctcccgccttttgttgctaccccgagtcttgctgaccatggcctctggaagccctccgacccagccctcgccggcctcggattccggctctggctacgttccgggctcggtctctgcagcctttgttacttgccccaacgagaaggtcgccaaggagatcgccagggccgtggtggagaagcgcctagcagcctgcgtcaacctcatccctcagattacatccatctatgagtggaaagggaagatcgaggaagacagtgaggtgctgatgatgattaaaacccaaagttccttggtcccagctttgacagattttgttcgttctgtgcacccttacgaagtggccgaggtaattgcattgcctgtggaacaggggaactttccgtacctgcagtgggtgcgccaggtcacagagtcagtttctgactctatcacagtcctgccatgatgagccctgttcctgctcatcatgaagatccccgcgatacttcaacgccttctgacttccaggtgatgactgggcccccaataaatcccgtctttgggtctctctgccttttgcctgttttttgtcatgtatgcaaatttgttgggagaatataagtgcttctagtccctgtattctctacatctttcagaatgactcagagctgct

SEQ ID NO: 15445 - protein, 156 aa, Homo sapiens; identical to SEQ ID NO: 1746

SEQ ID NO: 15446 - DNA, 978 bp, Homo sapiens
tctaatcacgtggctgccacccaggtaagaagaggccgctcttcctggggttgtttctccgtgtgacgtgtggcctttgagatcaactctcctgtaccagcgtaggccgcatgagtggggggcgggctcccgcggtcctgctcggcggagtggggcattcttcgggggtgcatcagagggagggcagagcctgaggatctaagcgaaggcttccccgggtgtaatttcctgggctgtttgtgaggagagatcgaattcgcctcctgctctcaggcctctctgctcctgtcttttgtttggatgccggcgctgctgcctgtggcctcccgccttttgttgctaccccgagtcttgctgaccatggcctctggaagccctccgacccagccctcgccggcctcggattccggctctggctacgttccgggctcggtctctgcagcctttgttacttgccccaacgagaaggtcgccaaggagatcgccagggccgtggtggagaagcgcctagcagcctgcgtcaacctcatccctcagattacatccatctatgagtggaaagggaagatcgaggaagacagtgaggtgctgatgatgattaaaacccaaagttccttggtcccagctttgacagattttgttcgttctgtgcacccttacgaagtggccgaggtaattgcattgcctgtggaacaggggaactttccgtacctgcagtgggtgcgccaggtcacagagtcagtttctgactctatcacagtcctgccatgatgagccctgttcctgctcatcatgaagatccccgcgatacttcaacgccttctgacttccaggtgatgactgggcccccaataaatcccgtctttgggtctctctgccttttgcctgttttttgtcatgtatgcaaatttgttgggagaatataagtgcttctagtccctgtattctctacatctttcagaatgactcagagctgct

SEQ ID NO: 15447 - protein, 156 aa, Homo sapiens; identical to SEQ ID NO: 1746

SEQ ID NO: 15448 - DNA, 869 bp, Homo sapiens
tgcgcgctgttttctaatcacgtggctgccacccaggtaagaagaggccgctcttcctggggttgtttctccgtgtgacgtgtggcctttgagatcaactctcctgtaccagcgtaggccgcatgagtggggggcgggctcccgcggtcctgctcggcggagtggcctctctgctcctgtcttttgtttggatgccggcgctgctgcctgtggcctcccgccttttgttgctaccccgagtcttgctgaccatggcctctggaagccctccgacccagccctcgccggcctcggattccggctctggctacgttccgggctcggtctctgcagcctttgttacttgccccaacgagaaggtcgccaaggagatcgccagggccgtggtggagaagcgcctagcagcctgcgtcaacctcatccctcagattacatccatctatgagtggaaagggaagatcgaggaagacagtgaggtgctgatgatgattaaaacccaaagttccttggtcccagctttgacagattttgttcgttctgtgcacccttacgaagtggccgaggtaattgcattgcctgtggaacaggggaactttccgtacctgcagtgggtgcgccaggtcacagagtcagtttctgactctatcacagtcctgccatgatgagccctgttcctgctcatcatgaagatccccgcgatacttcaacgccttctgacttccaggtgatgactgggcccccaataaatcccgtctttgggtctctctgccttttgcctgttttttgtcatgtatgcaaatttgttgggagaatataagtgcttctagtccctgtattctctacatctttcagaatgactcagagctgct

SEQ ID NO: 15449 - protein, 179 aa, Homo sapiens; identical to SEQ ID NO: 1750

SEQ ID NO: 15450 - DNA, 735 bp, Homo sapiens
gaggcgcaggtggtccttcttctactgtcacatggtgcgcgctgttttctaatcacgtggctgccacccaggcctctctgctcctgtcttttgtttggatgccggcgctgctgcctgtggcctcccgccttttgttgctaccccgagtcttgctgaccatggcctctggaagccctccgacccagccctcgccggcctcggattccggctctggctacgttccgggctcggtctctgcagcctttggccgtggtggagaagcgcctagcagcctgcgtcaacctcatccctcagattacatccatctatgagtggaaagggaagatcgaggaagacagtgaggtgctgatgatgattaaaacccaaagttccttggtcccagctttgacagattttgttcgttctgtgcacccttacgaagtggccgaggtaattgcattgcctgtggaacaggggaactttccgtacctgcagtgggtgcgccaggtcacagagtcagtttctgactctatcacagtcctgccatgatgagccctgttcctgctcatcatgaagatccccgcgatacttcaacgccttctgacttccaggtgatgactgggcccccaataaatcccgtctttgggtctctctgccttttgcctgttttttgtcatgtatgcaaatttgttgggagaatataagtgcttctagtccctgtattctctacatctttcagaatgactcagagctgct

SEQ ID NO: 15451 - protein, 70 aa, Homo sapiens
MPALLPVASRLLLLPRVLLTMASGSPPTQPSPASDSGSGYVPGSVSAAFGRGGEAPSSLRQPHPSDYIHL

SEQ ID NO: 15452 - DNA, 906 bp, Homo sapiens
cggaaacgggcgtgccatttccgcgcacgtctgcagatgcggtagtcgattggtcaagtctcccatggctcctccttcatcaggaggtgggcaaaccgcgccatgatagggtcgggattggctggctctggaggcgcaggtggtccttcttctactgtcacatggtgcgcgctgttttctaatcacgtggctgccacccaggcctctctgctcctgtcttttgtttggatgccggcgctgctgcctgtggcctcccgccttttgttgctaccccgagtcttgctgaccatggcctctggaagccctccgacccagccctcgccggcctcggattccggctctggctacgttccgggctcggtctctgcagcctttgttacttgccccaacgagaaggtcgccaaggagatcgccagggccgtggtggagaagcgcctagcagcctgcgtcaacctcatccctcagattacatccatctatgagtggaaagggaagatcgaggaagacagtgaggtgctgatgatgattaaaacccaaagttccttggtcccagctttgacagattttgttcgttctgtgcacccttacgaagtggccgaggtaattgcattgcctgtggaacaggggaactttccgtacctgcagtgggtgcgccaggtcacagagtcagtttctgactctatcacagtcctgccatgatgagccctgttcctgctcatcatgaagatccccgcgatacttcaacgccttctgacttccaggtgatgactgggcccccaataaatcccgtctttgggtctctctgccttttgcctgttttttgtcatgtatgcaaatttgttgggagaatataagtgcttctagtccctgtattctctacatctttcagaatgactcagagctgct

SEQ ID NO: 15453 - protein, 198 aa, Homo sapiens; identical to SEQ ID NO: 1744

SEQ ID NO: 15454 - DNA, 1021 bp, Homo sapiens
tctaatcacgtggctgccacccaggtaagaagaggccgctcttcctggggttgtttctccgtgtgacgtgtggcctttgagatcaactctcctgtaccagcgtaggccgcatgagtggggggcgggctcccgcggtcctgctcggcggagtggtgagtgaccggccccgccccgccccttccggtcctcgaagcctcgaccgctacccgcaccctaaatcccagaggttggccccctgaggtgtgagtgaaatgagcttttgctttattttccaagtttctctctcaccttcaggggcattcttcgggggtgcatcagagggagggcagagcctgaggatctaagcgaaggcttccccgggtgtaatttcctgggctgtttgtgaggagagatcgaattcgcctcctgctctcaggcctctctgctcctgtcttttgtttggatgccggcgctgctgcctgtggcctcccgccttttgttgctaccccgagtcttgctgaccatggcctctggaagccctccgacccagccctcgccggcctcggattccggctctggctacgttccgggctcggtctctgcagcctttgttacttgccccaacgagaaggtcgccaaggagatcgccagggccgtggtggagaagcgcctagcagcctgcgtcaacctcatccctcagattacatccatctatgagtggaaagggaagatcgaggaagacagtgaggtgctgatgatgattaaaacccaaagttccttggtcccagctttgacagattttgttcgttctgtgcacccttacgaagtggccgaggtaattgcattgcctgtggaacaggggaactttccgtacctgcagtgggtgcgccaggtcacagagtcagtttctgactctatcacagtcctgccatgatgagccctgttcctgctcatcatgaagatccccgcgatacttcaacgccttctgacttccaggtgatgactgggcccccaataaatcccgtctttgggtctctctgcc

SEQ ID NO: 15455 - protein, 156 aa, Homo sapiens; identical to SEQ ID NO: 1746

SEQ ID NO: 15456 - DNA, 848 bp, Homo sapiens
tctaatcacgtggctgccacccaggtaagaagaggccgctcttcctggggttgtttctccgtgtgacgtgtggcctttgagatcaactctcctgtaccagcgtaggccgcatgagtggggggcgggctcccgcggtcctgctcggcggagtggtgagtgaccggccccgccccgccccttccggtcctcgaagcctcgaccgctacccgcaccctaaatcccagaggttggccccctgaggtgcctctctgctcctgtcttttgtttggatgccggcgctgctgcctgtggcctcccgccttttgttgctaccccgagtcttgctgaccatggcctctggaagccctccgacccagccctcgccggcctcggattccggctctggctacgttccgggctcggtctctgcagcctttgttacttgccccaacgagaaggtcgccaaggagatcgccagggccgtggtggagaagcgcctagcagcctgcgtcaacctcatccctcagattacatccatctatgagtggaaagggaagatcgaggaagacagtgaggtgctgatgatgattaaaacccaaagttccttggtcccagctttgacagattttgttcgttctgtgcacccttacgaagtggccgaggtaattgcattgcctgtggaacaggggaactttccgtacctgcagtgggtgcgccaggtcacagagtcagtttctgactctatcacagtcctgccatgatgagccctgttcctgctcatcatgaagatccccgcgatacttcaacgccttctgacttccaggtgatgactgggcccccaataaatcccgtctttgggtctctctgcc

SEQ ID NO: 15457 - protein, 156 aa, Homo sapiens; identical to SEQ ID NO: 1746

SEQ ID NO: 15458 - DNA, 1129 bp, Homo sapiens
tctaatcacgtggctgccacccaggtaagaagaggccgctcttcctggggttgtttctccgtgtgacgtgtggcctttgagatcaactctcctgtaccagcgtaggccgcatgagtggggggcgggctcccgcggtcctgctcggcggagtggtgagtgaccggccccgccccgccccttccggtcctcgaagcctcgaccgctacccgcaccctaaatcccagaggttggccccctgaggtgtgagtgaaatgagcttttgctttattttccaagtttctctctcaccttcaggggcattcttcgggggtgcatcagagggagggcagagcctgaggatctaagcgaaggcttccccgggtgtaatttcctgggctgtttgtgaggagagatcgaattcgcctcctgctctcaggcctctctgctcctgtcttttgtttggatgccggcgctgctgcctgtggcctcccgccttttgttgctaccccgagtcttgctgaccatggcctctggaagccctccgacccagccctcgccggcctcggattccggctctggctacgttccgggctcggtctctgcagcctttgttacttgccccaacgagaaggtcgccaaggagatcgccagggccgtggtggagaagcgcctagcagcctgcgtcaacctcatccctcagattacatccatgtgagtcataggagttggggggttaacctaactgtaggagctgactgggaacctctttcctgggggaaattctttgctccccacaactctccccctctgacctttcagctatgagtggaaagggaagatcgaggaagacagtgaggtgctgatgatgattaaaacccaaagttccttggtcccagctttgacagattttgttcgttctgtgcacccttacgaagtggccgaggtaattgcattgcctgtggaacaggggaactttccgtacctgcagtgggtgcgccaggtcacagagtcagtttctgactctatcacagtcctgccatgatgagccctgttcctgctcatcatgaagatccccgcgatacttcaacgccttctgacttccaggtgatgactgggcccccaataaatcccgtctttgggtctctctgcc

SEQ ID NO: 15459 - protein, 83 aa, Homo sapiens [sequence omitted]

SEQ ID NO: 15460 - DNA, 770 bp, Homo sapiens
tgcgcgctgttttctaatcacgtggctgccacccaggtaagaagaggccgctcttcctggggttgtttctccgtgtgacgtgtggcctttgagatcaactctcctgtaccagcgtaggccgcatgagtggggggcgggctcccgcggtcctgctcggcggagtggcctctctgctcctgtcttttgtttggatgccggcgctgctgcctgtggcctcccgccttttgttgctaccccgagtcttgctgaccatggcctctggaagccctccgacccagccctcgccggcctcggattccggctctggctacgttccgggctcggtctctgcagcctttgttacttgccccaacgagaaggtcgccaaggagatcgccagggccgtggtggagaagcgcctagcagcctgcgtcaacctcatccctcagattacatccatctatgagtggaaagggaagatcgaggaagacagtgaggtgctgatgatgattaaaacccaaagttccttggtcccagctttgacagattttgttcgttctgtgcacccttacgaagtggccgaggtaattgcattgcctgtggaacaggggaactttccgtacctgcagtgggtgcgccaggtcacagagtcagtttctgactctatcacagtcctgccatgatgagccctgttcctgctcatcatgaagatccccgcgatacttcaacgccttctgacttccaggtgatgactgggcccccaataaatcccgtctttgggtctctctgcc

SEQ ID NO: 15461 - protein, 179 aa, Homo sapiens; identical to SEQ ID NO: 1750

SEQ ID NO: 15462 - DNA, 807 bp, Homo sapiens
cggaaacgggcgtgccatttccgcgcacgtctgcagatgcggtagtcgattggtcaagtctcccatggctcctccttcatcaggaggtgggcaaaccgcgccatgatagggtcgggattggctggctctggaggcgcaggtggtccttcttctactgtcacatggtgcgcgctgttttctaatcacgtggctgccacccaggcctctctgctcctgtcttttgtttggatgccggcgctgctgcctgtggcctcccgccttttgttgctaccccgagtcttgctgaccatggcctctggaagccctccgacccagccctcgccggcctcggattccggctctggctacgttccgggctcggtctctgcagcctttgttacttgccccaacgagaaggtcgccaaggagatcgccagggccgtggtggagaagcgcctagcagcctgcgtcaacctcatccctcagattacatccatctatgagtggaaagggaagatcgaggaagacagtgaggtgctgatgatgattaaaacccaaagttccttggtcccagctttgacagattttgttcgttctgtgcacccttacgaagtggccgaggtaattgcattgcctgtggaacaggggaactttccgtacctgcagtgggtgcgccaggtcacagagtcagtttctgactctatcacagtcctgccatgatgagccctgttcctgctcatcatgaagatccccgcgatacttcaacgccttctgacttccaggtgatgactgggcccccaataaatcccgtctttgggtctctctgcc

SEQ ID NO: 15463 - protein, 198 aa, Homo sapiens; identical to SEQ ID NO: 1744

SEQ ID NO: 15464 - DNA, 330 bp, Homo sapiens
ctatgagtggaaagggaagatcgaggaagacagtgaggtgctgatgatgattaaaacccaaagttccttggtcccagctttgacagattttgttcgttctgtgcacccttacgaagtggccgaggtaattgcattgcctgtggaacaggggaactttccgtacctgcagtgggtgcgccaggtcacagagtcagtttctgactctatcacagtcctgccatgatgagccctgttcctgctcatcatgaagatccccgcgatacttcaacgccttctgacttccaggtgatgactgggcccccaataaatcccgtctttgggtctctctgc

SEQ ID NO: 15465 - protein, 59 aa, Homo sapiens [sequence omitted]

SEQ ID NO: 15466 - DNA, 297 bp, Homo sapiens
cgtggtggagaagcgcctagcagcccaaagttccttggtcccagctttgacagattttgttcgttctgtgcacccttacgaagtggccgaggtaattgcattgcctgtggaacaggggaactttccgtacctgcagtgggtgcgccaggtcacagagtcagtttctgactctatcacagtcctgccatgatgagccctgttcctgctcatcatgaagatccccgcgatacttcaacgccttctgacttccaggtgatgactgggcccccaataaatcccgtctttgggtctctctgc

SEQ ID NO: 15467 - protein, 36 aa, Homo sapiens
MMSPVPAHHEDPRDTSTPSDFQVMTGPPINPVFGSL

SEQ ID NO: 15468 - DNA, 735 bp, Homo sapiens
ctcgaccgctacccgcaccctaaatcccagaggttggccccctgaggtgtgagtgaaatgagcttttgctttattttccaagtttctctctcaccttcaggggcattcttcgggggtgcatcagagggagggcagagcctgaggatctaagcgaaggcttccccgggtgtaatttcctgggctgtttgtgaggagagatcgaattcgcctcctgctctcaggcctctctgctcctgtcttttgtttggatgccggcgctgctgcctgtggcctcccgccttttggctcggtctctgcagcctttgttacttgccccaacgagaaggtcgccaaggagatcgccagggccgtggtggagaagcgcctagcagcctgcgtcaacctcatccctcagattacatccatctatgagtggaaagggaagatcgaggaagacagtgaggtgctgatgatgattaaaacccaaagttccttggtcccagctttgacagattttgttcgttctgtgcacccttacgaagtggccgaggtaattgcattgcctgtggaacaggggaactttccgtacctgcagtgggtgcgccaggtcacagagtcagtttctgactctatcacagtcctgccatgatgagccctgttcctgctcatcatgaagatccccgcgatacttcaacgccttctgacttccaggtgatgactgggcccccaataaatcccgtctttgggtctctctgc

SEQ ID NO: 15469 - protein, 59 aa, Homo sapiens [sequence omitted]

SEQ ID NO: 15470 - DNA, 1171 bp, Homo sapiens
cccaggtaagaagaggccgctcttcctggggttgtttctccgtgtgacgtgtggcctttgagatcaactctcctgtaccagcgtaggccgcatgagtggggggcgggctcccgcggtcctgctcggcggagtggtgagtgaccggccccgccccgccccttccggtcctcgaagcctcgaccgctacccgcaccctaaatcccagaggttggccccctgaggtgtgagtgaaatgagcttttgctttattttccaagtttctctctcaccttcaggggcattcttcgggggtgcatcagagggagggcagagcctgaggatctaagcgaaggcttccccgggtgtaatttcctgggctgtttgtgaggagagatcgaattcgcctcctgctctcaggcctctctgctcctgtcttttgtttggatgccggcgctgctgcctgtggcctcccgccttttgttgctaccccgagtcttgctgaccatggcctctggaagccctccgacccagccctcgccggcctcggattccggctctggctacgttccgggctcggtctctgcagcctttgttacttgccccaacgagaaggtcgccaaggagatcgccaggtagggacctcgatgtgcagcgagaaaggatgatcatgaagggacagttgggggtggggcagaagagtgctgctttctcctttctccagctctggaagcctgtctctgggctgccagtacaaaaactggggttatggggtactctgaatgggactgtctcttcactccagggccgtggtggagaagcgcctagcagcctgcgtcaacctcatccctcagattacatccatctatgagtggaaagggaagatcgaggaagacagtgaggtgctgatgatgattaaaacccaaagttccttggtcccagctttgacagattttgttcgttctgtgcacccttacgaagtggccgaggtaattgcattgcctgtggaacaggggaactttccgtacctgcagtgggtgcgccaggtcacagagtcagtttctgactctatcacagtcctgccatgatgagccctgttcctgctcatcatgaagatccccgcgatacttcaacgccttctgacttccaggtgatgactgggcccccaataaatcccgtctttgggtctctctgc

SEQ ID NO: 15471 - protein, 101 aa, Homo sapiens [sequence omitted]

SEQ ID NO: 15472 - DNA, 878 bp, Homo sapiens
tctaatcacgtggctgccacccaggtaagaagaggccgctcttcctggggttgtttctccgtgtgacgtgtggcctttgagatcaactctcctgtaccagcgtaggccgcatgagtggggggcgggctcccgcggtcctgctcggcggagtggggcattcttcgggggtgcatcagagggagggcagagcctgaggatctaagcgaaggcttccccgggtgtaatttcctgggctgtttgtgaggagagatcgaattcgcctcctgctctcaggcctctctgctcctgtcttttgtttggatgccggcgctgctgcctgtggcctcccgccttttgttgctaccccgagtcttgctgaccatggcctctggaagccctccgacccagccctcgccggcctcggattccggctctggctacgttccgggctcggtctctgcagcctttgttacttgccccaacgagaaggtcgccaaggagatcgccagggccgtggtggagaagcgcctagcagcctgcgtcaacctcatccctcagattacatccatctatgagtggaaagggaagatcgaggaagacagtgaggtgctgatgatgattaaaacccaaagttccttggtcccagctttgacagattttgttcgttctgtgcacccttacgaagtggccgaggtaattgcattgcctgtggaacaggggaactttccgtacctgcagtgggtgcgccaggtcacagagtcagtttctgactctatcacagtcctgccatgatgagccctgttcctgctcatcatgaagatccccgcgatacttcaacgccttctgacttccaggtgatgactgggcccccaataaatcccgtctttgggtctctctgc

SEQ ID NO: 15473 - protein, 156 aa, Homo sapiens; identical to SEQ ID NO: 1746

SEQ ID NO: 15474 - DNA, 1398 bp, Homo sapiens
tctaatcacgtggctgccacccaggtaagaagaggccgctcttcctggggttgtttctccgtgtgacgtgtggcctttgagatcaactctcctgtaccagcgtaggccgcatgagtggggggcgggctcccgcggtcctgctcggcggagtggtgagtgaccggccccgccccgccccttccggtcctcgaagcctcgaccgctacccgcaccctaaatcccagaggttggccccctgaggtgtgagtgaaatgagcttttgctttattttccaagtttctctctcaccttcaggggcattcttcgggggtgcatcagagggagggcagagcctgaggatctaagcgaaggcttccccgggtgtaatttcctgggctgtttgtgaggagagatcgaattcgcctcctgctctcaggcctctctgctcctgtcttttgtttggatgccggcgctgctgcctgtggcctcccgccttttgttgctaccccgagtcttgctgaccatggcctctggaagccctccgacccagccctcgccggcctcggattccggctctggctacgttccgggctcggtctctgcagcctttgttacttgccccaacgagaaggtcgccaaggagatcgccagggccgtggtggagaagcgcctagcagcctgcgtcaacctcatccctcagattacatccatgtgagtcataggagttggggggttaacctaactgtaggagctgactgggaacctctttcctgggggaaattctttgctccccacaactctccccctctgacctttcagctatgagtggaaagggaagatcgaggaagacagtgaggtgctgatggtgagaaacatttcccccacccaacaaaatatccccaatccctgacccctttagcccttacccctcttctgagaaactgaactcaatcccactccttgattcaaccatgtttatctttgtcccttagatgattaaaacccaaagttccttggtcccagctttgacagattttgttcggtgagaactttgagatggatggggtgagggtgtgtactgtgtgggtgtgacttgctgggcagtctagggcttgcgtgtaagggagtgggttcttttgggtaaatctttgagtgatccccttcccccacccacctattttgtagttctgtgcacccttacgaagtggccgaggtaattgcattgcctgtggaacaggggaactttccgtacctgcagtgggtgcgccaggtcacagagtcagtttctgactctatcacagtcctgccatgatgagccctgttcctgctcatcatgaagatccccgcgatacttcaacgccttctgacttccaggtgatgactgggcccccaataaatcccgtctttgggtctctctgc

SEQ ID NO: 15475 - protein, 83 aa, Homo sapiens [sequence omitted]

SEQ ID NO: 15476 - DNA, 709 bp, Homo sapiens
tttctaatcacgtggctgccacccaggtaagaagaggccgctcttcctggggttgtttctccgtgtgacgtgtggcctttgagatcaactctcctgtaccagcgtaggccgcatgagtggggggcgggctcccgcggtcctgctcggcggagtggcctctctgctcctgtcttttgtttggatgccggcgctgctgcctgtggcctcccgccttttgttgctaccccgagtcttgctgaccatggcctctggaagccctccgacccagccctcgccggcctcggattccggctctggctacgttccgggctcggtctctgcagcctttgttacttgccccaacgagaaggtcgccaaggagatcgccagggccgtggtggagaagcgcctagcagcctgcgtcaacctcatccctcagattacatccatctatgagtggaaagggaagatcgaggaagacagtgaggtgctgatgttctgtgcacccttacgaagtggccgaggtaattgcattgcctgtggaacaggggaactttccgtacctgcagtgggtgcgccaggtcacagagtcagtttctgactctatcacagtcctgccatgatgagccctgttcctgctcatcatgaagatccccgcgatacttcaacgccttctgacttccaggtgatgactgggcccccaataaatcccgtctttgggtctctctgc

SEQ ID NO: 15477 - protein, 155 aa, Homo sapiens
MSGGRAPAVLLGGVASLLLSFVWMPALLPVASRLLLLPRVLLTMASGSPPTQPSPASDSGSGYVPGSVSAAFVTCPNEKVAKEIARAVVEKRLAACVNLIPQITSIYEWKGKIEEDSEVLMFCAPLRSGRGNCIACGTGELSVPAVGAPGHRVSF

SEQ ID NO: 15478 - DNA, 635 bp, Homo sapiens
gaggcgcaggtggtccttcttctactgtcacatggtgcgcgctgttttctaatcacgtggctgccacccaggcctctctgctcctgtcttttgtttggatgccggcgctgctgcctgtggcctcccgccttttgttgctaccccgagtcttgctgaccatggcctctggaagccctccgacccagccctcgccggcctcggattccggctctggctacgttccgggctcggtctctgcagcctttggccgtggtggagaagcgcctagcagcctgcgtcaacctcatccctcagattacatccatctatgagtggaaagggaagatcgaggaagacagtgaggtgctgatgatgattaaaacccaaagttccttggtcccagctttgacagattttgttcgttctgtgcacccttacgaagtggccgaggtaattgcattgcctgtggaacaggggaactttccgtacctgcagtgggtgcgccaggtcacagagtcagtttctgactctatcacagtcctgccatgatgagccctgttcctgctcatcatgaagatccccgcgatacttcaacgccttctgacttccaggtgatgactgggcccccaataaatcccgtctttgggtctctctgc

SEQ ID NO: 15479 - protein, 70 aa, Homo sapiens; identical to SEQ ID NO: 15451

SEQ ID NO: 15480 - DNA, 783 bp, Homo sapiens
tctaatcacgtggctgccacccaggtaagaagaggccgctcttcctggggttgtttctccgtgtgacgtgtggcctttgagatcaactctcctgtaccagcgtaggccgcatgagtggggggcgggctcccgcggtcctgctcggcggagtggggcattcttcgggggtgcatcagagggagggcagagcctgaggatctaagcgaaggcttccccgggtgtaatttcctgggctgtttgtgaggagagatcgaattcgcctcctgctctcaggcctctctgctcctgtcttttgtttggatgccggcgctgctgcctgtggcctcccgccttttgttgctaccccgagtcttgctgaccatggcctctggaagccctccgacccagccctcgccggcctcggattccggctctggctacgttccgggctcggtctctgcagcctttgttacttgccccaacgagaaggtcgccaaggagatcgccagggccgtggtggagaagcgcctagcagcctgcgtcaacctcatccctcagattacatccatctatgagtggaaagggaagatcgaggaagacagtgaggtgctgatgatgattaaaacccaaagttccttggtcccagctttgacagattttgttcgttctgtgcacccttacgaagtggccgagtcctgccatgatgagccctgttcctgctcatcatgaagatccccgcgatacttcaacgccttctgacttccaggtgatgactgggcccccaataaatcccgtctttgggtc

SEQ ID NO: 15481 - protein, 135 aa, Homo sapiens
MPALLPVASRLLLLPRVLLTMASGSPPTQPSPASDSGSGYVPGSVSAAFVTCPNEKVAKEIARAVVEKRLAACVNLIPQITSIYEWKGKIEEDSEVLMMIKTQSSLVPALTDFVRSVHPYEVAESCHDEPCSCSS

SEQ ID NO: 15482 - DNA, 352 bp, Homo sapiens
tctaatcacgtggctgccacccaggtaagaagaggccgctcttcctggggttgtttctccgtgtgacgtgtggcctttgagatcaactctcctgtaccagcgtaggccgcatgagtggggggcgggctcccgcggtcctgctcggcggagtggcctctctgctcctgtcttttgtttggatgccggcgctgctgcctgtggcctcccgccttttgttgctaccccgagtcttgctgaccatggcctctggaagccctccgacccagccctcgccggcctcggattccggctctggctacgttccgggctcggtctctgcagcctttgttacttgccccaacgagaaggtcgc

SEQ ID NO: 15483 - protein, 79 aa, Homo sapiens
MSGGRAPAVLLGGVASLLLSFVWMPALLPVASRLLLLPRVLLTMASGSPPTQPSPASDSGSGYVPGSVSAAFVTCPNEK

SEQ ID NO: 15484 - DNA, 442 bp, Homo sapiens
tctaatcacgtggctgccacccaggtaagaagaggccgctcttcctggggttgtttctccgtgtgacgtgtggcctttgagatcaactctcctgtaccagcgtaggccgcatgagtggggggcgggctcccgcggtcctgctcggcggagtggtgagtgaccggccccgccccgccccttccggtcctcgaagcctcgaccgctacccgcaccctaaatcccagaggttggccccctgaggtgcctctctgctcctgtcttttgtttggatgccggcgctgctgcctgtggcctcccgccttttgttgctaccccgagtcttgctgaccatggcctctggaagccctccgacccagccctcgccggcctcggattccggctctggctacgttccgggctcggtctctgcagcctttgttacttgccccaacgagaaggtcgc

SEQ ID NO: 15485 - protein, 56 aa, Homo sapiens
MPALLPVASRLLLLPRVLLTMASGSPPTQPSPASDSGSGYVPGSVSAAFVTCPNEK

SEQ ID NO: 15486 - DNA, 128 bp, Homo sapiens
ccatgatagggtcgggattggctggctctggaggcgcaggtggtccttcttctactgtcacatggtgcgcgctgttttctaatcacgtggctgccacccagcgtaggccgcatgagtggggggcgggc

SEQ ID NO: 15487 - protein, 41 aa, Homo sapiens
MIGSGLAGSGGAGGPSSTVTWCALFSNHVAATQRRPHEWGA

SEQ ID NO: 15488 - DNA, 2061 bp, Homo sapiens
tctcggctgccgctgctgccgttggctcttattctcctcctcctcctcctctctcctcctctctgcttctctctgctcctctctcctcctctctcctcctcctcctcctccacctcctcctccttctccccctctttctccccctctttctctcttctttctcccccgtccccccgccccctccccccaggcctgatgagcaggtctcgagcctccatccatcgggggagcatccccgcgatgtcctatgcccccttcagagatgtacggggaccctctatgcaccgaacccaatacgttcattccccgtatgatcgtcctggttggaaccctcggttctgcatcatctcggggaaccagctgctcatgctggatgaggatgagatacaccccctactgatccgggaccggaggagcgagtccagtcgcaacaaactgctgagacgcacagtctccgtgccggtggaggggcggccccacggcgagcatgaataccacttgggtcgctcgaggaggaagagtgtcccaggggggaagcagtacagcatggagggtgcccctgctgcgcccttccggccctcgcaaggcttcctgagccgacggctaaaaagctccatcaaacgaacgaagtcacaacccaaacttgaccggaccagcagctttcgccagatcctgcctcgcttccgaagtgctgaccatgaccgggcccggctgatgcaaagctttaaggagtcacactctcatgagtccttgctgagtcctagcagtgcagctgaggcattggagctcaacttggatgaagattccattatcaagccagtgcacagctccatcctgggccaggagttctgttttgaggtaacaacttcatcaggaacaaaatgctttgcctgtcggtctgcggccgaaagagacaaatggattgagaatctgcagcgggcagtaaagcccaacaaggacaacagccgccgggtagacaatgtgctaaagctgtggatcatagaggcccgggagctgccccccaagaagcggtactactgtgagctctgcctggatgacatgctgtatgcacgcaccacctccaagccccgctctgcctctggggacaccgtcttctggggcgagcacttcgagtttaacaacctgccggctgtccgtgccctgcggctgcatctgtaccgtgactcagacaaaaagcgcaagaaggacaaggcaggctatgtcggcctggtgactgtgccagtggccaccctggctgggcgccacttcacagagcagtggtaccctgtaaccctgccaacaggcagtgggggatctgggggcatgggttcgggagggggagggggctcggggggtggctcagggggcaagggcaaaggaggttgcccggctgtgcggctgaaagcacgttaccagacaatgagcatcttgcccatggagctatataaagagtttgcagagtatgtcaccaaccattatcggatgctgtgtgcagtcttggagcccgccctgaatgtcaaaggcaaggaggaggttgccagtgcactagttcacatcctgcagagtacaggcaaggccaaggacttcctttcagacatggccatgtctgaggtagaccggttcatggaacgggagcacctcatattccgcgagaacacgcttgccactaaagccatagaagagtatatgagactgattggtcagaaatacctcaaggatgccattggagaattcatccgtgctctgtatgaatctgaggaaaactgcgaggtagaccctatcaagtgcacagcatccagtttggcagagcaccaggccaacctgcgaatgtgctgtgagttggccctgtgcaaggtggtcaactcccactggtgagactgggaacgctgggctggggggccagggtcgggggaattatgtgttcatctgttcatctatctgtccatcctcaaagaggactgagcaccatttatgggcaaagcattgttctaggcgctatagagcaaacaggtgaaagaggcctggtccctgccctcagagggcctccaccagaatggggac

SEQ ID NO: 15489 - protein, 559 aa, Homo sapiens
MSRSRASIHRGSIPAMSYAPFRDVRGPSMHRTQYVHSPYDRPGWNPRFCIISGNQLLMLDEDEIHPLLIRDRRSESSRNKLLRRTVSVPVEGRPHGEHEYHLGRSRRKSVPGGKQYSMEGAPAAPFRPSQGFLSRRLKSSIKRTKSQPKLDRTSSFRQILPRFRSADHDRARLMQSFKESHSHESLLSPSSAAEALELNLDEDSIIKPVHSSILGQEFCFEVTTSSGTKCFACRSAAERDKWIENLQRAVKPNKDNSRRVDNVLKLWIIEARELPPKKRYYCELCLDDMLYARTTSKPRSASGDTVFWGEHFEFNNLPAVRALRLHLYRDSDKKRKKDKAGYVGLVTVPVATLAGRHFTEQWYPVTLPTGSGGSGGMGSGGGGGSGGGSGGKGKGGCPAVRLKARYQTMSILPMELYKEFAEYVTNHYRMLCAVLEPALNVKGKEEVASALVHILQSTGKAKDFLSDMAMSEVDRFMEREHLIFRENTLATKAIEEYMRLIGQKYLKDAIGEFIRALYESEENCEVDPIKCTASSLAEHQANLRMCCELALCKVVNSHW

SEQ ID NO: 15490 - DNA, 8192 bp, Homo sapiens
cctcctcctcctcctccacctcctcctccttctccccctctttctccccctctttctctcttctttctcccccgtccccccgccccctccccccaggcctgatgagcaggtctcgagcctccatccatcgggggagcatccccgcgatgtcctatgcccccttcagagatgtacggggaccctctatgcaccgaacccaatacgttcattccccgtatgatcgtcctggttggaaccctcggttctgcatcatctcggggaaccagctgctcatgctggatgaggatgagatacaccccctactgatccgggaccggaggagcgagtccagtcgcaacaaactgctgagacgcacagtctccgtgccggtggaggggcggccccacggcgagcatgaataccacttgggtcgctcgaggaggaagagtgtcccaggggggaagcagtacagcatggagggtgcccctgctgcgcccttccggccctcgcaaggcttcctgagccgacggctaaaaagctccatcaaacgaacgaagtcacaacccaaacttgaccggaccagcagctttcgccagatcctgcctcgcttccgaagtgctgaccatgaccgggcccggctgatgcaaagctttaaggagtcacactctcatgagtccttgctgagtcctagcagtgcagctgaggcattggagctcaacttggatgaagattccattatcaagccagtgcacagctccatcctgggccaggagttctgttttgaggtaacaacttcatcaggaacaaaatgctttgcctgtcggtctgcggccgaaagagacaaatggattgagaatctgcagcgggcagtaaagcccaacaaggacaacagccgccgggtagacaatgtgctaaagctgtggatcatagaggcccgggagctgccccccaagaagcggtactactgtgagctctgcctggatgacatgctgtatgcacgcaccacctccaagccccgctctgcctctggggacaccgtcttctggggcgagcacttcgagtttaacaacctgccggctgtccgtgccctgcggctgcatctgtaccgtgactcagacaaaaagcgcaagaaggacaaggcaggctatgtcggcctggtgactgtgccagtggccaccctggctgggcgccacttcacagagcagtggtaccctgtaaccctgccaacaggcagtgggggatctgggggcatgggttcgggagggggagggggctcggggggtggctcagggggcaagggcaaaggaggttgcccggctgtgcggctgaaagcacgttaccagacaatgagcatcttgcccatggagctatataaagagtttgcagagtatgtcaccaaccattatcggatgctgtgtgcagtcttggagcccgccctgaatgtcaaaggcaaggaggaggttgccagtgcactagttcacatcctgcagagtacaggcaaggccaaggacttcctttcagacatggccatgtctgaggtagaccggttcatggaacgggagcacctcatattccgcgagaacacgcttgccactaaagccatagaagagtatatgagactgattggtcagaaatacctcaaggatgccattggagaattcatccgtgctctgtatgaatctgaggaaaactgcgaggtagaccctatcaagtgcacagcatccagtttggcagagcaccaggccaacctgcgaatgtgctgtgagttggccctgtgcaaggtggtcaactcccactgcgtgttcccgagggagctgaaggaggtgtttgcttcgtggcggctgcgctgcgcagagcgaggccgggaggacatcgcagacaggcttatcagcgcctcactcttcctgcgcttcctctgcccagcgattatgtcgcccagtctctttgggcttatgcaggagtacccagatgagcagacctcacgaaccctcaccctcattgccaaggtcatccagaacctggccaacttttccaagtttacctcaaaggaggactttctgggcttcatgaatgagtttctggagctggaatggggttccatgcagcagtttttgtatgagatctccaatctggacacgctaaccaacagcagtagctttgagggttacatcgacttgggccgagagctctccacactgcatgccctactctgggaggtgctgccccagctcagcaaggaagccctcctgaagctgggtccactgccccggctcctcaacgacatcagcacagctctgaggaaccccaacatccaaaggcagccaagccgccagagtgagcggccccggcctcagcctgtggtactgcgggggccatcggctgagatgcagggctacatgatgcgggacctcaacagctccatcgaccttcagtccttcatggctcgaggcctcaacagctctatggacatggctcgcctcccctccccaaccaaggaaaagccacccccaccaccgcctggtggtggtaaagacctgttctatgtaagccgtccacccctggcccgttcctcaccagcatactgcacgagcagctcggacatcacagagccagagcagaagatgctgagtgtcaacaagagtgtgtccatgctggacttacagggtgatgggcctggtggccgcctcaacagcagcagtgtttcgaacctggcggccgtaggggacctgctgcactcaagccaggcctcgctgacagcagccttggggctacggcctgcgcctgccggacgcctctcccaggggagtggctcatccatcacggcggctggcatgcgcctcagccagatgggtgtcaccacagacggtgtccctgcccagcaactgcgaatccccctctccttccagaaccctctcttccacatggctgctgatgggccaggtcccccaggcggccatggagggggcggtggccatggcccaccttcctcccatcaccaccaccaccaccatcaccaccaccgaggtggagagccccctggggacacctttgccccattccatggctatagcaagagtgaggacctctcttccggggtccccaagccccctgctgcctccatccttcatagccacagctacagtgatgagtttggaccctctggcactgacttcacccgtcggcagctttcactccaggacaacctgcagcacatgctgtcccctccccagatcaccattggtccccagaggccagccccctcagggcctggaggtgggagcggtgggggcagcggtgggggtggcgggggccagccgcctccattgcagaggggcaagtctcagcagttgacagtcagcgcagcccagaaaccccggccatccagcgggaatctattgcagtccccagagccaagttatggccccgcccgtccacggcaacagagcctcagcaaggagggcagcattgggggcagcgggggcagcggtggcggagggggtggggggctgaagccctccatcaccaagcagcattctcagacaccatccacattgaaccccacaatgccagcctctgagcggacagtggcctgggtctccaacatgcctcacctgtcggctgacatcgagagtgcccacatcgagcgggaagagtacaagctcaaggagtactcaaaatcgatggatgagagccggctggatagggtgaaggagtacgaggaggagattcactcactgaaagagcggctgcacatgtccaaccggaagctggaagagtatgagcggaggctgctgtcccaggaagaacaaaccagcaaaatcctgatgcagtatcaggcccgactggagcagagtgagaagaggctaaggcagcagcaggcagagaaggattcccagatcaagagcatcattggcaggctgatgctggtggaggaggagctgcgccgggaccaccccgccatggctgagccgctgccagaacccaagaagaggctgctcgacgctcaggagaggcagcttccccccttgggtccaacaaacccgcgtgtgacgctggccccaccgtggaatggcctggcccccccagccccaccacccccaccccggctgcagattacggagaacggcgagttccgaaacaccgcagaccactagcccacccagcatcagagaccttctcttcctttcctgtgcaccccaccctgtaacagcaccaaccaccaggattggacatcaccgaggaacagcgggattgcctccccgaatgcctccctgggaggcacactgattgcccacccccaccactgcaccatttccaggagggagagtggggaccctcagccgcccccttttccttcccattggggtgctgccctctctttgacccccagggacccttgccccaggacaccgcctaccccgtacagaccccttcactccggggtgctatccccatcctctgcctcatcgttcccctgagcactgggggacagaccctcacccccaccctgggggtgtggcacctccaaactttcaacttcagggtgatttttttagcagtaaccagagctgacaatctaactcccctccaccgccccattttggcctcccctgccccccttgttatggggaggggaccccgggtgagggggccctattaccccttgatttctcaggagcgtctgggggggctcagcacgcacaaactccttctccttctaccactcttaaatttactccctccccacccagaacccagatggggtggagggggccaccggggcagggagggggcggcaaggggggaatgggagttgtctccccttctccccacacctgatctgctctcggctggtcccagagcggggtgagggggcttatgcccccccctcccccagtgtgttgggtggggtggaattgaggttagggtgaggggtcagggtttaggagggtgtgtatgttgggaggacaggctagttgatctgtcctactctgacacacagtcccctctgccccttccttctctcttcttggtctctactcccagggggaggggggaacttactctaggaaaagccatgtctctctcccccagggtggggggacctgtgttggaggaggggtgttggggggcccccttccatgactctgtcccctgggggaggtaggacagggctgggcttccctctcatcctccccctcccaatctccttccacctccctccctcccgccagctccacgatttttcggtgtttctctgtacatagttttctggcgggataggggaggtaggatggatggggtttggggtgggtaggccatgggaggggagaagcccctccttggcaccccctcttccctgactgctgtcccctacccagccttgcccccttcatccttttgcgtttggtattgagactctcctagactctactcctctttcttttgtatggacagttccccttcagtcccatccccctacacatacacccagccggggccaaatttatacttatataaaagttgtaaatatgtgaaattttatccctgtgccctttccccacctcaggccctacccctggaccctccccaaccttccttctctcttctttggctgttgtaattatctggggtttgtactgtacatatccggggtgtgtgtgtgtgggctgggggcaacccttctgtacagagcttcctggccccctccccccccgcccctctgcttccctccccacccaccacctcaagggtagggagttgctcttcctacctgttttattttgttttctcgttctccctccccaccccactcccagccttatctatcccccctcactgtccccttttctccactcccagccccatttcctttttttctggagtgtgtggtgaaacagaaaaaaacatgtttaataaacggagattgttcttttatcgctgtgccgactttcttaggcagggctctccagacctgtacggtggtaagatctgctttctgaaaggaagctgacagcctgagaggaaaaccgtatatccccacctgatgccacactctcctcatagaatgtcactctcccctcccaatgagattttttatattttagagcaggagttttgcaccggccaaacttctccaatctaactctcccctcaccactgtgtcacttagtccgaggccaggaacagcggcgttatctgataaaagagttcatgtatatatccacatttatctcttttaaaaattacctagaaataaggtttctttaattgctggttaaaatgctcccgtgcagaaaacaggaaagaacctgcctggttccttagcaaatctgagttccagtcccaggtccactactattagctgagtgacgcttccagcccgtttcccccgcctggaaactgaggacggcaacccccaccctcgcagggccggtgggaagacacaaagtgatgtgggcaagtgccaggcccacatggtaagtacccaactaatctcgcccctctcaggacctaccgggggcgggtgctacacttaatcaccgggaaacgcagctttccggggcggctgacggcccaccccctccgaccgggctgttctctcccgggccctgcctctcggtcctctgcagcggggaggacttcagcagctccccgggacgcccgttgcgaggacaccctgggcctgtgccctcctactagcaccgccctcctcgtctgcagtagccaatcaacacgaggcttgtaggctgccgttcctcgattggctacggctctagctccgcccgccgcacttggcgacggtgtccggcggggaggcggcggcttccggtctgggacggagctgtagcggcactgtaactgcgagggcagcgccgcgtgtgtaacggcgggggcgtgtcggcgggaaggacaatcgggccgggactcgcggtgtccgggtgaccgcggcttcccgggagcagacctctgtgggcactgtgaggcggaacggagcggcggggcaggagctgttctgggcaggtgaaggcaggctggtggctgaaggacctccttcttatcttccacaggggctggaagttaaaacccctgttggtgtttagtggtggtggttgttgttgttgtttgtttttgctttcttggtgtgcgggactgatttgcagaaaccgccactgacttaaaagtttccagttattgctcgtggggagggggttgtttgagaagatgtggctccctttatccagggcttctgtgacctccatctttttcctctgcagccttcatcccgcgtggagtctacccccaagcccttctcctcttcccaattcttgtcaccttcgaggaggccatggaaaccccaacacctttgccgcctgtacccgcctccccgacctgcaacccagccccacggacaatccagatcgagttcccacagcatagctcgtctctgctggaatctctgaaccgccacaggctagagggaaagttctgtgatgtgtccctcctggtgcagggccgggaacttagggctcataaagcagtgttagctgctgcctctccttacttccatgacaagctgcttctgggggatgcgcctcgtctcactctaccgagtgtcattgaagccgatgccttcgaggggctgctccagctcatttattcagggcgtctccgcctgccactggatgctcttcctgctcatctccttgtggccagtggccttcaaatgtggcaggtagtagatcagtgctcagaaattcttagagaattagaaacttcaggtggtggaatttcagcccgtggaggaaactcctaccatgcccttctttccactacatcctctacaggaggctggtgcattcgctcttcgcctttccagaccccagtacagtcctctgcttctactgaaagccctgcttccactgagagccctgtgggaggggagggaagtgaactgggagaagtgctgcaaattcaggtggaagaagaagaggaggaggaggaagatgatgatgatgaggaccaggggtcagccacactctctcagactcctcagccccagagagtatcaggggtttttccccgtcctcatggaccccacccactgcccatgactgctactccccgaaagcttccagagggtgagagtgcaccacttgagcttcctgcccctcctgcactgccccccaaaatcttctacattaagcaggaac

SEQ ID NO: 15491 - protein, 1343 aa, Homo sapiens [sequence omitted]

SEQ ID NO: 15492 - DNA, 1914 bp, Homo sapiens
gtgtgggggggtcctgctcaggaggggatggtgggtggcctggtttgttttgggggtccccttgccccccacccccaccccggctgcagattacggagaacggcgagttccgaaacaccgcagaccactagcccacccagcatcagagaccttctcttcctttcctgtgcaccccaccctgtaacagcaccaaccaccaggattggacatcaccgaggaacagcgggattgcctccccgaatgcctccctgggaggcacactgattgcccacccccaccactgcaccatttccaggagggagagtggggaccctcagccgcccccttttccttcccattggggtgctgccctctctttgacccccagggacccttgccccaggacaccgcctaccccgtacagaccccttcactccggggtgctatccccatcctctgcctcatcgttcccctgagcactgggggacagaccctcacccccaccctgggggtgtggcacctccaaactttcaacttcagggtgatttttttagcagtaaccagagctgacaatctaactcccctccaccgccccattttggcctcccctgccccccttgttatggggaggggaccccgggtgagggggccctattaccccttgatttctcaggagcgtctgggggggctcagcacgcacaaactccttctccttctaccactcttaaatttactccctccccacccagaacccagatggggtggagggggccaccggggcagggagggggcggcaaggggggaatgggagttgtctccccttctccccacacctgatctgctctcggctggtcccagagcggggtgagggggcttatgcccccccctcccccagtgtgttgggtggggtggaattgaggttagggtgaggggtcagggtttaggagggtgtgtatgttgggaggacaggctagttgatctgtcctactctgacacacagtcccctctgccccttccttctctcttcttggtctctactcccagggggaggggggaacttactctaggaaaagccatgtctctctcccccagggtggggggacctgtgttggaggaggggtgttggggggcccccttccatgactctgtcccctgggggaggtaggacagggctgggcttccctctcatcctccccctcccaatctccttccacctccctccctcccgccagctccacgatttttcggtgtttctctgtacatagttttctggcgggataggggaggtaggatggatggggtttggggtgggtaggccatgggaggggagaagcccctccttggcaccccctcttccctgactgctgtcccctacccagccttgcccccttcatccttttgcgtttggtattgagactctcctagactctactcctctttcttttgtatggacagttccccttcagtcccatccccctacacatacacccagccggggccaaatttatacttatataaaagttgtaaatatgtgaaattttatccctgtgccctttccccacctcaggccctacccctggaccctccccaaccttccttctctcttctttggctgttgtaattatctggggtttgtactgtacatatccggggtgtgtgtgtgtgggctgggggcaacccttctgtacagagcttcctggccccctccccccccgcccctctgcttccctccccacccaccacctcaagggtagggagttgctcttcctacctgttttattttgttttctcgttctccctccccaccccactcccagccttatctatcccccctcactgtccccttttctccactcccagccccatttcctttttttctggagtgtgtggtgaaacagaaaaaaacatgtttaataaacggagattgttctttta

SEQ ID NO: 15493 - protein, 78 aa, Homo sapiens
MVGGLVCFGGPLAPHPHPGCRLRRTASSETPQTTSPPSIRDLLFLSCAPHPVTAPTTRIGHHRGTAGLPPRMPPWEAH

SEQ ID NO: 15494 - DNA, 796 bp, Homo sapiens
gaaccccaacatccaaaggcagccaagccgccagagtgagcggccccggcctcagcctgtggtactgcgggggccatcggctgagatgcagggctacatgatgcgggacctcaacagctctatggacatggctcgcctcccctccccaaccaaggaaaagccacccccaccaccgcctggtggtggtaaagacctgttctatgtaagccgtccacccctggcccgttcctcaccagcatactgcacgagcagctcggacatcacagagccagagcagaagatgctgagtgtcaacaagagtgtgtccatgctggacttacagggtgatgggcctggtggccgcctcaacagcagcagtgtttcgaacctggcggccgtaggggacctgctgcactcaagccaggcctcgctgacagcagccttggggctacggcctgcgcctgccggacgcctctcccaggggagtggctcatccatcacggcggctggcatgcgcctcagccagatgggtgtcaccacagacggtgtccctgcccagcaactgcgaatccccctctccttccagaaccctctcttccacatggctgctgatgggccaggtcccccaggcggccatggagggggcggtggccatggcccaccttcctcccatcaccaccaccaccaccatcaccaccaccgaggtggagagccccctggggacacctttgccccattccatggctatagcaagagtgaggacctctcttccggggtccccaagccccctgctgcctccatccttcatagccacagc

SEQ ID NO: 15495 - protein, 236 aa, Homo sapiens
MQGYMMRDLNSSMDMARLPSPTKEKPPPPPPGGGKDLFYVSRPPLARSSPAYCTSSSDITEPEQKMLSVNKSVSMLDLQGDGPGGRLNSSSVSNLAAVGDLLHSSQASLTAALGLRPAPAGRLSQGSGSSITAAGMRLSQMGVTTDGVPAQQLRIPLSFQNPLFHMAADGPGPPGGHGGGGGHGPPSSHHHHHHHHHHRGGEPPGDTFAPFHGYSKSEDLSSGVPKPPAASILHSH

SEQ ID NO: 15496 - DNA, 489 bp, Homo sapiens
gctgcacatgtccaaccggaagctggaagagtatgagcggaggctgctgtcccaggaagaacaaaccagcaaaatcctgatgcagtatcaggcccgactggagcagagtgagaagaggctaaggcagcagcaggcagagaaggattcccagatcaagagcatcattggcaggctgatgctggtggaggaggagctgcgccgggaccaccccgccatggctgagccgctgccagaacccaagaagaggctgctcgacgctcaggtggaaattacaatgtcatttatcttctccgtgtcccatccccatccatcccactgtctttcgtgcactcactacaccagccacctagccccatcaccatctgtctctcatagtctgctgtttgtccactggctgctcctggcagccccctagtgaccccatcttcatcccatcgtctgtgcctttgtcactcctggcagcgtcagcccaactcctgtgccttccca

SEQ ID NO: 15497 - protein, 135 aa, Homo sapiens
MSNRKLEEYERRLLSQEEQTSKILMQYQARLEQSEKRLRQQQAEKDSQIKSIIGRLMLVEEELRRDHPAMAEPLPEPKKRLLDAQVEITMSFIFSVSHPHPSHCLSCTHYTSHLAPSPSVSHSLLFVHWLLLAAP

SEQ ID NO: 15498 - DNA, 1647 bp, Homo sapiens
gctgcacatgtccaaccggaagctggaagagtatgagcggaggctgctgtcccaggaagaacaaaccagcaaaatcctgatgcagtatcaggcccgactggagcagagtgagaagaggctaaggcagcagcaggcagagaaggattcccagatcaagagcatcattggcaggctgatgctggtggaggaggagctgcgccgggaccaccccgccatggctgagccgctgccagaacccaagaagaggctgctcgacgctcagctcctcatcaggtaattctcctggttccgctttggccacgggcggaggacacagggggaggtgactccggaccactgcaggttggtcgtgaagcccactccctccaacacctccggagcctctcccctctcactgctgccctccacacccagagaacctccacagactccagccctccgacacctgcacagatccatctcccaagacaccacccaaagagagcatttgctgctgcttcccagaactgtccaacaataccttagcaacaccaagagttgggccctagatgggcccagcacattcacaggtcacacccacttccctgcaaaacccaccccctcccagcctcctcctgactctaagccctcctcttcctctacctctccagtgtatgtctgtcaccccccatttcaccagagcgtccttaggggctgggggtgggtttgttaatggggtggaggcaatgatgggttggaggatcttggctataggggctgtgctgactgcagcaggtaggttgggtttccctcttccttccctaatcttggttctctaccctcctttccactcctcacctgattctctctcttcctcctccttatatctgtgaggcagaaggcatctgaagctcatattagcccccattgggtgggaattaggagtgggtagttaactcagggagacttgagataccctggaaaaaatgctattgagatgtcctgacattaggcagggtggatggaacaagaaggagcaagaaaggaacctcaggcagatgttaggacatggacttgatcatgtggcctgggagtttagaaatggggagagacatcctcctagatcagatcgtgggctcagtaggcatgttgattcccagggagaggtgccaggaacagcatggtaaagaatgtactcttcacagctcacatccccaggttgctgatgccactcactccccctctcctgccatcgagtggccttgccggacacatcaccctacctaaaaagccagtaaatgagaacctgtcagctatagccatcatttctgagatgcgattttctttgggattgagctgcagtgggcagtggctccttacactgtaattttaattctctgcctgcccagcctctctgtcaaagtagctggtgatctataaagatgctaaaaggcaccaggggactttgccatttaaaggactcctgcagtgaattcttttgtaaaatgaataatggcaccctaatttatccactttctaaatttgggtccatgggggtgtccagggcatgcttatgtgctgtcaccagcagacaaacagagggaatggaatctgggggttccttccctgctctcccgccatactcaggataccctaccataagtgatt

SEQ ID NO: 15499 - protein, 89 aa, Homo sapiens
MSNRKLEEYERRLLSQEEQTSKILMQYQARLEQSEKRLRQQQAEKDSQIKSIIGRLMLVEEELRRDHPAMAEPLPEPKKRLLDAQLLIR

SEQ ID NO: 15500 - DNA, 652 bp, Homo sapiens
ttgggaggacaggctagttgatctgtcctactctgacacacagtcccctctgccccttccttctctcttcttggtctctactcccagggggaggggggaacttactctaggaaaagccatgtctctctcccccagggtggggggacctgtgttggaggaggggtgttggggggcccccttccatgactctgtcccctgggggaggtaggacagggctgggcttccctctcatcctccccctcccaatctccttccacctccctccctcccgccagctccacgatttttcggtgtttctctgtacatagttttctggcgggataggggaggtaggatggatggggtttggggtgggtaggccatgggaggggagaagcccctccttggcaccccctcttccctgactgctgtcccctacccagccttgcccccttcatccttttgcgtttggtattgagactctcctagactctactcctctttcttttgtatggacagttccccttcagtcccatccccccaccccactcccagccttatctatcccccctcactgtccccttttctccactcccagccccatttcctttttttctggagtgtgtggtgaaacagaaaaaaacatgtttaataaacggagattgttctttta

SEQ ID NO: 15501 - protein, 39 aa, Homo sapiens
MDSSPSVPSPHPTPSLIYPPSLSPFLHSQPHFLFFWSVW

SEQ ID NO: 15502 - DNA, 2717 bp, Homo sapiens
ttccggtctgggacggagctgtagcggcactgtaactgcgagggcagcgccgcgtgtgtaacggcgggggcgtgtcggcgggaaggacaatcgggccgggactcgcggtgtccgggtgaccgcggcttcccgggagcagacctctgtgggcactgtgaggcggaacggagcggcggggcaggagctgttctgggcagccttcatcccgcgtggagtctacccccaagcccttctcctcttcccaattcttgtcaccttcgaggaggccatggaaaccccaacacctttgccgcctgtacccgcctccccgacctgcaacccagccccacggacaatccagatcgagttcccacagcatagctcgtctctgctggaatctctgaaccgccacaggctagagggaaagttctgtgatgtgtccctcctggtgcagggccgggaacttagggctcataaagcagtgttagctgctgcctctccttacttccatgacaagctgcttctgggggatgcgcctcgtctcactctaccgagtgtcattgaagccgatgccttcgaggggctgctccagctcatttattcagggcgtctccgcctgccactggatgctcttcctgctcatctccttgtggccagtggccttcaaatgtggcaggtagtagatcagtgctcagaaattcttagagaattagaaacttcaggtggtggaatttcagcccgtggaggaaactcctaccatgcccttctttccactacatcctctacaggaggctggtgcattcgctcttcgcctttccagaccccagtacagtcctctgcttctactgaaagccctgcttccactgagagccctgtgggaggggagggaagtgaactgggagaagtgctgcaaattcaggtggaagaagaagaggaggaggaggaagatgatgatgatgaggaccaggggtcagccacactctctcagactcctcagccccagagagtatcaggggtttttccccgtcctcatggaccccacccactgcccatgactgctactccccgaaagcttccagagggtgagagtgcaccacttgagcttcctgcccctcctgcactgccccccaaaatcttctacattaagcaggaacccttcgagcctaaggaggagatatcaggaagcggaactcagcctggaggagcaaaggaggaaaccaaagtgttttctggaggggacactgaagggaatggggagctagggttcttgttgccttcagggccagggccaacatctgggggagggggtccatcctggaaaccagtggatcttcatgggaatgaaatcctgtcagggggtggaggacctgggggagcaggccaggccgtgcatgggcctgtgaagctaggggggacaccccctgcagatggaaaacgctttggttgcctgtgtgggaagcggtttgcagtgaagccaaagcgtgaccggcacatcatgctgaccttcagccttcggccttttggctgtggcatctgcaacaagcgcttcaagctgaagcaccatctgacagagcacatgaagacccatgctggagccctgcatgcctgtccccactgtggccgtcggttccgagtccatgcctgttttctccgccaccgggacctatgcaagggccagggctgggccactgcccactggacttacaagtgactgctgaggctatacactagcttctagaacaagataaccactgctgctgatggatacttttccctcactgccatggcacaccagtcatggatcttgtaatcatgccaagagaatagatacattatggacctcttgttcttagatatgggcctctcagcctggcagatgtggaaactcaaatttctcgtcccactccaggttttggctagccaaccctgcaggaaagtggtttataggccattcatacttaagttgatcacttgcccatggtggacatttttgtggtggtgatgtccattaaggaaaccagattttcaattatttagtgagagaagagttagagcaaaagacagtggtaaatgttttattccgtctccatgaggaattgaaggagttggtctccacctagagatacatttgatttacagcttaagtaattcagaggctaagctctaagcttttttctctcattgctggaatgatttaagcagaagtccttttgtgtacttttaaaattgtatctttccaggagcccctcagattgtaccttgctttctcaccaatagacaccttcccgacacttttttaatgttgtagctgagcactttaacaagttgagcattccatgtttcattcttagaaccttctttaatagagggtcttccctcaacagcctgtgcctctggtctacctttgaccaccactgataactaatatattggtcacaatgactggaatgtgactagtgatctcaggagatggcactgtcctaaagtgctgtcagggtggcaccactgctctctgaacaacttaccttggtcagagggactcaggtttgggacagcacaagctgaaggctggagagtaacttgcatagtaggaccatacctcttcctttcccatcccacccacatatgatagacagcccctctgttgagatatggaggggacagatactggaatcgggggtgggacttgcagttacttaaaattttttaataaactgtgccctgaaacctaaactgac

SEQ ID NO: 15503 - protein, 473 aa, Homo sapiens; identical to SEQ ID NO: 1754

SEQ ID NO: 15504 - DNA, 2032 bp, Homo sapiens
catttattcagggcgtctccgcctgccactggatgctcttcctgctcatctccttgtggccagtggccttcaaatgtggcaggaggctggtgcattcgctcttcgcctttccagaccccagtacagtcctctgcttctactgaaagccctgcttccactgagagccctgtgggaggggagggaagtgaactgggagaagtgctgcaaattcaggtggaagaagaagaggaggaggaggaagatgatgatgatgaggaccaggggtcagccacactctctcagactcctcagccccagagagtatcaggggtttttccccgtcctcatggaccccacccactgcccatgactgctactccccgaaagcttccagagggtgagagtgcaccacttgagcttcctgcccctcctgcactgccccccaaaatcttctacattaagcaggaacccttcgagcctaaggaggagatatcaggaagcggaactcagcctggaggagcaaaggaggaaaccaaagtgttttctggaggggacactgaagggaatggggagctagggttcttgttgccttcagggccagggccaacatctgggggagggggtccatcctggaaaccagtggatcttcatgggaatgaaatcctgtcagggggtggaggacctgggggagcaggccaggccgtgcatgggcctgtgaagctaggggggacaccccctgcagatggaaaacgctttggttgcctgtgtgggaagcggtttgcagtgaagccaaagcgtgaccggcacatcatgctgaccttcagccttcggccttttggctgtggcatctgcaacaagcgcttcaagctgaagcaccatctgacagagcacatgaagacccatgctggagccctgcatgcctgtccccactgtggccgtcggttccgagtccatgcctgttttctccgccaccgggacctatgcaagggccagggctgggccactgcccactggacttacaagtgactgctgaggctatacactagcttctagaacaagataaccactgctgctgatggatacttttccctcactgccatggcacaccagtcatggatcttgtaatcatgccaagagaatagatacattatggacctcttgttcttagatatgggcctctcagcctggcagatgtggaaactcaaatttctcgtcccactccaggttttggctagccaaccctgcaggaaagtggtttataggccattcatacttaagttgatcacttgcccatggtggacatttttgtggtggtgatgtccattaaggaaaccagattttcaattatttagtgagagaagagttagagcaaaagacagtggtaaatgttttattccgtctccatgaggaattgaaggagttggtctccacctagagatacatttgatttacagcttaagtaattcagaggctaagctctaagcttttttctctcattgctggaatgatttaagcagaagtccttttgtgtacttttaaaattgtatctttccaggagcccctcagattgtaccttgctttctcaccaatagacaccttcccgacacttttttaatgttgtagctgagcactttaacaagttgagcattccatgtttcattcttagaaccttctttaatagagggtcttccctcaacagcctgtgcctctggtctacctttgaccaccactgataactaatatattggtcacaatgactggaatgtgactagtgatctcaggagatggcactgtcctaaagtgctgtcagggtggcaccactgctctctgaacaacttaccttggtcagagggactcaggtttgggacagcacaagctgaaggctggagagtaacttgcatagtaggaccatacctcttcctttcccatcccacccacatatgatagacagcccctctgttgagatatggaggggacagatactggaatcgggggtgggacttgcagttacttaaaattttttaataaactgtgccctgaaacctaaactgac

SEQ ID NO: 15505 - protein, 91 aa, Homo sapiens
MWQEAGAFALRLSRPQYSPLLLLKALLPLRALWEGREVNWEKCCKFRWKKKRRRRKMMMMRTRGQPHSLRLLSPREYQGFFPVLMDPTHCP

SEQ ID NO: 15506 - DNA, 1829 bp, Homo sapiens
atggcttcggggcaaggcccaggtcctcccaggcaggagtgcggagagcctgccctgccctctgcttctgaggagcaggtagcccaggacacagaggaggttttccgcagctacgttttttaccgccatcagcactcctacagcaccatggggcaggtgggacggcagctcgccatcatcggggacgacatcaaccgacgctatgactcagagttccagaccatgttgcagcacctgcagcccacggcagagaatgcctatgagtacttcaccaagattgccaccagcctgtttgagagtggcatcaattggggccgtgtggtggctcttctgggcttcggctaccgtctggccctacacgtctaccagcatggcctgactggcttcctaggccaggtgacccgcttcgtggtcgacttcatgctgcatcactgcattgcccggtggattgcacagaggggtggctgggtggcagccctgaacttgggcaatggtcccatcctgaacgtgctggtggttctgggtgtggttctgttgggccagtttgtggtacgaagattcttcaaatcatgactcccaagggtgccctttggggtcccggttcagacccctgcctggacttaagcgaagtctttgccttctctgttcccttgcaggggtcccccctcaagagtacagaagctttagcaagtgtgcactccagcttcggagggcccctgcgtgggggccagtcaggctgcagaggcacctcaacattgcatggtgctagtgggccctctctctgggcccaggggctgtggccgtctcctccctcagctctctgggacctccttagccctgtctgctaggcgctggggagactgataacttggggaggcaagagactgggagccacttctccccagaaagtgtttaacggttttagctttttataatacccttgtgagagcccattcccaccattctacctgaggccaggacgtctggggtgtggggattggtgggtctatgttccccaggattcagctattctggaagatcagcaccctaagagatgggactaggacctgagcctggtcctggccgtccctaagcatgtgtcccaggagcaggacctactaggagaggggggccaaggtcctgctcaactctacccctgctcccattcctccctccggccatactgcctttgcagttggactctcagggattctgggcttggggtgtggggtggggtggagtcgcagaccagagctgtctgaactcacgtgtcagaagcctccaagcctgcctcccaaggtcctctcagttctctcccttcctctctccttatagacacttgctcccaacccattcactacaggtgaaggctctcacccccatccctgggggccttgggtgagtggcctgctaaggctcctccttgcccagactacagggcttaggacttggtttgttatatcagggaaaaggagtagggagttcatctggagggttctaagtgggagaaggactatcaacaccactaggaatcccagaggtgggatcctccctcatggctctggcacagtgtaatccaggggtgtagatgggggaactgtgaatacttgaactctgttcccccaccctccatgctcctcacctgtctaggtctcctcagggtggggggtgacagtgccttctctattgggcacagcctagggtcttgggggtcaggggggagaagttcttgattcagccaaatgcagggaggggaggcagatggagcccataggccaccccctatcctctgagtgtttggaaataaactgtgcaatcccctcaccctg

SEQ ID NO: 15507 - protein, 190 aa, Homo sapiens
MASGQGPGPPRQECGEPALPSASEEQVAQDTEEVFRSYVFYRHQHSYSTMGQVGRQLAIIGDDINRRYDSEFQTMLQHLQPTAENAYEYFTKIATSLFESGINWGRVVALLGFGYRLALHVYQHGLTGFLGQVTRFVVDFMLHHCIARWIAQRGGWVAALNLGNGPILNVLVVLGVVLLGQFVVRRFFKS

SEQ ID NO: 15508 - DNA, 1535 bp, Homo sapiens
gccgctggcacctctatgatcactggagtctcgcgggtccctcgggctgcacagggacaagtaaaggctacatccagatgccgggaatgcactgacgcccattcctggaaactgggctcccactcagcccctgggagcagcagccgccagcccctcgggacctccatctccaccctgctgagccacccgggttgggccaggatcccggcaggctgatcccgtcctccactgagacctgaaaaatggcttcggggcaaggcccaggtcctcccaggcaggagtgcggagagcctgccctgccctctgcttctgaggagcaggtagcccaggacacagaggaggttttccgcagctacgttttttaccgccatcagcaggaacaggaggctgaaggggtggctgcccctgccgacccagagatggtcaccttacctctgcaacctagcagaggcacctcaacattgcatggtgctagtgggccctctctctgggcccaggggctgtggccgtctcctccctcagctctctgggacctccttagccctgtctgctaggcgctggggagactgataacttggggaggcaagagactgggagccacttctccccagaaagtgtttaacggttttagctttttataatacccttgtgagagcccattcccaccattctacctgaggccaggacgtctggggtgtggggattggtgggtctatgttccccaggattcagctattctggaagatcagcaccctaagagatgggactaggacctgagcctggtcctggccgtccctaagcatgtgtcccaggagcaggacctactaggagaggggggccaaggtcctgctcaactctacccctgctcccattcctccctccggccatactgcctttgcagttggactctcagggattctgggcttggggtgtggggtggggtggagtcgcagaccagagctgtctgaactcacgtgtcagaagcctccaagcctgcctcccaaggtcctctcagttctctcccttcctctctccttatagacacttgctcccaacccattcactacaggtgaaggctctcacccccatccctgggggccttgggtgagtggcctgctaaggctcctccttgcccagactacagggcttaggacttggtttgttatatcagggaaaaggagtagggagttcatctggagggttctaagtgggagaaggactatcaacaccactaggaatcccagaggtgggatcctccctcatggctctggcacagtgtaatccaggggtgtagatgggggaactgtgaatacttgaactctgttcccccaccctccatgctcctcacctgtctaggtctcctcagggtggggggtgacagtgccttctctattgggcacagcctagggtcttgggggtcaggggggagaagttcttgattcagccaaatgcagggaggggaggcagatggagcccataggccaccccctatcctctgagtgtttggaaataaactgtgcaatcccctcaccctg

SEQ ID NO: 15509 - protein, 103 aa, Homo sapiens
MASGQGPGPPRQECGEPALPSASEEQVAQDTEEVFRSYVFYRHQQEQEAEGVAAPADPEMVTLPLQPSRGTSTLHGASGPSLWAQGLWPSPPSALWDLLSPVC

SEQ ID NO: 15510 - DNA, 2095 bp, Homo sapiens
gagggagctgattggagccgggtgccgctggcacctctatgatcactggagtctcgcgggtccctcgggctgcacagggacaagtaaaggctacatccagatgccgggaatgcactgacgcccattcctggaaactgggctcccactcagcccctgggagcagcagccgccagcccctcgggacctccatctccaccctgctgagccacccgggttgggccaggatcccggcaggctgatcccgtcctccactgagacctgaaaaatggcttcggggcaaggcccaggtcctcccaggcaggagtgcggagagcctgccctgccctctgcttctgcaggaacaggaggctgaaggggtggctgcccctgccgacccagagatggtcaccttacctctgcaacctagcagcaccatggggcaggtgggacggcagctcgccatcatcggggacgacatcaaccgacgctatgactcagagttccagaccatgttgcagcacctgcagcccacggcagagaatgcctatgagtacttcaccaagattgccaccagcctgtttgagagtggcatcaattggggccgtgtggtggctcttctgggcttcggctaccgtctggccctacacgtctaccagcatggcctgactggcttcctaggccaggtgacccgcttcgtggtcgacttcatgctgcatcactgcattgcccggtggattgcacagaggggtggctgggtggcagccctgaacttgggcaatggtcccatcctgaacgtgctggtggttctgggtgtggttctgttgggccagtttgtggtacgaagattcttcaaatcatgactcccaagggtgccctttggggtcccggttcagacccctgcctggacttaagcgaagtctttgccttctctgttcccttgcaggggtcccccctcaagagtacagaagctttagcaagtgtgcactccagcttcggagggcccctgcgtgggggccagtcaggctgcagaggcacctcaacattgcatggtgctagtgggccctctctctgggcccaggggctgtggccgtctcctccctcagctctctgggacctccttagccctgtctgctaggcgctggggagactgataacttggggaggcaagagactgggagccacttctccccagaaagtgtttaacggttttagctttttataatacccttgtgagagcccattcccaccattctacctgaggccaggacgtctggggtgtggggattggtgggtctatgttccccaggattcagctattctggaagatcagcaccctaagagatgggactaggacctgagcctggtcctggccgtccctaagcatgtgtcccaggagcaggacctactaggagaggggggccaaggtcctgctcaactctacccctgctcccattcctccctccggccatactgcctttgcagttggactctcagggattctgggcttggggtgtggggtggggtggagtcgcagaccagagctgtctgaactcacgtgtcagaagcctccaagcctgcctcccaaggtcctctcagttctctcccttcctctctccttatagacacttgctcccaacccattcactacaggtgaaggctctcacccccatccctgggggccttgggtgagtggcctgctaaggctcctccttgcccagactacagggcttaggacttggtttgttatatcagggaaaaggagtagggagttcatctggagggttctaagtgggagaaggactatcaacaccactaggaatcccagaggtgggatcctccctcatggctctggcacagtgtaatccaggggtgtagatgggggaactgtgaatacttgaactctgttcccccaccctccatgctcctcacctgtctaggtctcctcagggtggggggtgacagtgccttctctattgggcacagcctagggtcttgggggtcaggggggagaagttcttgattcagccaaatgcagggaggggaggcagatggagcccataggccaccccctatcctctgagtgtttggaaataaactgtgcaatcccctcaccctg

SEQ ID NO: 15511 - protein, 152 aa, Homo sapiens
MVTLPLQPSSTMGQVGRQLAIIGDDINRRYDSEFQTMLQHLQPTAENAYEYFTKIATSLFESGINWGRVVALLGFGYRLALHVYQHGLTGFLGQVTRFVVDFMLHHCIARWIAQRGGWVAALNLGNGPILNVLVVLGVVLLGQFVVRRFFKS

SEQ ID NO: 15512 - DNA, 2202 bp, Homo sapiens
ggtggccacagagcaacttcctctagagggagctgattggagccgggtgccgctggcacctctatgatcactggagtctcgcgggtccctcgggctgcacagggacaagtaaaggctacatccagatgccgggaatgcactgacgcccattcctggaaactgggctcccactcagcccctgggagcagcagccgccagcccctcgggacctccatctccaccctgctgagccacccgggttgggccaggatcccggcaggctgatcccgtcctccactgagacctgaaaaatggcttcggggcaaggcccaggtcctcccaggcaggagtgcggagagcctgccctgccctctgcttctgaggagcaggtagcccaggacacagaggaggttttccgcagctacgttttttaccgccatcagcaggaacaggaggctgaaggggtggctgcccctgccgacccagagatggtcaccttacctctgcaacctagcagcaccatggggcaggtgggacggcagctcgccatcatcggggacgacatcaaccgacgctatgactcagagttccagaccatgttgcagcacctgcagcccacggcagagaatgcctatgagtacttcaccaagattgccaccaggccagcagcaacacccacagcctgtttgagagtggcatcaattggggccgtgtggtggctcttctgggcttcggctaccgtctggccctacacgtctaccagcatggcctgactggcttcctaggccaggtgacccgcttcgtggtcgacttcatgctgcatcactgcattgcccggtggattgcacagaggggtggctgggtggcagccctgaacttgggcaatggtcccatcctgaacgtgctggtggttctgggtgtggttctgttgggccagtttgtggtacgaagattcttcaaatcatgactcccaagggtgccctttggggtcccggttcagacccctgcctggacttaagcgaagtctttgccttctctgttcccttgcaggggtcccccctcaagagtacagaagctttagcaagtgtgcactccagcttcggagggcccctgcgtgggggccagtcaggctgcagaggcacctcaacattgcatggtgctagtgggccctctctctgggcccaggggctgtggccgtctcctccctcagctctctgggacctccttagccctgtctgctaggcgctggggagactgataacttggggaggcaagagactgggagccacttctccccagaaagtgtttaacggttttagctttttataatacccttgtgagagcccattcccaccattctacctgaggccaggacgtctggggtgtggggattggtgggtctatgttccccaggattcagctattctggaagatcagcaccctaagagatgggactaggacctgagcctggtcctggccgtccctaagcatgtgtcccaggagcaggacctactaggagaggggggccaaggtcctgctcaactctacccctgctcccattcctccctccggccatactgcctttgcagttggactctcagggattctgggcttggggtgtggggtggggtggagtcgcagaccagagctgtctgaactcacgtgtcagaagcctccaagcctgcctcccaaggtcctctcagttctctcccttcctctctccttatagacacttgctcccaacccattcactacaggtgaaggctctcacccccatccctgggggccttgggtgagtggcctgctaaggctcctccttgcccagactacagggcttaggacttggtttgttatatcagggaaaaggagtagggagttcatctggagggttctaagtgggagaaggactatcaacaccactaggaatcccagaggtgggatcctccctcatggctctggcacagtgtaatccaggggtgtagatgggggaactgtgaatacttgaactctgttcccccaccctccatgctcctcacctgtctaggtctcctcagggtggggggtgacagtgccttctctattgggcacagcctagggtcttgggggtcaggggggagaagttcttgattcagccaaatgcagggaggggaggcagatggagcccataggccaccccctatcctctgagtgtttggaaataaactgtgcaatcccctcaccctg

SEQ ID NO: 15513 - protein, 153 aa, Homo sapiens
MASGQGPGPPRQECGEPALPSASEEQVAQDTEEVFRSYVFYRHQQEQEAEGVAAPADPEMVTLPLQPSSTMGQVGRQLAIIGDDINRRYDSEFQTMLQHLQPTAENAYEYFTKIATRPAATPTACLRVASIGAVWWLFWASATVWPYTSTSMA

SEQ ID NO: 15514 - DNA, 2182 bp, Homo sapiens
ggtggccacagagcaacttcctctagagggagctgattggagccgggtgccgctggcacctctatgatcactggagtctcgcgggtccctcgggctgcacagggacaagtaaaggctacatccagatgccgggaatgcactgacgcccattcctggaaactgggctcccactcagcccctgggagcagcagccgccagcccctcgggacctccatctccaccctgctgagccacccgggttgggccaggatcccggcaggctgatcccgtcctccactgagacctgaaaaatggcttcggggcaaggcccaggtcctcccaggcaggagtgcggagagcctgccctgccctctgcttctgaggagcaggtagcccaggacacagaggaggttttccgcagctacgttttttaccgccatcagcaggaacaggaggctgaaggggtggctgcccctgccgacccagagatggtcaccttacctctgcaacctagcagcaccatggggcaggtgggacggcagctcgccatcatcggggacgacatcaaccgacgctatgactcagagttccagaccatgttgcagcacctgcagcccacggcagagaatgcctatgagtacttcaccaagattgccaccagcctgtttgagagtggcatcaattggggccgtgtggtggctcttctgggcttcggctaccgtctggccctacacgtctaccagcatggcctgactggcttcctaggccaggtgacccgcttcgtggtcgacttcatgctgcatcactgcattgcccggtggattgcacagaggggtggctgggtggcagccctgaacttgggcaatggtcccatcctgaacgtgctggtggttctgggtgtggttctgttgggccagtttgtggtacgaagattcttcaaatcatgactcccaagggtgccctttggggtcccggttcagacccctgcctggacttaagcgaagtctttgccttctctgttcccttgcaggggtcccccctcaagagtacagaagctttagcaagtgtgcactccagcttcggagggcccctgcgtgggggccagtcaggctgcagaggcacctcaacattgcatggtgctagtgggccctctctctgggcccaggggctgtggccgtctcctccctcagctctctgggacctccttagccctgtctgctaggcgctggggagactgataacttggggaggcaagagactgggagccacttctccccagaaagtgtttaacggttttagctttttataatacccttgtgagagcccattcccaccattctacctgaggccaggacgtctggggtgtggggattggtgggtctatgttccccaggattcagctattctggaagatcagcaccctaagagatgggactaggacctgagcctggtcctggccgtccctaagcatgtgtcccaggagcaggacctactaggagaggggggccaaggtcctgctcaactctacccctgctcccattcctccctccggccatactgcctttgcagttggactctcagggattctgggcttggggtgtggggtggggtggagtcgcagaccagagctgtctgaactcacgtgtcagaagcctccaagcctgcctcccaaggtcctctcagttctctcccttcctctctccttatagacacttgctcccaacccattcactacaggtgaaggctctcacccccatccctgggggccttgggtgagtggcctgctaaggctcctccttgcccagactacagggcttaggacttggtttgttatatcagggaaaaggagtagggagttcatctggagggttctaagtgggagaaggactatcaacaccactaggaatcccagaggtgggatcctccctcatggctctggcacagtgtaatccaggggtgtagatgggggaactgtgaatacttgaactctgttcccccaccctccatgctcctcacctgtctaggtctcctcagggtggggggtgacagtgccttctctattgggcacagcctagggtcttgggggtcaggggggagaagttcttgattcagccaaatgcagggaggggaggcagatggagcccataggccaccccctatcctctgagtgtttggaaataaactgtgcaatcccctcaccctg

SEQ ID NO: 15515 - protein, 211 aa, Homo sapiens; identical to SEQ ID NO: 1756

SEQ ID NO: 15516 - DNA, 2107 bp, Homo sapiens
agatgcgagcgcctgcgcaggtacgcacgctccgctggagcctggggtggcctggcagtcgtggccgagacgtgtttgctgcacttcggtgcgcacaggcactgcggtgccaacctcttggttccgccctccccccgcaggcgcccacgcgtgacctcggccgcccacaggccttcgactcttcccggactccaggtcccaggccgccccgctccaccctgcggatgatggagacaaagtcccccacaagcccctcatatggggcaagggggaaggtaccacctggggcggggcctggctccccactgagcagaggtgctggccaaggcgctccccttagtgagacaaggtttcaccatgttgcccaggcttttctcaaactcctgagctcaagcaatccgcccacctcagcctccgaaagtgctaggattataggcgtgagccactgcacccagccccaggtggcaagtctttctgataggcactgctccaaagtgaatcacactgtgctaagcccccgcaagggagtgcctttgcagcttacagctgcacactcgtcatctcaggaggtccttgcaacagtcccctttcacgggtaaagaaactgaggcctctactcaacctcacagagcaagctaatgccagactaaaacctctggcctccaaaccccatgccctttctttttgtaagctacacagactgtcagggcaaatgtccactggataaaagcatgagatgatgaatggacggaaattaaccaaaaaggtcatcaacacattttcaacagatccatcaatgtgcactcaaagaagctgagacaggcctaacctttaaaggctgatgtcaaggaaggggagcagcaggatggtactcggtctgacccagcggggtcgctcccctgagcctatgtgtgtttggagtggacgagaatgggagagagattagaaaaacagcagcatcatgtgaattacagatgcacaggaaagcttacagcctgtctagacaaattcacttatgttacagatgaggaaactgaggctcagaaagaggaagggacttgcccaaggccacatagcaaaggaatagcaaagttgagacaaaaataatggacattgtgactctgagtcaagtgagaaacagagagactgatggagaagtgtgtgtgtgtgtgtgtgtgtgtgtgtgtttatgtgcatgcagtgtgcactcactcagggggccagggtcctgaatttagaaacactaccaccaagaaggcattatgcctaccctacccaggcagtgggggctggagccagggcctgggggctggaaccagggcccagggcctggaggggatggtaagcctccagccccaccttctccaggaaggggttggtggtctggcacgggccaagcgtacctggccatccacaatgctcacctccaccacggtgatctctggccgggtaagcagctctcggccctcttggctgcctagcttccagaggcgggactcttgctgcattcccagaagcttcttcaactccgactccaggaaacctgagagccagagagatggcaagggacagggagatggcagggaacaggcaggagtaggatggagcagcccactgggaacccaaggacccggaggtgcaaccgctccctgagcctcatcccagctctgtgtggttcctgctcaccctcagccacagccctctcttcttccaggacgtagagccagccaggtaccacccctccttcgccctgccttccccaggaagctcactctttgagggccttctctggcagcggcagcatgagagcctgcgtcttcacccactggggacagcatgcaaagggcaggtatttgcccccaccaccaaccaactcaagagcctggatctggaacccaaactgcctgcactcaagtcccagctctgcccatcactagctgtgtgacatcgggcaagttctcactgtgaactggagatggcaataggacctacctcagagtcgtaaaatgcaggattttatgaaaagtgcttaaagagggtctgccccattaatggctatgtaaatgtgaaccacgattttcatcatattatgtatgctatcaccact

SEQ ID NO: 15517 - protein, 198 aa, Homo sapiens; identical to SEQ ID NO: 1758

SEQ ID NO: 15518 - DNA, 882 bp, Homo sapiens
atgggcaccctatcttaggcgttcaaataaaggactaggaagcaaacacccaagcaccggggaacagaacagaaagaaagacggaaggagccaagagttttggagccaactcctggagagggagcggctgaactgattcggaagttggatctctttgtacacaggaatgcggagagaaaaaaaacaaaacccaccccattgcttcatttcccctccaagcctgagcactttctattgtgcaatgaaaaggcttttcacgttgagaaaaatgaatcccgaatttgctctgcaaagggatgagcgcgcctctgggcgccagcctgctctcagctgggcgcggagaccgcgcggtggccgcagggcggccgcggccagggcgctccagggcgcgccctccgcgagcggctccggggtgacgcccgccggagagctggactcccccttccgcgggcgcctgcactggctcttagccagccgagggcccgggtgcagatagtccgggaaccccgagggcggagagctccccactacgcctgggcctcccagggatggcagctccgagagccccctagacccggtgccttgcaggacgcctctggagatcaggagggctggcggcgcattcggcgtccgggaggccgggccccggacgcgcgaggagcgcggggcgcgggaaggcaggcgggtgcacatgggtgccggcgggcgagctgcggggggagggggggcggggtgtggcctccccgcctcccgggcgggatttgcatgtgtgtggtggccccagacttcctgctccttctacgctgcaggtacgcgcgggccgggcggggcgggcgggcggcgggcgcgccaagacgtgggcacctcctcacccggaccccg

SEQ ID NO: 15519 - protein, 109 aa, Homo sapiens
MRREKKQNPPHCFISPPSLSTFYCAMKRLFTLRKMNPEFALQRDERASGRQPALSWARRPRGGRRAAAARALQGAPSASGSGVTPAGELDSPFRGRLHWLLASRGPGCR

SEQ ID NO: 15520 - DNA, 1602 bp, Homo sapiens
ggaaggagccaagagttttggagccaactcctggagagggagcggctgaactgattcggaagttggatctctttgtacacaggaatgcggagagaaaaaaaacaaaacccaccccattgcttcatttcccctccaagcctgagcactttctattgtgcaatgaaaaggcttttcacgttgagaaaaatgaatcccgaatttgctctgcaaagggatgagcgcgcctctgggcgccagcctgctctcagctgggcgcggagaccgcgcggtggccgcagggcggccgcggccagggcgctccagggcgcgccctccgcgagcggctccggggtgacgcccgccggagagctggactcccccttccgcgggcgcctgcactggctcttagccagccgagggcccgggtgcagatagtccgggaaccccgagggcggagagctccccactacgcctgggcctcccagggatggcagctccgagagccccctagacccggtgccttgcaggacgcctctggagatcaggagggctggcggcgcattcggcgtccgggaggccgggccccggacgcgcgaggagcgcggggcgcgggaaggcaggcgggtgcacatgggtgccggcgggcgagctgcggggggagggggggcggggtgtggcctccccgcctcccgggcgggatttgcatgtgtgtggtggccccagacttcctgctccttctacgctgcaggtacgcgcgggccgggcggggcgggcgggcggcgggcgcgccaagacgtgggcacctcctcacccggaccccgggccccgccgagccgcctcctggctcccgtggccgccagcccgccccggccgcaccgagcgtcgggatccgaggtgggagcgtacccctccccgctccccggacgcctcagtcctccgcactgagcttggccacgcgcccctaggcgccccccacgccctgggccccggagggccgcagccatgagtgaaatgtccagctttcttcacatcggggacatcgtctccctgtacgccgagggctccgtcaatggcttcatcagcactttggggtagccgaagcagagagggaaggcagcatatgtcagcgttttcttctctgcacttgtaagaaagatcgaagactttaagactttcactatttcttctaccgctatctactgcgctcttcaaagaggaaccaggagtacgggaggagcatgaaagtggacaaggagtgggaccattgaagcacagcaccacagggaagggtttaagcctccggatgactgcgcgcaggcctggataatatccagccttccacaagaagctggtggagcagagtgttccccaactcttccaaggaaaggagactccctttcgcggtctgctaattaacgggtgcattcccagacactggcgttaccacttgaccaaggagccctcaagcggcccttatgtgggcgtgacagagggctcacctcttgccttccaggtcacttctcacaatgtcccttcagcacctgaccctatacccaccggttattcctaggttatattagtaatgcaacaaagagtaatattaaaagctaaagattaatagtg

SEQ ID NO: 15521 - protein, 30 aa, Homo sapiens
MSEMSSFLHIGDIVSLYAEGSVNGFISTLG

SEQ ID NO: 15522 - DNA, 8192 bp, Homo sapiens
aggcgccccccacgccctgggccccggagggccgcagccatgagtgaaatgtccagctttcttcacatcggggacatcgtctccctgtacgccgagggctccgtcaatggcttcatcagcactttggggctggtggatgaccgctgtgtggtggagcccgcggccggggacctggacaacccccctaagaagttccgtgactgcctcttcaaggtgtgccccatgaaccgctactcggcccagaagcagtactggaaggccaagcagactaagcaggacaaggagaagatcgctgatgtggtgttgctgcagaagctgcagcatgcggcgcagatggagcagaagcaaaatgacacggagaacaagaaggtgcatggggatgtcgtgaagtatggcagtgtgatccagctcctgcacatgaagagcaacaagtacctgacagtgaacaagcggcttccggccttgctggagaagaacgccatgcgggtgactctggatgccacaggcaacgagggttcctggctcttcatccagcccttctggaagctgcggagcaacggggacaacgtggtcgtgggggacaaggtgatcctgaatcctgtcaatgccgggcagcctctgcatgccagcaattacgagctcagcgacaacgccggctgcaaggaggtcaattctgtgaactgcaacaccagctggaagatcaacctgtttatgcagtttcgggaccacctggaggaggtgttgaaagggggagacgtggtgcggctgttccatgcggagcaggagaagttcctgacgtgtgacgagtacaagggcaagctgcaggtgttcctgcgaactacactgcgccagtctgccacctcggccaccagctccaatgctctctgggaggtggaggtggtccaccacgacccctgccgtggaggagctgggcactggaatggcttgtaccgcttcaagcacctggctacaggcaactacctggctgctgaggagaaccccagttacaaaggtgatgcctcagatcccaaggcagcaggaatgggggcacagggccgcacaggccgcaggaatgctggggagaagatcaagtactgcctggtggctgtgcctcatggcaatgacatcgcctctctctttgagctggaccccaccaccttgcagaaaaccgactctttcgtgccccggaactcgtacgtccggctgcggcacctctgcaccaacacgtggattcagagcaccaatgtgcccattgacatcgaggaggagcggcccatccggctcatgctgggcacctgccccaccaaggaggacaaggaggcctttgccatcgtgtcagtgcccgtgtctgagatccgagacctggactttgccaatgacgccagctccatgctggccagtgccgtggagaaactcaacgagggcttcatcagccagaatgaccgcaggtttgtcatccagctgctggaagacctggtgttctttgtcagcgatgtccccaacaatgggcagaatgtcctggacatcatggtcactaagcccaaccgggaacggcagaagctgatgagggagcagaacatcctcaaacaggtctttggcattctgaaggccccgttccgtgagaaggggggtgaaggtcccctggtgcggctggaggagctgtcagaccagaagaacgccccctaccagcacatgttccgcctgtgctaccgcgtgttgcggcattcccaggaggactaccgcaagaaccaggagcacattgccaagcagtttgggatgatgcagtcccagattggctacgacatcctggccgaggacaccatcactgccctgctgcacaacaaccgcaagctcctggaaaagcacatcaccaagaccgaggtggagaccttcgtcagccttgtgcgcaagaaccgggagcccaggttcctggactacctctctgacctgtgtgtgtccaaccacatcgccatccccgtcacccaagagctcatctgcaagtgtgtgctggaccccaagaacagtgacattctcatccggaccgagcttcggcccgtgaaggagatggcccaatcccacgagtacctgagcatcgagtactcagaagaggaagtgtggctcacgtggactgacaagaataacgagcatcatgagaagagtgtgaggcagctggcccaggaggcgcgggccggcaacgcccacgacgagaatgtgctcagctactacaggtaccagctgaagctctttgcccgcatgtgcttggaccgccagtacttggccatcgacgagatctcccagcagctgggcgtggacctgattttcctgtgcatggcagacgagatgctgccctttgacctgcgcgcctccttctgccacctgatgctgcacgtgcacgtggaccgtgacccccaggagctggtcacgccggtcaagtttgcccgtctctggactgagatccccacagccatcaccatcaaggactatgattccaacctcaacgcgtcccgagatgacaagaagaacaagtttgccaacaccatggagttcgtggaggactacctcaacaatgtagtcagcgaggccgtgccctttgccaacgaggagaagaacaagctcacttttgaggtggtcagcctggcgcacaatctcatctacttcggcttctacagcttcagcgagctgctgcggctcactcgcacactgctgggcatcatcgactgtgtgcaggggcccccggccatgctgcaggcctatgaggaccccggtggcaagaatgtgcggcggtccatccagggcgtggggcacatgatgtccaccatggtgctgagccgcaagcagtccgtcttcagtgcccccagcctgtctgctggggccagtgctgctgagccgctggacagaagcaagtttgaggagaatgaggacattgtggtgatggagaccaagctgaagatcctggaaatccttcagttcatcctcaatgtccgcctggattaccgcatatcctacctgctgtctgtcttcaagaaggagtttgtggaggtgtttcccatgcaggacagtggggctgatggcacagcccctgccttcgactctaccactgccaacatgaacctggatcgcatcggggagcaggcggaggccatgtttggagtggggaagacaagcagcatgctggaggtggatgacgagggcggccgcatgttcctgcgcgtgctcatccacctcaccatgcacgactatgcgccgctggtctcgggtgccctgcagctgctcttcaagcacttcagccagcgccaggaggccatgcacaccttcaagcaggttcagctgctgatctcagcgcaggacgtggagaactacaaggtgatcaagtcggagctggaccggctgcggaccatggtggagaagtcagagctgtgggtggacaagaagggcagtggcaagggtgaggaggtggaggcaggcgccgccaaggacaagaaagagcgtcccacggacgaggagggctttctgcacccaccaggggagaaaagcagtgagaactaccagatcgtcaagggcatcctggaaaggctgaacaagatgtgcggggttggggagcaaatgaggaagaagcagcaacggctgctgaagaacatggatgcccacaaggtcatgctggacctgctgcagatcccctatgacaagggtgatgccaagatgatggagatcctgcgctacacgcaccagttcctgcagaagttctgtgcagggaaccccggcaaccaggccctgctgcacaaacacctgcacctcttcctcacgccagggctcctggaggcagagaccatgcagcacatcttcctgaacaactatcagctctgctccgagatcagcgagcctgtgttgcagcacttcgtgcacctgctggccacgcacgggcgccatgtgcagtacctggacttcctgcacaccgtcattaaggccgagggcaagtacgtcaagaagtgccaggacatgatcatgactgagctgaccaatgcaggtgacgatgtggtcgtgttctacaatgataaggcatcgctggcccacctgctggacatgatgaaggccgcccgcgacggcgtggaggaccacagccccctcatgtaccacatttccctggtggacctgctggccgcctgtgccgagggcaaaaacgtctacactgagatcaagtgcacctccctgctgccgctggaggacgtggtgtctgtggtgacgcatgaggactgcatcactgaggtgaaaatggcctatgtgaacttcgtgaaccactgctacgtggacacggaggtggagatgaaggagatctacaccagcaaccacatctggacgctctttgagaacttcaccctggacatggcccgggtctgcagcaagcgtgagaagcgcgtggctgaccccaccttggagaagtacgtgctgagcgttgtgctggacaccatcaacgccttcttcagctccccattctctgagaacagcacttccctgcagacacaccagacgattgtggtgcagctgctgcagtctaccacacgcctcctcgagtgtccgtggctacagcagcagcacaagggctccgtggaggcctgcatccggaccctcgccatggtggccaagggccgggccatcttgctgcccatggacctggatgcccacatcagctcgatgctcagcagtggagccagctgtgcagctgccgcccagcggaacgcctccagctacaaggcaaccacgcgggccttcccccgcgtcacccccaccgccaaccagtgggactacaagaacatcattgagaagctgcaggacatcatcacagccctggaggagcggctgaagcccctggtacaggctgagctgtccgtgctggtggatgtcctgcactggcctgagctgctcttcctggagggcagtgaggcctaccagcgctgcgagagtgggggcttcctgtccaagctgatccagcacaccaaggacctcatggagtcggaggagaagctgtgcatcaaggtgctgcggaccctgcagcagatgctgctcaagaagaccaagtacggggaccggggcaaccagctgcgcaagatgctgctgcaaaactacctccagaaccggaagtccacctcgcggggggaccttcccgaccccataggcactggcctggacccagactggtcggcaatcgcagccacccagtgccggctggacaaggagggggccaccaagttggtatgcgacctcatcaccagcaccaagaacgagaagatcttccaggagagcatcggcctggccatccacctgctggatggtggcaacacagagatccagaaatccttccacaacctgatgatgagtgacaagaagtcagagcgcttcttcaaggtgctgcacgaccgcatgaagcgggcccagcaggagaccaagtccacggtggcagtcaacatgaatgacctgggcagccagccacatgaggaccgcgagccagtcgaccccaccaccaaaggccgcgtggcctccttctcgatacctggctcctcatcccgctactcgctgggccccagcctgcgccgggggcacgaggtgagcgaacgtgtgcagagcagtgagatgggcacatccgtgctcatcatgcagcccatcctgcgctttctgcagctgctgtgtgagaaccacaaccgggacctgcagaacttcctgcgctgtcagaacaacaaaaccaactacaacttggtatgcgagacgctgcagttcctggacatcatgtgcggcagcaccacgggcggcctggggctgctggggctctacatcaatgaggacaacgtgggcctcgtcatccagaccttggagaccctcactgagtactgccagggcccctgccatgagaaccagacttgcattgtgactcacgagtccaatggcatagacatcatcaccgcactgatcctcaatgacatcagccccctgtgcaagtaccgcatggatctggtgctgcagctcaaggacaatgcctccaagctgctcctggctctgatggagagccggcatgacagtgaaaatgctgagcgaatcctcatcagcctgcggccccaggagctggtggacgtcatcaagaaggcctacctgcaggaggaagagcgtgagaactcggaggtgagcccacgtgaagtgggccataacatctatatcctggcgctgcagctctccaggcacaataaacagctgcagcacctgctgaagccggtgaagcgcattcaagaggaggaggccgagggtatctcttccatgctcagcctcaacaacaagcagctgtcacagatgctcaagtcctcagcgccagcacaggaggaggaggaagaccccctggcctactatgagaaccacacgtcccagatcgagattgtgcggcaggaccgcagcatggagcagatcgtgttcccagtgcccggcatctgccagttcctgacggaggaaaccaagcaccggctcttcaccactactgagcaggacgagcagggcagcaaagtgagcgacttcttcgaccagtcctccttcctgcacaacgagatggagtggcagcgcaagctccgcagcatgccgctgatctactggttctcccgccgcatgaccctgtggggcagcatctccttcaacctggccgtgtttatcaacatcatcattgccttcttctacccttacatggagggcgcgtccacaggcgtgctggactcccctctcatctcattgctcttctggatcctcatctgcttctccatcgcggccctgttcaccaagcgctacagcatccgccccctcatcgtggcgctcatcctgcgctccatctactatctgggcatcgggcccacactcaacatcctgggtgccctcaatctgaccaacaagatcgtgtttgtggtgagcttcgtgggcaaccgtggcaccttcatccggggctataaggccatggtcatggacatggaattcctctaccacgtgggctacatcctgaccagtgtcctgggcctctttgctcatgagctgttctacagcatcctgctctttgacctcatctaccgcgaggagacgctgttcaacgtcatcaagagtgtgacccgcaatggccgctccatcctgctgacagccctgctggccctcatcctggtctacctcttctccatcgtcggcttcctcttcctcaaggatgacttcattctcgaggtcgaccggctgcccaacaaccactccacagccagccccctggggatgccacatggagctgctgcatttgtggacacctgcagtggggacaagatggactgtgtctcagggctctcggtgcctgaggtcctggaagaggacagggagctggacagcacagagcgggcctgtgacactctgttgatgtgcatcgtcactgtcatgaaccatgggctacgcaacggtggtggcgtgggcgacattctccgcaagccctccaaagatgagtctctcttcccagcccgagtggtctatgacctcctgttcttcttcatcgtcatcatcattgtgctgaacctcatctttggggtaatcatcgacaccttcgctgacctgcgtagtgagaagcagaagaaggaggagattcttaagacgacatgcttcatctgtggtctggagagggacaagtttgataacaagacagtgtcatttgaggaacacatcaagctggagcacaacatgtggaactacttgtacttcattgtgctggtccgcgtgaagaacaagaccgactacacgggccctgagagctacgtggcccagatgatcaagaacaagaacctggactggttcccccggatgcgggccatgtcccttgtcagcaatgagggcgagggggagcagaatgagattcggattctccaggacaagctcaactccaccatgaagctggtgtcccacctcactgcccagctcaacgagctcaaggagcagatgacggagcagcggaaacgcaggcaacgcctaggctttgtggatgtccagaactgcattagccgctgaggagagccaccgaaggccccaacaggggatgctcatcactggagactgcgactgggaagaacactgccccctccctcgggttgggtggcccagccagctggccagcctccactcccactctgccagacaccctgaca

SEQ ID NO: 15523 - protein, 2671 aa, Homo sapiens
MSEMSSFLHIGDIVSLYAEGSVNGFISTLGLVDDRCVVEPAAGDLDNPPKKFRDCLFKVCPMNRYSAQKQYWKAKQTKQDKEKIADVVLLQKLQHAAQMEQKQNDTENKKVHGDVVKYGSVIQLLHMKSNKYLTVNKRLPALLEKNAMRVTLDATGNEGSWLFIQPFWKLRSNGDNVVVGDKVILNPVNAGQPLHASNYELSDNAGCKEVNSVNCNTSWKINLFMQFRDHLEEVLKGGDVVRLFHAEQEKFLTCDEYKGKLQVFLRTTLRQSATSATSSNALWEVEVVHHDPCRGGAGHWNGLYRFKHLATGNYLAAEENPSYKGDASDPKAAGMGAQGRTGRRNAGEKIKYCLVAVPHGNDIASLFELDPTTLQKTDSFVPRNSYVRLRHLCTNTWIQSTNVPIDIEEERPIRLMLGTCPTKEDKEAFAIVSVPVSEIRDLDFANDASSMLASAVEKLNEGFISQNDRRFVIQLLEDLVFFVSDVPNNGQNVLDIMVTKPNRERQKLMREQNILKQVFGILKAPFREKGGEGPLVRLEELSDQKNAPYQHMFRLCYRVLRHSQEDYRKNQEHIAKQFGMMQSQIGYDILAEDTITALLHNNRKLLEKHITKTEVETFVSLVRKNREPRFLDYLSDLCVSNHIAIPVTQELICKCVLDPKNSDILIRTELRPVKEMAQSHEYLSIEYSEEEVWLTWTDKNNEHHEKSVRQLAQEARAGNAHDENVLSYYRYQLKLFARMCLDRQYLAIDEISQQLGVDLIFLCMADEMLPFDLRASFCHLMLHVHVDRDPQELVTPVKFARLWTEIPTAITIKDYDSNLNASRDDKKNKFANTMEFVEDYLNNVVSEAVPFANEEKNKLTFEVVSLAHNLIYFGFYSFSELLRLTRTLLGIIDCVQGPPAMLQAYEDPGGKNVRRSIQGVGHMMSTMVLSRKQSVFSAPSLSAGASAAEPLDRSKFEENEDIVVMETKLKILEILQFILNVRLDYRISYLLSVFKKEFVEVFPMQDSGADGTAPAFDSTTANMNLDRIGEQAEAMFGVGKTSSMLEVDDEGGRMFLRVLIHLTMHDYAPLVSGALQLLFKHFSQRQEAMHTFKQVQLLISAQDVENYKVIKSELDRLRTMVEKSELWVDKKGSGKGEEVEAGAAKDKKERPTDEEGFLHPPGEKSSENYQIVKGILERLNKMCGVGEQMRKKQQRLLKNMDAHKVMLDLLQIPYDKGDAKMMEILRYTHQFLQKFCAGNPGNQALLHKHLHLFLTPGLLEAETMQHIFLNNYQLCSEISEPVLQHFVHLLATHGRHVQYLDFLHTVIKAEGKYVKKCQDMIMTELTNAGDDVVVFYNDKASLAHLLDMMKAARDGVEDHSPLMYHISLVDLLAACAEGKNVYTEIKCTSLLPLEDVVSVVTHEDCITEVKMAYVNFVNHCYVDTEVEMKEIYTSNHIWTLFENFTLDMARVCSKREKRVADPTLEKYVLSVVLDTINAFFSSPFSENSTSLQTHQTIVVQLLQSTTRLLECPWLQQQHKGSVEACIRTLAMVAKGRAILLPMDLDAHISSMLSSGASCAAAAQRNASSYKATTRAFPRVTPTANQWDYKNIIEKLQDIITALEERLKPLVQAELSVLVDVLHWPELLFLEGSEAYQRCESGGFLSKLIQHTKDLMESEEKLCIKVLRTLQQMLLKKTKYGDRGNQLRKMLLQNYLQNRKSTSRGDLPDPIGTGLDPDWSAIAATQCRLDKEGATKLVCDLITSTKNEKIFQESIGLAIHLLDGGNTEIQKSFHNLMMSDKKSERFFKVLHDRMKRAQQETKSTVAVNMNDLGSQPHEDREPVDPTTKGRVASFSIPGSSSRYSLGPSLRRGHEVSERVQSSEMGTSVLIMQPILRFLQLLCENHNRDLQNFLRCQNNKTNYNLVCETLQFLDIMCGSTTGGLGLLGLYINEDNVGLVIQTLETLTEYCQGPCHENQTCIVTHESNGIDIITALILNDISPLCKYRMDLVLQLKDNASKLLLALMESRHDSENAERILISLRPQELVDVIKKAYLQEEERENSEVSPREVGHNIYILALQLSRHNKQLQHLLKPVKRIQEEEAEGISSMLSLNNKQLSQMLKSSAPAQEEEEDPLAYYENHTSQIEIVRQDRSMEQIVFPVPGICQFLTEETKHRLFTTTEQDEQGSKVSDFFDQSSFLHNEMEWQRKLRSMPLIYWFSRRMTLWGSISFNLAVFINIIIAFFYPYMEGASTGVLDSPLISLLFWILICFSIAALFTKRYSIRPLIVALILRSIYYLGIGPTLNILGALNLTNKIVFVVSFVGNRGTFIRGYKAMVMDMEFLYHVGYILTSVLGLFAHELFYSILLFDLIYREETLFNVIKSVTRNGRSILLTALLALILVYLFSIVGFLFLKDDFILEVDRLPNNHSTASPLGMPHGAAAFVDTCSGDKMDCVSGLSVPEVLEEDRELDSTERACDTLLMCIVTVMNHGLRNGGGVGDILRKPSKDESLFPARVVYDLLFFFIVIIIVLNLIFGVIIDTFADLRSEKQKKEEILKTTCFICGLERDKFDNKTVSFEEHIKLEHNMWNYLYFIVLVRVKNKTDYTGPESYVAQMIKNKNLDWFPRMRAMSLVSNEGEGEQNEIRILQDKLNSTMKLVSHLTAQLNELKEQMTEQRKRRQRLGFVDVQNCISR

SEQ ID NO: 15524 - DNA, 1970 bp, Homo sapiens
ctgccaggacgccgcgcctccgccagacgcgcccgggggcggggcgggtgatgtgccgctgcgcccgcgctttcctgctctcccccgctcgtctgcccgcggagggcggccccggggtacccctccccacctgatggcaccgacgtccctggccttagcgccccaccccgactcttcctcatggcgggcacctgtgtttatcaaactagccggaccacaggtgccctgctgagtgcgcaccgggcgctgaaaccagagccgcgctctacagggtccagagtgaggcccacagagtggatggaacccctgagccacacagctggtcagagaatggcacagacacaacccaggcctccatctactcgacagacctcaccacgagcctactatgtgctgggtgtggtccccaccctctgggatctcctgcgaccacgctgagtgccgaggacaggagccctgtctacacctgtgtgtccccttctcccctccaggaccagcccagcagaggctcaggagcccagaggacaacagtccctgcagtgcgccttccatccactgggaggcacaagaccagtctgaacagcagagggagcaggaggatggggctacagggaaagggtcctggctggaggcctgtgggcaggcagggctgttctgggccctctggagaggagctggttgacagcttgttctagggttgcaggagggcacagtccctgaaatgcccacggggtctacaccccaagaccttgatctgaggtaggagaggaagacagctgcatcccattctgccccattccaccctgcgtggactttgagatccaggtgggcgccatgggaaaggtagcagggtgggtcagtgctgtctggaaagattagataaggaggaggaagggagctagatagaagtggggcaggtgactatcaaggagcctgactcaaaacctaccaccttggccaccatcagagcaccatgggagggggaatgacagactgggggaatgacagactggggaaatccccgagggaccctgaacaaccctccccccacccccattcagctgtggatgagaaaactgtccctggggcatggaggagaaactgacccgcccaggtcacacaagttaatggaacagcaagttccagatcccaggtcttctggctcccagccccagacactggctgtgggtggaggattacccaggtgccaaggcaagagactgaaggcacaaactgtttcagtataataaaaaaaatagaataagaatagtcataatacaaattagatatagagatgatcatggacaattagcaatcactattaatctttagcttttaatattactctttgttgcattactaatataacctaggaataaccggtgggtatagggtcaggtgctgaagggacattgtgagaagtgacctggaaggcaagaggtgagccctctgtcacgcccacataagggccgcttgagggctccttggtcaagtggtaacgccagtgtctgggaatgcacccgttaattagcagaccgcgaaagggagtctcctttccttggaagagttggggaacactctgctccaccagcttcttgtggaaggctggatattatccaggcctgcgcgcagtcatccggaggcttaaacccttccctgtggtgctgtgcttcaatggtcccactccttgtccactttcatgctcctcccgtactcctggttcctctttgaagagcgcagtagatagcggtagaagaaatagtgaaagtcttaaagtcttcgatctttcttacaagtgcagagaagaaaacgctgacatatgctgccttccctctctgcttcggctacctaaaagggaagggccgcctatcctgtaatcacatgacttgcttcaccttgtcaatcacttagaagattcaccctccttaccctgcccccttgtcttgtatgcaataaatatcagtgacccc

SEQ ID NO: 15525 - protein, 85 aa, Homo sapiens
MAGTCVYQTSRTTGALLSAHRALKPEPRSTGSRVRPTEWMEPLSHTAGQRMAQTQPRPPSTRQTSPRAYYVLGVVPTLWDLLRPR

SEQ ID NO: 15526 - DNA, 688 bp, Homo sapiens
ggctggtggatgaccgctgtgtggtggagcccgcggccggggacctggacaacccccctaagaagttccgtgactgcctcttcaaggtgtgccccatgaaccgctactcggcccagaagcagtactggaaggccaagcagactaagcaggacaaggagaagatcgctgatgtggtgttgctgcagaagctgcagcatgcggcgcagatggagcagaagcaaaatgacacggagaacaagaaggtgcatggggatgtcgtgaagtatggcagtgtgatccagctcctgcacatgaagagcaacaagtacctgacagtgaacaagcggcttccggccttgctggagaagaacgccatgcgggtgactctggatgccacaggcaacgagggttcctggctcttcatccagcccttctggaagctgcggagcaacggggacaacgtggtcgtgggggacaaggtgatcctgaatcctgtcaatgccgggcagcctctgcatgccagcaattacgagctcagcgacaacgccggctgcaaggaggtcaattctgtgaactgcaacaccagctggaagatcaacctgtttatgcagtttcgggaccacctggaggaggtgttgaaaggggtaaggactgggaacccctgccctgcccagctggccacctagccctccccaccagggccctcttc

SEQ ID NO: 15527 - protein, 189 aa, Homo sapiens
MNRYSAQKQYWKAKQTKQDKEKIADVVLLQKLQHAAQMEQKQNDTENKKVHGDVVKYGSVIQLLHMKSNKYLTVNKRLPALLEKNAMRVTLDATGNEGSWLFIQPFWKLRSNGDNVVVGDKVILNPVNAGQPLHASNYELSDNAGCKEVNSVNCNTSWKINLFMQFRDHLEEVLKGVRTGNPCPAQLAT

SEQ ID NO: 15528 - DNA, 3925 bp, Homo sapiens
accagtgcctatggggtcgggaaggtccccccgcgaggtggacttccggttctggaggtagttttgcagcagcatcttgcgcagctggttgccctgggggaggatgggagtgaggccccattgtgggtacagcccaccactgaccactggcctgacgggcttgaccctgagcccctgggtactcctgactggcccacccagcacttgccccaccagggcactcacccggtccccgtacttggtcttcttgagcagcatctgctgcagggtccgcagcaccttgatgcacagcttctcctccgactccatgaggtccttggtgtgctggatcagcctgagccggccaaggaggcagctcagggcagccccacactgcctccctccagctacttccccaccccatcccaggcaggaacacccccaggccctctgacccagtgagcctgtctagtccccaccgggcccttctctgtcccctgccgctgcacccctgctgcccccatgccccagtgtctcgctcacttggacaggaagcccccactctcgcagcgctggtaggcctcactgccctccaggaagagcagctcaggccagtgcaggacatccaccagcacggacagctcagcctgtaccaggggcttcagccgctcctccagggctgtgatgatgtcctggggtgggcagggcagagtcattgccaggcccaagaaatgacccgggtgtgactgccattcctccgacccaaacgccaaacagccccacagattgccctgcctctgtctgaggggcccacacccacagagacaccctgaacacagcgtgatgtctgtctgctcagagccctggctgggagctgccaagcctggcttctctcccagctctgtgtgaccttgggcaaaccccttagcctctctgagcctcagtctcctgccacgtggggaaaataatccaccacaccccctctacaggccaacgagacagcgcacagaaatgtgctgcatagacaggagggcgctgcaggagtgaggggtggtcccgaccccctcatgagctccaaccccactagcaggcctctgggttctccaggcttcctctggaaggaggttccccagtcccttgctgctgggtcggcccttagcagccccagagtgtagagaagccaaccagccccttcctggaagtgtgggcaggacaggaagaaacactccccgagaacttgcccctccaaagtaggggagctgctgactcaaccaagcagctcccgaggcagatgccaggcagccccacacccacctgcagcttctcaatgatgttcttgtagtcccactggttggcggtgggggtgacgcgggggaaggcccgcgtggttgccttgtagctggaggcgttccgctgggcggcagctgcacagctggctccactgctgagcatcgagctgatgtgggcatccaggtccatgggcagcaagatggcccggcccttggctgggtgggaagggagggagtgctggagtgctggtgcgggggcagttcagccagccagaggccaggctcagggctgccacaccaggagacagagtgaactagaccaagggtctgggagacagagaccccccccaccccggcctatgcttgagggactgagaggctttcttccccttgttgggtaaaaggagtttctgcctctttgattccccccggctctaccctgacttccccttcctctctctcacctgtcctctcttcttccccaactgtccctaacaatccacaggcctgctcctgcctgagcccatctgcaaatacccataaaaaactagctggagaatgtcggcgagcatccttctctggggaactgacccagaggagaaaacagcttctctcaattgccaggatgaggcagacgccaagaagaacttactgacaaccacctgggagcaggagatgggcgagcttagggataaagtgtttattaggagggcaggcgtccccactgtgagcggcaggaggagtggtttggggctggccagtgccccggcacactcacccaccatggcgagggtccggatgcaggcctccacggagcccttgtgctgctgctgtagccacggacactcgaggaggcgtgtggtagactgcagcagctgcaccacaatcgtctggtgtgtctgcaagaagtcacagagcccgctgctgcagcccaggcccccaccctgggcaaccccaggtccaggaaccagggcccaatcagaatgggcatgggtggagagacggagccttcactagccaccatgtgcctctgtgccagttggaaaaagctaggcaagtcggccctggggtggtgggagaggagaagctcacctgcagggaagtgctgttctcagagaatggggagctgaagaaggcgttgatggtgtccagcacaacgctcagcacgtacttctccaaggtggggtcagccacgcgcttctcacgcttgctgcagacctgaggcaggagagagggatggctgggggctcctcacatggggcccctccactcccacacctcctggggggcttcacccacacccctcacagggacagacccgggccatgtccagggtgaagttctcaaagagcgtccagatgtggttgctggtgtagatctccttcatctccacctccgtgtccacgtagcagtggttcacgaagttcacataggccattttcacctgggcagtgggcgggaggtcaggggcgcaagcagggccgcctggccaggctctccctgccacaatgctcctgtcccctggcctccggttcctgcccacttccctggctttgcttcacccactcttcctgtcccgtggctttacccaccccttcgccccatctccagccgtcttgcccagtctcccgatccccacctcagtgatgcagtcctcatgcgtcaccacagacaccacgtcctccagcggcagcagggaggtgcacttgatctcagtgtagacgtttttgccctcggcacaggcggccagcaggtccaccagggaaatgtggtacatgagggggctgtggtcctccacgccgtcgcgggcggccttcatcatgtccagcaggtgggccagcgatgccttatcattgtagaacacgaccacatcgtcacctgcattggtcagctgcgggtgggagggggcacgtgtcacactctctcggtccagcaagccctgggctctcctctccgttgcttaccagggagaaactgggactctgaccacagcccttacctgaaatcaggaaaaccctcccctggctgggatttgggggttccccagctgatgtctcaggccctctgccagcagagatattgaccccatgacccagaaagtccccgcttctccccactggaaagaagtcccataggggtcatctcagaggcagcttcctccaggaagcctcgctaatcccgccttgctcaccccctccctcccctgtgctcccgcagcagttacttaaaccctcctcactgagcacacacctctcgtgccagcgactgcattattcgcagtaatataataatagaaattaataaaactaacactgtacagcagttccagcacatcatgtcttgtttatgatgtcctaatctcccttcagtgtttgcttctttctccccctgccgcctacactgtcagatgctcaggggcagggaccacgtctgttccagatttagactcagccctgtatccttcgtgccttcactcaacaggtgtctgttgagaacctactatgcgccacacactggggccctggcgatgcacacaaaggatggggtccctgcccgtgccccccaggagctgacactcagctgatgtcccccatgcatgtacagtccgtggcacgtagcaggtgcttcctgattttaaataaacgacgacaagtgac

SEQ ID NO: 15529 - protein, 48 aa, Homo sapiens
MGMGGETEPSLATMCLCASWKKLGKSALGWWERRSSPAGKCCSQRMGS

SEQ ID NO: 15530 - DNA, 3725 bp, Homo sapiens
ccccggcaccagtctgtctgtccagtccttttgctgctgggctgggagcagtgaaattacagagtcttcatctgcctgacccaagcctggccctcaaggccctgatggccactcctggtggccatctgacccctttctcctgtacagtggtggttcaagcctggactctggagctggaccagggctttgcatctcagctgggctactactagctgtgtaactgggcaagtttcttaactgccccatgcctcagtttcctcacctgtaaaatggggataacaacagcccctgcattctaaaataattgtgagatgaaatgagctaatgcatggaaagcacttacactgtttcctggcatgcagcaagtacattttaagagttggctggtattcagccacccgtttcacccctcgtgccttcccctgggccactccctttctgtgaccttagaattccaggtttctcgagaagctcccctgacaggcccacccagcttggatacgactaagtgcagacctccctggaggagccttgggaaactgtctggagcccaggcagccctcagggttccagtggcagccccagtgagagtggccggcccagcccctcaaggtgccatccctatctcaaccccatcctgcagctctttgacctcatctaccgcgaggagacgctgttcaacgtcatcaagagtgtgacccgcaatggccgctccatcctgctgacagccctgctggccctcatcctggtctacctcttctccatcgtcggcttcctcttcctcaaggatgacttcattctcgaggtcgaccggctgcccaacaaccactccacaggtcttggaggcttcctctcctgggcaggttgtggggaatgaggttgggtctcacaaatgtctggcgtcaggaccaggacctgcagcgcttacctcaccaggctcccgtctgcttctcctcttggcttctggggacgtctagctaacaccagtctgcctcgctcttttctggaacacactgagtgggtgggagagccttgggtctctggcccctaaggaaccccttgcttgagggctggagtcccttgaactgtcattcatgttaaacccagtatttgcagaaactgcccgtgtgccaggcctaggggtacagagacccctccctgcccttagtgtgcaacccagtcgggggcagaagcgtgatgacccttcactgtggctggacagtggagggctggcgatccaggaccagggaaggtttcctggaggatgtgacactggggacagagccaggggataaggccaggcactggacctcctgatgatctcatccatatcccctccagccagccccctggggatgccacatggagctgctgcatttgtggacacctgcagtggggacaagatggactgtgtctcagggctctcggtgcctgaggtcctggaagaggacagggagctggacagcacagagcgggcctgtgacactctgttgatgtgcatcgtcactgtcatgaaccatgggctacgcaacggtggtggcgtgggcgacattctccgcaagccctccaaagatgtgagcactcctgcccactcccaaacctgtggggcccaagccactgtccagatcagcaactgtggagagtcctgtccttggcctcgcgtcagatattcagggttgaaccccctcccccgaacttgtatccacttttccctgctttccacacctggccaattccatgatattactgcttagctgccccctcaccctcccattccataaggaaagactttggcaaccaaactttgccccagggctagggatggtgaccactggctttcctagcccacagcaggtgggcagagggcggagctgagtcagctttatcaggaggcctcatgatttggcttgggcagccacattcccgaatgtcaggccttcccctgttgcttgggagtgagaggccgcctccctggccagacagagggtttctggaatgtgtgaggccaggcgtcctgagggtgggcagaggtgttcagagctgcctctttccctcatcaatgttaggggcagagacacaccgagactcgtagccctacctccccgccagactccttctgcaggcctccaccccggcgtgtcctgagtccacgctttcctaacccaaactcagggcttctgcttgcaattcttgctctgtggagccaggttgggtccactctgccatctgatggcccccaggccagaggccctcatttccttctgctaggggctgggtcctcaatatcacagccctggccccaacctgagtcctatcttgccccagtgaatgtggggaccaccgggcccagcctccctgcctcatcccctgcaggagtctctcttcccagcccgagtggtctatgacctcctgttcttcttcatcgtcatcatcattgtgctgaacctcatctttggggtaatcatcgacaccttcgctgacctgcgtagtgagaagcagaagaaggaggagattcttaagacgacatgcttcatctgtggtctggagagggacaagtttgataacaagacagtgtcatttgaggaacacatcaagctggagcacaacatgtggaactacttgtacttcattgtgctggtccgcgtgaagaacaagaccgactacacgggccctgagagctacgtggcccagatgatcaagaacaagaacctggactggttcccccggatgcgggccatgtcccttgtcagcaatgagggcgagggggagcagaatgagattcggattctccaggacaagctcaactccaccatgaagctggtgtcccacctcactgcccagctcaacgagctcaaggagcagatgacggagcagcggaaacgcaggcaacgcctaggctttgtggatgtccagaactgcattagccgctgaggagagccaccgaaggccccaacaggggatgctcatcactggagactgcgactgggaagaacactgccccctccctcgggttgggtggcccagccagctggccagcctccactcccactctgccagacaccctgacacccacccaggctttgaagagcatggagggggagcctcagagctgacagtcctgcttagagcccttaaaaagacttgaaagttcactgggactcagtttaccttaatgccttagcagaagataaatcctacctagagacctttgttccttaaagcaataactgacaactctttgtagtcctccttgtgggtagttaagagtggggtcacccctttaactccaagcactacattttggcggctgccggcctctgggggaggtggcagttatgctgttactagtgattttagggctttgttatttaacttatttcaagggtgctgtgctcagccctgcccatggctgtgcagctccctccgtgcctcagatctgctgtagccagtgcagacctcactgtcgtgtccatgccacccccggcatggctccaggtggcctggtgactccatgatggacgatcttgctcccaggacctgcctcttcccaggcttcctggggaagagttgtacgcccaggcaacaagggctgagctgcgcttgcgtggctgtttcatgaccgcttgtttttctccttttggtgtaatgttttacaaatcctttggcctgagaactaatatgttaattgccttaaataaattaatagaaatctagtccgttaaaaa

SEQ ID NO: 15531 - protein, 200 aa, Homo sapiens [sequence omitted]

SEQ ID NO: 15532 - DNA, 4287 bp, Homo sapiens
tgagaatttgttttcacagcaagcctcatatttttgttgcaaattgtgtggcgtaagcttaccaaatgtttcctctgacaggacaagaaaagacctgcagcaccttgtagtgagaggctttgagggcctggcaagtctgaaatgtgctgtgttctgggttatgtgtgtgtccaccctgggattggggtcatggaaagcgcctaagggaggcctcagtgtccacctggacactggaaacatggacttctggaaaagctccagagcaggggcttttttctgttaccttttttggtcagaaaagatactctttttttctccagtagttttgttaacgtgaaaatttaggctggtaaagcaaaacaatattataagaatatctaaaatttaacatgcacgtaaaattagatttcatggaacattagccctagagactttagacaaatggttccgtactggggggatggttttgccccccaggggacatgtggcaatgtctggagacatttttagttgtcacaactggtggtgcgggcagcggtgctactggcattagtgggtagaggccaggatgctttgaaacagccttcagtgatgcacaggccagcccacgacgaaaaattatctggcccaaagtgttggtagtgccaaggccaagaaaccctgctttggttcctgggtgtagggacgtgtatgttcttaaacaagagcccctcccgcctgcattgtggtggatgatggctgccttttcattgagtgcgggctgtgtgccaagcgagttacctccatgcttttctttaatccttacaacttttgagacaccttggaagagcttaaggaaatagataaaggcatgtggaagaaactgcaggagaagtttgcccccaagggtcctgaggaggatcataaggcctgagctcaggccttacctcgtgcacatacctaggtgtggagtcttgtacattgccatcgtcaataaaactgccccagtttccccttgaccttacggtttgggaatctcctctagctttcccagaaaggaagcccttgctgctctaaagaaagtttcagcctgagaagggatggtgattgagctatctgctgtgactgctgctcagggtagggaaatctcctggggagaggaaatgcaggtttccctctgggcctgatgagggtaatggggcctcggcacaaggtgcttcctgcattgccacgggagcccccgcccctctggcacgggtctggtgtctcctggcaagatactcaggctcccttttgttgtaggagctcctgggaggaagccaaaaatagcagtaaatactgaaaagggcatcctgttgcaaacagaaagcagtagggaggtgtgaggccgagagaggcaaaaagcctgcttggccctcatccccactgactcagagaaggatggaccttaggcctctatccctgaccttgcaaaaacccacattgcccagttggcttaagggacagggaagctatagacaggccttggccaagcggggcctcagctgcagttggcttcagcactgtgggcaggttctgtaggtggccacaagtcagaggccctgctggctgaggacacacacagggtcacctcattattccatggaaccttggctcttactgatattgagcatccttctctctggaaccgtgagggacagggctgggcccacagcggccctggtgggtacaaagtggaagtgggttcttaacctcgtctgtgtctagactcctcaggatgttctgaaatgcataaaataaaatcgacaggactgccgtagaaaccagttatgccgaaatgcagttctgggtaggcaaatctcaggggaggacccttgagacaggatgtcactcagcgtatctcctgagagcctgagaggccaggccagcagggaggggctcttgttcctgtcttctgccagtgtgtcctgttaatccccacagcccccgggggagtgcaggaaacacatccctttttaacggactagatttctattaatttatttaaggcaattaacatattagttctcaggccaaaggatttgtaaaacattacaccaaaaggagaaaaacaagcggtcatgaaacagccacgcaagcgcagctcagcccttgttgcctgggcgtacaactcttccccaggaagcctgggaagaggcaggtcctgggagcaagatcgtccatcatggagtcaccaggccacctggagccatgccgggggtggcatggacacgacagtgaggtctgcactggctacagcagatctgaggcacggagggagctgcacagccatgggcagggctgagcacagcacccttgaaataagttaaataacaaagccctaaaatcactagtaacagcataactgccacctcccccagaggccggcagccgccaaaatgtagtgcttggagttaaaggggtgaccccactcttaactacccacaaggaggactacaaagagttgtcagttattgctttaaggaacaaaggtctctaggtaggatttatcttctgctaaggcattaaggtaaactgagtcccagtgaactttcaagtctttttaagggctctaagcaggactgtcagctctgaggctccccctccatgctcttcaaagcctgggtgggtgtcagggtgtctggcagagtgggagtggaggctggccagctggctgggccacccaacccgagggagggggcagtgttcttcccagtcgcagtctccagtgatgagcatcccctgttggggccttcggtggctctcctcagcggctaatgcagttctggacatccacaaagcctaggcgttgcctgcgtttccgctgctccgtcatctagggttaagcagatgccaacaggcctggtcaggccgcctggcaccttccctccatgggtgctgtggaagagcttggcacccgtcttcccctgtgggcccagctgctattcggcactggcggcgggccagggcccctcggggtgctttaaggatgtcgatgtcagcaccaaacccttgttctcaattagcgtgtcacaaaccctggatttgatgcagctgggaaaccagcccactaacagaggctgcctcatcttcatgcaggcactgccagatgcagaagaggatgtctaggcaagagggccttaaactcccccatctccagtgatggggatcccctcaaaggacctacctggcagctgtcagaggaaggggatgagagacagagggccccaccaccctgtactaaagtttccacttggccttgtctttagcggcccaaggcaggggttgtcaaccccagtctgacttgccatgcaggggagagtgggtttggcacctgccttctcatccaggcccagggccagaggccagtggggaagagggtgggtcaggaaggatgaaggcaggcagggactgcccagggatagaacccagggtgggcctgggatcaggcggggtgcacacctgctccttgagctcgttgagctgggcagtgaggtgggacaccagcttcatggtggagttgagcttgtcctggagaatccgaatctcattctgctccccctcgccctcattgctgacaagggacatggcccgcatccgggggaaccagtccaggttcttgttctgaaaaacatcaccagtgggttaagcaggcgtgggcccggcctagaaaggcctcatttagaaaaacagtaatgtggggggaggcttctgccacacccttaacaaaactactcgtcagggatgtgtcatgggaaaatctgaattgacctggtcctccccggggccagagtgagctggcagtcaaccctcttgtcaaccctctgccaccgagacaggctgacttccgttaggcagcgtcggcagctgagtttgagtcctttgctggtatcagcaccatctgtttactctcataacaccccctgagaggtggaggaaggcctctgcacccagacagaccctggatctccttccttccttcctcccgcccgcctgcctgacaagcacgccccacgccccgggaagacgcgagtcagacagatggcaaattgagggatcaggaggctccgctgaggagagctggcatctgacacgtgtctgggaggcaaagccacgtttcccaggacagaggagtcggggggggagggggcaccaagcaattctcagcttccttgtagtaagctgtgaattctcagaccaacagataaacctgtacacaaagatcagtttgaaatacagactaaacgataaataattccttctttatga

SEQ ID NO: 15533 - protein, 36 aa, Homo sapiens
MMAAFSLSAGCVPSELPPCFSLILTTFETPWKSLRK

SEQ ID NO: 15534 - DNA, 4495 bp, Homo sapiens
cgcccgttgtattcagcgctctcccccggctgcaccttggaattgccgaagaagctttttttaaactccagatgggccgggtgcggcggttcacacctataattccagcactctttgagaggccgaggcgggaggatcgcttgagcccaggatgacctcctgggcaacatagtgggactccgtctctacaaatcaaaaaacaaacaaaaacttcaaatgcagaatctctaggggtggggtcttgacctcagagttttaaaagctctccaggtgattcaaggtgcagagagagttgagacccacaccaccagtggcagctggtgacagcctcagctttttgcttccttgtcacggtagcattacctcattatttcgcagtgttgtgtattgactgagctaatccccagttaactctgcaggtccccgctaagcgtttgcgttcttcctgagcccctgtaagcctgtgcagcaggtttgggtcctcagctcacgcagctgtgtgtgagtagtaggcctatgttcttgctttcctccaggttggcgctgcagctctgggattcattcattcatatagctcgtatttattgagcacctaccatatgcctggaacggtgctagggaaacagcagtgttaaacaggtgaagtcctgcccgcatgaagttttacattgtagttcaggacacaataagcagcttagcccgaaacagagccaagccagcccacctaaaggagcaggagcacgcccagtggcatcattgtgactgtactgctgattggctggcagcctggggagtgtctggcccaggttatacgatacccagggccctcacattattcatggtggtcttcactggcccaaagtgtaaagatctttaaggttgcagagcctgaggcctgtgatcagatgtacgagagcttagcgcgactccattcaaactactacaaacacaagtaccctcgccccagagacaccagcttcagtggcctgtcgttggaagagtacaagctgatcctgtccacagacaccttggaagagcttaaggaaatagataaaggcatgtggaagaaactgcaggagaagtttgcccccaagggtcctgaggaggatcataaggcctgagctcaggccttacctcgtgcacatacctaggtgtggagtcttgtacattgccatcgtcaataaaactgccccagtttccccttgaccttacggtttgggaatctcctctagctttcccagaaaggaagcccttgctgctctaaagaaagtttcagcctgagaagggatggtgattgagctatctgctgtgactgctgctcagggtagggaaatctcctggggagaggaaatgcaggtttccctctgggcctgatgagggtaatggggcctcggcacaaggtgcttcctgcattgccacgggagcccccgcccctctggcacgggtctggtgtctcctggcaagatactcaggctcccttttgttgtaggagctcctgggaggaagccaaaaatagcagtaaatactgaaaagggcatcctgttgcaaacagaaagcagtagggaggtgtgaggccgagagaggcaaaaagcctgcttggccctcatccccactgactcagagaaggatggaccttaggcctctatccctgaccttgcaaaaacccacattgcccagttggcttaagggacagggaagctatagacaggccttggccaagcggggcctcagctgcagttggcttcagcactgtgggcaggttctgtaggtggccacaagtcagaggccctgctggctgaggacacacacagggtcacctcattattccatggaaccttggctcttactgatattgagcatccttctctctggaaccgtgagggacagggctgggcccacagcggccctggtgggtacaaagtggaagtgggttcttaacctcgtctgtgtctagactcctcaggatgttctgaaatgcataaaataaaatcgacaggactgccgtagaaaccagttatgccgaaatgcagttctgggtaggcaaatctcaggggaggacccttgagacaggatgtcactcagcgtatctcctgagagcctgagaggccaggccagcagggaggggctcttgttcctgtcttctgccagtgtgtcctgttaatccccacagcccccgggggagtgcaggaaacacatccctttttaacggactagatttctattaatttatttaaggcaattaacatattagttctcaggccaaaggatttgtaaaacattacaccaaaaggagaaaaacaagcggtcatgaaacagccacgcaagcgcagctcagcccttgttgcctgggcgtacaactcttccccaggaagcctgggaagaggcaggtcctgggagcaagatcgtccatcatggagtcaccaggccacctggagccatgccgggggtggcatggacacgacagtgaggtctgcactggctacagcagatctgaggcacggagggagctgcacagccatgggcagggctgagcacagcacccttgaaataagttaaataacaaagccctaaaatcactagtaacagcataactgccacctcccccagaggccggcagccgccaaaatgtagtgcttggagttaaaggggtgaccccactcttaactacccacaaggaggactacaaagagttgtcagttattgctttaaggaacaaaggtctctaggtaggatttatcttctgctaaggcattaaggtaaactgagtcccagtgaactttcaagtctttttaagggctctaagcaggactgtcagctctgaggctccccctccatgctcttcaaagcctgggtgggtgtcagggtgtctggcagagtgggagtggaggctggccagctggctgggccacccaacccgagggagggggcagtgttcttcccagtcgcagtctccagtgatgagcatcccctgttggggccttcggtggctctcctcagcggctaatgcagttctggacatccacaaagcctaggcgttgcctgcgtttccgctgctccgtcatctagggttaagcagatgccaacaggcctggtcaggccgcctggcaccttccctccatgggtgctgtggaagagcttggcacccgtcttcccctgtgggcccagctgctattcggcactggcggcgggccagggcccctcggggtgctttaaggatgtcgatgtcagcaccaaacccttgttctcaattagcgtgtcacaaaccctggatttgatgcagctgggaaaccagcccactaacagaggctgcctcatcttcatgcaggcactgccagatgcagaagaggatgtctaggcaagagggccttaaactcccccatctccagtgatggggatcccctcaaaggacctacctggcagctgtcagaggaaggggatgagagacagagggccccaccaccctgtactaaagtttccacttggccttgtctttagcggcccaaggcaggggttgtcaaccccagtctgacttgccatgcaggggagagtgggtttggcacctgccttctcatccaggcccagggccagaggccagtggggaagagggtgggtcaggaaggatgaaggcaggcagggactgcccagggatagaacccagggtgggcctgggatcaggcggggtgcacacctgctccttgagctcgttgagctgggcagtgaggtgggacaccagcttcatggtggagttgagcttgtcctggagaatccgaatctcattctgctccccctcgccctcattgctgacaagggacatggcccgcatccgggggaaccagtccaggttcttgttctgaaaaacatcaccagtgggttaagcaggcgtgggcccggcctagaaaggcctcatttagaaaaacagtaatgtggggggaggcttctgccacacccttaacaaaactactcgtcagggatgtgtcatgggaaaatctgaattgacctggtcctccccggggccagagtgagctggcagtcaaccctcttgtcaaccctctgccaccgagacaggctgacttccgttaggcagcgtcggcagctgagtttgagtcctttgctggtatcagcaccatctgtttactctcataacaccccctgagaggtggaggaaggcctctgcacccagacagaccctggatctccttccttccttcctcccgcccgcctgcctgacaagcacgccccacgccccgggaagacgcgagtcagacagatggcaaattgagggatcaggaggctccgctgaggagagctggcatctgacacgtgtctgggaggcaaagccacgtttcccaggacagaggagtcggggggggagggggcaccaagcaattctcagcttccttgtagtaagctgtgaattctcagaccaacagataaacctgtacacaaagatcagtttgaaatacagactaaacgataaataattccttctttatga

SEQ ID NO: 15535 - protein, 73 aa, Homo sapiens [sequence omitted]

SEQ ID NO: 15536 - DNA, 1617 bp, Homo sapiens
ctcctcccgctaaggcgggaacacgcggggcccaagatggcggccagccggtaccggcgttttcttaagctctgtgaggaatggccagtggacgagaccaaacggggccgggacttgggcgcttacctgcgacagcgggtagcacaggcctttcgggagggagagaatacccaggttgcagagcctgaggcctgtgatcagatgtacgagagcttagcgcgactccattcaaactactacaaacacaagtaccctcgccccagagacaccagcttcagtggcctgtcgttggaagagtacaagctgatcctgtccacagacaccttggaagagcttaaggaaatagataaaggcatgtggaagaaactgcaggagaagtttgcccccaagggtcctgaggaggatcataaggcctgagctcaggccttacctcgtgcacatacctaggcactgccagatgcagaagaggatgtctaggcaagagggccttaaactcccccatctccagtgatggggatcccctcaaaggacctacctggcagctgtcagaggaaggggatgagagacagagggccccaccaccctgtactaaagtttccacttggccttgtctttagcggcccaaggcaggggttgtcaaccccagtctgacttgccatgcaggggagagtgggtttggcacctgccttctcatccaggcccagggccagaggccagtggggaagagggtgggtcaggaaggatgaaggcaggcagggactgcccagggatagaacccagggtgggcctgggatcaggcggggtgcacacctgctccttgagctcgttgagctgggcagtgaggtgggacaccagcttcatggtggagttgagcttgtcctggagaatccgaatctcattctgctccccctcgccctcattgctgacaagggacatggcccgcatccgggggaaccagtccaggttcttgttctgaaaaacatcaccagtgggttaagcaggcgtgggcccggcctagaaaggcctcatttagaaaaacagtaatgtggggggaggcttctgccacacccttaacaaaactactcgtcagggatgtgtcatgggaaaatctgaattgacctggtcctccccggggccagagtgagctggcagtcaaccctcttgtcaaccctctgccaccgagacaggctgacttccgttaggcagcgtcggcagctgagtttgagtcctttgctggtatcagcaccatctgtttactctcataacaccccctgagaggtggaggaaggcctctgcacccagacagaccctggatctccttccttccttcctcccgcccgcctgcctgacaagcacgccccacgccccgggaagacgcgagtcagacagatggcaaattgagggatcaggaggctccgctgaggagagctggcatctgacacgtgtctgggaggcaaagccacgtttcccaggacagaggagtcggggggggagggggcaccaagcaattctcagcttccttgtagtaagctgtgaattctcagaccaacagataaacctgtacacaaagatcagtttgaaatacagactaaacgataaataattccttctttatga

SEQ ID NO: 15537 - protein, 126 aa, Homo sapiens; identical to SEQ ID NO: 1762

SEQ ID NO: 15538 - DNA, 3799 bp, Homo sapiens
ggcgccgactcctcccgctaaggcgggaacacgcggggcccaagatggcggccagccggtaccggcgttttcttaagctctgtgaggaatggccagtggacgagaccaaacggggccgggacttgggcgcttacctgcgacagcgggtagcacaggcctttcgggagggagagaatacccaggttgcagagcctgaggcctgtgatcagatgtacgagagcttagcgcgactccattcaaactactacaaacacaagtaccctcgccccagagacaccagcttcagtggcctgtcgttggaagagtacaagctgatcctgtccacagacaccttggaagagcttaaggaaatagataaaggcatgtggaagaaactgcaggagaagtttgcccccaagggtcctgaggaggatcataaggcctgagctcaggccttacctcgtgcacatacctaggtgtggagtcttgtacattgccatcgtcaataaaactgccccagtttccccttgaccttacggtttgggaatctcctctagctttcccagaaaggaagcccttgctgctctaaagaaagtttcagcctgagaagggatggtgattgagctatctgctgtgactgctgctcagggtagggaaatctcctggggagaggaaatgcaggtttccctctgggcctgatgagggtaatggggcctcggcacaaggtgcttcctgcattgccacgggagcccccgcccctctggcacgggtctggtgtctcctggcaagatactcaggctcccttttgttgtaggagctcctgggaggaagccaaaaatagcagtaaatactgaaaagggcatcctgttgcaaacagaaagcagtagggaggtgtgaggccgagagaggcaaaaagcctgcttggccctcatccccactgactcagagaaggatggaccttaggcctctatccctgaccttgcaaaaacccacattgcccagttggcttaagggacagggaagctatagacaggccttggccaagcggggcctcagctgcagttggcttcagcactgtgggcaggttctgtaggtggccacaagtcagaggccctgctggctgaggacacacacagggtcacctcattattccatggaaccttggctcttactgatattgagcatccttctctctggaaccgtgagggacagggctgggcccacagcggccctggtgggtacaaagtggaagtgggttcttaacctcgtctgtgtctagactcctcaggatgttctgaaatgcataaaataaaatcgacaggactgccgtagaaaccagttatgccgaaatgcagttctgggtaggcaaatctcaggggaggacccttgagacaggatgtcactcagcgtatctcctgagagcctgagaggccaggccagcagggaggggctcttgttcctgtcttctgccagtgtgtcctgttaatccccacagcccccgggggagtgcaggaaacacatccctttttaacggactagatttctattaatttatttaaggcaattaacatattagttctcaggccaaaggatttgtaaaacattacaccaaaaggagaaaaacaagcggtcatgaaacagccacgcaagcgcagctcagcccttgttgcctgggcgtacaactcttccccaggaagcctgggaagaggcaggtcctgggagcaagatcgtccatcatggagtcaccaggccacctggagccatgccgggggtggcatggacacgacagtgaggtctgcactggctacagcagatctgaggcacggagggagctgcacagccatgggcagggctgagcacagcacccttgaaataagttaaataacaaagccctaaaatcactagtaacagcataactgccacctcccccagaggccggcagccgccaaaatgtagtgcttggagttaaaggggtgaccccactcttaactacccacaaggaggactacaaagagttgtcagttattgctttaaggaacaaaggtctctaggtaggatttatcttctgctaaggcattaaggtaaactgagtcccagtgaactttcaagtctttttaagggctctaagcaggactgtcagctctgaggctccccctccatgctcttcaaagcctgggtgggtgtcagggtgtctggcagagtgggagtggaggctggccagctggctgggccacccaacccgagggagggggcagtgttcttcccagtcgcagtctccagtgatgagcatcccctgttggggccttcggtggctctcctcagcggctaatgcagttctggacatccacaaagcctaggcgttgcctgcgtttccgctgctccgtcatctagggttaagcagatgccaacaggcctggtcaggccgcctggcaccttccctccatgggtgctgtggaagagcttggcacccgtcttcccctgtgggcccagctgctattcggcactggcggcgggccagggcccctcggggtgctttaaggatgtcgatgtcagcaccaaacccttgttctcaattagcgtgtcacaaaccctggatttgatgcagctgggaaaccagcccactaacagaggctgcctcatcttcatgcaggcactgccagatgcagaagaggatgtctaggcaagagggccttaaactcccccatctccagtgatggggatcccctcaaaggacctacctggcagctgtcagaggaaggggatgagagacagagggccccaccaccctgtactaaagtttccacttggccttgtctttagcggcccaaggcaggggttgtcaaccccagtctgacttgccatgcaggggagagtgggtttggcacctgccttctcatccaggcccagggccagaggccagtggggaagagggtgggtcaggaaggatgaaggcaggcagggactgcccagggatagaacccagggtgggcctgggatcaggcggggtgcacacctgctccttgagctcgttgagctgggcagtgaggtgggacaccagcttcatggtggagttgagcttgtcctggagaatccgaatctcattctgctccccctcgccctcattgctgacaagggacatggcccgcatccgggggaaccagtccaggttcttgttctgaaaaacatcaccagtgggttaagcaggcgtgggcccggcctagaaaggcctcatttagaaaaacagtaatgtggggggaggcttctgccacacccttaacaaaactactcgtcagggatgtgtcatgggaaaatctgaattgacctggtcctccccggggccagagtgagctggcagtcaaccctcttgtcaaccctctgccaccgagacaggctgacttccgttaggcagcgtcggcagctgagtttgagtcctttgctggtatcagcaccatctgtttactctcataacaccccctgagaggtggaggaaggcctctgcacccagacagaccctggatctccttccttccttcctcccgcccgcctgcctgacaagcacgccccacgccccgggaagacgcgagtcagacagatggcaaattgagggatcaggaggctccgctgaggagagctggcatctgacacgtgtctgggaggcaaagccacgtttcccaggacagaggagtcggggggggagggggcaccaagcaattctcagcttccttgtagtaagctgtgaattctcagaccaacagataaacctgtacacaaagatcagtttgaaatacagactaaacgataaataattccttctttatga

SEQ ID NO: 15539 - protein, 126 aa, Homo sapiens; identical to SEQ ID NO: 1762

SEQ ID NO: 15540 - DNA, 4271 bp, Homo sapiens
tgagaatttgttttcacagcaagcctcatatttttgttgcaaattgtgtggcgtaagcttaccaaatgtttcctctgacaggacaagaaaagacctgcagcaccttgtagtgagaggctttgagggcctggcaagtctgaaatgtgctgtgttctgggttatgtgtgtgtccaccctgggattggggtcatggaaagcgcctaagggaggcctcagtgtccacctggacactggaaacatggacttctggaaaagctccagagcaggggcttttttctgttaccttttttggtcagaaaagatactctttttttctccagtagttttgttaacgtgaaaatttaggctggtaaagcaaaacaatattataagaatatctaaaatttaacatgcacgtaaaattagatttcatggaacattagccctagagactttagacaaatggttccgtactggggggatggttttgccccccaggggacatgtggcaatgtctggagacatttttagttgtcacaactggtggtgcgggcagcggtgctactggcattagtgggtagaggccaggatgctttgaaacagccttcagtgatgcacaggccagcccacgacgaaaaattatctggcccaaagtgttggtagtgccaaggccaagaaaccctgctttggttcctgggtgtagggacgtgtatgttcttaaacaagagcccctcccgcctgcattgtggtggatgatggctgccttttcattgagtgcgggctgtgtgccaagcgagttacctccatgcttttctttaatccttacaacttttgagacaccttggaagagcttaaggaaatagataaaggcatgtggaagaaactgcaggagaagtttgcccccaagggtcctgaggaggatcataaggcctgagctcaggccttacctcgtgcacatacctaggtgtggagtcttgtacattgccatcgtcaataaaactgccccagtttccccttgaccttacggtttgggaatctcctctagctttcccagaaaggaagcccttgctgctctaaagaaagtttcagcctgagaagggatggtgattgagctatctgctgtgactgctgctcagggtagggaaatctcctggggagaggaaatgcaggtttccctctgggcctgatgagggtaatggggcctcggcacaaggtgcttcctgcattgccacgggagcccccgcccctctggcacgggtctggtgtctcctggcaagatactcaggctcccttttgttgtaggagctcctgggaggaagccaaaaatagcagtaaatactgaaaagggcatcctgttgcaaacagaaagcagtagggaggtgtgaggccgagagaggcaaaaagcctgcttggccctcatccccactgactcagagaaggatggaccttaggcctctatccctgaccttgcaaaaacccacattgcccagttggcttaagggacagggaagctatagacaggccttggccaagcggggcctcagctgcagttggcttcagcactgtgggcaggttctgtaggtggccacaagtcagaggccctgctggctgaggacacacacagggtcacctcattattccatggaaccttggctcttactgatattgagcatccttctctctggaaccgtgagggacagggctgggcccacagcggccctggtgggtacaaagtggaagtgggttcttaacctcgtctgtgtctagactcctcaggatgttctgaaatgcataaaataaaatcgacaggactgccgtagaaaccagttatgccgaaatgcagttctgggtaggcaaatctcaggggaggacccttgagacaggatgtcactcagcgtatctcctgagagcctgagaggccaggccagcagggaggggctcttgttcctgtcttctgccagtgtgtcctgttaatccccacagcccccgggggagtgcaggaaacacatccctttttaacggactagatttctattaatttatttaaggcaattaacatattagttctcaggccaaaggatttgtaaaacattacaccaaaaggagaaaaacaagcggtcatgaaacagccacgcaagcgcagctcagcccttgttgcctgggcgtacaactcttccccaggaagcctgggaagaggcaggtcctgggagcaagatcgtccatcatggagtcaccaggccacctggagccatgccgggggtggcatggacacgacagtgaggtctgcactggctacagcagatctgaggcacggagggagctgcacagccatgggcagggctgagcacagcacccttgaaataagttaaataacaaagccctaaaatcactagtaacagcataactgccacctcccccagaggccggcagccgccaaaatgtagtgcttggagttaaaggggtgaccccactcttaactacccacaaggaggactacaaagagttgtcagttattgctttaaggaacaaaggtctctaggtaggatttatcttctgctaaggcattaaggtaaactgagtcccagtgaactttcaagtctttttaagggctctaagcaggactgtcagctctgaggctccccctccatgctcttcaaagcctgggtgggtgtcagggtgtctggcagagtgggagtggaggctggccagctggctgggccacccaacccgagggagggggcagtgttcttcccagtcgcagtctccagtgatgagcatcccctgttggggccttcggtggctctcctcagcggctaatgcagttctggacatccacaaagcctaggcgttgcctgcgtttccgctgctccgtcatctagggttaagcagatgccaacaggcctggtcaggccgcctggcaccttccctccatgggtgctgtggaagagcttggcacccgtcttcccctgtgggcccagctgctattcggcactggcggcgggccagggcccctcggggtgctttaaggatgtcgatgtcagcaccaaacccttgttctcaattagcgtgtcacaaaccctggatttgatgcagctgggaaaccagcccactaacagaggctgcctcatcttcatgcaggcactgccagatgcagaagaggatgtctaggcaagagggccttaaactcccccatctccagtgatggggatcccctcaaaggacctacctggcagctgtcagaggaaggggatgagagacagagggccccaccaccctgtactaaagtttccacttggccttgtctttagcggcccaaggcaggggttgtcaaccccagtctgacttgccatgcaggggagagtgggtttggcacctgccttctcatccaggcccagggccagaggccagtggggaagagggtgggtcaggaaggatgaaggcaggcagggactgcccagggatagaacccagggtgggcctgggatcaggcggggtgcacacctgctccttgagctcgttgagctgggcagtgaggtgggacaccagcttcatggtggagttgagcttgtcctggagaatccgaatctcattctgctccccctcgccctcattgctgacaagggacatggcccgcatccgggggaaccagtccaggttcttgttctgaaaaacatcaccagtgggttaagcaggcgtgggcccggcctagaaaggcctcatttagaaaaacagtaatgtggggggaggcttctgccacacccttaacaaaactactcgtcagggatgtgtcatgggaaaatctgaattgacctggtcctccccggggccagagtgagctggcagtcaaccctcttgtcaaccctctgccaccgagacaggctgacttccgttaggcagcgtcggcagctgagtttgagtcctttgctggtatcagcaccatctgtttactctcataacaccccctgagaggtggaggaaggcctctgcacccagacagaccctggatctccttccttccttcctcccgcccgcctgcctgacaagcacgccccacgccccgggaagacgcgagtcagacagatggcaaattgagggatcaggaggctccgctgaggagagctggcatctgacacgtgtctgggaggcaaagccacgtttcccaggacagaggagtcggggggggagggggcaccaagcaattctcagcttccttgtagtaagctgtgaattctcagaccaacagataaacctgtacacaaagatcagtttgaaatacagactaaacgataaat

SEQ ID NO: 15541 - protein, 36 aa, Homo sapiens; identical to SEQ ID NO: 15533

SEQ ID NO: 15542 - DNA, 4479 bp, Homo sapiens
cgcccgttgtattcagcgctctcccccggctgcaccttggaattgccgaagaagctttttttaaactccagatgggccgggtgcggcggttcacacctataattccagcactctttgagaggccgaggcgggaggatcgcttgagcccaggatgacctcctgggcaacatagtgggactccgtctctacaaatcaaaaaacaaacaaaaacttcaaatgcagaatctctaggggtggggtcttgacctcagagttttaaaagctctccaggtgattcaaggtgcagagagagttgagacccacaccaccagtggcagctggtgacagcctcagctttttgcttccttgtcacggtagcattacctcattatttcgcagtgttgtgtattgactgagctaatccccagttaactctgcaggtccccgctaagcgtttgcgttcttcctgagcccctgtaagcctgtgcagcaggtttgggtcctcagctcacgcagctgtgtgtgagtagtaggcctatgttcttgctttcctccaggttggcgctgcagctctgggattcattcattcatatagctcgtatttattgagcacctaccatatgcctggaacggtgctagggaaacagcagtgttaaacaggtgaagtcctgcccgcatgaagttttacattgtagttcaggacacaataagcagcttagcccgaaacagagccaagccagcccacctaaaggagcaggagcacgcccagtggcatcattgtgactgtactgctgattggctggcagcctggggagtgtctggcccaggttatacgatacccagggccctcacattattcatggtggtcttcactggcccaaagtgtaaagatctttaaggttgcagagcctgaggcctgtgatcagatgtacgagagcttagcgcgactccattcaaactactacaaacacaagtaccctcgccccagagacaccagcttcagtggcctgtcgttggaagagtacaagctgatcctgtccacagacaccttggaagagcttaaggaaatagataaaggcatgtggaagaaactgcaggagaagtttgcccccaagggtcctgaggaggatcataaggcctgagctcaggccttacctcgtgcacatacctaggtgtggagtcttgtacattgccatcgtcaataaaactgccccagtttccccttgaccttacggtttgggaatctcctctagctttcccagaaaggaagcccttgctgctctaaagaaagtttcagcctgagaagggatggtgattgagctatctgctgtgactgctgctcagggtagggaaatctcctggggagaggaaatgcaggtttccctctgggcctgatgagggtaatggggcctcggcacaaggtgcttcctgcattgccacgggagcccccgcccctctggcacgggtctggtgtctcctggcaagatactcaggctcccttttgttgtaggagctcctgggaggaagccaaaaatagcagtaaatactgaaaagggcatcctgttgcaaacagaaagcagtagggaggtgtgaggccgagagaggcaaaaagcctgcttggccctcatccccactgactcagagaaggatggaccttaggcctctatccctgaccttgcaaaaacccacattgcccagttggcttaagggacagggaagctatagacaggccttggccaagcggggcctcagctgcagttggcttcagcactgtgggcaggttctgtaggtggccacaagtcagaggccctgctggctgaggacacacacagggtcacctcattattccatggaaccttggctcttactgatattgagcatccttctctctggaaccgtgagggacagggctgggcccacagcggccctggtgggtacaaagtggaagtgggttcttaacctcgtctgtgtctagactcctcaggatgttctgaaatgcataaaataaaatcgacaggactgccgtagaaaccagttatgccgaaatgcagttctgggtaggcaaatctcaggggaggacccttgagacaggatgtcactcagcgtatctcctgagagcctgagaggccaggccagcagggaggggctcttgttcctgtcttctgccagtgtgtcctgttaatccccacagcccccgggggagtgcaggaaacacatccctttttaacggactagatttctattaatttatttaaggcaattaacatattagttctcaggccaaaggatttgtaaaacattacaccaaaaggagaaaaacaagcggtcatgaaacagccacgcaagcgcagctcagcccttgttgcctgggcgtacaactcttccccaggaagcctgggaagaggcaggtcctgggagcaagatcgtccatcatggagtcaccaggccacctggagccatgccgggggtggcatggacacgacagtgaggtctgcactggctacagcagatctgaggcacggagggagctgcacagccatgggcagggctgagcacagcacccttgaaataagttaaataacaaagccctaaaatcactagtaacagcataactgccacctcccccagaggccggcagccgccaaaatgtagtgcttggagttaaaggggtgaccccactcttaactacccacaaggaggactacaaagagttgtcagttattgctttaaggaacaaaggtctctaggtaggatttatcttctgctaaggcattaaggtaaactgagtcccagtgaactttcaagtctttttaagggctctaagcaggactgtcagctctgaggctccccctccatgctcttcaaagcctgggtgggtgtcagggtgtctggcagagtgggagtggaggctggccagctggctgggccacccaacccgagggagggggcagtgttcttcccagtcgcagtctccagtgatgagcatcccctgttggggccttcggtggctctcctcagcggctaatgcagttctggacatccacaaagcctaggcgttgcctgcgtttccgctgctccgtcatctagggttaagcagatgccaacaggcctggtcaggccgcctggcaccttccctccatgggtgctgtggaagagcttggcacccgtcttcccctgtgggcccagctgctattcggcactggcggcgggccagggcccctcggggtgctttaaggatgtcgatgtcagcaccaaacccttgttctcaattagcgtgtcacaaaccctggatttgatgcagctgggaaaccagcccactaacagaggctgcctcatcttcatgcaggcactgccagatgcagaagaggatgtctaggcaagagggccttaaactcccccatctccagtgatggggatcccctcaaaggacctacctggcagctgtcagaggaaggggatgagagacagagggccccaccaccctgtactaaagtttccacttggccttgtctttagcggcccaaggcaggggttgtcaaccccagtctgacttgccatgcaggggagagtgggtttggcacctgccttctcatccaggcccagggccagaggccagtggggaagagggtgggtcaggaaggatgaaggcaggcagggactgcccagggatagaacccagggtgggcctgggatcaggcggggtgcacacctgctccttgagctcgttgagctgggcagtgaggtgggacaccagcttcatggtggagttgagcttgtcctggagaatccgaatctcattctgctccccctcgccctcattgctgacaagggacatggcccgcatccgggggaaccagtccaggttcttgttctgaaaaacatcaccagtgggttaagcaggcgtgggcccggcctagaaaggcctcatttagaaaaacagtaatgtggggggaggcttctgccacacccttaacaaaactactcgtcagggatgtgtcatgggaaaatctgaattgacctggtcctccccggggccagagtgagctggcagtcaaccctcttgtcaaccctctgccaccgagacaggctgacttccgttaggcagcgtcggcagctgagtttgagtcctttgctggtatcagcaccatctgtttactctcataacaccccctgagaggtggaggaaggcctctgcacccagacagaccctggatctccttccttccttcctcccgcccgcctgcctgacaagcacgccccacgccccgggaagacgcgagtcagacagatggcaaattgagggatcaggaggctccgctgaggagagctggcatctgacacgtgtctgggaggcaaagccacgtttcccaggacagaggagtcggggggggagggggcaccaagcaattctcagcttccttgtagtaagctgtgaattctcagaccaacagataaacctgtacacaaagatcagtttgaaatacagactaaacgataaat

SEQ ID NO: 15543 - protein, 73 aa, Homo sapiens [sequence omitted]

SEQ ID NO: 15544 - DNA, 1601 bp, Homo sapiens
ctcctcccgctaaggcgggaacacgcggggcccaagatggcggccagccggtaccggcgttttcttaagctctgtgaggaatggccagtggacgagaccaaacggggccgggacttgggcgcttacctgcgacagcgggtagcacaggcctttcgggagggagagaatacccaggttgcagagcctgaggcctgtgatcagatgtacgagagcttagcgcgactccattcaaactactacaaacacaagtaccctcgccccagagacaccagcttcagtggcctgtcgttggaagagtacaagctgatcctgtccacagacaccttggaagagcttaaggaaatagataaaggcatgtggaagaaactgcaggagaagtttgcccccaagggtcctgaggaggatcataaggcctgagctcaggccttacctcgtgcacatacctaggcactgccagatgcagaagaggatgtctaggcaagagggccttaaactcccccatctccagtgatggggatcccctcaaaggacctacctggcagctgtcagaggaaggggatgagagacagagggccccaccaccctgtactaaagtttccacttggccttgtctttagcggcccaaggcaggggttgtcaaccccagtctgacttgccatgcaggggagagtgggtttggcacctgccttctcatccaggcccagggccagaggccagtggggaagagggtgggtcaggaaggatgaaggcaggcagggactgcccagggatagaacccagggtgggcctgggatcaggcggggtgcacacctgctccttgagctcgttgagctgggcagtgaggtgggacaccagcttcatggtggagttgagcttgtcctggagaatccgaatctcattctgctccccctcgccctcattgctgacaagggacatggcccgcatccgggggaaccagtccaggttcttgttctgaaaaacatcaccagtgggttaagcaggcgtgggcccggcctagaaaggcctcatttagaaaaacagtaatgtggggggaggcttctgccacacccttaacaaaactactcgtcagggatgtgtcatgggaaaatctgaattgacctggtcctccccggggccagagtgagctggcagtcaaccctcttgtcaaccctctgccaccgagacaggctgacttccgttaggcagcgtcggcagctgagtttgagtcctttgctggtatcagcaccatctgtttactctcataacaccccctgagaggtggaggaaggcctctgcacccagacagaccctggatctccttccttccttcctcccgcccgcctgcctgacaagcacgccccacgccccgggaagacgcgagtcagacagatggcaaattgagggatcaggaggctccgctgaggagagctggcatctgacacgtgtctgggaggcaaagccacgtttcccaggacagaggagtcggggggggagggggcaccaagcaattctcagcttccttgtagtaagctgtgaattctcagaccaacagataaacctgtacacaaagatcagtttgaaatacagactaaacgataaat

SEQ ID NO: 15545 - protein, 126 aa, Homo sapiens; identical to SEQ ID NO: 1762

SEQ ID NO: 15546 - DNA, 3783 bp, Homo sapiens
ggcgccgactcctcccgctaaggcgggaacacgcggggcccaagatggcggccagccggtaccggcgttttcttaagctctgtgaggaatggccagtggacgagaccaaacggggccgggacttgggcgcttacctgcgacagcgggtagcacaggcctttcgggagggagagaatacccaggttgcagagcctgaggcctgtgatcagatgtacgagagcttagcgcgactccattcaaactactacaaacacaagtaccctcgccccagagacaccagcttcagtggcctgtcgttggaagagtacaagctgatcctgtccacagacaccttggaagagcttaaggaaatagataaaggcatgtggaagaaactgcaggagaagtttgcccccaagggtcctgaggaggatcataaggcctgagctcaggccttacctcgtgcacatacctaggtgtggagtcttgtacattgccatcgtcaataaaactgccccagtttccccttgaccttacggtttgggaatctcctctagctttcccagaaaggaagcccttgctgctctaaagaaagtttcagcctgagaagggatggtgattgagctatctgctgtgactgctgctcagggtagggaaatctcctggggagaggaaatgcaggtttccctctgggcctgatgagggtaatggggcctcggcacaaggtgcttcctgcattgccacgggagcccccgcccctctggcacgggtctggtgtctcctggcaagatactcaggctcccttttgttgtaggagctcctgggaggaagccaaaaatagcagtaaatactgaaaagggcatcctgttgcaaacagaaagcagtagggaggtgtgaggccgagagaggcaaaaagcctgcttggccctcatccccactgactcagagaaggatggaccttaggcctctatccctgaccttgcaaaaacccacattgcccagttggcttaagggacagggaagctatagacaggccttggccaagcggggcctcagctgcagttggcttcagcactgtgggcaggttctgtaggtggccacaagtcagaggccctgctggctgaggacacacacagggtcacctcattattccatggaaccttggctcttactgatattgagcatccttctctctggaaccgtgagggacagggctgggcccacagcggccctggtgggtacaaagtggaagtgggttcttaacctcgtctgtgtctagactcctcaggatgttctgaaatgcataaaataaaatcgacaggactgccgtagaaaccagttatgccgaaatgcagttctgggtaggcaaatctcaggggaggacccttgagacaggatgtcactcagcgtatctcctgagagcctgagaggccaggccagcagggaggggctcttgttcctgtcttctgccagtgtgtcctgttaatccccacagcccccgggggagtgcaggaaacacatccctttttaacggactagatttctattaatttatttaaggcaattaacatattagttctcaggccaaaggatttgtaaaacattacaccaaaaggagaaaaacaagcggtcatgaaacagccacgcaagcgcagctcagcccttgttgcctgggcgtacaactcttccccaggaagcctgggaagaggcaggtcctgggagcaagatcgtccatcatggagtcaccaggccacctggagccatgccgggggtggcatggacacgacagtgaggtctgcactggctacagcagatctgaggcacggagggagctgcacagccatgggcagggctgagcacagcacccttgaaataagttaaataacaaagccctaaaatcactagtaacagcataactgccacctcccccagaggccggcagccgccaaaatgtagtgcttggagttaaaggggtgaccccactcttaactacccacaaggaggactacaaagagttgtcagttattgctttaaggaacaaaggtctctaggtaggatttatcttctgctaaggcattaaggtaaactgagtcccagtgaactttcaagtctttttaagggctctaagcaggactgtcagctctgaggctccccctccatgctcttcaaagcctgggtgggtgtcagggtgtctggcagagtgggagtggaggctggccagctggctgggccacccaacccgagggagggggcagtgttcttcccagtcgcagtctccagtgatgagcatcccctgttggggccttcggtggctctcctcagcggctaatgcagttctggacatccacaaagcctaggcgttgcctgcgtttccgctgctccgtcatctagggttaagcagatgccaacaggcctggtcaggccgcctggcaccttccctccatgggtgctgtggaagagcttggcacccgtcttcccctgtgggcccagctgctattcggcactggcggcgggccagggcccctcggggtgctttaaggatgtcgatgtcagcaccaaacccttgttctcaattagcgtgtcacaaaccctggatttgatgcagctgggaaaccagcccactaacagaggctgcctcatcttcatgcaggcactgccagatgcagaagaggatgtctaggcaagagggccttaaactcccccatctccagtgatggggatcccctcaaaggacctacctggcagctgtcagaggaaggggatgagagacagagggccccaccaccctgtactaaagtttccacttggccttgtctttagcggcccaaggcaggggttgtcaaccccagtctgacttgccatgcaggggagagtgggtttggcacctgccttctcatccaggcccagggccagaggccagtggggaagagggtgggtcaggaaggatgaaggcaggcagggactgcccagggatagaacccagggtgggcctgggatcaggcggggtgcacacctgctccttgagctcgttgagctgggcagtgaggtgggacaccagcttcatggtggagttgagcttgtcctggagaatccgaatctcattctgctccccctcgccctcattgctgacaagggacatggcccgcatccgggggaaccagtccaggttcttgttctgaaaaacatcaccagtgggttaagcaggcgtgggcccggcctagaaaggcctcatttagaaaaacagtaatgtggggggaggcttctgccacacccttaacaaaactactcgtcagggatgtgtcatgggaaaatctgaattgacctggtcctccccggggccagagtgagctggcagtcaaccctcttgtcaaccctctgccaccgagacaggctgacttccgttaggcagcgtcggcagctgagtttgagtcctttgctggtatcagcaccatctgtttactctcataacaccccctgagaggtggaggaaggcctctgcacccagacagaccctggatctccttccttccttcctcccgcccgcctgcctgacaagcacgccccacgccccgggaagacgcgagtcagacagatggcaaattgagggatcaggaggctccgctgaggagagctggcatctgacacgtgtctgggaggcaaagccacgtttcccaggacagaggagtcggggggggagggggcaccaagcaattctcagcttccttgtagtaagctgtgaattctcagaccaacagataaacctgtacacaaagatcagtttgaaatacagactaaacgataaat

SEQ ID NO: 15547 - protein, 126 aa, Homo sapiens; identical to SEQ ID NO: 1762

SEQ ID NO: 15548 - DNA, 448 bp, Homo sapiens
ttttaaactccagatgggccgggttggcgctgcagctctgggattcattcattcatatagctcgtatttattgagcacctaccatatgcctggaacggtgctagggaaacagcagtgttaaacaggtgaagtcctgcccgcatgaagttttacattgtagttcaggacacaataagcaggagcagcactctgcaagggtgacccgccccccatgcccctcctgtctgccctgctggctgaggacacacacagggtcacctcattattccatggaaccttggctcttactgatattgagcatccttctctctggaaccgtgagggacagggctgggcccacagcggccctggtgggtacaaagtggaagtgggttcttaacctcgtctgtgtctagactcctcaggatgttctgaaatgcataaaataaaatcgacaggactgccgtag

SEQ ID NO: 15549 - protein, 55 aa, Homo sapiens [sequence omitted]

SEQ ID NO: 15550 - DNA, 392 bp, Homo sapiens
cctactggtgacttctcactgctagagaagttggagcaggaagggaacttgagttgaaaggttgcagagcctgaggcctgtgatcagatgtacgagagcttagcgcgactccattcaaactactacaaacacaagtaccctcgccccagagacaccagcttcagtggcctgtcgttggaagagtacaagctgatcctgtccacagacaccttggaagagcttaaggaaatagataaaggcatgtggaagaaactgcaggagaagtttgcccccaagggtcctgaggaggatcataaggcctgagctcaggccttacctcgtgcacatacctaggtgtggagtcttgtacattgccatcgtcaataaaactgccccagtttccccttgacctt

SEQ ID NO: 15551 - protein, 71 aa, Homo sapiens [sequence omitted]

SEQ ID NO: 15552 - DNA, 514 bp, Homo sapiens
ggcgccgactcctcccgctaaggcgggaacacgcggggcccaagatggcggccagccggtaccggcgttttcttaagctctgtgaggaatggccagtggacgagaccaaacggggccgggacttgggcgcttacctgcgacagcgggtagcacaggcctttcgggagggagagaatacccaggttgcagagcctgaggcctgtgatcagatgtacgagagcttagcgcgactccattcaaactactacaaacacaagtaccctcgccccagagacaccagcttcagtggcctgtcgttggaagagtacaagctgatcctgtccacagacaccttggaagagcttaaggaaatagataaaggcatgtggaagaaactgcaggagaagtttgcccccaagggtcctgaggaggatcataaggcctgagctcaggccttacctcgtgcacatacctaggtgtggagtcttgtacattgccatcgtcaataaaactgccccagtttccccttgacctt

SEQ ID NO: 15553 - protein, 126 aa, Homo sapiens; identical to SEQ ID NO: 1762

SEQ ID NO: 15554 - DNA, 998 bp, Homo sapiens
tgagaatttgttttcacagcaagcctcatatttttgttgcaaattgtgtggcgtaagcttaccaaatgtttcctctgacaggacaagaaaagacctgcagcaccttgtagtgagaggctttgagggcctggcaagtctgaaatgtgctgtgttctgggttatgtgtgtgtccaccctgggattggggtcatggaaagcgcctaagggaggcctcagtgtccacctggacactggaaacatggacttctggaaaagctccagagcaggggcttttttctgttaccttttttggtcagaaaagatactctttttttctccagtagttttgttaacgtgaaaatttaggctggtaaagcaaaacaatattataagaatatctaaaatttaacatgcacgtaaaattagatttcatggaacattagccctagagactttagacaaatggttccgtactggggggatggttttgccccccaggggacatgtggcaatgtctggagacatttttagttgtcacaactggtggtgcgggcagcggtgctactggcattagtgggtagaggccaggatgctttgaaacagccttcagtgatgcacaggccagcccacgacgaaaaattatctggcccaaagtgttggtagtgccaaggccaagaaaccctgctttggttcctgggtgtagggacgtgtatgttcttaaacaagagcccctcccgcctgcattgtggtggatgatggctgccttttcattgagtgcgggctgtgtgccaagcgagttacctccatgcttttctttaatccttacaacttttgagacaccttggaagagcttaaggaaatagataaaggcatgtggaagaaactgcaggagaagtttgcccccaagggtcctgaggaggatcataaggcctgagctcaggccttacctcgtgcacatacctaggtgtggagtcttgtacattgccatcgtcaataaaactgccccagtttccccttga

SEQ ID NO: 15555 - protein, 36 aa, Homo sapiens; identical to SEQ ID NO: 15533

SEQ ID NO: 15556 - DNA, 2693 bp, Homo sapiens
cagtccccaccagcccttccccagagggtcaggtgacccttccctccccaggccacggcagcccggccctcccgggcagacctcccgcaccagggctctggtgaacagcaaatgctccacgctgggacgggccattgcctgatgcctgtacatggtgggcactgagagacaagattcctgggccctgccttccatacactccccacgatctcggaggaagctctgaggaccccgctgagaacccacagacaggaggacaactgcgctatgacagcaataaaggccaagaaggagaaagttgaggaccgctgacagccccgtgtgctgttgggagctgccctttctacttcaaaccttcctctagcagactgtgcagggaccccccaccaccaccatctgccgccatggttgtgcaaaacagcgcagacgccggggacatgagggcaggcgtgcagctggagcccttcctgcaccaggtcggggggcacatgagcgtgatgaagtatgacgagcatacggtgtgcaagcccctcgtctcccgggagcagaggttctatgaatccctgccgctggccatgaagcggttcaccccacagtacaaaggtaccgtcacagtgcacctctggaaagacagcacaggccatctcagcttggttgccaacccagtgaaggagagccaggagcccttcaaggtctccacagagtcggcggcggtggccatatggcagacgctccagcagaccaccggcagcaatggcagcgactgcacccttgcccagtggccgcatgcccagctggcacgctcacccaaggagagcccggccaaggctcttctgaggtccgagccccacctcaacactccagccttctcgctggtggaagacaccaacggaaaccaggttgagaggaagagcttcaacccgtggggcctgcaatgccaccaggcccacctgacccgcctgtgctccgagtacccagagaacaagcggcatcggttcttgttgctggaaaatgtagtgtcacagtacacgcatccctgtgtcctggatctgaagatggggacccggcagcacggcgatgatgcatcggaggagaagaaggcccgccacatgaggaagtgtgcgcagagcacctcagcctgcctgggtgtgcgcatctgcggcatgcaggtttatcaaacagataagaagtactttctctgcaaagacaagtactatggaagaaaactctcagtggaggggttcagacaagccctctatcagttcctacataatggaagccacctccggagggagctcctggagcccatcctgcaccagctccgggccctcctctctgtcattaggagccagagttcataccgcttctattccagctctctccttgtcatctatgatgggcaggaaccaccagaaagagccccaggcagcccgcatcctcacgaggctccccaggcagcccacggtagctctcccggtggtctcaccaaggttgacatccgcatgattgactttgctcataccacatacaagggctactggaatgagcacaccacctacgatggaccagaccctggctatatttttggcctggaaaacctcatcaggatcctgcaggatatccaagagggagaatgaaacttcctgggcttatctggattcttctgggctatagatctcaaatagagacctgttggttgctagggtagtccagacaccccttagatgtcttcataatagtcctatctaccttcaaaaaccatctctatatatggcagactatattaacagctgctgaacaaatcagctctggaggtgattccacatcccctggcattatgctctaatgctgctcatcggagaacagacagccaggataaagtggcaccttctggagtacactggagggggcagcccaagttagaggccagcattgctgacattctggaatatttgcatctaaaaatgtttactcgttgccatgctgcagtccgcacaagctgtgaggcagaaaacttgacttgaagcagccttgaagagtgagttcatgagctcatggtttttctccttgtatggactgctcgctccaagggcaggcagagctcatgaatgcctcttatcttcctaagcggagttttaggtgacacaggatgaagcagaagagatctacccatctcatctgctctgcacccagcttctaagtggacaaagccaagcccaggcatgagctctggcaaagcaagaccccagattctccatttttgcctgtggaaaggagggtccctttacaggcttttttttcctttttttcccccaaaatctcttaaaatgaggaatctcttagcagactttggagttccccattctgccacattctgaccatgagacgcggcttgcagtgggggtgaacgcacataaaaagggaccactgacgtcctgctctactctctgctttctatttatttattttgggggtgggttggggagtcagaagaacctggaggacggaggaaaccaggggcaatgtttacaagactggtggacaagtgtaaatatggaataagaacaaacagttctaattaattccttcttctgcagtatggaaacctattacgatgcccttgagtcaagcactgagatacgttacccaattagggaaataaatttgttaataaaattgctgaggtcaccagt

SEQ ID NO: 15557 - protein, 410 aa, Homo sapiens; identical to SEQ ID NO: 1764

SEQ ID NO: 15558 - DNA, 543 bp, Homo sapiens
ttccgcgcctcaaaggcggagtgcggggctgtgggagaaaacgagagcctcgggctgtcgcccggcgacgggcggctgaggccttcgtattcttagaacttttagaatctgaagcaaacttatcttccccctgtctgaagaaggggagcaggtttctgagtactccggggcgcggtgcctccccctaaacgcgaatggaacttttgggaaatgcccctcccccagccccttgtctggggcaacttccttgtctcttctcccccaccggtgttggggagttccttgtctccactcccaaccacagagccacaagtacattatctatgcccaggcgagtccctatgcccaggctaggagagccgcacttcttcctacagctgacacgtttggtttttggaggggaaaggggagctgtagctgaatcagtaatggaaattgatgaacctgtgatgtgactcctgggagtagtttgcaatcaccattggcccaaaaggagccatctacgtgctcagtggggtctagtaaaggataatattaattctt

SEQ ID NO: 15559 - protein, 86 aa, Homo sapiens
MELLGNAPPPAPCLGQLPCLFSPTGVGEFLVSTPNHRATSTLSMPRRVPMPRLGEPHFFLQLTRLVFGGERGAVAESVMEIDEPVM

SEQ ID NO: 15560 - DNA, 1093 bp, Homo sapiens
gggggcgtcggagtcaaggtccctggagctgccgctctggctcctgggcgattccggggagccattctccccaatttgccaactccctgggcatctctctctctcttcctggtcccgccacacccaaacaactcttatagttccacccggtatactggtctcttgacaggaacttttgggaaatgcccctcccccagccccttgtctggggcaacttccttgtctcttctcccccaccggtgttggggagttccttgtctccactcccaaccacagagccacaagtacattatctatgcccaggcgagtccctatgcccaggctaggagagccgcacttcttcctacagctgacacgtttggtttttggaggggaaaggggagctgtagctgaatcagtaatggaaattggttcttccatctctgcttctctctacaaagctgctttataatctcggcagagctgttttcactgcttttttgggaacgtaatccaggtttacccagcctcacttcaagaacaaacagagactaattagtatctatgaatcccaatccccaggagaaagaaactgattggttcgatttatgtccgcttgtgtactcttggtacaatcacctttgaccaacagggcagttatgtagtcaggtctttttgttttgtaaagcagacatggctgccagaaccccatctttgtaggctatgttctcaaagttatgtacttggcaaagattccaaaaaatgtccaccacagaccataaaggagtaaattgcagctgaacttcaaaagcataaagaacaattgacatgttaaggattttcaacagactgactcctacttaaacaaattcagacctgaatttaaatggaactccttcaaagaagtcatccctgacccaagccccaatcaaaatttggtggccccattattatcttacatggcactctttttctttatagtacctatcatagtttaaatatgtatttgtgagtctcctctccaaaaatcatgtctgttttgtttactgtgatatacacaatactcaaggtgcatttgggaggcgttcaataaatgttgtatgaataaaagcac

SEQ ID NO: 15561 - protein, 51 aa, Homo sapiens
MPRRVPMPRLGEPHFFLQLTRLVFGGERGAVAESVMEIGSSISASLYKAAL

SEQ ID NO: 15562 - DNA, 1373 bp, Homo sapiens
gttacggagacagcagggcccggggcttcagagcggccgctgcgactccggagccggcggggggctccggtccttccctgcgccaccgcacaggacatctctctggctggggagcggcggtgagacccgccgagggcgtctgtgtccctcctcccccgcggtcctcggtgcgtccgcacgcccctcctcctcggctccctccttcttctctccgcgcctctccgccccctccccgtctccgcaggccgagtggtgcggcccgcctccagctgaccggcctggaatcccggctccgagccccggactcgcgcccgcccgcgcgcccgctccttccccctccccccgccccgagccccccgacgccgccgccaccgcctcctcagagcggggcccgggcccagccgccgccaccgctgccgccgccgagctccgccgccgccgagcaccatgggagacgctgggagcgagcgcagcaaagcgcccagcctgccgcctcgctgtccctgcggcttctgggggtccagcaagactatgaatctctgttccaaatgctttgctgattttcaaaagaaacagccagacgatgattccgctccaagtacaagtaacagccaatcagatttgttttccgaagagaccaccagtgacaacaacaatacctcgataaccacgccaactcttagtcccagccagcagccgcttccgacagaactgaatgtaacttcaccgagtaaagaggagtgtgggccatgcacagacacagctcatgtctcattaatcacaccaacaaaaagatcctgtggtacagattcacagtctgagaatgaggcttcaccagtaaaacggccacgactacttgagaatacggaacggtccgaggaaaccagtcgatctaaacagaagagtcgacgtcggtgcttccagtgccaaaccaaactggagctggtgcagcaggaattgggatcgtgtcgctgcggttatgtgttctgtatgttacatcgcctccccgagcagcacgactgcacattcgaccacatgggccgtggccgggaggaagccatcatgaaaatggtgaagctggaccggaaagtggggcgctcctgccagcgcatcggggaggggtgctcctgaaggccaggcatggccaccacgtgacgctgttcttagttcactaatgttagccttatttaggacaaagtcagccagacaccttgtactgggcacgcgtcagactgcagccagtccgtttcctttctttagccagccatcctggtactgtagtttaggggttgatggtggttgaaattgatttctggctggttactaaggtgcctgctagccattgtataaaattaaaacatgaagaatatttt

SEQ ID NO: 15563 - protein, 227 aa, Homo sapiens; identical to SEQ ID NO: 1766

SEQ ID NO: 15564 - DNA, 3367 bp, Homo sapiens
gttacggagacagcagggcccggggcttcagagcggccgctgcgactccggagccggcggggggctccggtccttccctgcgccaccgcacaggacatctctctggctggggagcggcggtgagacccgccgagggcgtctgtgtccctcctcccccgcggtcctcggtgcgtccgcacgcccctcctcctcggctccctccttcttctctccgcgcctctccgccccctccccgtctccgcaggccgagtggtgcggcccgcctccagctgaccggcctggaatcccggctccgagccccggactcgcgcccgcccgcgcgcccgctccttccccctccccccgccccgagccccccgacgccgccgccaccgcctcctcagagcggggcccgggcccagccgccgccaccgctgccgccgccgagctccgccgccgccgagcaccatgggagacgctgggagcgagcgcagcaaagcgcccagcctgccgcctcgctgtccctgcggcttctgggggtccagcaagactatgaatctctgttccaaatgctttgctgattttcaaaagaaacagccagacgatgattccgctccaagtacaagtaacagccaatcagatttgttttccgaagagaccaccagtgacaacaacaatacctcgataaccacgccaactcttagtcccagccagcagccgcttccgacagaactgaatgtaacttcaccgagtaaagaggagtgtgggccatgcacagacacagctcatgtctcattaatcacaccaacaaaaagatcctgtggtacagattcacagtctgagaatgaggcttcaccagtaaaacggccacgactacttgagaatacggaacggtccgaggaaaccagtcgatctaaacagaagagtcgacgtcggtgcttccagtgccaaaccaaactggagctggtgcagcaggaattgggatcgtgtcgctgcggttatgtgttctgtatgttacatcgcctccccgagcagcacgactgcacattcgaccacatgggccgtggccgggaggaagccatcatgaaaatggtgaagctggaccggaaagtggggcgctcctgccagcgcatcggggaggggtgctcctgaaggccaggcatggccaccacgtgacgctgttcttagttcactaatgttagccttatttaggacaaagtcagccagacaccttgtactgggcacgcgtcagactgcagccagtccgtttcctttctttagccagccatcctggtactgtagtttaggggttgatggtggttgaaattgatttctggctggttactaaggtgcctgctagccattgtataaaattaaaacatgaagaatattttttttttgagcatggctagtggatttaaaacaacacatacctgtcactgctggagtcaaacttataaaaagccttaagtggaaagtgttccagacggagactctgagttaatagaggagtagaagctggtgttaaagttcccacgacgcacatggctttgccagaaactctgtttaatgatcggcctttcacctcttcacttatccttagtcccagtagccaggatacctgatggccacgtgtgccttggccacgggaggctgctgagattggccacgtggctgggctgggtggtggcctcactctcccacagagctggaaatggggggtgggggacagattcttacggaaatttttttacctgacttgctatgaaaaaactcatcacacaagaagagaaacagtaacctcactttgaaaattagctccactcaagactagtccacgaacgagacccgccttttctacacaggatccaaggtcacgagaagcagccagagtgccccgcctccgccggctctggtctgccattcgccagtgcagggatctggcacggaccagatgtggcgaatggcagcacagcgcggtggctgggtctgcacactggcctctgcagccagatttctatattgggagttttttaaaaagacatttcatagccaacaagaatcagtagaagtgctgggagcagcagctggggaagctgccgcccacgggctctgccccttccagctggagccgcccgtgcctccaggggccaagaggatgatgtcgtggcctccattctcgtttctatgcagccccatagtccaaggacacccagtccacatctaccatatagcaagtttagtaagggaaggcagcatacgtcccagggacagtgggtttggatctgtctagaacagcggtttgtggctgtggcccagctccgagagtgatatttgctctggtaggtgagggcctgagggtacatttctccacctgtgccccctcatgttcacagaggatttcagcagctgcaactgcgcacgccaggtggggaagggtgggggtgggcctggttgccccatgttaggaaatcactaccagtcaggtggggctggggctgggtggacaggatcaggattcccttgaaagcccaggcagggtgagcagtcccagtggtcctagtgccgcatcagatccaggtgggtgagggcaggaggcccctgcggaggcagcgtggatctgcccacacataggctactggaatagtttaacccagcaactttcctttttataaaacaacaaatggttcaactctgtctgcaaattaacagctgaacacctgcaactgcaaatgttttttgatccgacgtactgaaataggaagtcatgctcttcccaccctccacccaccagagtggaacccgctgcaaaatccccagccttaattcttgcttcaggacccagaccggtgtcttgctctagggcaacccagggcagaggggccaggtctgcccagcgtttaccactgctgtcaagccacagcccttggccaccatacgggccatcctcagtgaggcagccccccataggcttccgccaagctctggtcccgaagaggctgtgcgagcccttcccggccctccccagggccccccgccccctcctctgcctgctgcgtggaggcagccatgggaaggagcccaggggagctggcctgggggagcgaagcccatgttcgcttcctgacttagagctggggggggtggggggtggggcttgttcccctgcagtatctgttctgtgaagtttgttaaatgtaaggaaagcttaaattcttgtatctttaaaagagaaaatcttatttaacccttttgtgttctagatttacttacacacatagcctagagctcagttttagttttaacattgtgaaaatattaaaagaatcttgtaactttattcttttttctcctgctgaaaaaaaaaattaaaccaatcgtatgaaag

SEQ ID NO: 15565 - protein, 227 aa, Homo sapiens; identical to SEQ ID NO: 1766

SEQ ID NO: 15566 - DNA, 229 bp, Homo sapiens
cacagaaacagggaactcaggcctcagagactacatgaacatgtcctcccaaatcaataaaaaaaattaaaagtttctacatgcaagtatttttgtgggtcaatatacaaaaacacttctccatttattttattttatttcatttcatttttcgagccggagtctcactctattgcccaggctggagtgcatggcgatttacaggctcaaacccactgctgatcagtcc

SEQ ID NO: 15567 - protein, 48 aa, Homo sapiens
MQVFLWVNIQKHFSIYFILFHFIFRAGVSLYCPGWSAWRFTGSNPLLI

SEQ ID NO: 15568 - DNA, 660 bp, Homo sapiens
tgcggtggctcaagcctgtaatcccagcactttgggaggcggaggcaggtggatcacgaggtcaagagatcgaggtcatcctggccagcatggtgacaccccgtctctactaaaaatacaaaaattacccaggtgtaatggcacacgcctgtagtcccagctactcgggaggctgaggcaggagaatcacttgaacccgggaggcagagcttgcagagagctgagatcgcgccactgcactccagggatattctaaaataaagtaacatcaagttgccgtaatatttatgacactatttaaattgtatcaatataattttaaacaaagtgtatttttgtgtatatttagcatattggtatacacgctgttctctatatatgttgttctttaataagagtctatcggccgggcgtaatggctcatgcctgtaatcccagcactttgggaggctgaggtgggcggatcaactgaggtcgggagttcgagaccagcctgacaacatggagaaaccctgtctctattaaaaatacaaaaaagttagccgggtgtggtggcgcatgcctgtaatcccagctgctcgggaggctgacgcaggagaatcgcttcaacctgggaggcagaggttgcagtgagccaagattgcaccattgcactccagc

SEQ ID NO: 15569 - protein, 34 aa, Homo sapiens
MTLFKLYQYNFKQSVFLCIFSILVYTLFSIYVVL

SEQ ID NO: 15570 - DNA, 1658 bp, Homo sapiens
tatttttgagacagggtctcactgtgtcgcccaggcggtctcaaactcctgagctcaaagtgatctgccccactcggcctcccagattgctgggattacaggcatgagccactgtgcctggctggttctgtttcttctctagtcttacttctgtcaggctcacttacctgacttcatgtagaagcattcttcctggatccatgttattctcttttctgctaacctgatattctctttctagcagtgctagttacttgtttctttcagtattcagcatatatagcttttcgtgactgcttcagattacactcaaaattccacctgcacaatgaagcagataccacctacggacttccaccttcccttatttccccttccatttagtcaggggcaccctccactccacctgtgtatggtttgtatttactttaggttgtctttaagttctaaactcctcaaggcacaatttgattttgttctcttgatactgtgcctaatacctttgtatttcataaataataaaatatacatatttcttattttttatatacaataattttgtgaggatgtatttaataatgctaattaacaaagcaaatactgtacctaaaacaaaatgcatggttataattgtccgtttggttttttatttttattttttttgagagtgaaagtttattacaaatgaaagatttgacaaattattaaaaaagctgacaacccacataaacatcgcaaaatctagatgattaatattatttattgtttaactcttgacctttttttttttgagacaagatctcactctgttacccagactggagtgcagtgccgtgatcaaagctcactgcagcctgacctcttgggctcaagcaatcctcccacttcagcctccccaatagctgggaccactgacaaacgccaccatgtctggcctttttactttttgtagagatggggtttcaccatgtatagctgtcctttttatgtgtttgtgcaactatattagaaaatccagaataatggaatcataaaaatagcccacgttcagatatgctttataataatctgattaggataaatattatgtttatcaacacaattgtttatttgttaagaatgaaacactgtgctaaggctctgcagaaacatataacatgataaataccttgtattggggagacaaatgaagcgaatacaagtgagtctgaaaaacatggtactgtggaaacaatggtaagtaaacataccaggcaaactgtgtgggaataaaagtatctatttttaaagaaaaaaaaaattagaggcccagcaaatttcaaatactatttagcatggggcagtttttttggatttataaattggattgaatctcaaaaattcattgaaatgatgtgtgatttatggaacaaactaaacatatggagggtttgtagagtaaaggagtttcattttcagcagttgtagaagtcttgctgaggaggcgacttgtcgagcagcttgagattattatggatttttacagtaagagaaaattgtaggtaatagcctaatatggtctaatctcaactttaccagtccctgcctccataagagtataatagtttatgtgatggcttgaatgccagatgaccaggtccagtgtgtgtgagggtgtg

SEQ ID NO: 15571 - protein, 75 aa, Homo sapiens
MKQIPPTDFHLPLFPLPFSQGHPPLHLCMVCIYFRLSLSSKLLKAQFDFVLLILCLIPLYFINNKIYIFLIFYIQ

SEQ ID NO: 15572 - DNA, 363 bp, Homo sapiens
cttattaacagctccatcttctccattgtaatatttccttaaaaagaaaatttgcagacatggtctgaatgatttagagtgatgtgtaacagtttggacaggctggttgcacccctgaaagcctcctttgtcattgccagctaggatgtcatctgtttgaactggtctttttcgtgtttgcctagggtgagtagagagtggtgatttagtagagctgttggctgcttcctggctgctgtaggaagttagtttttctggctatatgtgtatgaggcgggaagcagattgttaggagtctttaatattctaattttacctctgagaaaactgggatgacttagagtgtagtaggtattttgggtt

SEQ ID NO: 15573 - protein, 31 aa, Homo sapiens
QFGQAGCTPESLLCHCQLGCHLFELVFFVFA

SEQ ID NO: 15574 - DNA, 509 bp, Homo sapiens
gatgtcatgtcacttataacccaatgtcctttgaaagatctctttttttaagttctgtgggtttgaatatttcccactggaggagggtctctggaaacctcaggagtctaaggaataactccgcctgattcttaaaagctagtcacgtgtgctaacattggtttccagaactcagcgtcttgactcattggacaggcattttccctctgtgtgtctgtggagactgttgtgaaggaggatccccttaggatttgtgattatttttattttattaatttaatttaatttttttcatttttaaaatttattttattatttattatttactttattttctttgagacctagtttcactctgtcacccagactggggtgcagtggtgcaatcttggctcactgcaacttttgccccccaggagaatcgcttgaacctgggaggcgtaggttgcagtgagccgagatcacaccactgtactccagcctgggctacaagagcgaaactccatttc

SEQ ID NO: 15575 - protein, 34 aa, Homo sapiens
MSFERSLFLSSVGLNISHWRRVSGNLRSLRNNSA

SEQ ID NO: 15576 - DNA, 663 bp, Homo sapiens
caagtagaattgcttttacttatccccctattggagtttaaacaatttttaaaaaaataaaagcaaattcagataccaaacaaaccaaaaaacttactgtgatgatcctgagaggttttgagatgatgttgatctcagattcatccttgatcaaatttattgtattactagagaagtacatttttaccagtgaaaatacagtcaagtgtgaacattttaaatgcagaaagcctgagattttgtcctattcaataaaacggctgaattatagaatactcaagagatgttgttttccttaagaagatatactataaatattcatgcgtactaagcctatagaaacataaactaggcttagttcaacaataaatacttgcaagctcaatgaagacataatggatacaaagatgataccctcaggaagcttatagtttagttctaaattacactactgtattttcttttcttttttttttttttttaaagaaaacagtttaacatcaaatgtttcccaggtttactttttgcacagtgcatacagttttgggaaaatatgtggttacaacacgatattctaggccagttatgttggctcacacctgtaatcacagcgctttgagaggctgaggcgggcggattgcttgaacccaggaatccgagaca

SEQ ID NO: 15577 - protein, 65 aa, Homo sapiens [sequence omitted]

SEQ ID NO: 15578 - DNA, 650 bp, Homo sapiens
ttttcttttcttttttttttttttttaaagaaaacagtttaacatcaaatgtttcccaggtttactttttgcacagtgcatacagttttgggaaaatatgtggttacaacacgatattctaggccagttatgttggctcacacctgtaatcacagccctcccaaagtgctgggattacaggcgagagctacagtgcctggctagtccagaatcttaacattgctatttgtatatctttttccttctgccttcagggaacccctcaatcactgcttattactgtgagtttgctctaacctgctgccatcaccttctgtcgtccgaatgaaaaaactaattttttcttgatgactctaatattgtttgaggggcaattcttctttttctcagcttttctcattaatgttgttatcttttatatgaaactgaaggatggccaaatcccattatccagctatcctgggtcagctttctaggttttacagtggtcccttggaggattttaggagtcctgtattttaaaaatttggtgacatggggtttagtgtagaagatgcagagaggccatgggaagggattccagtttgtatcccagaacatggatatattcaggttgagatcttgtgattgtcaaaaactcttgtgtattt

SEQ ID NO: 15579 - protein, 51 aa, Homo sapiens
MFPRFTFCTVHTVLGKYVVTTRYSRPVMLAHTCNHSPPKVLGLQARATVPG

SEQ ID NO: 15580 - DNA, 2602 bp, Homo sapiens
taaaaatcaaagccgttgaactcatggacataaaaagtagaagattcacagtctgagaatgaggcttcaccagtaaaacggccacgactacttgagaatacggaacggtccgaggaaaccagtcgatctaaacagaagagtcgacgtcggtgcttccagtgccaaaccaaactggagctggtgcagcaggaattgggatcgtgtcgctgcggttatgtgttctgtatgttacatcgcctccccgagcagcacgactgcacattcgaccacatgggccgtggccgggaggaagccatcatgaaaatggtgaagctggaccggaaagtggggcgctcctgccagcgcatcggggaggggtgctcctgaaggccaggcatggccaccacgtgacgctgttcttagttcactaatgttagccttatttaggacaaagtcagccagacaccttgtactgggcacgcgtcagactgcagccagtccgtttcctttctttagccagccatcctggtactgtagtttaggggttgatggtggttgaaattgatttctggctggttactaaggtgcctgctagccattgtataaaattaaaacatgaagaatattttttttttgagcatggctagtggatttaaaacaacacatacctgtcactgctggagtcaaacttataaaaagccttaagtggaaagtgttccagacggagactctgagttaatagaggagtagaagctggtgttaaagttcccacgacgcacatggctttgccagaaactctgtttaatgatcggcctttcacctcttcacttatccttagtcccagtagccaggatacctgatggccacgtgtgccttggccacgggaggctgctgagattggccacgtggctgggctgggtggtggcctcactctcccacagagctggaaatggggggtgggggacagattcttacggaaatttttttacctgacttgctatgaaaaaactcatcacacaagaagagaaacagtaacctcactttgaaaattagctccactcaagactagtccacgaacgagacccgccttttctacacaggatccaaggtcacgagaagcagccagagtgccccgcctccgccggctctggtctgccattcgccagtgcagggatctggcacggaccagatgtggcgaatggcagcacagcgcggtggctgggtctgcacactggcctctgcagccagatttctatattgggagttttttaaaaagacatttcatagccaacaagaatcagtagaagtgctgggagcagcagctggggaagctgccgcccacgggctctgccccttccagctggagccgcccgtgcctccaggggccaagaggatgatgtcgtggcctccattctcgtttctatgcagccccatagtccaaggacacccagtccacatctaccatatagcaagtttagtaagggaaggcagcatacgtcccagggacagtgggtttggatctgtctagaacagcggtttgtggctgtggcccagctccgagagtgatatttgctctggtaggtgagggcctgagggtacatttctccacctgtgccccctcatgttcacagaggatttcagcagctgcaactgcgcacgccaggtggggaagggtgggggtgggcctggttgccccatgttaggaaatcactaccagtcaggtggggctggggctgggtggacaggatcaggattcccttgaaagcccaggcagggtgagcagtcccagtggtcctagtgccgcatcagatccaggtgggtgagggcaggaggcccctgcggaggcagcgtggatctgcccacacataggctactggaatagtttaacccagcaactttcctttttataaaacaacaaatggttcaactctgtctgcaaattaacagctgaacacctgcaactgcaaatgttttttgatccgacgtactgaaataggaagtcatgctcttcccaccctccacccaccagagtggaacccgctgcaaaatccccagccttaattcttgcttcaggacccagaccggtgtcttgctctagggcaacccagggcagaggggccaggtctgcccagcgtttaccactgctgtcaagccacagcccttggccaccatacgggccatcctcagtgaggcagccccccataggcttccgccaagctctggtcccgaagaggctgtgcgagcccttcccggccctccccagggccccccgccccctcctctgcctgctgcgtggaggcagccatgggaaggagcccaggggagctggcctgggggagcgaagcccatgttcgcttcctgacttagagctggggggggtggggggtggggcttgttcccctgcagtatctgttctgtgaagtttgttaaatgtaaggaaagcttaaattcttgtatctttaaaagagaaaatcttatttaacccttttgtgttctagatttacttacacacatagcctagagctcagttttagttttaacattgtgaaaatattaaaagaatcttgtaactttattcttttttctcctgctgaaaaaaaaaattaaaccaatcgtatgaaag

SEQ ID NO: 15581 - protein, 112 aa, Homo sapiens
MWRMAAQRGGWVCTLASAARFLYWEFFKKTFHSQQESVEVLGAAAGEAAAHGLCPFQLEPPVPPGAKRMMSWPPFSFLCSPIVQGHPVHIYHIASLVREGSIRPRDSGFGSV

SEQ ID NO: 15582 - DNA, 1092 bp, Homo sapiens
acgggctctgccccttccagctggagccgcccgtgcctccaggggccaagaggatgatgtcgtggcctccattctcgtttctatgcagccccatagtccaaggacacccagtccacatctaccatatagcaagtttagtaagggaaggcagcatacgtcccagggacagtgggtttggatctgtctagaacagcggtttgtggctgtggcccagctccgagagtgatatttgctctggtaggtgagggcctgagggtacatttctccacctgtgccccctcatgttcacagaggatttcagcagctgcaactgcgcacgccaggtggggaagggtgggggtgggcctggttgccccatgttaggaaatcactaccagtcaggtggggctggggctgggtggacaggatcaggattcccttgaaagcccaggcagggtgagcagtcccagtggtcctagtgccgcatcagatccaggtgggtgagggcaggaggcccctgcggaggcagcgtggatctgcccacacataggctactggaatagtttaacccagcaactttcctttttataaaacaacaaatggttcaactctgtctgcaaattaacagctgaacacctgcaactgcaaatgttttttgatccgacgtactgaaataggaagtcatgctcttcccaccctccacccaccagagtggaacccgctgcaaaatccccagccttaattcttgcttcaggccccccgccccctcctctgcctgctgcgtggaggcagccatgggaaggagcccaggggagctggcctgggggagcgaagcccatgttcgcttcctgacttagagctggggggggtggggggtggggcttgttcccctgcagtatctgttctgtgaagtttgttaaatgtaaggaaagcttaaattcttgtatctttaaaagagaaaatcttatttaacccttttgtgttctagatttacttacacacatagcctagagctcagttttagttttaacattgtgaaaatattaaaagaatcttgtaactttattcttttttctcctgctgaaaaaaaaaattaaaccaatcgtatgaaag

SEQ ID NO: 15583 - protein, 57 aa, Homo sapiens
MLFPPSTHQSGTRCKIPSLNSCFRPPAPSSACCVEAAMGRSPGELAWGSEAHVRFLT

SEQ ID NO: 15584 - DNA, 2078 bp, Homo sapiens
tgcgatgtcagagggcttgcagggagctgtcggccccacagcagtcatgggttgagagtgggctcagtcagccaggttccagagggtgttgctgggccccccaggtggctgtgccaggtgaggatgggactagagagctgtgtggggaccagataggggagagggccctcctggggggcctgtcatgagcagggacaaagggtgtgacatcagcagtcctggtagactcaaggcaggaagtgcgggtagggcagtggacggcaggaggagggagagttctggcaccttccatgaggcactcaaaggaagacctgccccttccaggccccgcggttcctcctccacttggtcagctctggcagcagggaagggagccccgggcctggagtcaggatgcggttctgggccagatcagcctctcctaggctgggagagctctaacggggccccggcctctcgttccctagctggagaatgtggaaggttccacaatctcagacccttgcctggtggctctcagccatgactgcctttagaatcacccgcggagtttttaaagatttccgtgtctgaatccgcccaagaccaaaaccaagtcagtctctggggtggccggtcaggggtggttcctcacaaagctctgcaggcaattccagggtgcagccagatcaaagccaccaccctaatgcagccttgctgctgccctgccgcgcgaaggcacgaaagcctgaatctggaacctgcgacaccctcattctccaactggagcgccccagtgtgcagacggagcgagtcctgggtggattttctcagaaatggcttcccattttttttccccttaaacttgcaaggcccatggaagctgggcaatagtgtgtgatggaggacatcggacttggccccacatgatgtcattgtcttccgtgggtgctaggtgcttttcataggcccctgggcacctccacctccaagcagggccctggggcacacctccctccaggcagggccctggggcacacctccctgcccactcccaaaggaccaggcccctagaggtggaggtgttggggggaaggtggctccaaatactctgaggagcccacatttccaaaagggacccaaaaaagacaggagacacagccgggaggagtgcgcaggagtggagtggacggaggtgcctgacagtgaaatgcagtgttaggactatgttgtaataaaaatgcaggcagaaagggccactggtgtagacccagagaatgttaacatcatcacaacggctggcgtctctctcgctcgctctcttacacacacacacacacactcaccacctcccccaacccctgccccaggctcatttaaccctcacagtcccaaaaggtgctactgttagctccactggacagatgagaaaaccaaggctgctgagcaggtgcggggaaggaaggaagccccatggcgttctttgccttggagcagatagggcctgccctggcggaggcgcggccactctgaattgctcgtgggtccaaggactgggttcaacatggaaacgtccagtccagcctgcccggggctttgggtcatcctgtttcttggcttccgccatttcctgagctgctggcaccttcttgttttccattctggttttgtttttttgttgttgttgttgtttttaaacgattggtctttttggtcattgcttatgatggggtgaaggggtgtaacgtgcttatcttaccttttgcacacattccattttagtcaagactgtcaacttgccctccaaactggcagtctgccacctggaattcaaagtccaagatctttaaaattaaactaggtgaaacaagtagaatgttctggaatttttgaggtctcagctaggtgaggagacaatgaaatgtggagccacttcagaagagtctgtccttccacgtcctgggccagtgaatcctggtatggaatacgcagggtggctacggggcgctggtgggaaatcccgtcaatggaagaaatgctaagactctagaggtgggcaaagggtgtctttagagtctgtcgtcagtccccaccaaaat

SEQ ID NO: 15585 - protein, 118 aa, Homo sapiens
MLTSSQRLASLSLALLHTHTHTHHLPQPLPQAHLTLTVPKGATVSSTGQMRKPRLLSRCGEGRKPHGVLCLGADRACPGGGAATLNCSWVQGLGSTWKRPVQPARGFGSSCFLASAIS

SEQ ID NO: 15586 - DNA, 433 bp, Homo sapiens
tgtgtgtgtgtaagagagcgagcgagagagacgccagccgttgtgatgatgttaacattctctgggtctacaccagtggccctttctgcctgcatttttattacaacatagtcctaacactgcatttcactgtcaggcacctccgtccactccactcctgcgcactcctcccggctgtgtctcctgtcttttttgggtcccttttggaaatgtgggctcctcagagtatttggagccaccttccccccaacacctccacctctaggggcctggtcctttgggagtgggcagggcctatgaaaagcacctagcacccacggaagacaatgacatcatgtggggccaagtccgatgtcctccatcacacactattgcccagcttccatgggccttgcaagtttaaggggaaaaaaaatgggaagccatttctgag

SEQ ID NO: 15587 - protein, 33 aa, Homo sapiens [sequence omitted]

SEQ ID NO: 15588 - DNA, 507 bp, Homo sapiens
tacagcacaagtcaccactttatttctaagagaaaacctgcattttcacacacatggactcaggggtttcgaacacacggtttgtacatctgcccgcttaggttgctctgcaaaatgaggaagaagccgcatcgtgctcacaaataatacacattccacatagcagcacagccttttgggcatctttggagttttagacggagcttctggagtcacagagccattcccaacccaggcctggcatggtccctgcccttgcatcagagtggcctgggaggtacacacatctttacaggcccagaaacgccaaaggctgggaggctcttgttctctggtgaatccggattcaagacaggcttcgcaaaagcagctcttgggccgagcccagtatcccccagcctgggcggccgggctgtgctccctgaggaccttactggcagcaccctgccctgctgaccctggaagcagctgattgaggggcctgggaagaccccatggcctccagca

SEQ ID NO: 15589 - protein, 31 aa, Homo sapiens
MVPALASEWPGRYTHLYRPRNAKGWEALVLW

SEQ ID NO: 15590 - DNA, 8192 bp, Homo sapiens
ggggcggtggcgcagagaggggtgcggagcgggcggaagaggcgtctgtgtcgcagcttggtctcagaggagcatcgctgggaacaacgactatcgtctattccacaagatgagtaacagccaccctcttcgcccctttactgcagtgggggaaattgatcatgtgcacattttgtctgaacatattggtgccttgttgattggggaagaatatggcgacgtcacattcgtggtggaaaagaaacgttttcctgcccacagggtaattttagcagccaggtgccaatattttcgagcattattatatggtggaatgcgagagtctcagcctgaagcagaaattcctctccaagacaccactgcagaagcattcacaatgctactcaaatatatctacactgggcgggcaacgctgacagatgagaaggaggaggtgctgctggactttttgagcctggctcataaatatggatttccagagctagaggattctacctctgagtatctctgcaccatacttaacattcagaatgtctgcatgacttttgatgttgccagtctctactcacttcccaagttaacttgtatgtgctgcatgtttatggataggaatgctcaggaagtcctctcaagtgaaggtttcctctccctttctaagacagcacttttaaacatcgtgttaagagactcatttgcagctcccgaaaaagatattttcctagccttattaaactggtgtaagcacaattcaaaggagaatcatgctgaaatcatgcaggctgtgcgtttacctctcatgagcctcacagagcttctgaatgttgtgaggccttcaggactgctgtctcctgatgccatcctggatgccattaaagtgcgatctgagagccgggatatggacctcaattatagaggcatgctcataccagaagaaaacattgcaactatgaagtatggagcccaagttgtaaagggggagctgaaatcagccttattagatggtgatactcaaaattatgatttggatcatggattttcaaggcacccaattgatgatgactgccgttccggcatcgagattaagctaggtcagccatccattatcaatcacatacggatactcttgtgggaccgagatagccggtcttactcatacttcattgaagtgtcaatggatgaacttgattgggtcagagtgatagatcattcacaatatctgtgtcgttcttggcagaaattatattttccagcccgtgtctgcaggtatattcgaattgttgggactcacaacacagtgaacaagatttttcacattgtggcttttgaatgtatgtttacaaacaaaaccttcactcttgagaaggggctgatagttcccatggagaatgttgcaacaattgctgattgtgccagtgtgattgaaggagtcagtcggagccgaaatgccttgctgaatggggacactaagaattatgactgggattctggctacacatgtcaccagctaggaagtggtgcgattgtggttcagttggcacaaccgtacatgattgggtcaatacggttactactttgggattgtgatgatcgaagctatagctactacgttgaggtttctaccaaccagcaacagtggaccatggttgctgacagaactaaagtctcctgcaagtcctggcagtcagtaacttttgaaaggcagcctgcctccttcatccgtatcgttgggacacacaacacagcaaatgaggtgttccactgtgtccactttgagtgtccagagcagcagagcagccagaaggaggaaaatagtgaggaatcggggacaggggacaccagcctggccggtcagcagctcgactcccatgcgctgcgggcgcctagtggcagctcactaccctccagcccaggctccaactcacgctcccccaaccggcagcaccaataaaggaggcagcgggcctggtgtgacttggtgggctcgggcaacggcaggaaacggtctcctccctgagcaggggtctctgttgactgcccccacctctgcccctttccagggaggagccgacctagctgcaaaagcagacaccgaacaggttttctcccaaggacagaaaggggctgctttgttcttctcaatttatccaaatcaggcaggtctcaagggggagaaaatgggtcttcaatcttcatcaagtccaccattaacaccctacctctctaatctagcccaggcgcagggaacaggaggaagtcatagacaggcctgtgttggaatacaaaaatggcacgcaaacactcaggcggaggagaaagccattgggcctttgctacctggaggcaccctttaggaatgggcctccatagagtgttcattctgctggaatacattgccctggcaactaaatgattttttatttgttttagttattctccactcagtgaatcataggtgttccggatctatttgaaatgctcaaacagcaaatcactagttttaatcccttttgatgctataattttccttccttggttttgaacggttcagcttgcggggacagagacccatcgtgcatgtctcctaaatgagacacggatgcagctcatcctggcacttgggccacagaggaagtgccacaaatgcacacaagcaaatcaacctgtggacactggagttaatagtcactcgtgtggctgagttactcacctgtcattcctgacatggatccagcctttaagcttgggaggctgacaaggaaatagttactatgcccgctgctaattcactgttccgaagtccatgtagataaacatataccgagttctggcgtggccaaacctgccggggactgccgtggcttagctgcccctccagttgtgtttatcgaagcattggagaggcagccacctgcccatcagcgtcaggaacgcagaactgggactccgtgcttcccccacaccacagtactcaactggggactgaaaaatagcagttccaagaagcttttctcctaatcctcatcaaaaggacctcatttgacgatggtggcttgatgtggctccgtctcctacttagtgatttccattccagtgctgcctgccctgggtaactgcgcacaacattgcctgcccctccgctgtccccagagctccggcctctgtcgccatcagcatcagcctgggagtctccccaggacggcatggcacgtgagcagcactgcagtccttgggtcttcggcgccaacctgcaaccctgatcaaaggagggtgagggcgtgggagtttcctttcaggtgtgtcaaagacatatcagctgcgctctagaaagagccaacgggtcagccgcttcctcctagtttaacttgattttgagtgatttgtccatatggaaatagtagggtagcatcaaactgcgtgattaaattggaagactgtctttccgtgtgaacacaggatggcagacatcagagggctaccggggcagggtggacacgttcctgaggagaagccagggtctgcagctctccatcctccccggtagctccagctgcagggctgagctgcttcctatcccctcagctctgatctctgccacttccctgttgtgtgggagagtggaacactcctgggatgccaggcatttcataatgggaggaggctcctgtaaggaacggtgggcgcccgctcacagtggggggccctccagcatggttgctgactctgtcagcccccagccccgggttgccaattagccagagagctcctgcacacacagcacttccttccccagtgtgttttctacccagatggggacaaaggagccagacagtcatatcaagggcagagttcaaacattttgaaatgagccattcacatgcttctttttaaacatgggcatcacctgcccagaggcccttggcctgaagcagcatgctgctgaccttgggaagagagggtgggctggtgggggtgctggaggagctgcccggccctgcatctgcaaccctccagtcccctgcccacagagcacgcagagccctcctgtgctccgggaacgagatagcagcttggcagctcggcctcgcatctgaaaaggaatacgctgcaaagcctcggccctagacccacatctgcagctccctggcctgtggcggttctttccttcggggcatgcccttccagatctctgtccctcctgtcttctagcactttaaagatgccccttatcatcagataaagagaagtatggggacgatggggtggcactaacagtagatgtcattggtgaggactgatggcaaagtctcattccctcacagccgcgctgccagctcgcctccccctcgctttgctgggagcctgccctggactccaaaaggacacgggttcacctcctttcccaggctggaggggtactgcccttccctgaggggccttctgactggggcaggaactcttttcgtgtgtccagctgggcctggaggccaagtcaaggtgtgtcacaccacacaccagggcaaggacctcatctccagggaacagggacaagtgagtggctaccagaaagtccccgggcagcctggagttccccagagcctggctggtcctacagagcacttctcccctgggccaccaggaccaaagcgacctaaacacttgaagctaaaagcaagtgctgatgatgggatgggctggcacgtggctgggagggctcctgggcaccacagagccctcagcccagcagagagtggaggctcagtccgtggggagcgggggttgtgaaggagacatggccaagcccctggtcggggagataagctcccccatgcccaggccagccccaggggcaacaagccaacatggagagaggtggcaggtgaggctgacaggtgggtgcctgtggcctgggcccatgagggcaatggtcctcagtaaccaatggaaaggacacaagggcgccatggtcaccaccacccaggcaaagaaatgggaggtggccagcacccccacccttcacttttcattattattattattattattattattattttttttttttttttttttttttttttttttttttgagagtagaaaggcaacttcattggagcttttggggaaaaaagccttcaaagtcaccttctggcagctctggggagggtcatttggggtggactgagagtgtagggcaggtagggtgtgtgctgggcagcagctgtgtccatgcagccagcacccagcagggcagtctcacaggagccgttgtgagcactttggacttgaagcagctatgaaccaccccccgcccccaccgtctctccctctcacacacacacacacacacacacacacacacacacacacacacacacacccgttttaccattttctcagtgctttttctgctttcattcctttgattttagttagaagcacaagccatgatggatgtgggactcttctcaattgctctttaaattgtcactttttaaatcctattaaatgaagtgtcgattcctgacaaatacattaaaagtgttttattcctagaagagttgggaaaagaaattattttcagcaagagtaggatgtttgttaaactgattccttggcaaaaaagagaaaaaaagcttttgaattgtgcaaaaaattgcccagtattatgctgtcgccccagttgtcaaactgctgtgcagatggctccagcccagtcaacttcaccttctttttaatttagaagataacaaaattgtaatcacttatcctttccagagccaagggggaaaaggaaggtataatctacaataaaaagcgagcgttctgtgtactgaggccacttggtgataaagagatggagcgctcccctcacagacttcaattaagaacctccctttggacagggaagaaaggtgtcaaagaggaaaagaaaattaaatttgcttccttccaggagtttttcctcattagtgcttgcttgtcggtgttattattttaatcttaccttctatgtggtgaccagctcctccgagcgatgcccaggtcgggcacggcccgggcagggcaggtctgcagcgatgccgtggcagaggtgggcatactccatttgttttggcagctgcagccattgattctgcatatttttcctgacaacagccccggcaggagttcagttaggaatttaaagtgcagttcatggttctgtgccaccgtggcttttattattataatattaaattagaagttgtcctagtgcctggtgtttgctcagagtttccagaagagagggaagggcaaggtttaaatggcatgcaggacaactggaatgcccccatctctctcgctgacacggatccagtcatacctggggctggacgggatttggaggccctggtcatttgcagagtgaatggtgaagggcgcggaaaaggtttgcttggaggaaagaccggttgcagaggcgaggcggagggaggaggggcggaggcagcaggtctttgtttgtggtaggtctctggcttccatcagggaggaggaaagaggctgtgcccttcctggctcttggctgcaccactgaggacgctccgagggacagcgtgctcacccatcctttgcacagtgctggccccaagccccacggccttccagctaggattttctgctgggctcatgcagaggcaggggacaggtgcatggaagagccgccccacccgacacaccattgtttgaaaatcactgttctctttactcacttaaaaaagtgtacagggaacacctgttcctggcataatgctccaacctcgcggaaggggccaggtgcccttcatctggctctggctgcttccgacctgggcccacgtcatcgttcacgtcctctgtgaccaccactggtcacggtgctccctggcccagcctccaacccacccagcaccctggcatctcccaggccagtctgctgcacccagcgagcttccagtcagaagccaggctgaacggccctcctgccccatcagcttcgtgtcttcttttttttaaagaactgaaatagtccccaagaggcctcatggcctgaagactcacaatcatccacctgtaatttatgataaatgtctgggagcatttaccatttgcgtccgtgagtatttatagccctgaatgggcgggggggagggggggtggaggaggccctgcagccaggagctacacacctgtccccactagtgtcccctggttgacagagccccctcagcctccccaaggctgtcactgcggctgtgacagctgaggagtgccgcctttgaaagccagtggacagtcgctccactagggggagaggccctggccctggcgcagaggaggcgttgcgaggcgggacgggggctggaggggctgagcagccttcagggcagggactgggccctgggtcactggagacgttgatattagtccgtctgctgccaaattgctccccaccacatgagccccaggggtttatgtcccaggaaggcgagggtgcccatctgagcggaattgggaggggacggcaccagctcatctccctcagggcctttgcctcctggtgctgccctggtggctgctcctgcaccacagcccctgatggctgctgctagtcctgagttgctgggtttacccccagcccacacttcccacctgggcctgagggtgcggccagtgccctagtcctagccactacaggagtcattctgagacctgctggaggccatggggtcttcccaggcccctcaatcagctgcttccagggtcagcagggcagggtgctgccagtaaggtcctcagggagcacagcccggccgcccaggctgggggatactggggcagagcttccaggtctgtggggcctgatctctccccaaggctctccaggccttggtgcgccctccacagtgaccttcagagaggctgcaccccctcagaagaacagtgagaaatctctccatcacacgctccctggtccttatgtccctgaggccacccttccccaccccccagtgcctggagaagcgtgagactctggaggggcgccaggaggccaggggtcctcagggctaggcctggagctcggcccaagagctgcttttgcgaagcctgtcttgaatccggattcaccagagaacaagagcctcccagcctttggcgtttctgggcctgta

SEQ ID NO: 15591 - protein, 612 aa, Homo sapiens
MSNSHPLRPFTAVGEIDHVHILSEHIGALLIGEEYGDVTFVVEKKRFPAHRVILAARCQYFRALLYGGMRESQPEAEIPLQDTTAEAFTMLLKYIYTGRATLTDEKEEVLLDFLSLAHKYGFPELEDSTSEYLCTILNIQNVCMTFDVASLYSLPKLTCMCCMFMDRNAQEVLSSEGFLSLSKTALLNIVLRDSFAAPEKDIFLALLNWCKHNSKENHAEIMQAVRLPLMSLTELLNVVRPSGLLSPDAILDAIKVRSESRDMDLNYRGMLIPEENIATMKYGAQVVKGELKSALLDGDTQNYDLDHGFSRHPIDDDCRSGIEIKLGQPSIINHIRILLWDRDSRSYSYFIEVSMDELDWVRVIDHSQYLCRSWQKLYFPARVCRYIRIVGTHNTVNKIFHIVAFECMFTNKTFTLEKGLIVPMENVATIADCASVIEGVSRSRNALLNGDTKNYDWDSGYTCHQLGSGAIVVQLAQPYMIGSIRLLLWDCDDRSYSYYVEVSTNQQQWTMVADRTKVSCKSWQSVTFERQPASFIRIVGTHNTANEVFHCVHFECPEQQSSQKEENSEESGTGDTSLAGQQLDSHALRAPSGSSLPSSPGSNSRSPNRQHQ

SEQ ID NO: 15592 - DNA, 5948 bp, Homo sapiens
gctcgtctcaatttggccctgctgtatttcaagtgctcggtagccacatgtggcaagtggccatcactgtggccattgcagctccaaagggacaggagagttgatggaaattagacactgcattctacagcctcatgagcccaagagagcaaaccttggtttgctgaaaatcagcagataaggcaattgaaagggaagaagaacaacgactatcgtctattccacaagatgagtaacagccaccctcttcgcccctttactgcagtgggggaaattgatcatgtgcacattttgtctgaacatattggtgccttgttgattggggaagaatatggcgacgtcacattcgtggtggaaaagaaacgttttcctgcccacagggtaattttagcagccaggtgccaatattttcgagcattattatatggtggaatgcgagagtctcagcctgaagcagaaattcctctccaagacaccactgcagaagcattcacaatgctactcaaatatatctacactgggcgggcaacgctgacagatgagaaggaggaggtgctgctggactttttgagcctggctcataaatatggatttccagagctagaggattctacctctgagtatctctgcaccatacttaacattcagaatgtctgcatgacttttgatgttgccagtctctactcacttcccaagttaacttgtatgtgctgcatgtttatggataggaatgctcaggaagtcctctcaagtgaaggtttcctctccctttctaagacagcacttttaaacatcgtgttaagagactcatttgcagctcccgaaaaagatattttcctagccttattaaactggtgtaagcacaattcaaaggagaatcatgctgaaatcatgcaggctgtgcgtttacctctcatgagcctcacagagcttctgaatgttgtgaggccttcaggactgctgtctcctgatgccatcctggatgccattaaagtgcgatctgagagccgggatatggacctcaattatagaggcatgctcataccagaagaaaacattgcaactatgaagtatggagcccaagttgtaaagggggagctgaaatcagccttattagatggtgatactcaaaattatgatttggatcatggattttcaaggcacccaattgatgatgactgccgttccggcatcgagattaagctaggtcagccatccattatcaatcacatacggatactcttgtgggaccgagatagccggtcttactcatacttcattgaagtgtcaatggatgaacttgattgggtcagagtgatagatcattcacaatatctgtgtcgttcttggcagaaattatattttccagcccgtgtctgcaggtatattcgaattgttgggactcacaacacagtgaacaagatttttcacattgtggcttttgaatgtatgtttacaaacaaaaccttcactcttgagaaggggctgatagttcccatggagaatgttgcaacaattgctgattgtgccagtgtgattgaaggagtcagtcggagccgaaatgccttgctgaatggggacactaagaattatgactgggattctggctacacatgtcaccagctaggaagtggtgcgattgtggttcagttggcacaaccgtacatgattgggtcaatacggttactactttgggattgtgatgatcgaagctatagctactacgttgaggtttctaccaaccagcaacagtggaccatggttgctgacagaactaaagtctcctgcaagtcctggcagtcagtaacttttgaaaggcagcctgcctccttcatccgtatcgttgggacacacaacacagcaaatgaggtgttccactgtgtccactttgagtgtccagagcagcagagcagccagaaggaggaaaatagtgaggaatcggggacaggggacaccagcctggccggtcagcagctcgactcccatgcgctgcgggcgcctagtggcagctcactaccctccagcccaggctccaactcacgctcccccaaccggcagcaccaataaaggaggcagcgggcctggtgtgacttggtgggctcgggcaacggcaggaaacggtctcctccctgagcaggggtctctgttgactgcccccacctctgcccctttccagggaggagccgacctagctgcaaaagcagacaccgaacaggttttctcccaaggacagaaaggggctgctttgttcttctcaatttatccaaatcaggcaggtctcaagggggagaaaatgggtcttcaatcttcatcaagtccaccattaacaccctacctctctaatctagcccaggcgcagggaacaggaggaagtcatagacaggcctgtgttggaatacaaaaatggcacgcaaacactcaggcggaggagaaagccattgggcctttgctacctggaggcaccctttaggaatgggcctccatagagtgttcattctgctggaatacattgccctggcaactaaatgattttttatttgttttagttattctccactcagtgaatcataggtgttccggatctatttgaaatgctcaaacagcaaatcactagttttaatcccttttgatgctataattttccttccttggttttgaacggttcagcttgcggggacagagacccatcgtgcatgtctcctaaatgagacacggatgcagctcatcctggcacttgggccacagaggaagtgccacaaatgcacacaagcaaatcaacctgtggacactggagttaatagtcactcgtgtggctgagttactcacctgtcattcctgacatggatccagcctttaagcttgggaggctgacaaggaaatagttactatgcccgctgctaattcactgttccgaagtccatgtagataaacatataccgagttctggcgtggccaaacctgccggggactgccgtggcttagctgcccctccagttgtgtttatcgaagcattggagaggcagccacctgcccatcagcgtcaggaacgcagaactgggactccgtgcttcccccacaccacagtactcaactggggactgaaaaatagcagttccaagaagcttttctcctaatcctcatcaaaaggacctcatttgacgatggtggcttgatgtggctccgtctcctacttagtgatttccattccagtgctgcctgccctgggtaactgcgcacaacattgcctgcccctccgctgtccccagagctccggcctctgtcgccatcagcatcagcctgggagtctccccaggacggcatggcacgtgagcagcactgcagtccttgggtcttcggcgccaacctgcaaccctgatcaaaggagggtgagggcgtgggagtttcctttcaggtgtgtcaaagacatatcagctgcgctctagaaagagccaacgggtcagccgcttcctcctagtttaacttgattttgagtgatttgtccatatggaaatagtagggtactccagctgcagggctgagctgcttcctatcccctcagctctgatctctgccacttccctgttgtgtgggagagtggaacactcctgggatgccaggcatttcataatgggaggaggctcctgtaaggaacggtgggcgcccgctcacagtggggggccctccagcatggttgctgactctgtcagcccccagccccgggttgccaattagccagagagctcctgcacacacagcacttccttccccagtgtgttttctacccagatggggacaaaggagccagacagtcatatcaagggcagagttcaaacattttgaaatgagccattcacatgcttctttttaaacatgggcatcacctgcccagaggcccttggcctgaagcagcatgctgctgaccttgggaagagagggtgggctggtgggggtgctggaggagctgcccggccctgcatctgcaaccctccagtcccctgcccacagagcacgcagagccctcctgtgctccgggaacgagatagcagcttggcagctcggcctcgcatctgaaaaggaatacgctgcaaagcctcggccctagacccacatctgcagctccctggcctgtggcggttctttccttcggggcatgcccttccagatctctgtccctcctgtcttctagcactttaaagatgccccttatcatcagataaagagaagtatggggacgatggggtggcactaacagtagatgtcattggtgaggactgatggcaaagtctcattccctcacagccgcgctgccagctcgcctccccctcgctttgctgggagcctgccctggactccaaaaggacacgggttcacctcctttcccaggctggaggggtactgcccttccctgaggggccttctgactggggcaggaactcttttcgtgtgtccagctgggcctggaggccaagtcaaggtgtgtcacaccacacaccagggcaaggacctcatctccagggaacagggacaagtgagtggctaccagaaagtccccgggcagcctggagttccccagagcctggctggtcctacagagcacttctcccctgggccaccaggaccaaagcgacctaaacacttgaagctaaaagcaagtgctgatgatgggatgggctggcacgtggctgggagggctcctgggcaccacagagccctcagcccagcagagagtggaggctcagtccgtggggagcgggggttgtgaaggagacatggccaagcccctggtcggggagataagctcccccatgcccaggccagccccaggggcaacaagccaacatggagagaggtggcaggtgaggctgacaggtgggtgcctgtggcctgggcccatgagggcaatggtcctcagtaaccaatggaaaggacacaagggcgccatggtcaccaccacccaggcaaagaaatgggaggtggccagcacccccacccttcacttttcattattattattattattattattattattttttttttttttttttttttttttttttttttttgagagtagaaaggcaacttcattggagcttttggggaaaaaagccttcaaagtcaccttctggcagctctggggagggtcatttggggtggactgagagtgtagggcaggtagggtgtgtgctgggcagcagctgtgtccatgcagccagcacccagcagggcagtctcacaggagccgttgtgagcactttggacttgaagcagctatgaaccaccccccgcccccaccgtctctccctctcacacacacacacacacacacacacacacacacacacacacacacacacccgttttaccattttctcagtgctttttctgctttcattcctttgattttagttagaagcacaagccatgatggatgtgggactcttctcaattgctctttaaattgtcactttttaaatcctattaaatgaagtgtcgattcctgacaaatacattaaaagtgttttattcctagaagagttgggaaaagaaattattttcagcaagagtaggatgtttgttaaactgattccttggcaaaaaagagaaaaaaagcttttgaattgtgcaaaaaattgcccagtattatgctgtcgccccagttgtcaaactgctgtgcagatggctccagcccagtcaacttcaccttctttttaatttagaagataacaaaattgtaatcacttatcctttccagagccaagggggaaaaggaaggtataatctacaataaaaagcgagcgttctgtgtactgaggccacttggtgataaagagatggagcgctcccctcacagacttcaattaagaacctccctttggacagggaagaaaggtgtcaaagaggaaaagaaaattaaatttgcttccttccaggagtttttcctcatt

SEQ ID NO: 15593 - protein, 612 aa, Homo sapiens; identical to SEQ ID NO: 15591

SEQ ID NO: 15594 - DNA, 318 bp, Homo sapiens
gggttgcaggttggcgccgaagacccaaggactgcagtgctgctcacgtgccatgccgtcctggggagactcccaggctgatgctgatggcgacagaggccggagctctggggacagagctctttatccggccccaccatgttctttaattggttatttgtgtaatccctgctctccctgctcggtcaatatctccggaggccgctccccagagcctcaggctgacactaatcctggaattgacttacgtttgtcctactccttattaccttttctcaagctcactcctctggtattgaatggtttttctctcctttt

SEQ ID NO: 15595 - protein, 87 aa, Homo sapiens [sequence omitted]

SEQ ID NO: 15596 - DNA, 2414 bp, Homo sapiens
agataaggaattgtataggaggaaacttcatagtaaacattgaacctctgtgcttgtctccttgttgaagttgggggttcatgtttattgttccaagggagcctcatcaaaaccacttttaaagcattgagaatccaaataaataccatggatcatacaggattggggataagtcttgaggtctccccgagaaggagaagttctttaatttggtaattttagggtaatggttggatgctctctggattaatggaaaccttcaggggtacttttaggcagagtataacccagtgaagagagcattattatatggtggaatgcgagagtctcagcctgaagcagaaattcctctccaagacaccactgcagaagcattcacaatgctactcaaatatatctacactgggcgggcaacgctgacagatgagaaggaggaggtgctgctggactttttgagcctggctcataaatatggatttccagagctagaggattctacctctgagtatctctgcaccatacttaacattcagaatgtctgcatgacttttgatgttgccagtctctactcacttcccaagttaacttgtatgtgctgcatgtttatggataggaatgctcaggaagtcctctcaagtgaaggtttcctctccctttctaagacagcacttttaaacatcgtgttaagagactcatttgcagctcccgaaaaagatattttcctagccttattaaactggtgtaagcacaattcaaaggagaatcatgctgaaatcatgcaggctgtgcgtttacctctcatgagcctcacagagcttctgaatgttgtgaggccttcaggactgctgtctcctgatgccatcctggatgccattaaagtgcgatctgagagccgggatatggacctcaattatagaggcatgctcataccagaagaaaacattgcaactatgaagtatggagcccaagttgtaaagggggagctgaaatcagccttattagatggtgatactcaaaattatgatttggatcatggattttcaaggcacccaattgatgatgactgccgttccggcatcgagattaagctaggtcagccatccattatcaatcacatacggatactcttgtgggaccgagatagccggtcttactcatacttcattgaagtgtcaatggatgaacttgattgggtcagagtgatagatcattcacaatatctgtgtcgttcttggcagaaattatattttccagcccgtgtctgcaggtatattcgaattgttgggactcacaacacagtgaacaagatttttcacattgtggcttttgaatgtatgtttacaaacaaaaccttcactcttgagaaggggctgatagttcccatggagaatgttgcaacaattgctgattgtgccagtgtgattgaaggagtcagtcggagccgaaatgccttgctgaatggggacactaagaattatgactgggattctggctacacatgtcaccagctaggaagtggtgcgattgtggttcagttggcacaaccgtacatgattgggtcaatacggttactactttgggattgtgatgatcgaagctatagctactacgttgaggtttctaccaaccagcaacagtggaccatggttgctgacagaactaaagtctcctgcaagtcctggcagtcagtaacttttgaaaggcagcctgcctccttcatccgtatcgttgggacacacaacacagcaaatgaggtgttccactgtgtccactttgagtgtccagagcagcagagcagccagaaggaggaaaatagtgaggaatcggggacaggggacaccagcctggccggtcagcagctcgactcccatgcgctgcgggcgcctagtggcagctcactaccctccagcccaggctccaactcacgctcccccaaccggcagcaccaataaaggaggcagcgggcctggtgtgacttggtgggctcgggcaacggcaggaaacggtctcctccctgagcaggggtctctgttgactgcccccacctctgcccctttccagggaggagccgacctagctgcaaaagcagacaccgaacaggttttctcccaaggacagaaaggggctgctttgttcttctcaatttatccaaatcaggcaggtctcaagggggagaaaatgggtcttcaatcttcatcaagtccaccattaacaccctacctctctaatctagcccaggcgcagggaacaggaggaagtcatagacaggcctgtgttggaatacaaaaatggcacgcaaacactcaggcggaggagaaagccattgggcctttgctacctggaggcaccctttaggaatgggcctccatagagtgttcattctgctggaatacattgccctggcaactaaatga

SEQ ID NO: 15597 - protein, 544 aa, Homo sapiens
MRESQPEAEIPLQDTTAEAFTMLLKYIYTGRATLTDEKEEVLLDFLSLAHKYGFPELEDSTSEYLCTILNIQNVCMTFDVASLYSLPKLTCMCCMFMDRNAQEVLSSEGFLSLSKTALLNIVLRDSFAAPEKDIFLALLNWCKHNSKENHAEIMQAVRLPLMSLTELLNVVRPSGLLSPDAILDAIKVRSESRDMDLNYRGMLIPEENIATMKYGAQVVKGELKSALLDGDTQNYDLDHGFSRHPIDDDCRSGIEIKLGQPSIINHIRILLWDRDSRSYSYFIEVSMDELDWVRVIDHSQYLCRSWQKLYFPARVCRYIRIVGTHNTVNKIFHIVAFECMFTNKTFTLEKGLIVPMENVATIADCASVIEGVSRSRNALLNGDTKNYDWDSGYTCHQLGSGAIVVQLAQPYMIGSIRLLLWDCDDRSYSYYVEVSTNQQQWTMVADRTKVSCKSWQSVTFERQPASFIRIVGTHNTANEVFHCVHFECPEQQSSQKEENSEESGTGDTSLAGQQLDSHALRAPSGSSLPSSPGSNSRSPNRQHQ

SEQ ID NO: 15598 - DNA, 1014 bp, Homo sapiens
cctgcctccacactaccccctctcccctaatgaggctggcagcaccatttgctagcacctggcagatgagagagaaagaaaacctggtgtggagacccccatccattaaaggcaagagagtgaaaagtgggagagaaagctcccaagttcaacagcagtgacctagggtcatgcagtgaggacttacaaagtccaagaagaaagcatttggagaagtgctacacatgctcaactgaacttcctgtcaaattgttctcactcgtttgggcacaagtctgcttaagccatctctcattaacatttactcttgcccgaagccctctacgcccccaacccctgctaatcttccacaagcaagctgatcacactgggatctccttttcccagacacgtttgattctcactttctcctgaacctagaaatgtgcttcccaccaaagcatgccaggcactaactcgtccctactgaaaggggctgttaaaagctcatcttctttccagatggtagtgaggtgtgaggtgatcctttctctttcttttttttttttttttacttttagctacccctcaattctggtgttcagtaacaatgtattccacttaaaagagagaaatcatattaattattctaagatataaacacttaattttattcatgctcttgaattactttcctttctaccgcatgtttgtgtagctgttatatgagtcctttctactgatgtagctgtcattccttcaactcagttcttgccaaacactgagctatgtctggagatacaaagataactactcttgttgaagagatgccagtttagtgggggagacagacatgtaaacagatctgtatctgagatagatggcctgggtaggaaaagaatatatatagcacaaataactcagtggacctgcaaaaacagagcttgaggccatgatataccacaaagacccaccaaggcacaagcactgtcaacatgaaggtaaggcttccatttttgcctctttcaatctggg

SEQ ID NO: 15599 - protein, 65 aa, Homo sapiens
MPGTNSSLLKGAVKSSSSFQMVVRCEVILSLSFFFFFTFSYPSILVFSNNVFHLKERNHINYSKI

SEQ ID NO: 15600 - DNA, 668 bp, Homo sapiens
gggaaaaatctatgcactagaagtaagccctttttcagttttggttctctgctgcctttgactttccagatcatgctgatttacttgaaataaattctataagccacatgtcaaaagggctgcaagttttctcctgtcagacattcgtttttaccattctctcttgtaaacataagtgttaagcacagattttagagttaaatggaccgaattcagtcccagcttggtcatttaccaactatctgaccatttcaagttaaaatgagaatagtgctacaagcatacccctttttgttacactttgcagatactgtggtattttgttttgtttttaccaactgaaggttatggcaactccgtgttcaacaagtgttttggccctatttttccagcagcatgtgcttacttgtgtgcctatgtcacattttggtaattctcacaatatttcaaaacttttcattattattatatctattgtagtgatctgtaatcgatgatttttgatgttactattgtaattgttttggaacatcacaaaccacacccatagaagacagaatttaatagataaatgtgtgtattctgactgctccactgactggttgttcccccatctctccctgtcctccaatctccctattccctgagatacaatattgaaattaggc

SEQ ID NO: 15601 - protein, 49 aa, Homo sapiens
MATPCSTSVLALFFQQHVLTCVPMSHFGNSHNISKLFIIIISIVVICNR

SEQ ID NO: 15602 - DNA, 2692 bp, Homo sapiens
tttaacgttagcttctctcaatagtgcagtctttgagtgtcgctctcctagcttcatggatgtaggcctagagtgctcagccaaacgggaatgtctggatttagaaacctcggggcgggaatccgcagatgatgtcagtggaggcgtcaccgaggggtgccgagacacgccccattccttggggaaggcgtggacccggcgctctgtttttacgtatttccggagtcccttctgagacagaaggttgtgttggggaactgaaggagtttctgtgggcggacagggaaccctgcgtttctactgtgtgattctgccaccttcctggcccgacgccatgggagtgacttgtgtgtcccagatgcctgtggccgagggcaagagtgttcagcaaaccgtagagctccttacccggaaattggagatgcttggggcagagaagcaaggaacattttgtgtggactgtgagacttaccatacggccgcctctacccttggcagccaaggtcagaccgggaagctgatgtatgtgatgcacaactcagagtacccattgagctgtttcgccctctttgagaatggcccttgccttattgctgacaccaactttgatgtgcttatggtgaagctcaagggctttttccagagtgctaaggccagcaagattgagacccggggcaccaggtaccagtactgtgacttcctggtgaaggtgggcacggtcacaatggggcccagtgcccggggcatctctgtggaggtggagtatggcccctgtgtggtagctagtgactgctggagtctgctgctcgagttcctacagagttttctaggcagccacacaccaggggctcccgcagtgtttgggaacagacatgatgcggtctacggcccagcagataccatggtccagtacatggaactcttcaacaagatccgcaagcagcagcaggtgccggtggctgggattcgttagtgatgagcagctgccagctgagctctgtcaccaggggtactccacaggaggagcaggtgctgactttcaggtccctggaccccagaaacccagggtagacatggactctactctccttctctggttctcagctgtggcttttgttctggggctgagtcccctccccaaccccctgactctcacacatagccccccatcagctgttttactccgtgccttactggatttggcctgtcctcaagaatggtaattatgaagagtggagaagtttggaccttgcctcctttaggggaaaggtaggacaggaatgtccctgcctggtactggtgggggaaatagtccgtatccccaactattaaggatttgtcccaggccaatggtgaacatgctgcattttatgtttggattgtgctgtaataagagcctcttccttccctcagaggatgtggctgggcttctatcctagagatggagtagaaggcacaactggtttgatagttactattttctgacctgtttgctgaagtgatttgcgaattgactttcctagggtgttgcctgagtcctttgaaatctccttctgacatctttcccttctgttgtgaaatatgttaagccacaggccaaactgctataagatcgaagtttgtttttttctcacctaataatagagaggtaatcagatggtctagggcagatttaactctacaaggttatcaggaactttgtttccttctgtcttattcagccattcccagtatgttttcttacccataagatcaaagcagactcatcagctccatatctgcattccactggggaaagagagagagaaaagagcagattttaaaaaaaagatatgactgagcattgctcagatcactgtggccacactttgctgaaagagatgctgggacatagaacctcttatctgggcagtcatgtgctgagttaaaactcagggattctgtgactacaagatgaaagacaatttggttgctgagatgcagttaatggcttctgttacatggagctcaatggacgtgcccaggaatgcttttggctgttattttgcagttaatacctcctgtaactaaagcatttgtttatgagttgacttgagagaagggctgatctcagagccgctttgagctaagttggattagtcacactaggaagttaattccacacctttcgtctaagtctcagtattgaggcctctccagttctcatgcaccctgatcttagggttagaatacttgaccctgatacctgcaccatgcttcatggttcctgagctctttctcctgtttcatttgagcctccaaactacatatttggtcatattgcctgcctaccccatgcctgctgcagaaatattcatccaggttaaccttgatatacacagagatggtcttggagaattgtgaatgtatgtactgtattgtcatcaaggatactgtcccttatttgaaggcatctaaagagaaactgttttcagatccaagtgctcagatctaaagcctctgcaacaagtcaggtggtggtcatgtttcccttctagttttggctgacaggaagctcagttcagtaccataactacagaacctgtcatctgtattttttgttctcaccccgtttttgttattttgtttctggttttttatattgaggtatgttttagatatagtttacaaaaataaaacgcacagatcttac

SEQ ID NO: 15603 - protein, 212 aa, Homo sapiens; identical to SEQ ID NO: 1770

SEQ ID NO: 15604 - DNA, 2603 bp, Homo sapiens
cttgaccatggtccgccgtcctctgggagctgagggagatgtcctcgggttgtgtagatgagaggatgccgtccgggctgcgggttccccgggcttgtttcctcagagatgcgccccttcctcttggaaggcgggaaagcaaagtgtgtcccagatgcctgtggccgagggcaagagtgttcagcaaaccgtagagctccttacccggaaattggagatgcttggggcagagaagcaaggaacattttgtgtggactgtgagacttaccatacggccgcctctacccttggcagccaagggtctctctgtcacccaggctggagtgcaatggcatgatcatagctcactattgcctcgacctgccgggctcaagtgatcctccagccccagcatcctaaatagctggggccacaggtcagaccgggaagctgatgtatgtgatgcacaactcagagtacccattgagctgtttcgccctctttgagaatggcccttgccttattgctgacaccaactttgatgtgcttatggtgaagctcaagggctttttccagagtgctaaggccagcaagattgagacccggggcaccaggtaccagtactgtgacttcctggtgaaggtgggcacggtcacaatggggcccagtgcccggggcatctctgtggaggtggagtatggcccctgtgtggtagctagtgactgctggagtctgctgctcgagttcctacagagttttctaggcagccacacaccaggggctcccgcagtgtttgggaacagacatgatgcggtctacggcccagcagataccatggtccagtacatggaactcttcaacaagatccgcaagcagcagcaggtgccggtggctgggattcgttagtgatgagcagctgccagctgagctctgtcaccaggggtactccacaggaggagcaggtgctgactttcaggtccctggaccccagaaacccagggtagacatggactctactctccttctctggttctcagctgtggcttttgttctggggctgagtcccctccccaaccccctgactctcacacatagccccccatcagctgttttactccgtgccttactggatttggcctgtcctcaagaatggtaattatgaagagtggagaagtttggaccttgcctcctttaggggaaaggtaggacaggaatgtccctgcctggtactggtgggggaaatagtccgtatccccaactattaaggatttgtcccaggccaatggtgaacatgctgcattttatgtttggattgtgctgtaataagagcctcttccttccctcagaggatgtggctgggcttctatcctagagatggagtagaaggcacaactggtttgatagttactattttctgacctgtttgctgaagtgatttgcgaattgactttcctagggtgttgcctgagtcctttgaaatctccttctgacatctttcccttctgttgtgaaatatgttaagccacaggccaaactgctataagatcgaagtttgtttttttctcacctaataatagagaggtaatcagatggtctagggcagatttaactctacaaggttatcaggaactttgtttccttctgtcttattcagccattcccagtatgttttcttacccataagatcaaagcagactcatcagctccatatctgcattccactggggaaagagagagagaaaagagcagattttaaaaaaaagatatgactgagcattgctcagatcactgtggccacactttgctgaaagagatgctgggacatagaacctcttatctgggcagtcatgtgctgagttaaaactcagggattctgtgactacaagatgaaagacaatttggttgctgagatgcagttaatggcttctgttacatggagctcaatggacgtgcccaggaatgcttttggctgttattttgcagttaatacctcctgtaactaaagcatttgtttatgagttgacttgagagaagggctgatctcagagccgctttgagctaagttggattagtcacactaggaagttaattccacacctttcgtctaagtctcagtattgaggcctctccagttctcatgcaccctgatcttagggttagaatacttgaccctgatacctgcaccatgcttcatggttcctgagctctttctcctgtttcatttgagcctccaaactacatatttggtcatattgcctgcctaccccatgcctgctgcagaaatattcatccaggttaaccttgatatacacagagatggtcttggagaattgtgaatgtatgtactgtattgtcatcaaggatactgtcccttatttgaaggcatctaaagagaaactgttttcagatccaagtgctcagatctaaagcctctgcaacaagtcaggtggtggtcatgtttcccttctagttttggctgacaggaagctcagttcagtaccataactacagaacctgtcatctgtattttttgttctcaccccgtttttgttattttgtttctggttttttatattgaggtatgttttagatatagtttacaaaaataaaacgcacagatctta

SEQ ID NO: 15605 - protein, 150 aa, Homo sapiens
MYVMHNSEYPLSCFALFENGPCLIADTNFDVLMVKLKGFFQSAKASKIETRGTRYQYCDFLVKVGTVTMGPSARGISVEVEYGPCVVASDCWSLLLEFLQSFLGSHTPGAPAVFGNRHDAVYGPADTMVQYMELFNKIRKQQQVPVAGIR

SEQ ID NO: 15606 - DNA, 2437 bp, Homo sapiens
tttaacgttagcttctctcaatagtgcagtctttgagtgtcgctctcctagcttcatggatgtaggcctagagtgctcagccaaacgggaatgtctggatttagaaacctcggggcgggaatccgcagatgatgtcagtggaggcgtcaccgaggggtgccgagacacgccccattccttggggaaggcgtggacccggcgctctgtttttacgtatttccggagtcccttctgagacagaaggttgtgttggggaactgaaggagtttctgtgggcggacagggaaccctgcgtttctactgtgtgattctgccaccttcctggcccgacgccatgggagtgacttgtgtgtcccagatgcctgtggccgagggcaagagtgttcagcaaaccgtagagctccttacccggaaattggagatgcttggggcagagaagcaaggaacattttgtgtggactgtgagacttaccatacggccgcctctacccttggcagccaaggtggagtatggcccctgtgtggtagctagtgactgctggagtctgctgctcgagttcctacagagttttctaggcagccacacaccaggggctcccgcagtgtttgggaacagacatgatgcggtctacggcccagcagataccatggtccagtacatggaactcttcaacaagatccgcaagcagcagcaggtgccggtggctgggattcgttagtgatgagcagctgccagctgagctctgtcaccaggggtactccacaggaggagcaggtgctgactttcaggtccctggaccccagaaacccagggtagacatggactctactctccttctctggttctcagctgtggcttttgttctggggctgagtcccctccccaaccccctgactctcacacatagccccccatcagctgttttactccgtgccttactggatttggcctgtcctcaagaatggtaattatgaagagtggagaagtttggaccttgcctcctttaggggaaaggtaggacaggaatgtccctgcctggtactggtgggggaaatagtccgtatccccaactattaaggatttgtcccaggccaatggtgaacatgctgcattttatgtttggattgtgctgtaataagagcctcttccttccctcagaggatgtggctgggcttctatcctagagatggagtagaaggcacaactggtttgatagttactattttctgacctgtttgctgaagtgatttgcgaattgactttcctagggtgttgcctgagtcctttgaaatctccttctgacatctttcccttctgttgtgaaatatgttaagccacaggccaaactgctataagatcgaagtttgtttttttctcacctaataatagagaggtaatcagatggtctagggcagatttaactctacaaggttatcaggaactttgtttccttctgtcttattcagccattcccagtatgttttcttacccataagatcaaagcagactcatcagctccatatctgcattccactggggaaagagagagagaaaagagcagattttaaaaaaaagatatgactgagcattgctcagatcactgtggccacactttgctgaaagagatgctgggacatagaacctcttatctgggcagtcatgtgctgagttaaaactcagggattctgtgactacaagatgaaagacaatttggttgctgagatgcagttaatggcttctgttacatggagctcaatggacgtgcccaggaatgcttttggctgttattttgcagttaatacctcctgtaactaaagcatttgtttatgagttgacttgagagaagggctgatctcagagccgctttgagctaagttggattagtcacactaggaagttaattccacacctttcgtctaagtctcagtattgaggcctctccagttctcatgcaccctgatcttagggttagaatacttgaccctgatacctgcaccatgcttcatggttcctgagctctttctcctgtttcatttgagcctccaaactacatatttggtcatattgcctgcctaccccatgcctgctgcagaaatattcatccaggttaaccttgatatacacagagatggtcttggagaattgtgaatgtatgtactgtattgtcatcaaggatactgtcccttatttgaaggcatctaaagagaaactgttttcagatccaagtgctcagatctaaagcctctgcaacaagtcaggtggtggtcatgtttcccttctagttttggctgacaggaagctcagttcagtaccataactacagaacctgtcatctgtattttttgttctcaccccgtttttgttattttgtttctggttttttatattgaggtatgttttagatatagtttacaaaaataaaacgcacagatctta

SEQ ID NO: 15607 - protein, 65 aa, Homo sapiens
MGVTCVSQMPVAEGKSVQQTVELLTRKLEMLGAEKQGTFCVDCETYHTAASTLGSQGGVWPLCGS

SEQ ID NO: 15608 - DNA, 1821 bp, Homo sapiens
tttaacgttagcttctctcaatagtgcagtctttgagtgtcgctctcctagcttcatggatgtaggcctagagtgctcagccaaacgggaatgtctggatttagaaacctcggggcgggaatccgcagatgatgtcagtggaggcgtcaccgaggggtgccgagacacgccccattccttggggaaggcgtggacccggcgctctgtttttacgtatttccggagtcccttctgagacagaaggttgtgttggggaactgaaggagtttctgtgggcggacagggaaccctgcgtttctactgtgtgattctgccaccttcctggcccgacgccatgggagtgacttgtgtgtcccagatgcctgtggccgagggcaagagtgttcagcaaaccgtagagctccttacccggaaattggagatgcttggggcagagaagcaaggaacattttgtgtggactgtgagacttaccatacggccgcctctacccttggcagccaaggtcagaccgggaagctgatgtatgtgatgcacaactcagagtacccattgagctgtttcgccctctttgagaatggcccttgccttattgctgacaccaactttgatgtgcttatggtgaagctcaagggctttttccagagtgctaaggccagcaagattgagacccggggcaccaggtaccagtactgtgacttcctggtgaaggtgggcacggtcacaatggggcccagtgcccggggcatctctgtggaggtggagtatggcccctgtgtggtagctagtgactgctggagtctgctgctcgagttcctacagagttttctaggcagccacacaccaggggctcccgcagtgtttgggaacagacatgatgcggtctacggcccagcagataccatggtccagtacatggaactcttcaacaagatccgcaagcagcagcaggtgccggtggctgggattcgttagtgatgagcagctgccagctgagctctgtcaccaggggtactccacaggaggagcaggtgctgactttcaggtccctggaccccagaaacccagggtagacatggactctactctccttctctggttctcagctgtggcttttgttctggggctgagtcccctccccaaccccctgactctcacacatagccccccatcagctgttttactccgtgccttactggatttggcctgtcctcaagaatggtaattatgaagagtggagaagtttggaccttgcctcctttaggggaaaggtaggacaggaatgtccctgcctggtactggtgggggaaatagtccgtatccccaactattaaggatttgtcccaggccaatggtgaacatgctgcattttatgtttggattgtgctgtaataagagcctcttccttccctcagaggatgtggctgggcttctatcctagagatggagtagaaggcacaactggtttgatagttactattttctgacctgtttgctgaagtgatttgcgaattgactttcctagggtgttgcctgagtcctttgaaatctccttctgacatctttcccttctgttgtgaaatatgttaagccacaggccaaactgctataagatcgaagtttgtttttttctcacctaataatagagaggtaatcagatggtctagggcagatttaactctacaaggttatcaggaactttgtttccttctgtcttattcagccattcccagtatgttttcttacccataagatcaaagcagactcatcagctccatatctgcattccactggggaaagagagagagaaaagagcagatttt

SEQ ID NO: 15609 - protein, 212 aa, Homo sapiens; identical to SEQ ID NO: 1770

SEQ ID NO: 15610 - DNA, 1074 bp, Homo sapiens
tttaacgttagcttctctcaatagtgcagtctttgagtgtcgctctcctagcttcatggatgtaggcctagagtgctcagccaaacgggaatgtctggatttagaaacctcggggcgggaatccgcagatgatgtcagtggaggcgtcaccgaggggtgccgagacacgccccattccttggggaaggcgtggacccggcgctctgtttttacgtatttccggagtcccttctgagacagaaggttgtgttggggaactgaaggagtttctgtgggcggacagggaaccctgcgtttctactgtgtgattctgccaccttcctggcccgacgccatgggagtgacttgtgtgtcccagatgcctgtggccgagggcaagagtgttcagcaaaccgtagagctccttacccggaaattggagatgcttggggcagagaagcaaggaacattttgtgtggactgtgagacttaccatacggccgcctctacccttggcagccaaggtcagaccgggaagctgatgtatgtgatgcacaactcagagtacccattgagctgtttcgccctctttgagaatggcccttgccttattgctgacaccaactttgatgtgcttatggtgaagctcaagggctttttccagagtgctaaggccagcaagattgagacccggggcaccaggtaccagtactgtgacttcctggtgaaggtgggcacggtcacaatggggcccagtgcccggggcatctctgtggaggtaagaccttggtgaaaataggagcaggatgttctgagggggctgcttagcaaagggctctgaagattttccagttcttctctttttttttttttgagacagagtcttgttctgtcacccaggctggaatgcaatggcacaatcttggcacactgtagcctcgacctccagggctcaagtgatccttccgcctcagtctcccaagtacctgggactacacccaccgaattaaatttttttttttttttagtagaaatgaggtcttactatgttgcccaggctgatctcagactcctgggctcaattgatcctcccat

SEQ ID NO: 15611 - protein, 145 aa, Homo sapiens
MGVTCVSQMPVAEGKSVQQTVELLTRKLEMLGAEKQGTFCVDCETYHTAASTLGSQGQTGKLMYVMHNSEYPLSCFALFENGPCLIADTNFDVLMVKLKGFFQSAKASKIETRGTRYQYCDFLVKVGTVTMGPSARGISVEVRPW

SEQ ID NO: 15612 - DNA, 2027 bp, Homo sapiens
tctcggcacccctcggtgacgcctccactgacatcatctgcggattcccgccccgaggtttctaaatccagacattcccgtttggctgagcactctaggcctacatccatgaagctaggagagcgacactcaaagactgcactattgagagaagctaacgttaaaggcagtgaatatattcgggagtccagctccggaacccgggagctcttttagtgggaggggcggcgctgatggcgcttctggcctccgaatgctagggggcgctgtgatcgccgggcggcctcttgggcgctgggagtccaccgcgcaagcgcatcctggcctttcttcagtccccacgtgcgatccttcccggcaactttttcgagaaaaatgcccaaattcaaggcggcccgtggggtggggggtcaggaaaaacatgcgcccctggccgatcagatcctggctgggaatgcggtgcgggcgggggtccgggagaagcggcggggtcgcgggacaggagaagcggaggaagagtatgtggggccccggctgagccgacggattttgcagcaagcacggcagcaacaggaggaactcgaggccgagcatgggactggggacaagcccgcggcgccgcgggaacgcaccacgcggctgggtccaagaatgcctcaggatggatcagatgacgaggacgaggagtggcccaccctggagaaggctgccacaatgacagcagcgggccatcatgcagaggtggttgtggaccctgaggatgagcgtgccatagagatgttcatgaacaagaaccctcctgccaggcgcaccctggctgacatcatcatggagaagctgactgagaagcagacagaggttgagacagtcatgtcagaggtgtcgggcttccctatgccccagctggacccccgggtcctagaagtgtacaggggggtccgggaggtattatctaagtaccgcagtggaaaactgcccaaggcatttaagatcatccctgcactctccaactgggagcaaatcctctacgtcacagagccggaggcctggactgcagctgccatgtaccaggccaccaggatttttgcctctaacctgaaggaacgcatggcccagcgcttctacaaccttgtcctgctccctcgagtacgagatgacgttgctgaatacaaacgactcaacttccatctctacatggctctcaagaaggcccttttcaaacctggagcctggttcaaagggatcctgattccactgtgcgagtctggcacttgtaccctccgggaagccatcattgtgggtagcatcatcaccaagtgctccatccctgtgttgcactccagtgcggccatgctgaaaattgctgagatggaatacagcggtgccaacagcatcttcctgcgactgctgctggataagaagtatgcactgccttaccgggtgctggatgccctagtcttccacttcctggggttccggacagagaagcgtgaactgcctgtgctgtggcaccagtgcctcctgactttggtccagcgctacaaggccgacttggccacagaccagaaagaggccctcttagaactgctccggctgcagccccatccacagctatcgcccgaaatcaggcgtgagcttcagagtgcagtcccccgcgatgtggaagatgttcccatcaccgtggagtgaggaaaacagtcagctgtcctggccaaaggggtttggaaggacaccaagacccccgttggtgactgaagatgacactgagctttaatggctgaagacccagatcagggcagtgacagatcacagggacatctgtggctcccagtccaggacaggaaggactgagggtctggctggttccctcttccattctaggcccttatccctgtttagttctgagagccaacttgagataccatatgctagcattcccagtccccagctggggcttggtgtgagtactttttctatggctattgtgtcaggtcactgtggataaaggcaaagacagatatttattg

SEQ ID NO: 15613 - protein, 437 aa, Homo sapiens; identical to SEQ ID NO: 1772

SEQ ID NO: 15614 - DNA, 2302 bp, Homo sapiens
tctcggcacccctcggtgacgcctccactgacatcatctgcggattcccgccccgaggtttctaaatccagacattcccgtttggctgagcactctaggcctacatccatgaagctaggagagcgacactcaaagactgcactattgagagaagctaacgttaaaggcagtgaatatattcgggagtccagctccggaacccgggagctcttttagtgggaggggcggcgctgatggcgcttctggcctccgaatgctagggggcgctgtgatcgccgggcggcctcttgggcgctgggagtccaccgcgcaagcgcatcctggcctttcttcagtccccacgtgcgatccttcccggcaactttttcgagaaaaatgcccaaattcaaggcggcccgtggggtggggggtcaggaaaaacatgcgcccctggccgatcagatcctggctgggaatgcggtgcgggcgggggtccgggagaagcggcggggtcgcgggacaggagaagcggaggaagagtatgtggggccccggctgagccgacggattttgcagcaagcacggcagcaacaggaggaactcgaggccgagcatgggactggggacaagcccgcggcgccgcgggaacgcaccacgcggctgggtccaagaatgcctcaggatggatcagatgacgaggacgaggagtggcccaccctggagaaggctgccacaatgacagcagcgggccatcatgcagaggtggttgtggaccctgaggatgagcgtgccatagagatgttcatgaacaagaaccctcctgccaggcgcaccctggctgacatcatcatggagaagctgactgagaagcagacagaggttgagacagtcatgtcagaggtgtcgggcttccctatgccccagctggacccccgggtcctagaagtgtacaggggggtccgggaggtattatctaagtaccgcagtggaaaactgcccaaggcatttaagatcatccctgcactctccaactgggagcaaatcctctacgtcacagagccggaggcctggactgcagctgccatgtaccaggccaccaggatttttgcctctaacctgaaggaacgcatggcccagcgcttctacaaccttgtcctgctccctcgagtacgagatgacgttgctgaatacaaacgactcaacttccatctctacatggctctcaagaaggcccttttcaaacctggagcctggttcaaagggatcctgattccactgtgcgagtctggcacttgtaccctccgggaagccatcattgtgggtagcatcatcaccaagtgctccatccctgtgttgcactccagtgcggccatgctgaaaattgctgagatggaatacagcggtgccaacagcatcttcctgcgactgctgctggataagaagtatgcactgccttaccgggtgctggatgccctagtcttccacttcctggggttccggacagagaagcgtgaactgcctgtgctgtggcaccagtgcctcctgactttggtccagcgctacaaggccgacttggccacagaccagaaagaggccctcttagaactgctccggctgcagccccatccacagctatcgcccgaaatcaggcgtgagcttcagagtgcagtcccccgcgatgtggaagatgttcccatcaccgtggagtgaggaaaacagtcagctgtcctggccaaaggggtttggaaggacaccaagacccccgttggtgactgaagatgacactgagctttaatggctgaagacccagatcagggcagtgacagatcacagggacatctgtggctcccagtccaggacaggaaggactgagggtctggctggttccctcttccattctaggcccttatccctgtttagttctgagagccaacttgagataccatatgctagcattcccagtccccagctggggcttggtgtgagtactttttctatggctattgtgtcaggtcactgtggataaaggcaaagacagatatttattgaacctctgtgtttggtgtagtcaatggaggtaggcattactcctgttagtatttggaggacggaggacattcttgtcctgtttatataggacccacctcccttgatctccaagcttgtttctccaggctgcactcaccttgttagcccccaggggacacatcctctgccttcccccatcacaggctacagcagccaggagcaggttgtccaaagatggtcgtgtctcagcagtggatgaaaggactacaagagaaaactccttggggaaagcaga

SEQ ID NO: 15615 - protein, 437 aa, Homo sapiens; identical to SEQ ID NO: 1772

SEQ ID NO: 15616 - DNA, 2311 bp, Homo sapiens
ggattcccgccccgaggtttctaaatccagacattcccgtttggctgagcactctaggcctacatccatgaagctaggagagcgacactcaaagactgcactattgagagaagctaacgttaaaggcagtgaatatattcgggagtccagctccggaacccgggagctcttttagtgggaggggcggcgctgatggcgcttctggcctccgaatgctagggggcgctgtgatcgccgggcggcctcttgggcgctgggagtccaccgcgcaagcgcatcctggcctttcttcagtccccacgtgcgatccttcccggcaactttttcgagaaaaatgcccaaattcaaggcggcccgtggggtggggggtcaggaaaaacatgcgcccctggccgatcagatcctggctgggaatgcggtgcgggcgggggtccgggagaagcggcggggtcgcgggacaggagaagcggaggaagagtatgtggggccccggctgagccgacggattttgcagcaagcacggcagcaacaggaggaactcgaggccgagcatgggactggggacaagcccgcggcgccgcgggaacgcaccacgcggctgggtccaagaatgcctcaggatggccatcctattgcatttggttttggtattcttagtttttttagcggtaagctcaacttccttggacaagtcttcatatcctaagcttcatttaagccaaggtttttcaacctcagcattattgacattttgggctgggtaattttgtgtgtgtgtggaggctgtcctgtgcagtgtaggaggtttagtagatatctctgatctctacttctagactccagtagcaaccttcccccagttgtgaaaaccaaaaatgacatcagacattgccaaatgtcctctgggaggcaagactgcccctagtcaggaccactaatttattcccatctataataaatgctagctccaaaacatgcaggcatttagactgcctgtggtcaaactcctgagcccataaattttggcccttgggagtggagtctaggataagggtcctcaaccagttcattctgaccctgtgatattaacataatggtgtccctgatactttaggctgttttgggctaatgcatctcattgctaatcatactataaaaggacagggaggctgataaattctgtggcagcttatttgaaaatgcagaatgaagaaatgaaaatgagcccctctcccagattgatgcctaacagttgaaatatatgtcataaagtatgtacttgggcttgtccccccagagagcctctcaggttctcactcagcacctcataactcctacttcactgataatgctgaccaatttagcagaatgcttttccagcttgtagtaaatagagtagacaagctccttgaagtaatcagaactcctggcagtcgtaagaaatgatagctggcatcttcagaaagcaagcctagatccacatgaattcaacaatcagaggccatttagtttgggggcacattataaggtactataaagcaccttaactcaagacttccaaaaacctgagtttgactcttacccccacctgacagctgtgaggccttgggtgagttattaacctgaggcccagttcccatgtctgcataagtttccgtgtcctataagtgttgcgctgactctaggactgaaaagtcccaaactcagtgcctggcattgagtaggacctcagaaaagaggagcagtttgttttttgttttgttttgtgacaggatctcactctgtcacccacgctggagggcagtggcatgatctcagctcactgcaacctcagcctctcgagtagctgggattacaggcacgtaccaccacgcctggctaatttttgttttattagtagagacagggtttcaccatgttggccaggctggtctcaaactcctgacctcacgtgatccacctccctcagcctcccaaagtactgggattacaagcgtgagccactgcgcccaactgagaagcagctttaaatacatttcagtctgggcatggtggcccagacctgtaatcttagcactttgggacgccaaggcaggagcccaggagtgtgagaccagcctgggcaacatggggagaccccatctctacagaagaataaaaaactagctgggccttgtactatgttcctgtggtcccagctactcgagagactgaggcgggaagatcgcttgagccagagagatagaggctgcagtgagccatgatggtgccactgcatgccaacctgggcaacagaggtagactctctctc

SEQ ID NO: 15617 - protein, 123 aa, Homo sapiens
MPKFKAARGVGGQEKHAPLADQILAGNAVRAGVREKRRGRGTGEAEEEYVGPRLSRRILQQARQQQEELEAEHGTGDKPAAPRERTTRLGPRMPQDGHPIAFGFGILSFFSGKLNFLGQVFIS

SEQ ID NO: 15618 - DNA, 1847 bp, Homo sapiens
ggattcccgccccgaggtttctaaatccagacattcccgtttggctgagcactctaggcctacatccatgaagctaggagagcgacactcaaagactgcactattgagagaagctaacgttaaaggcagtgaatatattcgggagtccagctccggaacccgggagctcttttagtgggaggggcggcgctgatggcgcttctggcctccgaatgctagggggcgctgtgatcgccgggcggcctcttgggcgctgggagtccaccgcgcaagcgcatcctggcctttcttcagtccccacgtgcgatccttcccggcaactttttcgagaaaaatgcccaaattcaaggcggcccgtggggtggggggtcaggaaaaacatgcgcccctggccgatcagatcctggctgggaatgcggtgcgggcgggggtccgggagaagcggcggggtcgcgggacaggagaagcggaggaagagtatgtggggccccggctgagccgacggattttgcagcaagcacggcagcaacaggaggaactcgaggccgagcatgggactggggacaagcccgcggcgccgcgggaacgcaccacgcggctgggtccaagaatgcctcaggatggatcagatgacgaggacgaggagtggcccaccctggagaaggctgccacaatgacagcagcgggccatcatgcagaggtggttgtggaccctgaggatgagcgtgccatagagatgttcatgaacaagaaccctcctgccaggtattatctaagtaccgcagtggaaaactgcccaaggcatttaagatcatccctgcactctccaactgggagcaaatcctctacgtcacagagccggaggcctggactgcagctgccatgtaccaggccaccaggatttttgcctctaacctgaaggaacgcatggcccagcgcttctacaaccttgtcctgctccctcgagtacgagatgacgttgctgaatacaaacgactcaacttccatctctacatggctctcaagaaggcccttttcaaacctggagcctggttcaaagggatcctgattccactgtgcgagtctggcacttgtaccctccgggaagccatcattgtgggtagcatcatcaccaagtgctccatccctgtgttgcactccagtgcggccatgctgaaaattgctgagatggaatacagcggtgccaacagcatcttcctgcgactgctgctggataagaagtatgcactgccttaccgggtgctggatgccctagtcttccacttcctggggttccggacagagaagcgtgaactgcctgtgctgtggcaccagtgcctcctgactttggtccagcgctacaaggccgacttggccacagaccagaaagaggccctcttagaactgctccggctgcagccccatccacagctatcgcccgaaatcaggcgtgagcttcagagtgcagtcccccgcgatgtggaagatgttcccatcaccgtggagtgaggaaaacagtcagctgtcctggccaaaggggtttggaaggacaccaagacccccgttggtgactgaagatgacactgagctttaatggctgaagacccagatcagggcagtgacagatcacagggacatctgtggctcccagtccaggacaggaaggactgagggtctggctggttccctcttccattctaggcccttatccctgtttagttctgagagccaacttgagataccatatgctagcattcccagtccccagctggggcttggtgtgagtactttttctatggctattgtgtcaggtcactgtggataaaggcaaagacagatatttattg

SEQ ID NO: 15619 - protein, 208 aa, Homo sapiens [sequence omitted]

SEQ ID NO: 15620 - DNA, 2122 bp, Homo sapiens
ggattcccgccccgaggtttctaaatccagacattcccgtttggctgagcactctaggcctacatccatgaagctaggagagcgacactcaaagactgcactattgagagaagctaacgttaaaggcagtgaatatattcgggagtccagctccggaacccgggagctcttttagtgggaggggcggcgctgatggcgcttctggcctccgaatgctagggggcgctgtgatcgccgggcggcctcttgggcgctgggagtccaccgcgcaagcgcatcctggcctttcttcagtccccacgtgcgatccttcccggcaactttttcgagaaaaatgcccaaattcaaggcggcccgtggggtggggggtcaggaaaaacatgcgcccctggccgatcagatcctggctgggaatgcggtgcgggcgggggtccgggagaagcggcggggtcgcgggacaggagaagcggaggaagagtatgtggggccccggctgagccgacggattttgcagcaagcacggcagcaacaggaggaactcgaggccgagcatgggactggggacaagcccgcggcgccgcgggaacgcaccacgcggctgggtccaagaatgcctcaggatggatcagatgacgaggacgaggagtggcccaccctggagaaggctgccacaatgacagcagcgggccatcatgcagaggtggttgtggaccctgaggatgagcgtgccatagagatgttcatgaacaagaaccctcctgccaggtattatctaagtaccgcagtggaaaactgcccaaggcatttaagatcatccctgcactctccaactgggagcaaatcctctacgtcacagagccggaggcctggactgcagctgccatgtaccaggccaccaggatttttgcctctaacctgaaggaacgcatggcccagcgcttctacaaccttgtcctgctccctcgagtacgagatgacgttgctgaatacaaacgactcaacttccatctctacatggctctcaagaaggcccttttcaaacctggagcctggttcaaagggatcctgattccactgtgcgagtctggcacttgtaccctccgggaagccatcattgtgggtagcatcatcaccaagtgctccatccctgtgttgcactccagtgcggccatgctgaaaattgctgagatggaatacagcggtgccaacagcatcttcctgcgactgctgctggataagaagtatgcactgccttaccgggtgctggatgccctagtcttccacttcctggggttccggacagagaagcgtgaactgcctgtgctgtggcaccagtgcctcctgactttggtccagcgctacaaggccgacttggccacagaccagaaagaggccctcttagaactgctccggctgcagccccatccacagctatcgcccgaaatcaggcgtgagcttcagagtgcagtcccccgcgatgtggaagatgttcccatcaccgtggagtgaggaaaacagtcagctgtcctggccaaaggggtttggaaggacaccaagacccccgttggtgactgaagatgacactgagctttaatggctgaagacccagatcagggcagtgacagatcacagggacatctgtggctcccagtccaggacaggaaggactgagggtctggctggttccctcttccattctaggcccttatccctgtttagttctgagagccaacttgagataccatatgctagcattcccagtccccagctggggcttggtgtgagtactttttctatggctattgtgtcaggtcactgtggataaaggcaaagacagatatttattgaacctctgtgtttggtgtagtcaatggaggtaggcattactcctgttagtatttggaggacggaggacattcttgtcctgtttatataggacccacctcccttgatctccaagcttgtttctccaggctgcactcaccttgttagcccccaggggacacatcctctgccttcccccatcacaggctacagcagccaggagcaggttgtccaaagatggtcgtgtctcagcagtggatgaaaggactacaagagaaaactccttggggaaagcaga

SEQ ID NO: 15621 - protein, 208 aa, Homo sapiens [sequence omitted]

SEQ ID NO: 15622 - DNA, 1219 bp, Homo sapiens
ccactagtgcggccatgctgaaaattgctgagatggaatacagcggtgccaacagcatcttcctgcgactgctgctggataagaagtatgcactgccttaccgggtgctggatgccctagtcttccacttcctggggttccggacagagaagcgtgaactgcctgtgctgtggcaccagtgcctcctgactttggtccagcgctacaaggccgacttggccacagaccagaaagaggccctcttagaactgctccggctgcagccccatccacagctatcgcccgaaatcaggcgtgagcttcagagtgcagtcccccgcgatgtggaagatgttcccatcaccgtggagtgaggaaaacagtcagctgtcctggccaaaggggtttggaaggacaccaagacccccgttggtgactgaagatgacactgagctttaatggctgaagacccagatcagggcagtgacagatcacagggacatctgtggctcccagtccaggacaggaaggactgagggtctggctggttccctcttccattctaggcccttatccctgtttagttctgagagccaacttgagataccatatgctagcattcccagtccccagctggggcttggtgtgagtactttttctatggctattgtgtcaggtcactgtggataaaggcaaagacagatatttattgaacctctgtgtttggtgtagtcaatggaggtaggcattactcctgttagtatttggaggacggaggacattcttgtcctgtttatataggacccacctcccttgatctccaagcttgtttctccaggctgcactcaccttgttagcccccaggggacacatcctctgccttcccccatcacaggctacagcagccaggagcaggttgtccaaagatggtcgtgtctcagcagtggatgaaaggactacaagagaaaactccttggggaaagcagagataagagtcaagaaaggccagagagtgctgggattacaggcatgagccactgcacccagcccaagtgcccatttttgtgtggcccatgagctaagaatgatttttccatttttaaatggggaaaaaattaaaacagtattttgtgataggtaggaattacatgaaattccagtttcagcatccataaatagttttgttggaacagccatgctcacccatttacatgttttctgtggctggttttgtgctaca

SEQ ID NO: 15623 - protein, 112 aa, Homo sapiens [sequence omitted]

SEQ ID NO: 15624 - DNA, 1256 bp, Homo sapiens
agccccatccacagctatcgcccgaaatcaggcgtgagcttcagagtgcagtcccccgcgatgtggaagatgttcccatcaccgtggagtgaggaaaacagtcagctgtcctggccaaaggggtttggaaggacaccaagacccccgttggtgactgaagatgacactgagctttaatggctgaagacccagatcagggcagtgacagatcacagggacatctgtggctcccagtccaggacaggaaggactgagggtctggctggttccctcttccattctaggcccttatccctgtttagttctgagagccaacttgagataccatatgctagcattcccagtccccagctggggcttggtgtgagtactttttctatggctattgtgtcaggtcactgtggataaaggcaaagacagatatttattgaacctctgtgtttggtgtagtcaatggaggtaggcattactcctgttagtatttggaggacggaggacattcttgtcctgtttatataggacccacctcccttgatctccaagcttgtttctccaggctgcactcaccttgttagcccccaggggacacatcctctgccttcccccatcacaggctacagcagccaggagcaggttgtccaaagatgtgctgggattacaggcatgagccactgcacccagcccaagtgcccatttttgtgtggcccatgagctaagaatgatttttccatttttaaatggggaaaaaattaaaacagtattttgtgataggtaggaattacatgaaattccagtttcagcatccataaatagttttgttggaacagccatgctcacccatttacatgttttctgtggctggttttgtgctacaacagcagagtttaagtataatcctgctataacccttgttatttgctttcgaaattgcgcatttgttccaacccatttaatatatttgggaacagtttgatcataacgcagacttcatgtttgcttgtgtgtgatttcatcctcgagaaatagtaggtgaatatgggaaactgtatctagctgaaccaagcctaagtagtacacaaaactcacacctaaacatgtaccagctacctcactcatctccccacctgtgttgagcaacccttccgacgtccacttccaaaagcaaagtgcatgtcttcaagataaaaggccatatttattgtgatataatttctcaaccatttgacatatgtaaaaaccaagctatcctttttttt

SEQ ID NO: 15625 - protein, 47 aa, Homo sapiens
MLTHLHVFCGWFCATTAEFKYNPAITLVICFRNCAFVPTHLIYLGTV

SEQ ID NO: 15626 - DNA, 1826 bp, Homo sapiens
agggaagcggcgcgcgcgcgcgggcggcgggcgggctggggatccgccgcgcagtgccagcgccagcgccagacccgcgccccgcgctctccggcccgtcgcctgccttgggactcgcgagcccgcactcccgccctgcctgttcgctgcccgagtatggagctgctgtgttgcgaaggcacccggcacgcgccccgggccgggccggacccgcggctgctgggggaccagcgtgtcctgcagagcctgctccgcctggaggagcgctacgtaccccgcgcctcctacttccagtgcgtgcagcgggagatcaagccgcacatgcggaagatgctggcttactggatgctggaggactgggaggtgctggtcctagggaagctcaagtgggacctggctgctgtgattgcacatgatttcctggccttcattctgcaccggctctctctgccccgtgaccgacaggccttggtcaaaaagcatgcccagacctttttggccctctgtgctacagattatacctttgccatgtacccgccatccatgatcgccacgggcagcattggggctgcagtgcaaggcctgggtgcctgctccatgtccggggatgagctcacagagctgctggcagggatcactggcactgaagtggactgcctgcgggcctgtcaggagcagatcgaagctgcactcagggagagcctcagggaagcctctcagaccagctccagcccagcgcccaaagccccccggggctccagcagccaagggcccagccagaccagcactcctacagatgtcacagccatacacctgtagccctggagaggccctctggagtggccactaagcagaggaggggccgctgccacccacctccctgcctccaggaaccacaccacatctaagcctgaaggggcgtctgttcccccttcacaaagcccaagggatctggtcctacccatccccgcagtgtgcactaaggggcccggccagccatgtctgcatttcggtggctagtcaagctcctcctccctgcatctgaccagcagcgcctttcccaactctagctgggggtgggccaggctgatgggacagaattggatacatacaccagcattccttttgaacgcccccccccacccctgggggctctcatgttttcaactgccaaaatgctctagtgccttctaaaggtgttgtcccttctagggttattgcatttggattggggtccctctaaaatttaatgcatgatagacacatatgagggggaatagtctagatggctcctctcagtactttggaggcccctatgtagtccgtgctgacagctgctcctagagggaggggcctaggcctcagccagagaagctataaattcctctttgctttgctttctgctcagcttctcctgtgtgattgacagctttgctgctgaaggctcattttaatttattaattgctttgagcacaactttaagaggacataatggggtcctggccatcccacaagtggtggtaaccctggtggttgctgttttcctcccttctgctactggcaaaaggatctttgtggccaaggagctgctatagcctggggtggggtcatgccctcctctcccattgtccctctgccccatcctccagcagggaaaatgcagcagggatgccctggaggtggctgagcccctgtctagagagggaggcaagccctgttgacacaggtctttcctaaggctgcaaggtttaggctggtggcccaggaccatcatcctactgtaataaagatgattgtgaaataaaactggctttggcttcttgga

SEQ ID NO: 15627 - protein, 220 aa, Homo sapiens
MELLCCEGTRHAPRAGPDPRLLGDQRVLQSLLRLEERYVPRASYFQCVQREIKPHMRKMLAYWMLEDWEVLVLGKLKWDLAAVIAHDFLAFILHRLSLPRDRQALVKKHAQTFLALCATDYTFAMYPPSMIATGSIGAAVQGLGACSMSGDELTELLAGITGTEVDCLRACQEQIEAALRESLREASQTSSSPAPKAPRGSSSQGPSQTSTPTDVTAIHL

SEQ ID NO: 15628 - DNA, 2542 bp, Homo sapiens
agggaagcggcgcgcgcgcgcgggcggcgggcgggctggggatccgccgcgcagtgccagcgccagcgccagacccgcgccccgcgctctccggcccgtcgcctgccttgggactcgcgagcccgcactcccgccctgcctgttcgctgcccgagtatggagctgctgtgttgcgaaggcacccggcacgcgccccgggccgggccggacccgcggctgctgggggaccagcgtgtcctgcagagcctgctccgcctggaggagcgctacgtaccccgcgcctcctacttccagtgcgtgcagcgggagatcaagccgcacatgcggaagatgctggcttactggatgctggaggtaccgcccggacgcgtccccctcccccaccgctcccgggtctggacacaccggggccgccctgtcgggacatcccggtccccacagcaatctgcaggatgctccgaggctaagactcccggggcctggcctttcactagggcacccacgccagctgcctcccttgctttcccgagccctaatcggctcctcccgacagtgactgccagtcacttggcaccctaactgtgcctctcttcgggccgagcaaacgggaccaaggacactctctccccttcggcttctcacagcgtctcccgcttccctccgcctcccggccttctccggagagcgcgcctggaaaaccctgggctcggccgcccccgcccgggagccggttcctgtgtctttcgcggggttctggcggggaaggcgatgggggtggcgcgcgccctgttccggccgacagggaaatgaaaagtgcaggaggcagcggcaggagcctcctcccttcccctcgggtatgtgaggagcagcgctgtgaggaggaagtcttccccctggccatgaactacctggatcgctacctgtcttgcgtccccacccgaaaggcgcagttgcagctcctgggtgcggtctgcatgctgctggcctccaagctgcgcgagaccacgcccctgaccatcgaaaaactgtgcatctacaccgaccacgctgtctctccccgccagttgcgggactgggaggtgctggtcctagggaagctcaagtgggacctggctgctgtgattgcacatgatttcctggccttcattctgcaccggctctctctgccccgtgaccgacaggccttggtcaaaaagcatgcccagacctttttggccctctgtgctacagattatacctttgccatgtacccgccatccatgatcgccacgggcagcattggggctgcagtgcaaggcctgggtgcctgctccatgtccggggatgagctcacagagctgctggcagggatcactggcactgaagtggactgcctgcgggcctgtcaggagcagatcgaagctgcactcagggagagcctcagggaagcctctcagaccagctccagcccagcgcccaaagccccccggggctccagcagccaagggcccagccagaccagcactcctacagatgtcacagccatacacctgtagccctggagaggccctctggagtggccactaagcagaggaggggccgctgccacccacctccctgcctccaggaaccacaccacatctaagcctgaaggggcgtctgttcccccttcacaaagcccaagggatctggtcctacccatccccgcagtgtgcactaaggggcccggccagccatgtctgcatttcggtggctagtcaagctcctcctccctgcatctgaccagcagcgcctttcccaactctagctgggggtgggccaggctgatgggacagaattggatacatacaccagcattccttttgaacgcccccccccacccctgggggctctcatgttttcaactgccaaaatgctctagtgccttctaaaggtgttgtcccttctagggttattgcatttggattggggtccctctaaaatttaatgcatgatagacacatatgagggggaatagtctagatggctcctctcagtactttggaggcccctatgtagtccgtgctgacagctgctcctagagggaggggcctaggcctcagccagagaagctataaattcctctttgctttgctttctgctcagcttctcctgtgtgattgacagctttgctgctgaaggctcattttaatttattaattgctttgagcacaactttaagaggacataatggggtcctggccatcccacaagtggtggtaaccctggtggttgctgttttcctcccttctgctactggcaaaaggatctttgtggccaaggagctgctatagcctggggtggggtcatgccctcctctcccattgtccctctgccccatcctccagcagggaaaatgcagcagggatgccctggaggtggctgagcccctgtctagagagggaggcaagccctgttgacacaggtctttcctaaggctgcaaggtttaggctggtggcccaggaccatcatcctactgtaataaagatgattgtgaaataaaactggctttggcttcttgga

SEQ ID NO: 15629 - protein, 242 aa, Homo sapiens
MKSAGGSGRSLLPSPRVCEEQRCEEEVFPLAMNYLDRYLSCVPTRKAQLQLLGAVCMLLASKLRETTPLTIEKLCIYTDHAVSPRQLRDWEVLVLGKLKWDLAAVIAHDFLAFILHRLSLPRDRQALVKKHAQTFLALCATDYTFAMYPPSMIATGSIGAAVQGLGACSMSGDELTELLAGITGTEVDCLRACQEQIEAALRESLREASQTSSSPAPKAPRGSSSQGPSQTSTPTDVTAIHL

SEQ ID NO: 15630 - DNA, 2082 bp, Homo sapiens
ccacggttgctacatcgtcgcgaggggcggggcgcctgtcagggaagcggcgcgcgcgcgcgggcggcgggcgggctggggatccgccgcgcagtgccagcgccagcgccagacccgcgccccgcgctctccggcccgtcgcctgccttgggactcgcgagcccgcactcccgccctgcctgttcgctgcccgagtatggagctgctgtgttgcgaaggcacccggcacgcgccccgggccgggccggacccgcggctgctgggggaccagcgtgtcctgcagagcctgctccgcctggaggagcgctacgtaccccgcgcctcctacttccagtgcgtgcagcgggagatcaagccgcacatgcggaagatgctggcttactggatgctggaggtatgtgaggagcagcgctgtgaggaggaagtcttccccctggccatgaactacctggatcgctacctgtcttgcgtccccacccgaaaggcgcagttgcagctcctgggtgcggtctgcatgctgctggcctccaagctgcgcgagaccacgcccctgaccatcgaaaaactgtgcatctacaccgaccacgctgtctctccccgccagttgcgggactgggaggtgctggtcctagggaagctcaagtgggacctggctgctgtgattgcacatgatttcctggccttcattctgcaccggctctctctgccccgtgaccgacaggccttggtcaaaaagcatgcccagacctttttggccctctgtgctacagattatacctttgccatgtacccgccatccatgatcgccacgggcagcattggggctgcagtgcaaggcctgggtgcctgctccatgtccggggatgagctcacagagctgctggcagggatcactggcactgaagtggactgcctgcgggcctgtcaggagcagatcgaagctgcactcagggagagcctcagggaagcctctcagaccagctccagcccagcgcccaaagccccccggggctccagcagccaagggcccagccagaccagcactcctacagatgtcacagccatacacctgtagccctggagaggccctctggagtggccactaagcagaggaggggccgctgccacccacctccctgcctccaggaaccacaccacatctaagcctgaaggggcgtctgttcccccttcacaaagcccaagggatctggtcctacccatccccgcagtgtgcactaaggggcccggccagccatgtctgcatttcggtggctagtcaagctcctcctccctgcatctgaccagcagcgcctttcccaactctagctgggggtgggccaggctgatgggacagaattggatacatacaccagcattccttttgaacgcccccccccacccctgggggctctcatgttttcaactgccaaaatgctctagtgccttctaaaggtgttgtcccttctagggttattgcatttggattggggtccctctaaaatttaatgcatgatagacacatatgagggggaatagtctagatggctcctctcagtactttggaggcccctatgtagtccgtgctgacagctgctcctagagggaggggcctaggcctcagccagagaagctataaattcctctttgctttgctttctgctcagcttctcctgtgtgattgacagctttgctgctgaaggctcattttaatttattaattgctttgagcacaactttaagaggacataatggggtcctggccatcccacaagtggtggtaaccctggtggttgctgttttcctcccttctgctactggcaaaaggatctttgtggccaaggagctgctatagcctggggtggggtcatgccctcctctcccattgtccctctgccccatcctccagcagggaaaatgcagcagggatgccctggaggtggctgagcccctgtctagagagggaggcaagccctgttgacacaggtctttcctaaggctgcaaggtttaggctggtggcccaggaccatcatcctactgtaataaagatgattgtgaaataaaactggctttggcttcttgga

SEQ ID NO: 15631 - protein, 292 aa, Homo sapiens; identical to SEQ ID NO: 1774

SEQ ID NO: 15632 - DNA, 1932 bp, Homo sapiens
ccaggctggagtgcagtggcgcgatctcagctcactgcaacctctacctgggttcaagtgattctcctgctcagcctccggagtagctgggattacaggcatccaccaccacacctggctaattttttgtatttttagtagagacaaggttttaccatgttggccaggctggtctcgaactcctgacttcaggtgatccacccgtcttggcatcccaaagtgctgggattacaggcgtgagcaggtatgtgaggagcagcgctgtgaggaggaagtcttccccctggccatgaactacctggatcgctacctgtcttgcgtccccacccgaaaggcgcagttgcagctcctgggtgcggtctgcatgctgctggcctccaagctgcgcgagaccacgcccctgaccatcgaaaaactgtgcatctacaccgaccacgctgtctctccccgccagttgcgggactgggaggtgctggtcctagggaagctcaagtgggacctggctgctgtgattgcacatgatttcctggccttcattctgcaccggctctctctgccccgtgaccgacaggccttggtcaaaaagcatgcccagacctttttggccctctgtgctacagattatacctttgccatgtacccgccatccatgatcgccacgggcagcattggggctgcagtgcaaggcctgggtgcctgctccatgtccggggatgagctcacagagctgctggcagggatcactggcactgaagtggactgcctgcgggcctgtcaggagcagatcgaagctgcactcagggagagcctcagggaagcctctcagaccagctccagcccagcgcccaaagccccccggggctccagcagccaagggcccagccagaccagcactcctacagatgtcacagccatacacctgtagccctggagaggccctctggagtggccactaagcagaggaggggccgctgccacccacctccctgcctccaggaaccacaccacatctaagcctgaaggggcgtctgttcccccttcacaaagcccaagggatctggtcctacccatccccgcagtgtgcactaaggggcccggccagccatgtctgcatttcggtggctagtcaagctcctcctccctgcatctgaccagcagcgcctttcccaactctagctgggggtgggccaggctgatgggacagaattggatacatacaccagcattccttttgaacgcccccccccacccctgggggctctcatgttttcaactgccaaaatgctctagtgccttctaaaggtgttgtcccttctagggttattgcatttggattggggtccctctaaaatttaatgcatgatagacacatatgagggggaatagtctagatggctcctctcagtactttggaggcccctatgtagtccgtgctgacagctgctcctagagggaggggcctaggcctcagccagagaagctataaattcctctttgctttgctttctgctcagcttctcctgtgtgattgacagctttgctgctgaaggctcattttaatttattaattgctttgagcacaactttaagaggacataatggggtcctggccatcccacaagtggtggtaaccctggtggttgctgttttcctcccttctgctactggcaaaaggatctttgtggccaaggagctgctatagcctggggtggggtcatgccctcctctcccattgtccctctgccccatcctccagcagggaaaatgcagcagggatgccctggaggtggctgagcccctgtctagagagggaggcaagccctgttgacacaggtctttcctaaggctgcaaggtttaggctggtggcccaggaccatcatcctactgtaataaagatgattgtgaaataaaactggctttggcttcttgga

SEQ ID NO: 15633 - protein, 211 aa, Homo sapiens
MNYLDRYLSCVPTRKAQLQLLGAVCMLLASKLRETTPLTIEKLCIYTDHAVSPRQLRDWEVLVLGKLKWDLAAVIAHDFLAFILHRLSLPRDRQALVKKHAQTFLALCATDYTFAMYPPSMIATGSIGAAVQGLGACSMSGDELTELLAGITGTEVDCLRACQEQIEAALRESLREASQTSSSPAPKAPRGSSSQGPSQTSTPTDVTAIHL

SEQ ID NO: 15634 - DNA, 2156 bp, Homo sapiens
ggcagcggtccgggaacccgtgctgccccggccccgccgcccacacctgagcctccgtggcgccccgcccccgcacctatgccgcgtggggcgggggctgcgggcgggggtgcgcggcgccggatgagcctcctggcctcgccgagggtgtacagggggtgggagagtcaggccggggaccgaaacttggctgagcagagcaccagcccctttgtctcctccgccccctcttccccacttcctgcccagctctggatcggcggcgcggcgcggactttgtaaacacttcgccactgcaggggtggagactggctctgttcggatgccggccgggggggagaggtgcaatcctctcctcgcggctggtggttgcgaccacccccactccccaaaggcaggctccggaggcggcgggacagagcgcctgcgaccccagtcggtgctccggggaggtcacctgacgaggaggtatgtgaggagcagcgctgtgaggaggaagtcttccccctggccatgaactacctggatcgctacctgtcttgcgtccccacccgaaaggcgcagttgcagctcctgggtgcggtctgcatgctgctggcctccaagctgcgcgagaccacgcccctgaccatcgaaaaactgtgcatctacaccgaccacgctgtctctccccgccagttgcgggactgggaggtgctggtcctagggaagctcaagtgggacctggctgctgtgattgcacatgatttcctggccttcattctgcaccggctctctctgccccgtgaccgacaggccttggtcaaaaagcatgcccagacctttttggccctctgtgctacagattatacctttgccatgtacccgccatccatgatcgccacgggcagcattggggctgcagtgcaaggcctgggtgcctgctccatgtccggggatgagctcacagagctgctggcagggatcactggcactgaagtggactgcctgcgggcctgtcaggagcagatcgaagctgcactcagggagagcctcagggaagcctctcagaccagctccagcccagcgcccaaagccccccggggctccagcagccaagggcccagccagaccagcactcctacagatgtcacagccatacacctgtagccctggagaggccctctggagtggccactaagcagaggaggggccgctgccacccacctccctgcctccaggaaccacaccacatctaagcctgaaggggcgtctgttcccccttcacaaagcccaagggatctggtcctacccatccccgcagtgtgcactaaggggcccggccagccatgtctgcatttcggtggctagtcaagctcctcctccctgcatctgaccagcagcgcctttcccaactctagctgggggtgggccaggctgatgggacagaattggatacatacaccagcattccttttgaacgcccccccccacccctgggggctctcatgttttcaactgccaaaatgctctagtgccttctaaaggtgttgtcccttctagggttattgcatttggattggggtccctctaaaatttaatgcatgatagacacatatgagggggaatagtctagatggctcctctcagtactttggaggcccctatgtagtccgtgctgacagctgctcctagagggaggggcctaggcctcagccagagaagctataaattcctctttgctttgctttctgctcagcttctcctgtgtgattgacagctttgctgctgaaggctcattttaatttattaattgctttgagcacaactttaagaggacataatggggtcctggccatcccacaagtggtggtaaccctggtggttgctgttttcctcccttctgctactggcaaaaggatctttgtggccaaggagctgctatagcctggggtggggtcatgccctcctctcccattgtccctctgccccatcctccagcagggaaaatgcagcagggatgccctggaggtggctgagcccctgtctagagagggaggcaagccctgttgacacaggtctttcctaaggctgcaaggtttaggctggtggcccaggaccatcatcctactgtaataaagatgattgtgaaataaaactggctttggcttcttgga

SEQ ID NO: 15635 - protein, 211 aa, Homo sapiens; identical to SEQ ID NO: 15633

SEQ ID NO: 15636 - DNA, 1940 bp, Homo sapiens
ggcagcggtccgggaacccgtgctgccccggccccgccgcccacacctgagcctccgtggcgccccgcccccgcacctatgccgcgtggggcgggggctgcgggcgggggtgcgcggcgccggatgagcctcctggcctcgccgagggtgtacagggggtgggagagtcaggccggggaccgaaacttggctgagcagagcaccagcccctttgtctcctccgccccctcttccccacttcctgcccagctctggatcggcggcgcggcgcggactttgtaaacacttcgccactgcaggggtggagactggctctgttcggatgccggccgggggggagaggtgcaatcctctcctcgcggctggtggttgcgaccacccccactccccaaaggcaggctccggaggcggcgggacagagcgcctgcgaccccagtcggtgctccggggaggtcacctgacgaggaggactgggaggtgctggtcctagggaagctcaagtgggacctggctgctgtgattgcacatgatttcctggccttcattctgcaccggctctctctgccccgtgaccgacaggccttggtcaaaaagcatgcccagacctttttggccctctgtgctacagattatacctttgccatgtacccgccatccatgatcgccacgggcagcattggggctgcagtgcaaggcctgggtgcctgctccatgtccggggatgagctcacagagctgctggcagggatcactggcactgaagtggactgcctgcgggcctgtcaggagcagatcgaagctgcactcagggagagcctcagggaagcctctcagaccagctccagcccagcgcccaaagccccccggggctccagcagccaagggcccagccagaccagcactcctacagatgtcacagccatacacctgtagccctggagaggccctctggagtggccactaagcagaggaggggccgctgccacccacctccctgcctccaggaaccacaccacatctaagcctgaaggggcgtctgttcccccttcacaaagcccaagggatctggtcctacccatccccgcagtgtgcactaaggggcccggccagccatgtctgcatttcggtggctagtcaagctcctcctccctgcatctgaccagcagcgcctttcccaactctagctgggggtgggccaggctgatgggacagaattggatacatacaccagcattccttttgaacgcccccccccacccctgggggctctcatgttttcaactgccaaaatgctctagtgccttctaaaggtgttgtcccttctagggttattgcatttggattggggtccctctaaaatttaatgcatgatagacacatatgagggggaatagtctagatggctcctctcagtactttggaggcccctatgtagtccgtgctgacagctgctcctagagggaggggcctaggcctcagccagagaagctataaattcctctttgctttgctttctgctcagcttctcctgtgtgattgacagctttgctgctgaaggctcattttaatttattaattgctttgagcacaactttaagaggacataatggggtcctggccatcccacaagtggtggtaaccctggtggttgctgttttcctcccttctgctactggcaaaaggatctttgtggccaaggagctgctatagcctggggtggggtcatgccctcctctcccattgtccctctgccccatcctccagcagggaaaatgcagcagggatgccctggaggtggctgagcccctgtctagagagggaggcaagccctgttgacacaggtctttcctaaggctgcaaggtttaggctggtggcccaggaccatcatcctactgtaataaagatgattgtgaaataaaactggctttggcttcttgga

SEQ ID NO: 15637 - protein, 96 aa, Homo sapiens
MYPPSMIATGSIGAAVQGLGACSMSGDELTELLAGITGTEVDCLRACQEQIEAALRESLREASQTSSSPAPKAPRGSSSQGPSQTSTPTDVTAIHL

SEQ ID NO: 15638 - DNA, 1266 bp, Homo sapiens
ggcagcggtccgggaacccgtgctgccccggccccgccgcccacacctgagcctccgtggcgccccgcccccgcacctatgccgcgtggggcgggggctgcgggcgggggtgcgcggcgccggatgagcctcctggcctcgccgagggtgtacagggggtgggagagtcaggccggggaccgaaacttggctgagcagagcaccagcccctttgtctcctccgccccctcttccccacttcctgcccagctctggatcggcggcgcggcgcggactttgtaaacacttcgccactgcaggggtggagactggctctgttcggatgccggccgggggggagaggtgcaatcctctcctcgcggctggtggttgcgaccacccccactccccaaaggcaggctccggaggcggcgggacagagcgcctgcgaccccagtcggtgctccggggaggtcacctgacgaggaggtatgtgaggagcagcgctgtgaggaggaagtcttccccctggccatgaactacctggatcgctacctgtcttgcgtccccacccgaaaggcgcagttgcagctcctgggtgcggtctgcatgctgctggcctccaagctgcgcgagaccacgcccctgaccatcgaaaaactgtgcatctacaccgaccacgctgtctctccccgccagttgcgggactgggaggtgctggtcctagggaagctcaagtgggacctggctgctgtgattgcacatgatttcctggccttcattctgcaccggctctctctgccccgtgaccgacaggccttggtcaaaaagcatgcccagacctttttggccctctgtgctacagattatacctttgccatgtacccgccatccatgatcgccacgggcagcattggggctgcagtgcaaggcctgggtgcctgctccatgtccggggatgagctcacagagctgctggcagggatcactggcactgaagtggtgagtgctgggtagctgggcagcagcctctccattcataaagtagtgctatgccctgagcctccagtagagggaaacctccaaccccaacctggtcccaagtcctggtttcacaaccttggggctttgtggctttttatctcctgccttggtctggggaagagcaagtatcttgggtggggtgaagggcactggccctaggggttcttttcttgccaagtggtgtgctggagtgggggtggggggtttggtgtcagatgcagggctgctctcacactcccttgc

SEQ ID NO: 15639 - protein, 160 aa, Homo sapiens
MNYLDRYLSCVPTRKAQLQLLGAVCMLLASKLRETTPLTIEKLCIYTDHAVSPRQLRDWEVLVLGKLKWDLAAVIAHDFLAFILHRLSLPRDRQALVKKHAQTFLALCATDYTFAMYPPSMIATGSIGAAVQGLGACSMSGDELTELLAGITGTEVVSAG

SEQ ID NO: 15640 - DNA, 713 bp, Homo sapiens
aggtatgtgaggagcagcgctgtgaggaggaagtcttccccctggccatgaactacctggatcgctacctgtcttgcgtccccacccgaaaggcgcagttgcagctcctgggtgcggtctgcatgctgctggcctccaagctgcgcgagaccacgcccctgaccatcgaaaaactgtgcatctacaccgaccacgctgtctctccccgccagttgcgggactgggaggtgctggtcctagggaagctcaagtgggacctggctgctgtgattgcacatgatttcctggccttcattctgcaccggctctctctgccccgtgaccgacaggccttggtcaaaaagcatgcccagacctttttggccctctgtgctacagattatacctttgccatgtacccgccatccatgatcgccacgggcagcattggggctgcagtgcaaggcctgggtgcctgctccatgtccggggatgagctcacagagctgctggcagggatcactggcactgaagtggtgagtgctgggtagctgggcagcagcctctccattcataaagtagtgctatgccctgagcctccagtagagggaaacctccaaccccaacctggtcccaagtcctggtttcacaaccttggggctttgtggctttttatctcctgccttggtctggggaagagcaagtatcttgggtggggtgaagggcactggccc

SEQ ID NO: 15641 - protein, 160 aa, Homo sapiens; identical to SEQ ID NO: 15639

SEQ ID NO: 15642 - DNA, 2253 bp, Homo sapiens
caaagaaaagagatcactaagtgtaaaagatgcattttctcctcagcacaaagcagattccaggtgtatataattcaccattcagaaaaaaattccgtggcctgtcatgctggctcacacctgtaatcccagcactttgggaggccaaggcaggaagatcacttgagcccaagagttcgagaccagtctgggcaacatagcaagaccccctctctattaaaaaaaaaaaattagctgagtatggtggtacacacctgtagtcccagctacttgggagactgaggctggaggatcacttgagccactggtagcctgaacgacagaacaagactctgtctctaaaacacacacacacacacacacacacacacacacacacacagagagagagagagagagagagagagagagagagagagagaaaagcctggtccatgggagttgtggttacagaaggcaaagcttttaatataccaaagatctaaagttaagcagaagtactccataagccttaccaattggctagcttgtataagcacccagtcttttctgaagtgctgctacctctcaataggaagcaatatcggggtccttccaaggtatcactgaagtattaggacaatgccacaagcctttggagccaatgttacaggcaccagaaccaatcagtgagttaaagttaaagtgaggagctcaaaagagaggaatgagtgcgaaatgtaattgacaatatgtttttgccattttcttcctactgtaaaaatagaaagtccatcccattaatccagagttaattaatatccagagctggtttacaggatattgacatgttctggcatacattaggaatttacacagaatagtaatgactattcaaaaatggggtagttatttaggcagacgactttatcaactaattgtgaaggtagcatattatactatgaagatgaatctctacaatgcagtggctatcaggattgcattaatcatgcaagtatgggcctgattcttatggagaacatttccaaagtgaaaatcctcagaaatagatccgtgacaaggaacaagacaaggatgcccattctcaccacttctattcaatatagtattggaggtccttgctagagcaattgggtaagacaaataaatggcatccaaattggaaaagaagaagtaacattgtctctgcagatgacatgatcgtatattaaaagaaaccccaaagactccaccaaaaagctgttagagctaataaatttagttaaattatggaatacaaaatcatcataccaaagtagtaacatttctatacactaacaacaaactatcccccaaagaaatcaaaacaataatcccatttataatagcatcagcaaaaataatatacttaggaataaatttaatcaaggaggtaaaggacttgtacatagaaaactataaaatattgatgaaataaattaaagaagacacaaataaatggaatgatattctgtgttcatgaattggaagaattaatgtttaaattaattattacctgacgttacctacagagcaatgcaatctccatcaaaattctgatgacattttttacagaaatagaaaaaacaatcctgaaattcatatgaaaccacaaaagatcatgaatagccaaaacaatcttgagcaaaaagaacaaagctggaggcatctcactacctaaattccaaatatactgtaaagctatagcaatcaaaatagcatggtactggcataacaatagacatatagaccaacggaacagaatagggaacccagaaataagtccacacatttatggtcaattgatcttaaacagagctggcatgtatgcacactggggataggacaatctcttcaataaatggttttgggaaaactgcatatccacatgcagaagaatgaaatcggacctttatcttagaccacctcaaaatagattaaagattaaactggccaggcatggtggctcacgcctgtaatcccagcactctgggaggccgaggcgggtggattacctaaggtcaggagtccgagaccagcctggccaacatggtgaaaccccgtctctattaaaaatacacaaaattagccaggtgtggtggtggacacctgtaattccagctgctcggaaggctgaggtaggagaatctcttggacccgggaggcggaggttgcagtgagctgagatcaagccattgcactccagcctgggcaacaagaacgaaactccatctc

SEQ ID NO: 15643 - protein, 56 aa, Homo sapiens
MHFLLSTKQIPGVYNSPFRKKFRGLSCWLTPVIPALWEAKAGRSLEPKSSRPVWAT

SEQ ID NO: 15644 - DNA, 353 bp, Homo sapiens
tcttactttgtaattaaaaatgaatgcactgcaagtaaaagaaaatggtgcagctctggaaagctgcacactaagctgttgacaatggggactaggctgagggttctgtcactttatacatacacactctggactgtttgaatttgtctcaagaggtacttttctttttcttttttttgagacagatctgggcaacaagagggaaattccgccttaaaaaaaaaaaaaagttttcccagcaccatttcttgaagagactatcctttccccagtgagtgttcttggcacctttgtcaaaaatcagttggctaagccggggcagtggcgcacacctgtaatcccagcactttggg

SEQ ID NO: 15645 - protein, 59 aa, Homo sapiens [sequence omitted]

SEQ ID NO: 15646 - DNA, 698 bp, Homo sapiens
ggcagcggtccgggaacccgtgctgccccggccccgccgcccacacctgagcctccgtggcgccccgcccccgcacctatgccgcgtggggcgggggctgcgggcgggggtgcgcggcgccggatgagcctcctggcctcgccgagggtgtacagggggtgggagagtcaggccggggaccgaaacttggctgagcagagcaccagcccctttgtctcctccgccccctcttccccacttcctgcccagctctggatcggcggcgcggcgcggactttgtaaacacttcgccactgcaggggtggagactggctctgttcggatgccggccgggggggagaggtgcaatcctctcctcgcggctggtggttgcgaccacccccactccccaaaggcaggctccggaggcggcgggacagagcgcctgcgaccccagtcggtgctccggggaggtcacctgacgaggagttgttcttacagattcaagaatcacttttgaaagccttcattggatccttgtgaaatgaccgattgactgcttggatgaactcctgaagtgtttctatggaggacagaccaagaggaaacttaatatttcctctcaattttcctgtgaaactaaaactgtgctaaaaaacagtctatttagaaaaaaagaagaagatagttgcctatagaggaactaaagaatgttgtgg

SEQ ID NO: 15647 - protein, 58 aa, Homo sapiens
MPAGGERCNPLLAAGGCDHPHSPKAGSGGGGTERLRPQSVLRGGHLTRSCSYRFKNHF

SEQ ID NO: 15648 - DNA, 527 bp, Homo sapiens
ctttttcaattttgtgtcaggtatataaaactaaaggaaaaggcatttttctgagatctctcaagttaaataaaaatggcctctcaggtgctcactttcgcagcacatatactaaaattggaacgatacagagaagattagcatggcccctgcgcagggatgacatgcaaattcgtgaagcgttccgtattttttcctggtaatttttgtatttttagtagagatggggtttcaccagggtggccaggatggtgttgatctcctgacctcgtgatccgcctgcctcggcctcccaaagtgccgggattacaggcgtgagccaccacacccggccacattttgttgctaaaatataaaatgttaattattattttggaaaaagttaaaatttccagcctttgccttctacctacacaaccttttaataaactgttttttgtatgtcaatatatagatttcttaaatgcctatgtcacattccacccatattttactcaggtcatcacactatttccatagacacttct

SEQ ID NO: 15649 - protein, 32 aa, Homo sapiens
MTCKFVKRSVFFPGNFCIFSRDGVSPGWPGWC

SEQ ID NO: 15650 - DNA, 763 bp, Homo sapiens
cgcgctcgcgcacactacgccagaacaagatggccgacgcggcggccacagctggggccggtggctccggaacgagatcgggaagtaaacagtccactaaccctgccgataactatcatctggcccggaggagaaccctgcaggtggttgtgagctccttgctgacagaggcagggtttgagagtgccgagaaagcatccgtggaaacgctgacagagatgctgcagagctacatttcagaaattgggagaagtgccaagtcttactgtgagcacacagccaggacccagcccacactgtccgatatcgtggtcacacttgttgagatgggtttcaatgtggacactctccctgcttatgcaaaacggtctcagaggatggtcatcactgctcctccggtgaccaatcagccagtgacccccaaggccctcactgcagggcagaaccgaccccacccgccgcacatccccagccattttcctgagttccctgatccccacacctacatcaaaactccggtgagtgatgaagcactgggactgcgcgtggtgtaaagcacggagtcagttcctactgactgtcacgtggcagagtccagtccaaaagcttgttgatgaaagagtggttcaaaactcagaatgtggccgggcacattggctcacacctgtaatcccagcattttaggaggccgaggcaggaggatcacttgagcctgggagttcaagaccagcctgggcagcagagcaagaccctgtctcatttg

SEQ ID NO: 15651 - protein, 174 aa, Homo sapiens
MADAAATAGAGGSGTRSGSKQSTNPADNYHLARRRTLQVVVSSLLTEAGFESAEKASVETLTEMLQSYISEIGRSAKSYCEHTARTQPTLSDIVVTLVEMGFNVDTLPAYAKRSQRMVITAPPVTNQPVTPKALTAGQNRPHPPHIPSHFPEFPDPHTYIKTPVSDEALGLRVV

SEQ ID NO: 15652 - DNA, 797 bp, Homo sapiens
cgcgctcgcgcacactacgccagaacaagatggccgacgcggcggccacagctggggccggtggctccggaacgagatcgggaagtaaacagtccactaaccctgccgataactatcatctggcccggaggagaaccctgcaggtggttgtgagctccttgctgacagaggcagggtttgagagtgccgagaaagcatccgtggaaacgctgacagagatgctgcagagctacatttcagaaattgggagaagtgccaagtcttactgtgagcacacagccaggacccagcccacactgtccgatatcgtggtcacacttgttgagatgggtttcaatgtggacactctccctgcttatgcaaaacggtctcagaggatggtcatcactgctcctccggtgaccaatcagccagtgacccccaaggccctcactgcagggcagaaccgaccccacccgccgcacatccccagccattttcctgagttccctgatccccacacctacatcaaaactccggtgagtgatgaagcactgggactgcgcgtggtgtaaagcacggagtcagttcctactgactgtcacgtggcagagtccagtccaaaagcttgttgatgaaagagtggttcaaaactcagaatgtggccgggcacattggctcacacctgtaatcccagcattttaggaggccgaggcaggaggatcacttgagcctgggagttcaagaccagcctgggcagcagagcaagaccctgtctcatttgaaaaataaataaataaagaaaaaaaaaagaattc

SEQ ID NO: 15653 - protein, 174 aa, Homo sapiens; identical to SEQ ID NO: 15651

SEQ ID NO: 15654 - DNA, 1806 bp, Homo sapiens
gcacactacgccagaacaagatggccgacgcggcggccacagctggggccggtggctccggaacgagatcgggaagtaaacagtccactaaccctgccgataactatcatctggcccggaggagaaccctgcaggtggttgtgagctccttgctgacagaggcagggtttgagagtgccgagaaagcatccgtggaaacgctgacagagatgctgcagagctacatttcagaaattgggagaagtgccaagtcttactgtgagcacacagccaggacccagcccacactgtccgatatcgtggtcacacttgttgagatgggtttcaatgtggacactctccctgcttatgcaaaacggtctcagaggatggtcatcactgctcctccggtgaccaatcagccagtgacccccaaggccctcactgcagggcagaaccgaccccacccgccgcacatccccagccattttcctgagttccctgatccccacacctacatcaaaactccgacgtaccgtgagcccgtgtcagactaccaggtcctgcgggagaaggctgcatcccagaggcgcgatgtggagcgggcacttacccgtttcatggccaagacaggcgagactcagagtcttttcaaagatgacgtcagcacatttccattgattgctgccagacctttcaccatcccctacctgacagctcttcttccgtctgaactggagatgcaacaaatggaagagacagattcctcggagcaggatgaacagacagacacagagaaccttgctcttcatatcagcatgatagagtctcgctccgtcacccaggctggagtgcagtggcaagatcttggctcactgcaacctccgcctcctgggttcaagcgattctccagcctcagcctcctgagtagctggaattacaggaggattctggagccgagaaggagaacacctctgtcctgcagcagaacccctccttgtcgggtagccggaatggggaggagaacatcatcgataacccttatctgcggccggtgaagaagcccaagatccgcaggaagaagccagatacattctagagaattgtgagactttgccctaagctgccaagtgctccccaaggagatcggtcaccaggagagcagccacaaaggtcaagaaagacacacacggaagcaaacccaggctctgtgctccttccagcccttgctggtgcagatgctaccccacaagcttgtcagatcgcccaggtgacgggccaggcgcagccatcgggaaggtcattcagccaacccagaggatgtagaccctgtcctcaagaagtgcagggcgagttctgccgtgccctctgaaatactctccctcctctcagagccctccctcgagagcctgagtgcaccatgtcttgtggcctcgcctgaagccttcctctggcttcacagaatgctctggaactctggggtctggtcagggagtgtgtcctcagcttgtctggaggaggcctgcatccctcctgagctcttggaggtgcccaggaaccctgcttctcctcacagggcctggccatatagccagctccaacccaaagccctgcacagtgcctcacccactcccttctcctggtctctcctcaaaagaattttacatgattttaaaataataatagctttcatttacatagtgcttacatttatatagcacttactatgtgcgatgtactaatttaagtactttatattaactcatataataaatggacacaacacaaaactcaaaaggtacaaaagaataaaacagttaaaaacta

SEQ ID NO: 15655 - protein, 338 aa, Homo sapiens
MADAAATAGAGGSGTRSGSKQSTNPADNYHLARRRTLQVVVSSLLTEAGFESAEKASVETLTEMLQSYISEIGRSAKSYCEHTARTQPTLSDIVVTLVEMGFNVDTLPAYAKRSQRMVITAPPVTNQPVTPKALTAGQNRPHPPHIPSHFPEFPDPHTYIKTPTYREPVSDYQVLREKAASQRRDVERALTRFMAKTGETQSLFKDDVSTFPLIAARPFTIPYLTALLPSELEMQQMEETDSSEQDEQTDTENLALHISMIESRSVTQAGVQWQDLGSLQPPPPGFKRFSSLSLLSSWNYRRILEPRRRTPLSCSRTPPCRVAGMGRRTSSITLICGR

SEQ ID NO: 15656 - DNA, 3506 bp, Homo sapiens
acactacgccagaacaagatggccgacgcggcggccacagctggggccggtggctccggaacgagatcgggaagtaaacagtccactaaccctgccgataactatcatctggcccggaggagaaccctgcaggtggttgtgagctccttgctgacagaggcagggtttgagagtgccgagaaagcatccgtggaaacgctgacagagatgctgcagagctacatttcagaaattgggagaagtgccaagtcttactgtgagcacacagccaggacccagcccacactgtccgatatcgtggtcacacttgttgagatgggtttcaatgtggacactctccctgcttatgcaaaacggtctcagaggatggtcatcactgctcctccggtgaccaatcagccagtgacccccaaggccctcactgcagggcagaaccgaccccacccgccgcacatccccagccattttcctgagttccctgatccccacacctacatcaaaactccgacgtaccgtgagcccgtgtcagactaccaggtcctgcgggagaaggctgcatcccagaggcgcgatgtggagcgggcacttacccgtttcatggccaagacaggcgagactcagagtcttttcaaagatgacgtcagcacatttccattgattgctgccagacctttcaccatcccctacctgacagctcttcttccgtctgaactggagatgcaacaaatggaagagacagattcctcggagcaggatgaacagacagacacagagaaccttgctcttcatatcagcatgatagagtctcgctccgtcacccaggctggagtgcagtggcaagatcttggctcactgcaacctccgcctcctgggttcaagcgattctccagcctcagcctcctgagtagctggaattacaggaggattctggagccgagaaggagaacacctctgtcctgcagcagaacccctccttgtcgggtagccggaatggggaggagaacatcatcgataacccttatctgcggccggtgaagaagcccaagatccgcaggaagaagtccctctcctgagctgagaaggaaacctggcttgtacaggggcgcagattccaccctcccggggagttaaagccactcaagggaagaagagggtgacctcctcatggccaagccgaggctgcagggtgtgatcggacatgattttcatggcaaaccgtcttattaagatgacctattttcactggatgtttgggttgaggaagatatgaacagaataatgagaatttttttttttattttgagatggagtcttactctatcacccaggctggaatgcagtggtgtgatctcagctcactgcagtctcagcaaccctgggtccaagtgattctcctgccttggcctcccgagtagctgggactagaggcaagcgccaccatgctggctaatttttgtattttgagtagagatagggtttcgccatgttggccaggctggtcttgaactcctgacctcaagtgatccacccgcattggcctcccaaagagttgcgattacaggtgtgagccaccacgcccagctaatttttgtatttttaatagagataaggtttcgccatgttggccaggctggtcttgaactcctgacctcaagtgataacccgcctcggcctcccaaagtgctgagattacaggcgtgagccaccgcaccccaccagagactttcttaatcaatcaggctatgtggtggggcatagcagcagccagtgacttcgttcattatcacaggatttgattcctttgaaactcaagagaccagggaaagtgacaggaaggaaagggctctttgctgctgtgcttattacaaggaagactgtttgtccagcgtgtatttcaggatatctggatcccttttattgactcacaatttgtggcaccactttctcatcccagaacttcattcttatttctctcctcatctggcctcccaagtgctccgttgagctgatgaaaagttctttgtactccctcaacgtgtcggaaacaggaggccacacagcacagctttgtttggggtgggcaggagtcaggagtcttgagcagatgcatcactgtgaagaagaacgacatgtcggggctgcacctgtcctcccgtcggcatttgacgaaagctccctgaagcggggcagcactctcctcctgagagatttaccatttattgcccctgtgaggaatgtgtgcttgggaactgccaagtcttaccccttctggaagaagaggttttctctgacaagagcctagagcgtcggctctattatgctgggacttgacagaggagccatggggtttaaacagtaggaaagaggggctacgcgcagtggctcacgccttgatccacccgccttggccttccaaagtgttgagattacaggcgtgagccacggtgcccagcccatctcttagtcttccattcccttggtgaatttggaaacttgaaaaacttggggacttgacagcaggctccatgttcttctggcctcactgtactgtgtaaggaaagagctgcttgtcaggaacggaagaggggacgctagtaaaaaaaaaaaaattggattccccaactggactaaataggagtttttcaggtttgtagtaacgtgaaactctcctagatcgaagcagttagactggcctatgtggccttctcagggtttgtgattcagttcttagcgattcttggcctgataagtttatgaacacagccccacattcaagccgtggccaatcccagctgttctcactgctcttgggaggtgttgtcccagtcagtgtttctgcagcttccatttgttgttgttatccagtgtaagcacctgttgaatgcagatgtgctgagttagaggtgggatttggaaaagggctgctatttctgctgttgagatttcagaggctatactctttttttttcttttcttttttttttttttttgagacggcatctcactcttatcgcccaggctggagtgcaatggcgtgatctcggctcactgcaacctccacctcctgggttcaagggattctcctgcctcagcctcctgagtagctgggattacaggcacctaccacaattctcggctaattttttttgtatttttggtagagacggggtttcaccaggttggccagggtggtctcgaacacctgacctcagatgatccacccacctcggcctcccagtgtgggtgggattacaggcatgagccaccgcgcctggcctcagaggctatactcttataattttgttctgaggggagacagggaaagggttagacaacttgaaacattgaccctgtataaaaatgcaaaattctcaatgtgtatttataaatttctattttttataactttatgggacttcttagaggccaaaagtagtaaacatgcagattaaaaatgtttatgaaaatctcaataaaaattcataataaaaactttgtaaataaat

SEQ ID NO: 15657 - protein, 338 aa, Homo sapiens; identical to SEQ ID NO: 15655

SEQ ID NO: 15658 - DNA, 1070 bp, Homo sapiens
actacgccagaacaagatggccgacgcggcggccacagctggggccggtggctccggaacgagatcgggaagtaaacagtccactaaccctgccgataactatcatctggcccggaggagaaccctgcaggtggttgtgagctccttgctgacagaggcagggtttgagagtgccgagaaagcatccgtggaaacgctgacagagatgctgcagagctacatttcagaaattgggagaagtgccaagtcttactgtgagcacacagccaggacccagcccacactgtccgatatcgtggtcacacttgttgagatgggtttcaatgtggacactctccctgcttatgcaaaacggtctcagaggatggtcatcactgctcctccggtgaccaatcagccagtgacccccaaggccctcactgcagggcagaaccgaccccacccgccgcacatccccagccattttcctgagttccctgatccccacacctacatcaaaactccgggtctcactttgttgcccaggctgctggagtgcaatgggcgatctcagctcaccacagcctcgaccttctaggctcaagtgatcctcccacctcaacctcccgagtagctgggactacaggggtgcaccaccatgcccagctaatttttgtatcttctgtagagacaagatatcgccatgttgcccaggctggtctcaaactcctgggcgcaagcagttcacccaggcatgggtacatactccagtatatgtttgcttatttatgtgaatattataatgtaacattgtacaaaataatgtacattaaaagataatcttacccttttaaaatgttcaggaaacctataaccttttctagcgggagcaattgcctctgctttttattttttgaaatcatagggtttttgtttgttttgttgttcttgtttgttttgttgttgttgttattttatagagatggggacaggttttttgtctttctgtggtgctcaagctggtcttgaactcctagccttaagtagtctttgcaccttggcctcccagagtgctgggattacaggcatgc

SEQ ID NO: 15659 - protein, 186 aa, Homo sapiens
MADAAATAGAGGSGTRSGSKQSTNPADNYHLARRRTLQVVVSSLLTEAGFESAEKASVETLTEMLQSYISEIGRSAKSYCEHTARTQPTLSDIVVTLVEMGFNVDTLPAYAKRSQRMVITAPPVTNQPVTPKALTAGQNRPHPPHIPSHFPEFPDPHTYIKTPGLTLLPRLLECNGRSQLTTASTF

SEQ ID NO: 15660 - DNA, 699 bp, Homo sapiens
actacgccagaacaagatggccgacgcggcggccacagctggggccggtggctccggaacgagatcgggaagtaaacagtccactaaccctgccgataactatcatctggcccggaggagaaccctgcaggtggttgtgagctccttgctgacagaggcagggtttgagagtgccgagaaagcatccgtggaaacgctgacagagatgctgcagagctacatttcagaaattgggagaagtgccaagtcttactgtgagcacacagccaggacccagcccacactgtccgatatcgtggtcacacttgttgagatgggtttcaatgtggacactctccctgcttatgcaaaacggtctcagaggatggtcatcactgctcctccggtgaccaatcagccagtgacccccaaggccctcactgcagggcagaaccgaccccacccgccgcacatccccagccattttcctgagttccctgatccccacacctacatcaaaactccgacgtaccgtgagcccgtgtcagactaccaggtcctgcgggagaaggctgcatcccagaggcgcgatgtggagcgggcacttacccgtttcatggccaagacaggcgagactcagagtcttttcaaagatgacgtcagcacatttccatgtgagagttgccccactgtgtggaccctgtcttatttgaaacactc

SEQ ID NO: 15661 - protein, 226 aa, Homo sapiens
MADAAATAGAGGSGTRSGSKQSTNPADNYHLARRRTLQVVVSSLLTEAGFESAEKASVETLTEMLQSYISEIGRSAKSYCEHTARTQPTLSDIVVTLVEMGFNVDTLPAYAKRSQRMVITAPPVTNQPVTPKALTAGQNRPHPPHIPSHFPEFPDPHTYIKTPTYREPVSDYQVLREKAASQRRDVERALTRFMAKTGETQSLFKDDVSTFPCESCPTVWTLSYLK

SEQ ID NO: 15662 - DNA, 480 bp, Homo sapiens
gccagaacaagatggccgacgcggcggccacagctggggccggtggctccggaacgagatcgggaagtaaacagtccactaaccctgccgataactatcatctggcccggaggagaaccctgcaggtggttgtgagctccttgctgacagaggcagggtttgagagtgccgagaaagcatccgtggaaacgctgacagagatgctgcagagctgtgagtacatggaaacacttggccttggagtcaaccccaacatcagttctgtgccctgctttgtgatagtgtttgagaggatttaagaaacaaacttttttcttaagaggggagaaaaaaaattttttttaatgtaaaaagttgagaaaagaaaacagcacaatgggccgagcgtggtggctcacgcctgtaatcccagtactttaggaggctgaggcgggtggatcacctgaagtcaggagttcaagaccagcctggccaacgtgg

SEQ ID NO: 15663 - protein, 95 aa, Homo sapiens
MADAAATAGAGGSGTRSGSKQSTNPADNYHLARRRTLQVVVSSLLTEAGFESAEKASVETLTEMLQSCEYMETLGLGVNPNISSVPCFVIVFERI

SEQ ID NO: 15664 - DNA, 898 bp, Homo sapiens
ctcctcgcggtcacctcttgttactgttttcattttccctttcaatgaaatggtgtgaagatgggaggcacaagagagggatcctgttttttctgcgggacacgtcttaatcccatcatgcgtgtttcttcagctatgtattctaataatctgctaaagtagaaagtaaaagacctgctattttatctcattgggactgtacgttttagagatcgggaagtaaacagtccactaaccctgccgataactatcatctggcccggaggagaaccctgcaggtggttgtgagctccttgctgacagaggcagggtttgagagtgccgagaaagcatccgtggaaacgctgacagagatgctgcagagctacatttcagaaattgggagaagtgccaagtcttactgtgagcacacagccaggacccagcccacactgtccgatatcgtggtcacacttgttgagatgggtttcaatgtggacactctccctgcttatgcaaaacggtctcagaggatggtcatcactgctcctccggtgaccaatcagccagtgacccccaaggccctcactgcagggcagaaccgaccccacccgccgcacatccccagccattttcctgagttccctgatccccacacctacatcaaaactccggtgagtgatgaagcactgggactgcgcgtggtgtaaagcacggagtcagttcctactgactgtcacgtggcagagtccagtccaaaagcttgttgatgaaagagtggttcaaaactcagaatgtggccgggcacattggctcacacctgtaatcccagcattttaggaggccgaggcaggaggatcacttgagcctgggagttcaagaccagcctgggcagcagagcaagaccctgtctcatttg

SEQ ID NO: 15665 - protein, 111 aa, Homo sapiens
MLQSYISEIGRSAKSYCEHTARTQPTLSDIVVTLVEMGFNVDTLPAYAKRSQRMVITAPPVTNQPVTPKALTAGQNRPHPPHIPSHFPEFPDPHTYIKTPVSDEALGLRVV

SEQ ID NO: 15666 - DNA, 932 bp, Homo sapiens
ctcctcgcggtcacctcttgttactgttttcattttccctttcaatgaaatggtgtgaagatgggaggcacaagagagggatcctgttttttctgcgggacacgtcttaatcccatcatgcgtgtttcttcagctatgtattctaataatctgctaaagtagaaagtaaaagacctgctattttatctcattgggactgtacgttttagagatcgggaagtaaacagtccactaaccctgccgataactatcatctggcccggaggagaaccctgcaggtggttgtgagctccttgctgacagaggcagggtttgagagtgccgagaaagcatccgtggaaacgctgacagagatgctgcagagctacatttcagaaattgggagaagtgccaagtcttactgtgagcacacagccaggacccagcccacactgtccgatatcgtggtcacacttgttgagatgggtttcaatgtggacactctccctgcttatgcaaaacggtctcagaggatggtcatcactgctcctccggtgaccaatcagccagtgacccccaaggccctcactgcagggcagaaccgaccccacccgccgcacatccccagccattttcctgagttccctgatccccacacctacatcaaaactccggtgagtgatgaagcactgggactgcgcgtggtgtaaagcacggagtcagttcctactgactgtcacgtggcagagtccagtccaaaagcttgttgatgaaagagtggttcaaaactcagaatgtggccgggcacattggctcacacctgtaatcccagcattttaggaggccgaggcaggaggatcacttgagcctgggagttcaagaccagcctgggcagcagagcaagaccctgtctcatttgaaaaataaataaataaagaaaaaaaaaagaattc

SEQ ID NO: 15667 - protein, 111 aa, Homo sapiens; identical to SEQ ID NO: 15665

SEQ ID NO: 15668 - DNA, 1981 bp, Homo sapiens
acatttcagaaattgggagaagtgccaagtcttactgtgagcacacagccaggacccagcccacactgtccgatatcgtggtcacacttgttgagatgggtttcaatgtggacactctccctgcttatgcaaaacggtctcagaggatgatcgtgccactgcactccagcctgggtgacagagcgagactccatttcaaaaaaataaaaaaaggataaagtaaacaataggaaaggatttggtggggtgagggtggggtgttgagggctgggcctcatcttgtattctgaaagctgagaaacggctggtcagctggaaggctggtggatgggcaggagtgagccaagctgaggcgttctgcaagaagcaggtctgagtctgtccaaccaatttgtatcctgtggggagaacaacttcattcttaacataccctacaaaccagaaaacaagtttttaaggaagatgctgggcatgctgatagcttttctggtctcctaaggaagagtttttaaaactaaatccaaggaagaaaaatgtaacaacacgtggaagtgaacactggatgaataagcttgtttcccaaattagaatcctaacgtccatatttagcttcatgtattcccctttggcttccacagttcaactccttttattttgagacagggtctcgctgtgtcgccccagctggagtatagtggcactacctcggctcactgcaacctccactccccgggttcaagcaattctcagagtagctgggattacagatgcccgccaccacatctggctaattttttttttttttttttagtagacacgggattttgctatgttgcccaggctggtcttgaactcctggcctcaagtgatccacccgccttggccttccaaagtgttgagattacaggcgtgagccacggtgcccagcccatctcttagtcttccattcccttggtgaatttggaaacttgaaaaacttggggacttgacagcaggctccatgttcttctggcctcactgtactgtgtaaggaaagagctgcttgtcaggaacggaagaggggacgctagtaaaaaaaaaaaaattggattccccaactggactaaataggagtttttcaggtttgtagtaacgtgaaactctcctagatcgaagcagttagactggcctatgtggccttctcagggtttgtgattcagttcttagcgattcttggcctgataagtttatgaacacagccccacattcaagccgtggccaatcccagctgttctcactgctcttgggaggtgttgtcccagtcagtgtttctgcagcttccatttgttgttgttatccagtgtaagcacctgttgaatgcagatgtgctgagttagaggtgggatttggaaaagggctgctatttctgctgttgagatttcagaggctatactctttttttttcttttcttttttttttttttttgagacggcatctcactcttatcgcccaggctggagtgcaatggcgtgatctcggctcactgcaacctccacctcctgggttcaagggattctcctgcctcagcctcctgagtagctgggattacaggcacctaccacaattctcggctaattttttttgtatttttggtagagacggggtttcaccaggttggccagggtggtctcgaacacctgacctcagatgatccacccacctcggcctcccagtgtgggtgggattacaggcatgagccaccgcgcctggcctcagaggctatactcttataattttgttctgaggggagacagggaaagggttagacaacttgaaacattgaccctgtataaaaatgcaaaattctcaatgtgtatttataaatttctattttttataactttatgggacttcttagaggccaaaagtagtaaacatgcagattaaaaatgtttatgaaaatctcaataaaaattcataataaaaactttgtaaataaat

SEQ ID NO: 15669 - protein, 40 aa, Homo sapiens
MGFNVDTLPAYAKRSQRMIVPLHSSLGDRARLHFKKIKKG

SEQ ID NO: 15670 - DNA, 1919 bp, Homo sapiens
aagtgatccacccgcattggcctcccaaagagttgcgattacaggtgtgagccaccacgcccagctaatttttgtatttttaatagagataaggtttcgccatgttggccaggctggtcttgaactcctgacctcaagtgataacccgcctcggcctcccaaagtgctgagattacaggcgtgagccaccgcaccccaccagagactttcttaatcaatcaggctatgtggtggggcatagcagcagccagtgacttcgttcattatcacaggatttgattcctttgaaactcaagagaccagggaaagtgacaggaaggaaagggctctttgctgctgtgcttattacaaggaagactgtttgtccagcgtgtatttcaggatatctggatcccttttattgactcacaatttgtggcaccactttctcatcccagaacttcattcttatttctctcctcatctggcctcccaagtgctccgttgagctgatgaaaagttctttgtactccctcaacgtgtcggaaacaggaggccacacagcacagctttgtttggggtgggcaggagtcaggagtcttgagcagatgcatcactgtgaagaagaacgacatgtcggggctgcacctgtcctcccgtcggcatttgacgaaagctccctgaagcggggcagcactctcctcctgagagatttaccatttattgcccctgtgaggaatgtgtgcttgggaactgccaagtcttaccccttctggaagaagaggttttctctgacaagagcctagagcgtcggctctattatgctgggacttgacagaggagccatggggtttaaacagtaggaaagaggggccacggtgcccagcccatctcttagtcttccattcccttggtgaatttggaaacttgaaaaacttggggacttgacagcaggctccatgttcttctggcctcactgtactgtgtaaggaaagagctgcttgtcaggaacggaagaggggacgctagtaaaaaaaaaaaaattggattccccaactggactaaataggagtttttcaggtttgtagtaacgtgaaactctcctagatcgaagcagttagactggcctatgtggccttctcagggtttgtgattcagttcttagcgattcttggcctgataagtttatgaacacagccccacattcaagccgtggccaatcccagctgttctcactgctcttgggaggtgttgtcccagtcagtgtttctgcagcttccatttgttgttgttatccagtgtaagcacctgttgaatgcagatgtgctgagttagaggtgggatttggaaaagggctgctatttctgctgttgagatttcagaggctatactctttttttttcttttcttttttttttttttttgagacggcatctcactcttatcgcccaggctggagtgcaatggcgtgatctcggctcactgcaacctccacctcctgggttcaagggattctcctgcctcagcctcctgagtagctgggattacaggcacctaccacaattctcggctaattttttttgtatttttggtagagacggggtttcaccaggttggccagggtggtctcgaacacctgacctcagatgatccacccacctcggcctcccagtgtgggtgggattacaggcatgagccaccgcgcctggcctcagaggctatactcttataattttgttctgaggggagacagggaaagggttagacaacttgaaacattgaccctgtataaaaatgcaaaattctcaatgtgtatttataaatttctattttttataactttatgggacttcttagaggccaaaagtagtaaacatgcagattaaaaatgtttatgaaaatctcaataaaaattcataataaaaactttgtaaataaat

SEQ ID NO: 15671 - protein, 97 aa, Homo sapiens [sequence omitted]

SEQ ID NO: 15672 - DNA, 1754 bp, Homo sapiens
atagagataaggtttcgccatgttggccaggctggtcttgaactcctgacctcaagtgataacccgcctcggcctcccaaagtgctgagattacaggcgtgagccaccgcaccccaccagagactttcttaatcaatcaggctatgtggtggggcatagcagcagccagtgacttcgttcattatcacaggatttgattcctttgaaactcaagagaccagggaaagtgacaggaaggaaagggctctttgctgctgtgcttattacaaggaagactgtttgtccagcgtgtatttcaggatatctggatcccttttattgactcacaatttgtggcaccactttctcatcccagaacttcattcttatttctctcctcatctggcctcccaagtgctccgttgagctgatgaaaagttctttgtactccctcaacgtgtcggaaacaggaggccacacagcacagctttgtttggggtgggcaggagtcaggagtcttgagcagatgcatcactgtgaagaagaacgacatgtcggggctgcacctgtcctcccgtcggcatttgacgaaagctccctgaagcggggcagcactctcctcctgagagatttaccatttattgccctcctggcctcaagtgatccacccgccttggccttccaaagtgttgagattacaggcgtgagccacggtgcccagcccatctcttagtcttccattcccttggtgaatttggaaacttgaaaaacttggggacttgacagcaggctccatgttcttctggcctcactgtactgtgtaaggaaagagctgcttgtcaggaacggaagaggggacgctagtaaaaaaaaaaaaattggattccccaactggactaaataggagtttttcaggtttgtagtaacgtgaaactctcctagatcgaagcagttagactggcctatgtggccttctcagggtttgtgattcagttcttagcgattcttggcctgataagtttatgaacacagccccacattcaagccgtggccaatcccagctgttctcactgctcttgggaggtgttgtcccagtcagtgtttctgcagcttccatttgttgttgttatccagtgtaagcacctgttgaatgcagatgtgctgagttagaggtgggatttggaaaagggctgctatttctgctgttgagatttcagaggctatactctttttttttcttttcttttttttttttttttgagacggcatctcactcttatcgcccaggctggagtgcaatggcgtgatctcggctcactgcaacctccacctcctgggttcaagggattctcctgcctcagcctcctgagtagctgggattacaggcacctaccacaattctcggctaattttttttgtatttttggtagagacggggtttcaccaggttggccagggtggtctcgaacacctgacctcagatgatccacccacctcggcctcccagtgtgggtgggattacaggcatgagccaccgcgcctggcctcagaggctatactcttataattttgttctgaggggagacagggaaagggttagacaacttgaaacattgaccctgtataaaaatgcaaaattctcaatgtgtatttataaatttctattttttataactttatgggacttcttagaggccaaaagtagtaaacatgcagattaaaaatgtttatgaaaatctcaataaaaattcataataaaaactttgtaaataaat

SEQ ID NO: 15673 - protein, 100 aa, Homo sapiens
MKSSLYSLNVSETGGHTAQLCLGWAGVRSLEQMHHCEEERHVGAAPVLPSAFDESSLKRGSTLLLRDLPFIALLASSDPPALAFQSVEITGVSHGAQPIS

SEQ ID NO: 15674 - DNA, 848 bp, Homo sapiens
ctttgctgctgtgcttattacaaggaagactgtttgtccagcgtgtatttcaggatatctggatcccttttattgactcacaatttgtggcaccactttctcatcccagaacttcattcttatttctctcctcatctggcctcccaagtgctccgttgagctgatgaaaagttctttgtactccctcaacgtgtcggaaacaggaggccacacagcacagctttgtttggggtgggcaggagtcaggagtcttgagcagatgcatcactgtgaagaagaacgacatgtcggggctgcacctgtcctcccgtcggcatttgacgaaagctccctgaagcggggcagcactctcctcctgagagatttaccatttattgcccctgtgaggaatgtgtgcttgggaactgccaagtcttaccccttctggaagaagaggttttctctgacaagagcctagagcgtcggctctattatgctgggacttgacagaggagccatggggtttaaacagtaggaaagaggggctacgcgcaggtggtctcgaacacctgacctcagatgatccacccacctcggcctcccagtgtgggtgggattacaggcatgagccaccgcgcctggcctcagaggctatactcttataattttgttctgaggggagacagggaaagggttagacaacttgaaacattgaccctgtataaaaatgcaaaattctcaatgtgtatttataaatttctattttttataactttatgggacttcttagaggccaaaagtagtaaacatgcagattaaaaatgtttatgaaaatctcaataaaaattcataataaaaactttgtaaat

SEQ ID NO: 15675 - protein, 97 aa, Homo sapiens [sequence omitted]

SEQ ID NO: 15676 - DNA, 852 bp, Homo sapiens
tctcccctacttccttctcacacaattgtgtggccagagtagccggaccaatggctccaaactacccccaaatactcatccccgcctcactgcttgggcccccttggcttcccctaggccagctcacactcaaggtccagcttggatcggagctcctacaggaagccttccccagccctgctctgctcggagacctcttcctcctccatacctacctctcccacttctgtggcaggctcttctttatcctcaggcttcagctcagacatccctcacctgctaggccacagcagctcctgcaaagcttcccacggtccctgctgctctccctccccgcacctagtgttacttggtctacatctctctcccagcaacttgtaagctccacaacgtaaggacgcctcactcatcacaaattccaccaatgcaattcaacactgcgagggggcgccactcagtacaagccaaggaacctcgcaagaggctcacagttgagtgtggaagacagacgtacacacaaataactggactatggagcaggagaatgcaaagctcttccacccaggagagcccggtggcccaagagagcacgggaccacatggggcactgttgggttgtccttgtgggtgtcctctcttgctggcctgtgacccttgtgggagcacgtgcatgagctgggcagaggaatgagggatgccctttgtgtgcttatttttcctacagagtgagttgtggtctttcggtgacctctcttggccatttaaagctgcccttgacattcactttaactggattctccagggagaggagaggggagtgccagaaggcacctgtgtaatttaccctggtgt

SEQ ID NO: 15677 - protein, 114 aa, Homo sapiens
MAPNYPQILIPASLLGPPWLPLGQLTLKVQLGSELLQEAFPSPALLGDLFLLHTYLSHFCGRLFFILRLQLRHPSPARPQQLLQSFPRSLLLSLPAPSVTWSTSLSQQLVSSTT

SEQ ID NO: 15678 - DNA, 4723 bp, Homo sapiens
gatgccgtggcgtgctcgctttggccatccatgtccctcgtgttggacactagagctgtccccgatgtacccatactgacctggtcacgaatcgccttgagaggctggaaactcacccgcctcctttcccggactagggggaagtggggtgaaggaggcgtgcagggaggaacctgggggagggggtggcccgtctcccaggctgggcgtgggccgggcgaggtccccagcccaccgggccgtgccaacaatggcctgttgtagaaggaggcgggaaggaatgcggcctggggagctgggcggcggcggggcggggcccggccaagcggctgccttttacctggccaggtagctcgcatttcccggcaagcggcggcgcccgcagcacctgttgcccggtgcgcgggcggggaggacggcgggggacatggcctggtagagtcccctggggaaaccgtgctgagttcagtccggggcagggcagggcgagggagggaaggtccttccctggcgcccgcgcgggctgcggcagcatgaaaaagaagcagacggtgcagggcaccttcagcaaactcttcgggaagaagcacaccacgacccccagcacctccctctacgccaccaatccgccctggatcttcacccaggaggccccggaggaggggaccgggggcttcgatggcatctattatggagacaatcggtttaacacagtgagcgagtcaggaacagccacgctgaaagctcggccaagagtccggcccctgctgaccttccttccgctgaatgcccaggaaaaccatgggctggctgtgcccaccccctcggttccagatgattttgcagacaaagaagtgacaggtaccagctcactagtcaatggcaacctccgactgtacagctctaaggcagcccatccacctgctgggtttacaaaaacccctaaatccagctctcctgctctcaaacccaaacccaacccccccagcccagagaacacagcgtcttcagcacctgtggactggagggaccccagccagatggaaaagctgcggaacgagctggcagcctatctctgtggctccaggagagaggaccgattcctcagtcacaggccaggcccaacagtggcccctcagagcaaggagggcaagaagggcccccgcctgcctgagaaggagactctcctgagcctgccagcaaaggacactcccccaggtgttcctgaaaagagtcttggcggcagcagcctgacagagacagaggctgcccccagcctgaccctgccctctgtggactacattccccaagactctccaactcccagtgtgcggcagatccggaatgagctggaggcccggctctcctcagcagcagagaaggaggctaagcccagcataggatctctgccccctaagcctcggctagaagggggaagaatttgtgaaaacggggctgatgatgacaaactctccaagcctgtggccaagaatctgccacctcaatccaccaccctgctgccaactacatcactccagcccaaggctatgttgggaccagccataccacccaaggccacacctgagccagccataccacccaaggctacactttggccagccacaccacccaaggccacacttgggccagccacaccactcaaggccacatctgggccaaccacaccactcaaggccacatctggccctgccatagcatctacagccacaactctgcccaccaccacatcccaactgatggcagagaaggactcaggcccagctggccagccagagaagccagcatctcaagaagtttccactccctcccaggcaaggggagaggggtccccctcagaggccactaggctgcccacacagggagcccgctcatctgcagccttcccaccaaagacatctcctggtggaggagaggtgccatgtctctacaagccccactgccaccagagcagcctcagccgtgaggttgctgtggtgatgcccaccctggccagaggaggggctgcagggccaggggagcccgtggaggtgaaggagcccccagggctgccagccaagcctcctgcctcggcccagcccactgatgaactcctcaggcacccggtgactggggaggtggtggagcggggctcgccgatggccctgctcctggcggccaggcagagggctcagaagggaaggtctgtaggggctgccctgggtcggtcctctctgccaggaagtctccgtgaccacagccaccaagccgaggccagctctgacagcatcttccacagccagggcacgcccaactccttcactgtggtgcccaagttacccaaggaggctgagaaggactccccgctgacgaccgaaatacccaataagtgggggccgcggctgggaagagacgcagagggcacagagctgagccgcaggcacaactggacaaagccagagccccaggcccctgtggcctgggaaagagtagctccctccaacctcccccagggccacccgctgcccaagtccttctcctccccaccttctccttcgaacaagagggaggaggaggaggaggagttcaacttcgaggtcatcccaccgccgccagagttcagcaatgaccctgagcccccggccccggccctccagtatctgggccgccagagctcccctccccggaacaactactcagacttgaggcagctcccgaacgctggccccggggcgcccccggctctcggcttctcgcgctttcccgcgggcgcgcgctacgccggggctgggggcctggagcgcttctcgggagggggccgctcgctcataaagaagcgcctgtacgtcggggagccgcaccgaggcccagggctaccccacggtggcaccggccgcagcctgagctctcccaactgcttcgggccgcagcccggaggccccgagatgcggcgcgtgaactcggcgggtcgcgcgccccccggaggcctgcacgcgccgaggctgtccctggagggcgccgcccggggcgccgcggaggccaagcacaaagcgcccggcagcgccgactacggcttcgccccagctgccggcaggtctccctacaccaccacccgctatggaagccccatcaacacgttcaccgtgaggcctgggacccgccatcccatctcctatgtctgctcaggggcccatcggaaagccacctcctgagccaggggttctcttagctctactccaacaaactgtgtctttaaggatctgggcacttgtttcttgtggggggtgggaggtacacagcaggtgttgggcgacctgactcagacacagaggagtctttgatccccaaagaccaacgatgagaagcagtggcccaggaagaccgagagtgggcttctgtttcccaaagcgctggtgtgactgtggactgtttacacgtggggggtgggaggggaaggagggtagagagaaggaaccattaaggacctgggcgctgagtttctgctctctggtactatctgctttagcaagagttatttaaaacagttttacaagcacggcctactgagcaggttctgaaagcaaggggtggggcactgactgaactggaacccatcgagatagctgtgattgcctgtcaggcccttgcaaagggctgaggcccagctctgtctggtgggtgtgcagggcaccgaagggagatctttagcctccatcacctgccatcccaagcaagagtggacacctggggttcctagccgcattgaggtgggaccaggaatgtgtatgtataacatgtggagaaggaccatgtgtggggtggggagtgaagctcccacatgtggaatggaagccctttgcattggccaagggcagaggtgggagattgatggttcatttttccttggccctagcccttagctacagggaggcctagagagaggacacttggcaagtttaggatgggaaacaaggttaagcctggctttgctattcagacctgtgcagccctgattttggggactgggcccaaggagccatgagtcttaggcttgacactaggggccttacatggccaggtctcatatgggatttggagaaggcatttttcctaacactgatactacaagtcaccaatactcttgatgccttaagatgctagaaagccttggagagtggaggcagcagagatgggaatggaggtctgaagaagcttgctgctgttggggaatgtgtttgggaaagtcaagagtggtaggattggttggctgggcgcggtggctcacacctgtaatcccagcactttgggaggccgaggccggtggatcacttgaggtcagaagttcgagaccagcctgcccaaatggtgaaaccccatctctactaaaaatacggaaaaaaaaaaaaaaagagtgctaggattgggccagttaagagcaggggagacctggctgggcatggtggctcacacctgtaattctagcactttgggaggctgaggcgggtggatcatgaggtcaagagattaagaccatcctggcctacatggcgaaaccctgtctctactaaaaataaaaaaatgacctgggcatggtggtgggcgcctgtagtcccagctactcggggcgctgaggcaggagaatcgctcgaacccaggaggtggaggttgcagtgagccgagattgcacaattgcactccagcctggcgacagagcgagactcgtctc

SEQ ID NO: 15679 - protein, 891 aa, Homo sapiens
MKKKQTVQGTFSKLFGKKHTTTPSTSLYATNPPWIFTQEAPEEGTGGFDGIYYGDNRFNTVSESGTATLKARPRVRPLLTFLPLNAQENHGLAVPTPSVPDDFADKEVTGTSSLVNGNLRLYSSKAAHPPAGFTKTPKSSSPALKPKPNPPSPENTASSAPVDWRDPSQMEKLRNELAAYLCGSRREDRFLSHRPGPTVAPQSKEGKKGPRLPEKETLLSLPAKDTPPGVPEKSLGGSSLTETEAAPSLTLPSVDYIPQDSPTPSVRQIRNELEARLSSAAEKEAKPSIGSLPPKPRLEGGRICENGADDDKLSKPVAKNLPPQSTTLLPTTSLQPKAMLGPAIPPKATPEPAIPPKATLWPATPPKATLGPATPLKATSGPTTPLKATSGPAIASTATTLPTTTSQLMAEKDSGPAGQPEKPASQEVSTPSQARGEGSPSEATRLPTQGARSSAAFPPKTSPGGGEVPCLYKPHCHQSSLSREVAVVMPTLARGGAAGPGEPVEVKEPPGLPAKPPASAQPTDELLRHPVTGEVVERGSPMALLLAARQRAQKGRSVGAALGRSSLPGSLRDHSHQAEASSDSIFHSQGTPNSFTVVPKLPKEAEKDSPLTTEIPNKWGPRLGRDAEGTELSRRHNWTKPEPQAPVAWERVAPSNLPQGHPLPKSFSSPPSPSNKREEEEEEFNFEVIPPPPEFSNDPEPPAPALQYLGRQSSPPRNNYSDLRQLPNAGPGAPPALGFSRFPAGARYAGAGGLERFSGGGRSLIKKRLYVGEPHRGPGLPHGGTGRSLSSPNCFGPQPGGPEMRRVNSAGRAPPGGLHAPRLSLEGAARGAAEAKHKAPGSADYGFAPAAGRSPYTTTRYGSPINTFTVRPGTRHPISYVCSGAHRKATS

SEQ ID NO: 15680 - DNA, 1740 bp, Homo sapiens
cggtttaacacagtgagcgagtcaggaacagccacgctgaaagctcggccaagagtccggcccctgctgaccttccttccgctgaatgcccaggaaaaccatgggctggctgtgcccaccccctcggttccagatgattttgcagacaaagaagtgacaggtaccagctcactagtcaatggcaacctccgactgtacagctctgtgggtgacctgaggcctggacaatatggccaggatctactcatccccccacctcccccaggcccagccccagggccccctcaggacatttcagaacctccaggggggtcgccactgccatctccaccttccacagcacccccaccacctcccctgctgctggaacccccacctcctgagccaggggttctcttagctctactccaacaaactgtgtctttaaggatctgggcacttgtttcttgtggggggtgggaggtacacagcaggtgttgggcgacctgactcagacacagaggagtctttgatccccaaagaccaacgatgagaagcagtggcccaggaagaccgagagtgggcttctgtttcccaaagcgctggtgtgactgtggactgtttacacgtggggggtgggaggggaaggagggtagagagaaggaaccattaaggacctgggcgctgagtttctgctctctggtactatctgctttagcaagagttatttaaaacagttttacaagcacggcctactgagcaggttctgaaagcaaggggtggggcactgactgaactggaacccatcgagatagctgtgattgcctgtcaggcccttgcaaagggctgaggcccagctctgtctggtgggtgtgcagggcaccgaagggagatctttagcctccatcacctgccatcccaagcaagagtggacacctggggttcctagccgcattgaggtgggaccaggaatgtgtatgtataacatgtggagaaggaccatgtgtggggtggggagtgaagctcccacatgtggaatggaagccctttgcattggccaagggcagaggtgggagattgatggttcatttttccttggccctagcccttagctacagggaggcctagagagaggacacttggcaagtttaggatgggaaacaaggttaagcctggctttgctattcagacctgtgcagccctgattttggggactgggcccaaggagccatgagtcttaggcttgacactaggggccttacatggccaggtctcatatgggatttggagaaggcatttttcctaacactgatactacaagtcaccaatactcttgatgccttaagatgctagaaagccttggagagtggaggcagcagagatgggaatggaggtctgaagaagcttgctgctgttggggaatgtgtttgggaaagtcaagagtggtaggattggttggctgggcgcggtggctcacacctgtaatcccagcactttgggaggccgaggccggtggatcacttgaggtcagaagttcgagaccagcctgcccaaatggtgaaaccccatctctactaaaaatacggaaaaaaaaaaaaaaagagtgctaggattgggccagttaagagcaggggagacctggctgggcatggtggctcacacctgtaattctagcactttgggaggctgaggcgggtggatcatgaggtcaagagattaagaccatcctggcctacatggcgaaaccctgtctctactaaa

SEQ ID NO: 15681 - protein, 56 aa, Homo sapiens [sequence omitted]

SEQ ID NO: 15682 - DNA, 2449 bp, Homo sapiens
ctcagtcacaggccaggcccaacagtggcccctcagagcaaggagggcaagaagggcccccgcctgcctgagaaggagactctcctgagcctgccagcaaaggacactcccccaggtgttcctgaaaagagtcttggcggcagcagcctgacagagacagaggctgcccccagcctgaccctgccctctgtggactacattccccaagactctccaactcccagtgtgcggcagatccggaatgagctggaggcccggctctcctcagcagcagagaaggaggctaagcccagcataggatctctgccccctaagcctcggctagaagggggaagaatttgtgaaaacggggctgatgatgacaaactctccaagcctgtggccaagaatctgccacctcaatccaccaccctgctgccaactacatcactccagcccaaggctatgttgggaccagccataccacccaaggccacacctgagccagccataccacccaaggctacactttggccagccacaccacccaaggccacacttgggccagccacaccactcaaggccacatctgggccaaccacaccactcaaggccacatctggccctgccatagcatctacagccacaactctgcccaccaccacatcccaactgatggcagagaaggactcaggcccagctggccagccagagaagccagcatctcaagaagtttccactccctcccaggcaaggggagaggggtccccctcagaggccactaggctgcccacacagggagcccgctcatctgcagccttcccaccaaagacatctcctggtggaggagaggtgccatgtctctacaagccccactgccaccagagcagcctcagccgtgaggttgctgtggtgatgcccaccctggccagaggaggggctgcagggccaggggagcccgtggaggtgaaggagcccccagggctgccagccaagcctcctgcctcggcccagcccactgatgaactcctcaggcacccggtgactggggaggtggtggagcggggctcgccgatggccctgctcctggcggccaggcagagggctcagaagggaaggtctgtaggggctgccctgggtcggtcctctctgccaggaagtctccgtgaccacagccaccaagccgaggccagctctgacagcatcttccacagccagggcacgcccaactccttcactgtggtgcccaagttacccaaggaggctgagaaggactccccgctgacgaccgaaatacccaataagtgggggccgcggctgggaagagacgcagagggcacagagctgagccgcaggcacaactggacaaagccagagccccaggcccctgtggcctgggaaagagtagctccctccaacctcccccagggccacccgctgcccaagtccttctcctccccaccttctccttcgaacaagagggaggaggaggaggaggagttcaacttcgaggtcatcccaccgccgccagagttcagcaatgaccctgagcccccggccccggccctccagtatctgggccgccagagctcccctccccggaacaactactcagacttgaggcagctcccgaacgctggccccggggcgcccccggctctcggcttctcgcgctttcccgcgggcgcgcgctacgccggggctgggggcctggagcgcttctcgggagggggccgctcgctcataaagaagcgcctgtacgtcggggagccgcaccgaggcccagggctaccccacggtggcaccggccgcagcctgagctctcccaactgcttcgggccgcagcccggaggccccgagatgcggcgcgtgaactcggcgggtcgcgcgccccccggaggcctgcacgcgccgaggctgtccctggagggcgccgcccggggcgccgcggaggccaagcacaaagcgcccggcagcgccgactacggcttcgccccagctgccggcaggtctccctacaccaccacccgctatggaagccccatcaacacgttcaccgtgaggcctgggacccgccatcccatctcctatgtctgctcaggggcccatcggaaagccacctcctgagccaggggttctcttagctctactccaacaaactgtgtctttaaggatctgggcacttgtttcttgtggggggtgggaggtacacagcaggtgttgggcgacctgactcagacacagaggagtctttgatccccaaagaccaacgatgagaagcagtggcccaggaagaccgagagtgggcttctgtttcccaaagcgctggtgtgactgtggactgtttacacgtggggggtgggaggggaaggagggtagagagaaggaaccattaaggacctgggcgctgagtttctgctctctggtactatctgctttagcaagagttatttaaaacagttttacaagc

SEQ ID NO: 15683 - protein, 553 aa, Homo sapiens
MLGPAIPPKATPEPAIPPKATLWPATPPKATLGPATPLKATSGPTTPLKATSGPAIASTATTLPTTTSQLMAEKDSGPAGQPEKPASQEVSTPSQARGEGSPSEATRLPTQGARSSAAFPPKTSPGGGEVPCLYKPHCHQSSLSREVAVVMPTLARGGAAGPGEPVEVKEPPGLPAKPPASAQPTDELLRHPVTGEVVERGSPMALLLAARQRAQKGRSVGAALGRSSLPGSLRDHSHQAEASSDSIFHSQGTPNSFTVVPKLPKEAEKDSPLTTEIPNKWGPRLGRDAEGTELSRRHNWTKPEPQAPVAWERVAPSNLPQGHPLPKSFSSPPSPSNKREEEEEEFNFEVIPPPPEFSNDPEPPAPALQYLGRQSSPPRNNYSDLRQLPNAGPGAPPALGFSRFPAGARYAGAGGLERFSGGGRSLIKKRLYVGEPHRGPGLPHGGTGRSLSSPNCFGPQPGGPEMRRVNSAGRAPPGGLHAPRLSLEGAARGAAEAKHKAPGSADYGFAPAAGRSPYTTTRYGSPINTFTVRPGTRHPISYVCSGAHRKATS

SEQ ID NO: 15684 - DNA, 726 bp, Homo sapiens
cggtttaacacagtgagcgagtcaggaacagccacgctgaaagctcggccaagagtccggcccctgctgaccttccttccgctgaatgcccaggaaaaccatgggctggctgtgcccaccccctcggttccagatgattttgcagacaaagaagtgacaggtaccagctcactagtcaatggcaacctccgactgtacagctctgtgggtgacctgaggcctggacaatatggccaggatctactcatccccccacctcccccaggcccagccccagggccccctcaggacatttcagaacctccaggggggtcgccactgccatctccaccttccacagcacccccaccacctcccctgctgctggaacccccacctcctgagccaggggttctcttagctctactccaacaaactgtgtctttaaggatctgggcacttgtttcttgtggggggtgggaggtacacagcaggtgttgggcgacctgactcagacacagaggagtctttgatccccaaagaccaacgatgagaagcagtggcccaggaagaccgagagtgggcttctgtttcccaaagcgctggtgtgactgtggactgtttacacgtggggggtgggaggggaaggagggtagagagaaggaaccattaaggacctgggcgctgagtttctgctctctggtactatctgctttagcaagagttatttaaaacagttttacaagc

SEQ ID NO: 15685 - protein, 56 aa, Homo sapiens [sequence omitted]

SEQ ID NO: 15686 - DNA, 1253 bp, Homo sapiens
gatgccgtggcgtgctcgctttggccatccatgtccctcgtgttggacactagagctgtccccgatgtacccatactgacctggtcacgaatcgccttgagaggctggaaactcacccgcctcctttcccggactagggggaagtggggtgaaggaggcgtgcagggaggaacctgggggagggggtggcccgtctcccaggctgggcgtgggccgggcgaggtccccagcccaccgggccgtgccaacaatggcctgttgtagaaggaggcgggaaggaatgcggcctggggagctgggcggcggcggggcggggcccggccaagcggctgccttttacctggccaggtagctcgcatttcccggcaagcggcggcgcccgcagcacctgttgcccggtgcgcgggcggggaggacggcgggggacatggcctggtagagtcccctggggaaaccgtgctgagttcagtccggggcagggcagggcgagggagggaaggtccttccctggcgcccgcgcgggctgcggcagcatgaaaaagaagcagacggtgcagggcaccttcagcaaactcttcgggaagaagcacaccacgacccccagcacctccctctacgccaccaatccgccctggatcttcacccaggaggccccggaggaggggaccgggggcttcgatggcatctattatggagacaatcggtttaacacagtgagcgagtcaggaacagccacgctgaaagctcggccaagagtccggcccctgctgaccttccttccgctgactgagtttcattcttgttgcccaggctggagtggtacaatggcgtgatctcggctccctgcaacctccacctcctgggttcaagcgattctcctgcctcagcctcccaagtagctgggattacaggtgcccaccaccatgcccggcaaattttttgtatttttagtagagacagggtttcaccattttggccaggctggtctcgaactcctgacctcaggtgatccacaaacctcagcctcccaaagtgctgggattacaggcgtgagctaccgcgcccagcctgaaatactctatattgggaggttaattagattctctcctatcacttaccctcagcacacatacccagattcatagcagtgtgggcccagagttgacacacctctaccagtcggtaaaatactaaaacattcatctgtaaaatgggaataaaaaaaaaaaaacaaataaaatactgaaatacag

SEQ ID NO: 15687 - protein, 99 aa, Homo sapiens; identical to SEQ ID NO: 4761

SEQ ID NO: 15688 - DNA, 1895 bp, Homo sapiens
ccaagagtcctccctgaccaccagaagttccacctcaccatcaagaaaggccctggtccaggatgtgcaaggtgtgatgaaatcacagggctggggaaggtcagctcggggtcacaagaagcctgatgggcaggaaagagcatgaaagccccagccagcctcacatgtgcggctgggaggactcacagaaaccctctgtacccagtcatgggccaaagacaccgtcatgcaagggggtgaaggctccacactcgtcccggccccgggcgtggaagcaggacctcgagcagtctctggcagcagcctatgtgccggtcgttgtggactctaaggggcagaatccggacaagctcagggtacagtctcccctggggctgcaaggatttagtggagactcttaacaccagttctctggcatctgtgagtttgagtgtgggccatcatcttcttccttctgctctctccctctccacatttcccggtaccatctgatccatcaggcccttctttgctcaggcctgaaggactcaggcctgtgagagaggacggccccgttgtcggccaagacacctttgggcgaggagcagcgaacagggcctgtccatctcagacgtcagccccctgaaggcctgagcaatgggcaacgtgatggagggaaagtcagtggaggagctgagcagcaccgagtgccaccagtggtacaagaagttcatgactgagtgcccctctggccaactcaccctctatgagttccgccagttcttcggcctcaagaacctgagcccgtcggccagccagtacgtggaacagatgtttgagacttttgacttcaacaaggacggctacattgatttcatggagtacgtggcagcgctcagcttggtcctcaaggggaaggtggaacagaagctccgctggtacttcaagctctatgatgtagatggcaacggctgcattgaccgcgatgagctgctcaccatcatccaggccattcgcgccattaacccctgcagcgataccaccatgactgcagaggagttcaccgatacagtgttctccaagattgacgtcaacggggatggggaactctccctggaagagtttatagagggcgtccagaaggaccagatgctcctggacacactgacacgaagcctggaccttacccgcatcgtgcgcaggctccagaatggcgagcaagacgaggagggggctgacgaggccgctgaggcagccggctgagtgcaccgcccggctgcttctgcactagcgggtggggtggtatggtggtgcctgttggtggtgttcttgtcttaaccctagatagaatctaatgaactcagaggcttagctcgcctctttagggtccatggtggcagcagagaggcagaagtgggagtccagagccaggaacagtgaaggatggttcctggcccctctgagtgacagctggtggcagcactccttgctggggggcactgttcaacatccctctgccgtcgggtgaccccctagcccttctgactcctctcccagcttttcccagctttccccactgagcttctccagtccatgctcttctggacgtggactctctgaggcagaactgagcttttccaggcctcttatggaatcctgcagatccagtggctgcagcttcaatcccagtgctgcaatcacacatccattctgccctgggggaccctggagcctacttgtgcgctttgcatttcattgattgacgcctcccttcaacaagcatttactgagcgcctactatgtactaatgctagatgttagatgtacaaagaagacagttttcatcctctaggaactcataggctaatggtgagacacacagacaaacatcattataataaaatatgctaagagaa

SEQ ID NO: 15689 - protein, 201 aa, Homo sapiens; identical to SEQ ID NO: 1780

SEQ ID NO: 15690 - DNA, 2235 bp, Homo sapiens
acctcaccatcaagaaaggccctggtccaggatgtgcaaggtgtgatgaaatcacagggctggggaaggtcagctcggggtcacaagaagcctgatgggcaggaaagagcatgaaagccccagccagcctcacatgtgcggctgggaggactcacagaaaccctctgtacccagtcatgggccaaagacaccgtcatgcaagggggtgaaggctccacactcgtcccggccccgggcgtggaagcaggacctcgagcagtctctggcagcagcctatgtgccggtcgttgtggactctaaggggcagaatccggacaagctcaggttcaatttctacacctcccagtactccaactccctgaaccccttctacactttgcagaagcctacctgtggctacctgtaccgccgggacactgaccacacccgcaagcgctttgatgtgcctcctgccaacttggtcttgtggcgctcctaggcctgagccaaacggaagcccccgacccttcaccctcacccctgtgacctcaggtccccaaggggaagggctgctcactgcaggaggagtgacctatattcgggctaagacagctgtgccatgcccacctattgacaatgataaagggaggtctctcttctcagcagcagttaaagtttgtccttcctttccctggcatctgaatgggtggctgtggggtacagtctcccctggggctgcaaggatttagtggagactcttaacaccagttctctggcatctgtgagtttgagtgtgggccatcatcttcttccttctgctctctccctctccacatttcccggtaccatctgatccatcaggcccttctttgctcaggcctgaaggactcaggcctgtgagagaggacggccccgttgtcggccaagacacctttgggcgaggagcagcgaacagggcctgtccatctcagacgtcagccccctgaaggcctgagcaatgggcaacgtgatggagggaaagtcagtggaggagctgagcagcaccgagtgccaccagtggtacaagaagttcatgactgagtgcccctctggccaactcaccctctatgagttccgccagttcttcggcctcaagaacctgagcccgtcggccagccagtacgtggaacagatgtttgagacttttgacttcaacaaggacggctacattgatttcatggagtacgtggcagcgctcagcttggtcctcaaggggaaggtggaacagaagctccgctggtacttcaagctctatgatgtagatggcaacggctgcattgaccgcgatgagctgctcaccatcatccaggccattcgcgccattaacccctgcagcgataccaccatgactgcagaggagttcaccgatacagtgttctccaagattgacgtcaacggggatggggaactctccctggaagagtttatagagggcgtccagaaggaccagatgctcctggacacactgacacgaagcctggaccttacccgcatcgtgcgcaggctccagaatggcgagcaagacgaggagggggctgacgaggccgctgaggcagccggctgagtgcaccgcccggctgcttctgcactagcgggtggggtggtatggtggtgcctgttggtggtgttcttgtcttaaccctagatagaatctaatgaactcagaggcttagctcgcctctttagggtccatggtggcagcagagaggcagaagtgggagtccagagccaggaacagtgaaggatggttcctggcccctctgagtgacagctggtggcagcactccttgctggggggcactgttcaacatccctctgccgtcgggtgaccccctagcccttctgactcctctcccagcttttcccagctttccccactgagcttctccagtccatgctcttctggacgtggactctctgaggcagaactgagcttttccaggcctcttatggaatcctgcagatccagtggctgcagcttcaatcccagtgctgcaatcacacatccattctgccctgggggaccctggagcctacttgtgcgctttgcatttcattgattgacgcctcccttcaacaagcatttactgagcgcctactatgtactaatgctagatgttagatgtacaaagaagacagttttcatcctctaggaactcataggctaatggtgagacacacagacaaacatcattataataaaatatgctaagagaa

SEQ ID NO: 15691 - protein, 201 aa, Homo sapiens; identical to SEQ ID NO: 1780

SEQ ID NO: 15692 - DNA, 732 bp, Homo sapiens
tgcttctctaagccttgttctattttcaactcttttctccagggtacagtctcccctggggctgcaaggatttagtggagactcttaacaccagttctctggcatctgtgagtttgagtgtgggccatcatcttcttccttctgctctctccctctccacatttcccggtaccatctgatccatcaggcccttctttgctcaggcctgaaggactcaggcctgtgagagaggacggccccgttgtcggccaagacacctttgggcgaggagcagcgaacagggcctgtccatctcagacgtcagccccctgaaggcctgagcaatgggcaacgtgatggagggaaagtcagtggaggagctgagcagcaccgagtgccaccagtggtacaagaagttcatgactgagtgcccctctggccaactcacccttctctgaggcagaactgagcttttccaggcctcttatggaatcctgcagatccagtggctgcagcttcaatcccagtgctgcaatcacacatccattctgccctgggggaccctggagcctacttgtgcgctttgcatttcattgattgacgcctcccttcaacaagcatttactgagcgcctactatgtactaatgctagatgttagatgtacaaagaagacagttttcatcctctaggaactcataggctaatggtgagacacacagacaaacatcattataataaaatatgctaagaga

SEQ ID NO: 15693 - protein, 37 aa, Homo sapiens
MGNVMEGKSVEELSSTECHQWYKKFMTECPSGQLTLL

SEQ ID NO: 15694 - DNA, 2272 bp, Homo sapiens
agtcacccaggagatgatggagaggctgatcaggcctcctggaaagggaggaagagggccctagttggagagatccatcagcagaagccagggaggagatacagacccttgctccctgatgctcctcagggctagcatggggcaggagtttagctgggaggaggcggaggcagctggcgagatagatgtggcggagctccaggagtggtacaagaagtttgtgatggagtgccccagcggcacactctttatgcatgagtttaagcgcttcttcaaggtcacagacgatgaggaggcctcccagtatgtagagggcatgttccgagccttcgacaagaatggggacaacaccatcgacttcctggagtacgtggcagctctgaatctcgtgctgaggggcaccctggagcacaagctgaagtggacattcaagatctatgataaggatggcaatggctgcatcgaccgcctggagctactcaacattgtggagggaatttaccagctgaagaaagcctgccggcgagagctacaaactgagcaaggccagctgctcacacccgaggaggtcgtggacaggatcttcctcctggtggatgagaatggagatggccagctgtctctgaacgagtttgttgaaggtgcccgtcgggacaagtgggtgatgaagatgctgcagatggacatgaatcccagcagctggctcgctcagcagagacggaaaagtgccatgttctgaggagtctggggcccctccacgactccaggctcacccaggtttccagggtagtaggagggtccctggctcagcctgctcatgcccactcttcccctggtgttgacttcctggcaccccctgtgcagggctgagtggggatggggaagggctgctgggtttgaagtggccaacagggcatagtccattttggaggagtccctgggatggtgaagggaattcagttacttttcctgttcagccgctcctgggaggactgtgccttggctgggtggttgtggggctcccacagtttctgggtgttctcagttggaagcaagagccaactgaggggtgagggtcccacagaccaaatcagaaatgagaacacaaagactggtaggaggcaggggtgggagggtgttgagactgaagaaaaggcaggagttgccgggcacggtggctcacgcctgtaatcccagcactttgggaggccgaggcgggcagatcacgaggtcaggagatcgagaccatcctggctaacacggggtgaaaccccgtctctactaaaaatacaaaaaatcagccgggtgaggtggcgggcgcctgtagtcccagctactcaggaggctgaggcaagagaatggcgtgaaccccagggggccgagcctacagtgagccgagattgcgccactgcactccagcctggacgacagtgagactccgtctcaaaaaaaaaaaaagaaagaaaagaaaaggcaggagttttggggggcagggggcagcaataattctataacttccgggatgctgaggggcgttcatggggaggaccctggcctcctcctccccaaggcatcctcaccagtggtgtcaacaggaaaaatggcagcaaatacgctgcaggctgtggtctttctgcctttgaaagggtcagctgtacttaaagggactgtttcagctctgcctgggtgctgctctgggaccccctgctgccaacccaccactcccccaacaatcctctctttccatccatatcccccagtatggaccttccacaactcccagccataagctgaatgtttctctttaaaggatggagaaaacttctgtctgtctctggcaagaattgggggactgttgactgggattgtgggctgggcttggcttctaactgctgtgtgacccaagacagccacttctcctccctaaccttggttatgtcttggcagcacagtgagcaggtcggactaggcgaacagttttggattattgtgtttttagatgtggaattattttttgttatataaactcttatgtgtaaccccaatatagaaactagattaaaagggagtctctctggttgaaaggggagctgagtaccctctggaactggaggcacctctgaaaaaagcaaactgaaaaccagtgccctgggtcactgttactcctataagacagtttaaagtgagacctggaaaaacatttgctttaccttgaatagataggtttttatgttggtatataagaaataaaactaacctattaaacctgaga

SEQ ID NO: 15695 - protein, 206 aa, Homo sapiens
MLLRASMGQEFSWEEAEAAGEIDVAELQEWYKKFVMECPSGTLFMHEFKRFFKVTDDEEASQYVEGMFRAFDKNGDNTIDFLEYVAALNLVLRGTLEHKLKWTFKIYDKDGNGCIDRLELLNIVEGIYQLKKACRRELQTEQGQLLTPEEVVDRIFLLVDENGDGQLSLNEFVEGARRDKWVMKMLQMDMNPSSWLAQQRRKSAMF

SEQ ID NO: 15696 - DNA, 1233 bp, Homo sapiens
caatctgggaaacactatcagaagaaaaagaagaaagcaagtcataaagcctcagggaggccatttttgcctaaatttgaaatgagggtgggccagatgagtatgtttaagtggagagtgcttccagctgagatgatttgagtctgccctaactgctccattgagttctcgtgccctcatcagctgagggcagggaatggaactttaatggaagaaccacttttatctattctttttattcattgtttcagttctgatttcagcaaacatgagcaaaccactttgactgaaagcagaaagagtgaaaattctattttgttacgctactggtgttcaattattagtttgtaccatttttaatttatgtcagttgatgcatctgaaaataagtgcttggagtgttcgtacccttatttttttttaagattcctagaaggaatctttggttaattcagattgagcagttaaagtttttgctatttacctttgtgcaggctggcatatgctaatttgggggtggtaaccaaccgattttatctcatgtaagcattacattttgaagactgaatatacttcacagcagatcaaacacatttatggcatgcactgacctcttcttggagcccagaactttatagagttgcctaccagggttactgtaatggaatttatgatcttaagaaattactagttgtattatttatcctatgattcattcattcaataagcttttactgcataaactttacatccagcactggcgacagagcgagacgccgtctcaaaaaaaaaaaaagaaaattgtgcaaagcataggtaaatatttttctttattaagcttctcactgagaagccctctttattttggtaaatgtcactctgtttgttaggagatgtctgcttttccatgaaatgaaatagtggctaaagccctgaaagaggcaagactacaatgggctgaaacagttggtatagcaaccccagagaagtgcttcattttctttttatagtagaagcaggtccatgtcttttgtggtttcctgcacatctttggagtagttatgacttctcagtttttccccccttaaactgcattgcctattcttttttcctgacatgctatcaggtatcagtgtgttgaatacatactgcttgtgtatcagacttacgttactgtcatcaccattaaaagaattgcagctttgtgccccatgaccttcagctcagttgttg

SEQ ID NO: 15697 - protein, 60 aa, Homo sapiens
MIHSFNKLLLHKLYIQHWRQSETPSQKKKKKIVQSIGKYFSLLSFSLRSPLYFGKCHSVC

SEQ ID NO: 15698 - DNA, 578 bp, Homo sapiens
gcacatgtctagtttactgctcttttctaacttttctcttaatagatattggatatttatttatttatttattttgagacagagtctcgcttgcactccagcctggcgacagagcgagacgccgtctcaaaaaaaaaaaaagaaaattgtgcaaagcataggtaaatatttttctttattaagcttctcactgagaagccctctttattttggtaaatgtcactctgtttgttaggagatgtctgcttttccatgaaatgaaatagtggctaaagccctgaaagaggcaagactacaatgggctgaaacagttggtatagcaaccccagagaagtgcttcattttctttttatagtagaagcaggtccatgtcttttgtggtttcctgcacatctttggagtagttatgacttctcagtttttccccccttaaactgcattgcctattcttttttcctgacatgctatcaggtatcagtgtgttgaatacatactgcttgtgtatcagacttacgttactgtcatcaccattaaaagaattgcagctttgtgccccatgaccttcagctcagttgttg

SEQ ID NO: 15699 - protein, 76 aa, Homo sapiens
MSSLLLFSNFSLNRYWIFIYLFILRQSLACTPAWRQSETPSQKKKKKIVQSIGKYFSLLSFSLRSPLYFGKCHSVC

SEQ ID NO: 15700 - DNA, 2118 bp, Homo sapiens
gggaccggcaagatggcggcgcggacagcgttcggtgctgtgtgccggcgcctctggcagggattggggaatttttctgtaaacacttctaagggcaatacagccaaaaatggtggcttgcttctcagtaccaatatgaagtgggtacagttttcaaacctacacgttgatgttccaaaggatttgaccaaacctgtggtaacaatctctgatgaaccagacatattatataagcgcctctcggttttggtgaaaggtcacgataaggctgtattggacagttatgaatattttgctgtgcttgctgctaaagaacttggtatctctattaaagtacatgaacctccaaggaaaatagagcgatttactcttctccaatcagtgcatatttacaagaagcacagagttcagtatgaaatgagaacactttacagatgtttagagttagaacatctaactggaagcacagcagatgtctacttggaatatattcagcgaaacttacctgaaggggttgccatggaagtaacaaagacacaattagaacagttaccagaacacatcaaggagccaatctgggaaacactatcagaagaaaaagaagaaagcaagtcataaagcctcagggaggccatttttgcctaaatttgaaatgagggtgggccagatgagtatgtttaagtggagagtgcttccagctgagatgatttgagtctgccctaactgctccattgagttctcgtgccctcatcagctgagggcagggaatggaactttaatggaagaaccacttttatctattctttttattcattgtttcagttctgatttcagcaaacatgagcaaaccactttgactgaaagcagaaagagtgaaaattctattttgttacgctactggtgttcaattattagtttgtaccatttttaatttatgtcagttgatgcatctgaaaataagtgcttggagtgttcgtacccttatttttttttaagattcctagaaggaatctttggttaattcagattgagcagttaaagtttttgctatttacctttgtgcaggctggcatatgctaatttgggggtggtaaccaaccgattttatctcatgtaagcattacattttgaagactgaatatacttcacagcagatcaaacacatttatggcatgcactgacctcttcttggagcccagaactttatagagttgcctaccagggttactgtaatggaatttatgatcttaagaaattactagttgtattatttatcctatgattcattcattcaataagcttttactgcataaactttacatccagcactgtagttaagtacccaaaattgaatagaaataatggcttttgaaaatcgcacaaagcaggccaggcacggtggctcacgcctgtaatcccagcattttgggaggccgaggcaggcggatcacgaggtcaagagatccagaccatcctggctaacacggtgaaaccccgtctctaataaaaatacaaaaattagctggacatggtggcacgtgcctgtaatcccagctactcaggaggctgaggcaggagaattgcgtgaacccgggcccggtggaggctgcagtgagacgagatcgcgccactgcactccagcctggcgacagagcgagacgccgtctcaaaaaaaaaaaaagaaaattgtgcaaagcataggtaaatatttttctttattaagcttctcactgagaagccctctttattttggtaaatgtcactctgtttgttaggagatgtctgcttttccatgaaatgaaatagtggctaaagccctgaaagaggcaagactacaatgggctgaaacagttggtatagcaaccccagagaagtgcttcattttctttttatagtagaagcaggtccatgtcttttgtggtttcctgcacatctttggagtagttatgacttctcagtttttccccccttaaactgcattgcctattcttttttcctgacatgctatcaggtatcagtgtgttgaatacatactgcttgtgtatcagacttacgttactgtcatcaccattaaaagaattgcagctttgtgccccatgaccttcagctcagttgttg

SEQ ID NO: 15701 - protein, 201 aa, Homo sapiens; identical to SEQ ID NO: 1784

SEQ ID NO: 15702 - DNA, 887 bp, Homo sapiens
gggaccggcaagatggcggcgcggacagcgttcggtgctgtgtgccggcgcctctggcagggattggggaatttttctgtaaacacttctaagggcaatacagccaaaaatggtggcttgcttctcagtaccaatatgaagtgggtacagttttcaaacctacacgttgatgttccaaaggatttgaccaaacctgtggtaacaatctctgatgaaccagacatattatataagcgcctctcggttttggtgaaaggtcacgataaggctgtattggacagttatgaatattttgctgtgcttgctgctaaagaacttggtatctctattaaagtacatgaacctccaaggaaaatagagcgatttactcttctccaatcagtgcatatttacaagaagcacagagttcagtatgaaatgagaacactttacagatgtttagagttagaacatctaactggaagcacagcagatgtctacttggaatatattcagcgaaacttacctgaaggggttgccatggaagtaacaaagacacaattagaacagttaccagaacacatcaaggagccaatctgggaaacactatcagaagaaaaagaagaaagcaagtcataaagcctcagggaggccatttttgcctaaatttgaaatgagggtgggccagatgagtatgtttaagtggagagtgcttccagctgagatgatttgagtctgccctaactgctccattgagttctcgtgccctcatcagctgagggcagggaatggaactttaatggaagaaccacttttatctattctttttattcattgtttcagttctgatttcagcaaacatgagcaaaccactttgactgaaagcagaaagagtgaaaattctattt

SEQ ID NO: 15703 - protein, 201 aa, Homo sapiens; identical to SEQ ID NO: 1784

SEQ ID NO: 15704 - DNA, 3932 bp, Homo sapiens
agagctcaccctctcacagcaccaccagcggcgagacagaccccaccaccatcttcccctgcaaggagtgtggcaagtaggtgcaggggaccggggactgaatctgagttcatgatgggtagtcgctctatgggagctgggccaggatggcctgaggtttcttcaatcagaaaaaagaacttagacctcaaaactcttcttcgtgtcatctttgggatggagtcttcttcaagatcaaaagccgaaatgcacacatgaaaactcacaggcagcaggaggaacaacagaggcaaaaggctcagaaggcggcttttgcagctgagatggcagccacgattgagaggactacggggcccgtgggggcgccggggctgctgcccctggaccagctgagtctgatcaaacccatcaaggatgtggacatcctcgacgacgacgtcgtccagcagttgggaggtgtcatggaagaggctgaagttgtggacaccgatcttctcttggatgatcaagattcagtcttgcttcagggtgacgcagaactataaagccctgtgtgtcacttagagacagtgaaaacccacggcctccatcttcattaatcaggaaacctggactgcctgcttgttttgtaacccttttaaactacctgttttaaaagtggtcattttattcaggtttagaaaaaaaaatcctatttcttttccttttatttaaaaaaatttgtttttgtggggggttgggggaataaataattggcacaactatctttaagaggtgtttcatctgggctaccttctcatgaaatcattcccagtagggactgaagctgaccttcatgttccattgcattcagatgtcaaccatcccggttgccttttatcccaaagcttgctgtgagtgtgtgtgtgtgagacgcaggcgaccctcttagtactggggtcttggggccaacttttcccatcaagcgttactttgattctgttctgacctcattccatagtttgcagtgagcatggcatctttgcctggagatactatgctaggggcagctttccaggggcaaagcaagccctcgtgttacacggctctcctccagctcacacgacatgtgaggagatgaccaaatgtgaaaacaggtttcccctgtgttgcccgtcatcctttggcccgttcacaggaatggagtactgtataattttaggctttcattcccagcagtgtttactgaggacctggttttctagaacaggtgtgtcctgtcctcttccatgttccctgggggctggtcagctccaagttgtgggtggcagagctgtgtttcagcatgaactgactagagacccatctggaggcaaatattaagttgccaggactgctttcacttcagggtgattgaaggacacatattgaagtacctagaatgccagaaagtgttctattgcccaaaaaacaaatcagaaaagcctattcttttttgcaacgctgttaatgattagtggagttctgaaattactttgtgccacttggaagtactgtgaaaccgcattcactgggattttgctgtaattcacatccgctggactgaagtttaccttgatgttagctataagaaatagttttctaacacatacgatagcaaatacaagacaaatagcattgaaggccaacaaaaatggcttcagatacaccttagctataatgtttgcattcaaacaatgaatgtattcatcacaagtcacttaccaaagcacttctagacttctccaacctccatgactttgctctgcttcctcctgtccctgtcagcagggttgctgtttgtacttgaaggtaataaacctgtaatccttcaaaaatgccatttagccccaggcttctgagctgagtcagactgacccatcccaccgttagggcaaaagtcaggctgggacacagcgccagtacagagaggatcctgcttcatgcaactccccttttggagttaatgcagcgtgatttcctgggccggtgttttcaggcatcgcccaccccaggtatgctggttcccagctccacgtaggtgtgcctatcacgctgggccactttgctgacaacattcatagcttgacatgagagagaatatcagcagaagcatgagagtaggacctgacgtctttgactctgcaaaagcatttagcacacactcatgggggggaactggctgtgagccacagcagccccacacagacagtggtctctgaacttcaggaaagccatggacagaaaaaaaaataaaattcttttccatcattctattttcaaagaggtcttggcgttttcctacatcttttgtttagagggggaaaaaagtttcatttgctgccatttcagaaaggttatgctatcctgttttatccaagcagttgtgagtcaggaactgcctgggcagtgtgcatcaactttgtggccgaaccattacagctgtcatatccttggctgatcgtctctcccagggactactgccctccacttagtgtctgagggtaagcctagaagggtgctgctattgggtctatggaagcttatctatcaaaggagcaaacatccagaaaagtgtttataaagcaaatgtattgcctctgtttagagatttgcccagctgttccagttttaaacattaaaaaataaactcagttgccatggcaaaaatagaatgcacagcttacttataattttccatgcagtatagcataaggatttttgacttgaaacaaccaaagaactcctccttaacgagacagttcaaattcctgaattagtatttcttgactatcaacttaaagaatggacttcctagtacaatgttgcacttatttttttttctgaaataattctgcctgcatgtatgtgttgtgttttagcttctccccttaccccaccccaaagatcttttcttcctaatggttaatgtctcaactcggttactgtttactatcagatggtttttcattagtgaatttagacctctttgagaaagcttgtatataaaaagttaacagatatattttatggaaaaacccatcttattttcaaatatatttaactgctgttatattttattagaggaaggttgtaaatattttctaggagttctattgtaaagaaaagtatttttgaaaaaaattaatgtaataaaaaggaaaacatttttaaatagtggttgtgattgcttcctgttctggcttcgttatgttctattctcagcagatgaattgcatgccttccatatcaggatgtaatttattcaggtttgcactattataagttgacatcataatatctagtgtgcttaactgtattttcccggaatgcaagtcccttggtccatattaaagcactatgtatagcatattcataatttttcttttgtaacgtgtgtatttttaataaggattttatgtaacattttggcaacaagaggaccgtattttctagtgaattttataataacattttgctaaaaatgtttcttcctaggtcagtttttgttaaggtgaaccaaaagtcttattttaccaggggtttaaaaaaagtttgaagcttgaaagcaaagttatatttaaacatcatatgtaacaaataaataaagatgttttatagacttgtcctaaaaaggtgcattccttaaaaaaaaaaaaaagaaaaaaaaaggaaactggggcattctaggttgtttcccctccaagtgataagctttttttttttcttaattatcacaatgcttcttcaaaaagggaaccagggaaattttatttaacacattctaatcattagcctctcagaaagttattacagttcctatagatgggcattcatcaaatggagatgtaaccaaacagacactgtcatatttatttgtgaaaacctgattcaatattgcatcagctgctctg

SEQ ID NO: 15705 - protein, 48 aa, Homo sapiens
MMGSRSMGAGPGWPEVSSIRKKNLDLKTLLRVIFGMESSSRSKAEMHT

SEQ ID NO: 15706 - DNA, 7086 bp, Homo sapiens
ttttgtggctggacgttcacaaccaaggcagacagcatgggtgaccagcaactgtacaagaccaaccatgtggcccatggtagtgagaaccttttctaccaacagccaccacttggcgtccacagcgggctgaaccacaactatgggaatgcagttacagggggcggaatggatgcccctcaggcctcgccaatctccccccacttccctcaagatacacgggatggtctgggcttgcctgttggctccaaaaaccttggccaaatggatacctcgaggcagggagggtggggaagtcatgcagggcctggaaaccatgtccagctacgtggaaacctggccaactcaaacatgatgtggggggcaccagcccaggctgagcccactgatggctaccaatacacctactcccaggccagcgagatccggacccagaagcttaccagcggtgtcttacacaagctggactctttcacccaggtgtttgccaaccaaaacctgcgaattcaggtcaacaatatggcccaggtgctgcacactcagtcagcagtgatggatggagcccctgacagtgctctccgccagctgctgtctcagaagcccatggagcccccagcaccggctatcccttcccgctaccagcaggtgccccagcagcctcaccctggtttcactggtgggctgtccaaaccagctcttcaggtcgggcagcaccctacccaagggcacctgtattatgactaccagcagcctctggctcaggtgccagtgcagggaggacagccactgcaggccccacagatgctgtcacagcacatgcaacagatgcagcagcaccagtattacccaccgcagcaacagcagcaagccgggcaacagcgtatctccatgcaagaaatacagacgcagccgcaacaaattcgcccatcacagccacagccgccgccacagcagcagcagccgcagcagctacagctgcagcagcggcagggttcaatgcagatacctcagtattatcagccccaacccatgatgcagcacttgcaagagcagcagcagcaacagatgcacctgcagcctccttcttatcacagggaccctcaccagtataccccagagcaggcacacactgtccagctgattcccctgggctccatgtcccagtactactaccaggagccccagcagccctacagccaccccctctaccagcagagccacctgtcccagcaccagcagcgtgaggacagtcagctgaagacctactctagtgacagacaggcccaggccatgctgagctcccatggggacctggggcctcctgacacaggaatgggagacccagcgagctcagatctgacccgggtcagcagcaccctcccccatcgccccctcctatcccccagtgggatccacctcaacaacatggggcctcagcatcagcagctgtctcccagtgccatgtggccccagatgcacctacctgatgggagagcccagccagggtcccctgagtcaagtggccaacccaaaggagcgtttggggagcagtttgatgccaagaacaagctgacatgctccatctgcctgaaggagttcaagaacctgcctgccctgaatggccacatgcggtcccacgggggaatgagggcctcccccaacctcaaacaggaggaaggagagaaggtcctgccgcctcagccccagccaccactgccgcctccgcctccgcctccgccgccaccacagctccctcccgaggcagaaagcctcacgcctatggtcatgcccgtgtctgtccctgtcaagcttctcccgcccaagcccagctctcaggggttcaccaacagcaccgttgccgccccctccgccagagacaagccagccagctcgatgtcggacgacgagatgcctgtgctcgtgaggatgaccctctctcccccacactcaccccaaggggctgccccccgcacgcctgctgaaatccccaggaagcatcagccgagtgtgcccaaagccgaggagcccctcaagaccgtgcaggagaagaaaaagttccggcaccggccggaacctctcttcatcccgccgccgccctcctacaacccgaaccccgctgcctcctactcgggcgccaccctgtaccagagccagctgcgctccccgcgcgtcctcggggaccacctgctcctggaccccacccacgagctgcccccttacacgcccccacccatgctgagcccggtgcgccagggctcggggctcttcagcaatgtcctcatctccggccacggccctggcgcccacccgcagctgcccctgacgcccctgacgcccacaccacgggtgctgctgtgtcgctccaacagcatcgatggcagcaacgtgacggtcaccccagggcctggagagcagactgtagatgttgaaccacgcatcaacattggcttgagattccaagcagaaatccctgaactccaagatatctctgccctggcccaggacacacacaaggccacactggtatggaagccctggccagaactagaaaaccatgacctccagcaaagagtggagaatcttctgaatttgtgctgttccagtgcattgccaggtggagggaccaattctgaatttgctttgcactctctgtttgaggccaaaggtgatgtgatggttgctctggaaatgctgctactgcggaagcctgtcaggttaaaatgtcatcctttagcaaattaccactatgccggttcggacaagtggacctccctagaaagaaaactgtttaacaaagcactagccacttacagcaaagactttatttttgtacagaagatggtgaagtccaagacggtggctcagtgcgtggagtactactacacgtggaaaaagatcatgcggctggggcggaaacaccggacacgcctggcagaaatcatcgacgattgtgtgacaagtgaagaagaagaagagttagaggaggaggaggaggaggacccggaagaagataggaaatccacaaaagaagaagagagtgaggtgccgaagtccccggagccaccacccgtccccgtcctggctcccacggaggggccgcccctgcaggccctgggccagccctcaggctccttcatctgtgaaatgcccaactgtggggctgtgttcagctcccgacaggcactgaatggccatgcccgcatccacgggggcaccaaccaggtgaccaaggcccgaggtgccatcccctctgggaagcagaagcctggtggcacccagagtgggtactgttcggtaaagagctcaccctctcacagcaccaccagcggcgagacagaccccaccaccatcttcccctgcaaggagtgtggcaaagtcttcttcaagatcaaaagccgaaatgcacacatgaaaactcacaggcagcaggaggaacaacagaggcaaaaggctcagaaggcggcttttgcagctgagatggcagccacgattgagaggactacggggcccgtgggggcgccggggctgctgcccctggaccagctgagtctgatcaaacccatcaaggatgtggacatcctcgacgacgacgtcgtccagcagttgggaggtgtcatggaagaggctgaagttgtggacaccgatcttctcttggatgatcaagattcagtcttgcttcagggtgacgcagaactataaagccctgtgtgtcacttagagacagtgaaaacccacggcctccatcttcattaatcaggaaacctggactgcctgcttgttttgtaacccttttaaactacctgttttaaaagtggtcattttattcaggtttagaaaaaaaaatcctatttcttttccttttatttaaaaaaatttgtttttgtggggggttgggggaataaataattggcacaactatctttaagaggtgtttcatctgggctaccttctcatgaaatcattcccagtagggactgaagctgaccttcatgttccattgcattcagatgtcaaccatcccggttgccttttatcccaaagcttgctgtgagtgtgtgtgtgtgagacgcaggcgaccctcttagtactggggtcttggggccaacttttcccatcaagcgttactttgattctgttctgacctcattccatagtttgcagtgagcatggcatctttgcctggagatactatgctaggggcagctttccaggggcaaagcaagccctcgtgttacacggctctcctccagctcacacgacatgtgaggagatgaccaaatgtgaaaacaggtttcccctgtgttgcccgtcatcctttggcccgttcacaggaatggagtactgtataattttaggctttcattcccagcagtgtttactgaggacctggttttctagaacaggtgtgtcctgtcctcttccatgttccctgggggctggtcagctccaagttgtgggtggcagagctgtgtttcagcatgaactgactagagacccatctggaggcaaatattaagttgccaggactgctttcacttcagggtgattgaaggacacatattgaagtacctagaatgccagaaagtgttctattgcccaaaaaacaaatcagaaaagcctattcttttttgcaacgctgttaatgattagtggagttctgaaattactttgtgccacttggaagtactgtgaaaccgcattcactgggattttgctgtaattcacatccgctggactgaagtttaccttgatgttagctataagaaatagttttctaacacatacgatagcaaatacaagacaaatagcattgaaggccaacaaaaatggcttcagatacaccttagctataatgtttgcattcaaacaatgaatgtattcatcacaagtcacttaccaaagcacttctagacttctccaacctccatgactttgctctgcttcctcctgtccctgtcagcagggttgctgtttgtacttgaaggtaataaacctgtaatccttcaaaaatgccatttagccccaggcttctgagctgagtcagactgacccatcccaccgttagggcaaaagtcaggctgggacacagcgccagtacagagaggatcctgcttcatgcaactccccttttggagttaatgcagcgtgatttcctgggccggtgttttcaggcatcgcccaccccaggtatgctggttcccagctccacgtaggtgtgcctatcacgctgggccactttgctgacaacattcatagcttgacatgagagagaatatcagcagaagcatgagagtaggacctgacgtctttgactctgcaaaagcatttagcacacactcatgggggggaactggctgtgagccacagcagccccacacagacagtggtctctgaacttcaggaaagccatggacagaaaaaaaaataaaattcttttccatcattctattttcaaagaggtcttggcgttttcctacatcttttgtttagagggggaaaaaagtttcatttgctgccatttcagaaaggttatgctatcctgttttatccaagcagttgtgagtcaggaactgcctgggcagtgtgcatcaactttgtggccgaaccattacagctgtcatatccttggctgatcgtctctcccagggactactgccctccacttagtgtctgagggtaagcctagaagggtgctgctattgggtctatggaagcttatctatcaaaggagcaaacatccagaaaagtgtttataaagcaaatgtattgcctctgtttagagatttgcccagctgttccagttttaaacattaaaaaataaactcagttgccatggcaaaaatagaatgcacagcttacttataattttccatgcagtatagcataaggatttttgacttgaaacaaccaaagaactcctccttaacgagacagttcaaattcctgaattagtatttcttgactatcaacttaaagaatggacttcctagtacaatgttgcacttatttttttttctgaaataattctgcctgcatgtatgtgttgtgttttagcttctccccttaccccaccccaaagatcttttcttcctaatggttaatgtctcaactcggttactgtttactatcagatggtttttcattagtgaatttagacctctttgagaaagcttgtatataaaaagttaacagatatattttatggaaaaacccatcttattttcaaatatatttaactgctgttatattttattagaggaaggttgtaaatattttctaggagttctattgtaaagaaaagtatttttgaaaaaaattaatgtaataaaaaggaaaacatttttaaatagtggttgtgattgcttcctgttctggcttcgttatgttctattctcagcagatgaattgcatgccttccatatcaggatgtaatttattcaggtttgcactattataagttgacatcataatatctagtgtgcttaactgtattttcccggaatgcaagtcccttggtccatattaaagcactatgtatagcatattcataatttttcttttgtaacgtgtgtatttttaataaggattttatgtaacattttggcaacaagaggaccgtattttctagtgaattttataataacattttgctaaaaatgtttcttcctaggtcagtttttgttaaggtgaaccaaaagtcttattttaccaggggtttaaaaaaagtttgaagcttgaaagcaaagttatatttaaacatcatatgtaacaaataaataaagatgttttatagacttgtcctaaaaaggtgcattccttaaaaaaaaaaaaaagaaaaaaaaaggaaactggggcattctaggttgtttcccctccaagtgataagctttttttttttcttaattatcacaatgcttcttcaaaaagggaaccagggaaattttatttaacacattctaatcattagcctctcagaaagttattacagttcctatagatgggcattcatcaaatggagatgtaaccaaacagacactgtcatatttatttgtgaaaacctgattcaatattgcatcagctgctctg

SEQ ID NO: 15707 - protein, 1220 aa, Homo sapiens
MGDQQLYKTNHVAHGSENLFYQQPPLGVHSGLNHNYGNAVTGGGMDAPQASPISPHFPQDTRDGLGLPVGSKNLGQMDTSRQGGWGSHAGPGNHVQLRGNLANSNMMWGAPAQAEPTDGYQYTYSQASEIRTQKLTSGVLHKLDSFTQVFANQNLRIQVNNMAQVLHTQSAVMDGAPDSALRQLLSQKPMEPPAPAIPSRYQQVPQQPHPGFTGGLSKPALQVGQHPTQGHLYYDYQQPLAQVPVQGGQPLQAPQMLSQHMQQMQQHQYYPPQQQQQAGQQRISMQEIQTQPQQIRPSQPQPPPQQQQPQQLQLQQRQGSMQIPQYYQPQPMMQHLQEQQQQQMHLQPPSYHRDPHQYTPEQAHTVQLIPLGSMSQYYYQEPQQPYSHPLYQQSHLSQHQQREDSQLKTYSSDRQAQAMLSSHGDLGPPDTGMGDPASSDLTRVSSTLPHRPLLSPSGIHLNNMGPQHQQLSPSAMWPQMHLPDGRAQPGSPESSGQPKGAFGEQFDAKNKLTCSICLKEFKNLPALNGHMRSHGGMRASPNLKQEEGEKVLPPQPQPPLPPPPPPPPPPQLPPEAESLTPMVMPVSVPVKLLPPKPSSQGFTNSTVAAPSARDKPASSMSDDEMPVLVRMTLSPPHSPQGAAPRTPAEIPRKHQPSVPKAEEPLKTVQEKKKFRHRPEPLFIPPPPSYNPNPAASYSGATLYQSQLRSPRVLGDHLLLDPTHELPPYTPPPMLSPVRQGSGLFSNVLISGHGPGAHPQLPLTPLTPTPRVLLCRSNSIDGSNVTVTPGPGEQTVDVEPRINIGLRFQAEIPELQDISALAQDTHKATLVWKPWPELENHDLQQRVENLLNLCCSSALPGGGTNSEFALHSLFEAKGDVMVALEMLLLRKPVRLKCHPLANYHYAGSDKWTSLERKLFNKALATYSKDFIFVQKMVKSKTVAQCVEYYYTWKKIMRLGRKHRTRLAEIIDDCVTSEEEEELEEEEEEDPEEDRKSTKEEESEVPKSPEPPPVPVLAPTEGPPLQALGQPSGSFICEMPNCGAVFSSRQALNGHARIHGGTNQVTKARGAIPSGKQKPGGTQSGYCSVKSSPSHSTTSGETDPTTIFPCKECGKVFFKIKSRNAHMKTHRQQEEQQRQKAQKAAFAAEMAATIERTTGPVGAPGLLPLDQLSLIKPIKDVDILDDDVVQQLGGVMEEAEVVDTDLLLDDQDSVLLQGDAEL

SEQ ID NO: 15708 - DNA, 769 bp, Homo sapiens
agagctcaccctctcacagcaccaccagcggcgagacagaccccaccaccatcttcccctgcaaggagtgtggcaagtaggtgcaggggaccggggactgaatctgagttcatgatgggtagtcgctctatgggagctgggccaggatggcctgaggtttcttcaatcagaaaaaagaacttagacctcaaaactcttcttcgtgtcatctttgggatggagtcttcttcaagatcaaaagccgaaatgcacacatgaaaactcacaggcagcaggaggaacaacagaggcaaaaggctcagaaggcggcttttgcagctgagatggcagccacgattgagaggactacggggcccgtgggggcgccggggctgctgcccctggaccagctgagtctgatcaaacccatcaaggatgtggacatcctcgacgacgacgtcgtccagcagttgggaggtgtcatggaagaggctgaagttgtggacaccgatcttctcttggatgatcaagattcagtcttgcttcagggtgacgcagaactataaagccctgtgtgtcacttagagacagtgaaaacccacggcctccatcttcattaatcaggaaacctggactgcctgcttgttttgtaacccttttaaactacctgttttaaaagtggtcattttattcaggtttagaaaaaaaaatcctatttcttttccttttatttaaaaaaatttgtttttgtggggggttgggggaataaataattggcacaactatcttt

SEQ ID NO: 15709 - protein, 48 aa, Homo sapiens; identical to SEQ ID NO: 15705

SEQ ID NO: 15710 - DNA, 3923 bp, Homo sapiens
ttttgtggctggacgttcacaaccaaggcagacagcatgggtgaccagcaactgtacaagaccaaccatgtggcccatggtagtgagaaccttttctaccaacagccaccacttggcgtccacagcgggctgaaccacaactatgggaatgcagttacagggggcggaatggatgcccctcaggcctcgccaatctccccccacttccctcaagatacacgggatggtctgggcttgcctgttggctccaaaaaccttggccaaatggatacctcgaggcagggagggtggggaagtcatgcagggcctggaaaccatgtccagctacgtggaaacctggccaactcaaacatgatgtggggggcaccagcccaggctgagcccactgatggctaccaatacacctactcccaggccagcgagatccggacccagaagcttaccagcggtgtcttacacaagctggactctttcacccaggtgtttgccaaccaaaacctgcgaattcaggtcaacaatatggcccaggtgctgcacactcagtcagcagtgatggatggagcccctgacagtgctctccgccagctgctgtctcagaagcccatggagcccccagcaccggctatcccttcccgctaccagcaggtgccccagcagcctcaccctggtttcactggtgggctgtccaaaccagctcttcaggtcgggcagcaccctacccaagggcacctgtattatgactaccagcagcctctggctcaggtgccagtgcagggaggacagccactgcaggccccacagatgctgtcacagcacatgcaacagatgcagcagcaccagtattacccaccgcagcaacagcagcaagccgggcaacagcgtatctccatgcaagaaatacagacgcagccgcaacaaattcgcccatcacagccacagccgccgccacagcagcagcagccgcagcagctacagctgcagcagcggcagggttcaatgcagatacctcagtattatcagccccaacccatgatgcagcacttgcaagagcagcagcagcaacagatgcacctgcagcctccttcttatcacagggaccctcaccagtataccccagagcaggcacacactgtccagctgattcccctgggctccatgtcccagtactactaccaggagccccagcagccctacagccaccccctctaccagcagagccacctgtcccagcaccagcagcgtgaggacagtcagctgaagacctactctagtgacagacaggcccaggccatgctgagctcccatggggacctggggcctcctgacacaggaatgggagacccagcgagctcagatctgacccgggtcagcagcaccctcccccatcgccccctcctatcccccagtgggatccacctcaacaacatggggcctcagcatcagcagctgtctcccagtgccatgtggccccagatgcacctacctgatgggagagcccagccagggtcccctgagtcaagtggccaacccaaaggagcgtttggggagcagtttgatgccaagaacaagctgacatgctccatctgcctgaaggagttcaagaacctgcctgccctgaatggccacatgcggtcccacgggggaatgagggcctcccccaacctcaaacaggaggaaggagagaaggtcctgccgcctcagccccagccaccactgccgcctccgcctccgcctccgccgccaccacagctccctcccgaggcagaaagcctcacgcctatggtcatgcccgtgtctgtccctgtcaagcttctcccgcccaagcccagctctcaggggttcaccaacagcaccgttgccgccccctccgccagagacaagccagccagctcgatgtcggacgacgagatgcctgtgctcgtgaggatgaccctctctcccccacactcaccccaaggggctgccccccgcacgcctgctgaaatccccaggaagcatcagccgagtgtgcccaaagccgaggagcccctcaagaccgtgcaggagaagaaaaagttccggcaccggccggaacctctcttcatcccgccgccgccctcctacaacccgaaccccgctgcctcctactcgggcgccaccctgtaccagagccagctgcgctccccgcgcgtcctcggggaccacctgctcctggaccccacccacgagctgcccccttacacgcccccacccatgctgagcccggtgcgccagggctcggggctcttcagcaatgtcctcatctccggccacggccctggcgcccacccgcagctgcccctgacgcccctgacgcccacaccacgggtgctgctgtgtcgctccaacagcatcgatggcagcaacgtgacggtcaccccagggcctggagagcagactgtagatgttgaaccacgcatcaacattggcttgagattccaagcagaaatccctgaactccaagatatctctgccctggcccaggacacacacaaggccacactggtatggaagccctggccagaactagaaaaccatgacctccagcaaagagtggagaatcttctgaatttgtgctgttccagtgcattgccaggtggagggaccaattctgaatttgctttgcactctctgtttgaggccaaaggtgatgtgatggttgctctggaaatgctgctactgcggaagcctgtcaggttaaaatgtcatcctttagcaaattaccactatgccggttcggacaagtggacctccctagaaagaaaactgtttaacaaagcactagccacttacagcaaagactttatttttgtacagaagatggtgaagtccaagacggtggctcagtgcgtggagtactactacacgtggaaaaagatcatgcggctggggcggaaacaccggacacgcctggcagaaatcatcgacgattgtgtgacaagtgaagaagaagaagagttagaggaggaggaggaggaggacccggaagaagataggaaatccacaaaagaagaagagagtgaggtgccgaagtccccggagccaccacccgtccccgtcctggctcccacggaggggccgcccctgcaggccctgggccagccctcaggctccttcatctgtgaaatgcccaactgtggggctgtgttcagctcccgacaggcactgaatggccatgcccgcatccacgggggcaccaaccaggtgaccaaggcccgaggtgccatcccctctgggaagcagaagcctggtggcacccagagtgggtactgttcggtaaagagctcaccctctcacagcaccaccagcggcgagacagaccccaccaccatcttcccctgcaaggagtgtggcaaagtcttcttcaagatcaaaagccgaaatgcacacatgaaaactcacaggcagcaggaggaacaacagaggcaaaaggctcagaaggcggcttttgcagctgagatggcagccacgattgagaggactacggggcccgtgggggcgccggggctgctgcccctggaccagctgagtctgatcaaacccatcaaggatgtggacatcctcgacgacgacgtcgtccagcagttgggaggtgtcatggaagaggctgaagttgtggacaccgatcttctcttggatgatcaagattcagtcttgcttcagggtgacgcagaactataaagccctgtgtgtcacttagagacagtgaaaacccacggcctccatcttcattaatcaggaaacctggactgcctgcttgttttgtaacccttttaaactacctgttttaaaagtggtcattttattcaggtttagaaaaaaaaatcctatttcttttccttttatttaaaaaaatttgtttttgtggggggttgggggaataaataattggcacaactatcttt

SEQ ID NO: 15711 - protein, 1220 aa, Homo sapiens; identical to SEQ ID NO: 15707

SEQ ID NO: 15712 - DNA, 3961 bp, Homo sapiens
ccctctaagcgatggctgagaggcggtgcatgcagatggggactctgctcgccccccatctcaccccccaagcggatactggtcttctcgtcggattgcccatgcacttgttgcagaaacagccaaggccctggctgtggagaatgctgaaggaagaagacgcagaagcaggacgaccctgaaagattcagcctcttcatcctcaaacaggtcgcttctcgggagttcttggtgttggaatattttacagcaaagcagtcgaccaggcctcctcttcccacctgtccagcagcatgaaagcagcatgattggccgaccgcaggagaagcccccagaaccaggcccccaactcagccatctgcggaggtcaaggtgtgagcgacgtctcctcaccacagtgctgtgtggtctatacctcagccagggagaggatgtgaaaccccccgccctgcacatgagtggtacaggccaacaggaacacctggctccagccacgttcacagacatgtcagccgtggagtagtgctgacacttttctctcagcttctcagggtttcagtccttttgggtttgttttatttaccttttttatggttttgtggctggacgttcacaaccaaggcagacagcatgggtgaccagcaactgtacaagaccaaccatgtggcccatggtagtgagaaccttttctaccaacagccaccacttggcgtccacagcgggctgagcccactgatggctaccaatacacctactcccaggccagcgagatccggacccagaagcttaccagcggtgtcttacacaagctggactctttcacccaggtgtttgccaaccaaaacctgcgaattcaggtcaacaatatggcccaggtgctgcacactcagtcagcagtgatggatggagcccctgacagtgctctccgccagctgctgtctcagaagcccatggagcccccagcaccggctatcccttcccgctaccagcaggtgccccagcagcctcaccctggtttcactggtgggctgtccaaaccagctcttcaggtcgggcagcaccctacccaagggcacctgtattatgactaccagcagcctctggctcaggtgccagtgcagggaggacagccactgcaggccccacagatgctgtcacagcacatgcaacagatgcagcagcaccagtattacccaccgcagcaacagcagcaagccgggcaacagcgtatctccatgcaagaaatacagacgcagccgcaacaaattcgcccatcacagccacagccgccgccacagcagcagcagccgcagcagctacagctgcagcagcggcagggttcaatgcagatacctcagtattatcagccccaacccatgatgcagcacttgcaagagcagcagcagcaacagatgcacctgcagcctccttcttatcacagggaccctcaccagtataccccagagcaggcacacactgtccagctgattcccctgggctccatgtcccagtactactaccaggagccccagcagccctacagccaccccctctaccagcagagccacctgtcccagcaccagcagcgtgaggacagtcagctgaagacctactctagtgacagacaggcccaggccatgctgagctcccatggggacctggggcctcctgacacaggaatgggagacccagcgagctcagatctgacccgggtcagcagcaccctcccccatcgccccctcctatcccccagtgggatccacctcaacaacatggggcctcagcatcagcagctgtctcccagtgccatgtggccccagatgcacctacctgatgggagagcccagccagggtcccctgagtcaagtggccaacccaaaggagcgtttggggagcagtttgatgccaagaacaagctgacatgctccatctgcctgaaggagttcaagaacctgcctgccctgaatggccacatgcggtcccacgggggaatgagggcctcccccaacctcaaacaggaaatccccaggaagcatcagccgagtgtgcccaaagccgaggagcccctcaagaccgtgcaggagaagaaaaagttccggcaccggccggaacctctcttcatcccgccgccgccctcctacaacccgaaccccgctgcctcctactcgggcgccaccctgtaccagagccagctgcgctccccgcgcgtcctcggggaccacctgctcctggaccccacccacgagctgcccccttacacgcccccacccatgctgagcccggtgcgccagggctcggggctcttcagcaatgtcctcatctccggccacggccctggcgcccacccgcagctgcccctgacgcccctgacgcccacaccacgggtgctgctgtgtcgctccaacagcatcgatggcagcaacgtgacggtcaccccagggcctggagagcagactgtagatgttgaaccacgcatcaacattggcttgagattccaagcagaaatccctgaactccaagatatctctgccctggcccaggacacacacaaggccacactggtatggaagccctggccagaactagaaaaccatgacctccagcaaagagtggagaatcttctgaatttgtgctgttccagtgcattgccaggtggagggaccaattctgaatttgctttgcactctctgtttgaggccaaaggtgatgtgatggttgctctggaaatgctgctactgcggaagcctgtcaggttaaaatgtcatcctttagcaaattaccactatgccggttcggacaagtggacctccctagaaagaaaactgtttaacaaagcactagccacttacagcaaagactttatttttgtacagaagatggtgaagtccaagacggtggctcagtgcgtggagtactactacacgtggaaaaagatcatgcggctggggcggaaacaccggacacgcctggcagaaatcatcgacgattgtgtgacaagtgaagaagaagaagagttagaggaggaggaggaggaggacccggaagaagataggaaatccacaaaagaagaagagagtgaggtgccgaagtccccggagccaccacccgtccccgtcctggctcccacggaggggccgcccctgcaggccctgggccagccctcaggctccttcatctgtgaaatgcccaactgtggggctgtgttcagctcccgacaggcactgaatggccatgcccgcatccacgggggcaccaaccaggtgaccaaggcccgaggtgccatcccctctgggaagcagaagcctggtggcacccagagtgggtactgttcggtaaagagctcaccctctcacagcaccaccagcggcgagacagaccccaccaccatcttcccctgcaaggagtgtggcaaagtcttcttcaagatcaaaagccgaaatgcacacatgaaaactcacaggcagcaggaggaacaacagaggcaaaaggctcagaaggcggcttttgcagctgagatggcagccacgattgagaggactacggggcccgtgggggcgccggggctgctgcccctggaccagctgagtctgatcaaacccatcaaggatgtggacatcctcgacgacgacgtcgtccagcagttgggaggtgtcatggaagaggctgaagttgtggacaccgatcttctcttggatgatcaagattcagtcttgcttcagggtgacgcagaactataaagccctgtgtgtcacttagagacagtgaaaacccacggcctccatcttcattaatcaggaaacctggactgcctgcttgttttgtaacccttttaaactacctgttttaaaagtggtcattttattcaggtttagaaaaaaaaatcctatttcttttccttttatttaaaaaaatttgtttttgtggggggttgggggaataaataattggcacaactatcttt

SEQ ID NO: 15713 - protein, 956 aa, Homo sapiens
MAQVLHTQSAVMDGAPDSALRQLLSQKPMEPPAPAIPSRYQQVPQQPHPGFTGGLSKPALQVGQHPTQGHLYYDYQQPLAQVPVQGGQPLQAPQMLSQHMQQMQQHQYYPPQQQQQAGQQRISMQEIQTQPQQIRPSQPQPPPQQQQPQQLQLQQRQGSMQIPQYYQPQPMMQHLQEQQQQQMHLQPPSYHRDPHQYTPEQAHTVQLIPLGSMSQYYYQEPQQPYSHPLYQQSHLSQHQQREDSQLKTYSSDRQAQAMLSSHGDLGPPDTGMGDPASSDLTRVSSTLPHRPLLSPSGIHLNNMGPQHQQLSPSAMWPQMHLPDGRAQPGSPESSGQPKGAFGEQFDAKNKLTCSICLKEFKNLPALNGHMRSHGGMRASPNLKQEIPRKHQPSVPKAEEPLKTVQEKKKFRHRPEPLFIPPPPSYNPNPAASYSGATLYQSQLRSPRVLGDHLLLDPTHELPPYTPPPMLSPVRQGSGLFSNVLISGHGPGAHPQLPLTPLTPTPRVLLCRSNSIDGSNVTVTPGPGEQTVDVEPRINIGLRFQAEIPELQDISALAQDTHKATLVWKPWPELENHDLQQRVENLLNLCCSSALPGGGTNSEFALHSLFEAKGDVMVALEMLLLRKPVRLKCHPLANYHYAGSDKWTSLERKLFNKALATYSKDFIFVQKMVKSKTVAQCVEYYYTWKKIMRLGRKHRTRLAEIIDDCVTSEEEEELEEEEEEDPEEDRKSTKEEESEVPKSPEPPPVPVLAPTEGPPLQALGQPSGSFICEMPNCGAVFSSRQALNGHARIHGGTNQVTKARGAIPSGKQKPGGTQSGYCSVKSSPSHSTTSGETDPTTIFPCKECGKVFFKIKSRNAHMKTHRQQEEQQRQKAQKAAFAAEMAATIERTTGPVGAPGLLPLDQLSLIKPIKDVDILDDDVVQQLGGVMEEAEVVDTDLLLDDQDSVLLQGDAEL

SEQ ID NO: 15714 - DNA, 3997 bp, Homo sapiens
ccctctaagcgatggctgagaggcggtgcatgcagatggggactctgctcgccccccatctcaccccccaagcggatactggtcttctcgtcggattgcccatgcacttgttgcagaaacagccaaggccctggctgtggagaatgctgaaggaagaagacgcagaagcaggacgaccctgaaagattcagcctcttcatcctcaaacaggtcgcttctcgggagttcttggtgttggaatattttacagcaaagcagtcgaccaggcctcctcttcccacctgtccagcagcatgaaagcagcatgattggccgaccgcaggagaagcccccagaaccaggcccccaactcagccatctgcggaggtcaaggtgtgagcgacgtctcctcaccacagtgctgtgtggtctatacctcagccagggagaggatgtgaaaccccccgccctgcacatgagtggtacaggccaacaggaacacctggctccagccacgttcacagacatgtcagccgtggagtagtgctgacacttttctctcagcttctcagggtttcagtccttttgggtttgttttatttaccttttttatggttttgtggctggacgttcacaaccaaggcagacagcatgggtgaccagcaactgtacaagaccaaccatgtggcccatggtagtgagaaccttttctaccaacagccaccacttggcgtccacagcgggctgagcccactgatggctaccaatacacctactcccaggccagcgagatccggacccagaagcttaccagcggtgtcttacacaagctggactctttcacccaggtgtttgccaaccaaaacctgcgaattcaggtcaacaatatggcccaggtgctgcacactcagtcagcagtgatggatggagcccctgacagtgctctccgccagctgctgtctcagaagcccatggagcccccagcaccggctatcccttcccgctaccagcaggtgccccagcagcctcaccctggtttcactggtgggctgtccaaaccagctcttcaggtcgggcagcaccctacccaagggcacctgtattatgactaccagcagcctctggctcaggtgccagtgcagggaggacagccactgcaggccccacagatgctgtcacagcacatgcaacagatgcagcagcaccagtattacccaccgcagcaacagcagcaagccgggcaacagcgtatctccatgcaagaaatacagacgcagccgcaacaaattcgcccatcacagccacagccgccgccacagcagcagcagccgcagcagctacagctgcagcagcggcagggttcaatgcagatacctcagtattatcagccccaacccatgatgcagcacttgcaagagcagcagcagcaacagatgcacctgcagcctccttcttatcacagggaccctcaccagtataccccagagcaggcacacactgtccagctgattcccctgggctccatgtcccagtactactaccaggagccccagcagccctacagccaccccctctaccagcagagccacctgtcccagcaccagcagcgtgaggacagtcagctgaagacctactctagtgacagacaggcccaggccatgctgagctcccatggggacctggggcctcctgacacaggaatgggagacccagcgagctcagatctgacccgggtcagcagcaccctcccccatcgccccctcctatcccccagtgggatccacctcaacaacatggggcctcagcatcagcagctgtctcccagtgccatgtggccccagatgcacctacctgatgggagagcccagccagggtcccctgagtcaagtggccaacccaaaggagcgtttggggagcagtttgatgccaagaacaagctgacatgctccatctgcctgaaggagttcaagaacctgcctgccctgaatggccacatgcggtcccacgggggaatgagggcctcccccaacctcaaacaggaaatccccaggaagcatcagccgagtgtgcccaaagccgaggagcccctcaagaccgtgcaggagaagaaaaagttccggcaccggccggaacctctcttcatcccgccgccgccctcctacaacccgaaccccgctgcctcctactcgggcgccaccctgtaccagagccagctgcgctccccgcgcgtcctcggggaccacctgctcctggaccccacccacgagctgcccccttacacgcccccacccatgctgagcccggtgcgccagggctcggggctcttcagcaatgtcctcatctccggccacggccctggcgcccacccgcagctgcccctgacgcccctgacgcccacaccacgggtgctgctgtgtcgctccaacagcatcgatggcagcaacgtgacggtcaccccagggcctggagagcagactgtagatgttgaaccacgcatcaacattggcttgagattccaagcagaaatccctgaactccaagatatctctgccctggcccaggacacacacaaggccacactggtatggaagccctggccagaactagaaaaccatgacctccagcaaagagtggagaatcttctgaatttgtgctgttccagtgcattgccaggtggagggaccaattctgaatttgctttgcactctctgtttgaggccaaaggtgatgtgatggttgctctggaaatgctgctactgcggaagcctgtcaggttaaaatgtcatcctttagcaaattaccactatgccggttcggacaagtggacctccctagaaagaaaactgtttaacaaagcactagccacttacagcaaagactttatttttgtacagaagatggtgaagtccaagacggtggctcagtgcgtggagtactactacacgtggaaaaagatcatgcggctggggcggaaacaccggacacgcctggcagaaatcatcgacgattgtgtgacaagtgaagaagaagaagagttagaggaggaggaggaggaggacccggaagaagataggaaatccacaaaagaagaagagagtgaggtgccgaagtccccggagccaccacccgtccccgtcctggctcccacggaggggccgcccctgcaggccctgggccagccctcaggctccttcatctgtgaaatgcccaactgtggggctgactgtagatgtcatgtcactccctttcttccccaggtgttcagctcccgacaggcactgaatggccatgcccgcatccacgggggcaccaaccaggtgaccaaggcccgaggtgccatcccctctgggaagcagaagcctggtggcacccagagtgggtactgttcggtaaagagctcaccctctcacagcaccaccagcggcgagacagaccccaccaccatcttcccctgcaaggagtgtggcaaagtcttcttcaagatcaaaagccgaaatgcacacatgaaaactcacaggcagcaggaggaacaacagaggcaaaaggctcagaaggcggcttttgcagctgagatggcagccacgattgagaggactacggggcccgtgggggcgccggggctgctgcccctggaccagctgagtctgatcaaacccatcaaggatgtggacatcctcgacgacgacgtcgtccagcagttgggaggtgtcatggaagaggctgaagttgtggacaccgatcttctcttggatgatcaagattcagtcttgcttcagggtgacgcagaactataaagccctgtgtgtcacttagagacagtgaaaacccacggcctccatcttcattaatcaggaaacctggactgcctgcttgttttgtaacccttttaaactacctgttttaaaagtggtcattttattcaggtttagaaaaaaaaatcctatttcttttccttttatttaaaaaaatttgtttttgtggggggttgggggaataaataattggcacaactatcttt

SEQ ID NO: 15715 - protein, 968 aa, Homo sapiens
MAQVLHTQSAVMDGAPDSALRQLLSQKPMEPPAPAIPSRYQQVPQQPHPGFTGGLSKPALQVGQHPTQGHLYYDYQQPLAQVPVQGGQPLQAPQMLSQHMQQMQQHQYYPPQQQQQAGQQRISMQEIQTQPQQIRPSQPQPPPQQQQPQQLQLQQRQGSMQIPQYYQPQPMMQHLQEQQQQQMHLQPPSYHRDPHQYTPEQAHTVQLIPLGSMSQYYYQEPQQPYSHPLYQQSHLSQHQQREDSQLKTYSSDRQAQAMLSSHGDLGPPDTGMGDPASSDLTRVSSTLPHRPLLSPSGIHLNNMGPQHQQLSPSAMWPQMHLPDGRAQPGSPESSGQPKGAFGEQFDAKNKLTCSICLKEFKNLPALNGHMRSHGGMRASPNLKQEIPRKHQPSVPKAEEPLKTVQEKKKFRHRPEPLFIPPPPSYNPNPAASYSGATLYQSQLRSPRVLGDHLLLDPTHELPPYTPPPMLSPVRQGSGLFSNVLISGHGPGAHPQLPLTPLTPTPRVLLCRSNSIDGSNVTVTPGPGEQTVDVEPRINIGLRFQAEIPELQDISALAQDTHKATLVWKPWPELENHDLQQRVENLLNLCCSSALPGGGTNSEFALHSLFEAKGDVMVALEMLLLRKPVRLKCHPLANYHYAGSDKWTSLERKLFNKALATYSKDFIFVQKMVKSKTVAQCVEYYYTWKKIMRLGRKHRTRLAEIIDDCVTSEEEEELEEEEEEDPEEDRKSTKEEESEVPKSPEPPPVPVLAPTEGPPLQALGQPSGSFICEMPNCGADCRCHVTPFLPQVFSSRQALNGHARIHGGTNQVTKARGAIPSGKQKPGGTQSGYCSVKSSPSHSTTSGETDPTTIFPCKECGKVFFKIKSRNAHMKTHRQQEEQQRQKAQKAAFAAEMAATIERTTGPVGAPGLLPLDQLSLIKPIKDVDILDDDVVQQLGGVMEEAEVVDTDLLLDDQDSVLLQGDAEL

SEQ ID NO: 15716 - DNA, 4390 bp, Homo sapiens
ggcgaggatggggagcaatgcaaagctctgctcgccccccatctcaccccccaagcggatactggtcttctcgtcggattgcccatgcacttgttgcagaaacagccaaggccctggctgtggagaatgctgaaggaagaagacgcagaagcaggacgaccctgaaagattcagcctcttcatcctcaaacaggaccaggcctcctcttcccacctgtccagcagcatgaaagcagcatgattggccgaccgcaggagaagcccccagaaccaggcccccaactcagccatctgcggaggtcaaggtgtgagcgacgtctcctcaccacagtgctgtgtggtctatacctcagccagggagaggatgtgaaaccccccgccctgcacatgagtggtacaggccaacaggaacacctggctccagccacgttcacagacatgtcagccgtggagtagtgctgacacttttctctcagcttctcagggtttcagtccttttgggtttgttttatttaccttttttatggttttgtggctggacgttcacaaccaaggcagacagcatgggtgaccagcaactgtacaagaccaaccatgtggcccatggtagtgagaaccttttctaccaacagccaccacttggcgtccacagcgggctgaaccacaactatgggaatgcagttacagggggcggaatggatgcccctcaggcctcgccaatctccccccacttccctcaagatacacgggatggtctgggcttgcctgttggctccaaaaaccttggccaaatggatacctcgaggcagggagggtggggaagtcatgcagggcctggaaaccatgtccagctacgtggaaacctggccaactcaaacatgatgtggggggcaccagcccaggctgagcccactgatggctaccaatacacctactcccaggccagcgagatccggacccagaagcttaccagcggtgtcttacacaagctggactctttcacccaggtgtttgccaaccaaaacctgcgaattcaggtcaacaatatggcccaggtgctgcacactcagtcagcagtgatggatggagcccctgacagtgctctccgccagctgctgtctcagaagcccatggagcccccagcaccggctatcccttcccgctaccagcaggtgccccagcagcctcaccctggtttcactggtgggctgtccaaaccagctcttcaggtcgggcagcaccctacccaagggcacctgtattatgactaccagcagcctctggctcaggtgccagtgcagggaggacagccactgcaggccccacagatgctgtcacagcacatgcaacagatgcagcagcaccagtattacccaccgcagcaacagcagcaagccgggcaacagcgtatctccatgcaagaaatacagacgcagccgcaacaaattcgcccatcacagccacagccgccgccacagcagcagcagccgcagcagctacagctgcagcagcggcagggttcaatgcagatacctcagtattatcagccccaacccatgatgcagcacttgcaagagcagcagcagcaacagatgcacctgcagcctccttcttatcacagggaccctcaccagtataccccagagcaggcacacactgtccagctgattcccctgggctccatgtcccagtactactaccaggagccccagcagccctacagccaccccctctaccagcagagccacctgtcccagcaccagcagcgtgaggacagtcagctgaagacctactctagtgacagacaggcccaggccatgctgagctcccatggggacctggggcctcctgacacaggaatgggagacccagcgagctcagatctgacccgggtcagcagcaccctcccccatcgccccctcctatcccccagtgggatccacctcaacaacatggggcctcagcatcagcagctgtctcccagtgccatgtggccccagatgcacctacctgatgggagagcccagccagggtcccctgagtcaagtggccaacccaaaggagcgtttggggagcagtttgatgccaagaacaagctgacatgctccatctgcctgaaggagttcaagaacctgcctgccctgaatggccacatgcggtcccacgggggaatgagggcctcccccaacctcaaacaggaggaaggagagaaggtcctgccgcctcagccccagccaccactgccgcctccgcctccgcctccgccgccaccacagctccctcccgaggcagaaagcctcacgcctatggtcatgcccgtgtctgtccctgtcaagcttctcccgcccaagcccagctctcaggggttcaccaacagcaccgttgccgccccctccgccagagacaagccagccagctcgatgtcggacgacgagatgcctgtgctcgaaatccccaggaagcatcagccgagtgtgcccaaagccgaggagcccctcaagaccgtgcaggagaagaaaaagttccggcaccggccggaacctctcttcatcccgccgccgccctcctacaacccgaaccccgctgcctcctactcgggcgccaccctgtaccagagccagctgcgctccccgcgcgtcctcggggaccacctgctcctggaccccacccacgagctgcccccttacacgcccccacccatgctgagcccggtgcgccagggctcggggctcttcagcaatgtcctcatctccggccacggccctggcgcccacccgcagctgcccctgacgcccctgacgcccacaccacgggtgctgctgtgtcgctccaacagcatcgatggcagcaacgtgacggtcaccccagggcctggagagcagactgtagatgttgaaccacgcatcaacattggcttgagattccaagcagaaatccctgaactccaagatatctctgccctggcccaggacacacacaaggccacactggtatggaagccctggccagaactagaaaaccatgacctccagcaaagagtggagaatcttctgaatttgtgctgttccagtgcattgccaggtggagggaccaattctgaatttgctttgcactctctgtttgaggccaaaggtgatgtgatggttgctctggaaatgctgctactgcggaagcctgtcaggttaaaatgtcatcctttagcaaattaccactatgccggttcggacaagtggacctccctagaaagaaaactgtttaacaaagcactagccacttacagcaaagactttatttttgtacagaagatggtgaagtccaagacggtggctcagtgcgtggagtactactacacgtggaaaaagatcatgcggctggggcggaaacaccggacacgcctggcagaaatcatcgacgattgtgtgacaagtgaagaagaagaagagttagaggaggaggaggaggaggacccggaagaagataggaaatccacaaaagaagaagagagtgaggtgccgaagtccccggagccaccacccgtccccgtcctggctcccacggaggggccgcccctgcaggccctgggccagccctcaggctccttcatctgtgaaatgcccaactgtggggctgtgttcagctcccgacaggcactgaatggccatgcccgcatccacgggggcaccaaccaggtgaccaaggcccgaggtgccatcccctctgggaagcagaagcctggtggcacccagagtgggtactgttcggtaaagagctcaccctctcacagcaccaccagcggcgagacagaccccaccaccatcttcccctgcaaggagtgtggcaaagtcttcttcaagatcaaaagccgaaatgcacacatgaaaactcacaggcagcaggaggaacaacagaggcaaaaggctcagaaggcggcttttgcagctgagatggcagccacgattgagaggactacggggcccgtgggggcgccggggctgctgcccctggaccagctgagtctgatcaaacccatcaaggatgtggacatcctcgacgacgacgtcgtccagcagttgggaggtgtcatggaagaggctgaagttgtggacaccgatcttctcttggatgatcaagattcagtcttgcttcagggtgacgcagaactataaagccctgtgtgtcacttagagacagtgaaaacccacggcctccatcttcattaatcaggaaacctggactgcctgcttgttttgtaacccttttaaactacctgttttaaaagtggtcattttattcaggtttagaaaaaaaaatcctatttcttttccttttatttaaaaaaatttgtttttgtggggggttgggggaataaataattggcacaactatcttt

SEQ ID NO: 15717 - protein, 1200 aa, Homo sapiens; identical to SEQ ID NO: 1790

SEQ ID NO: 15718 - DNA, 839 bp, Homo sapiens
agatgcacctgcagcctccttcttatcacagggaccctcaccagtataccccagagcaggcacacactgtccagctgattcccctgggctccatgtcccagtactactaccaggagccccagcagccctacagccaccccctctaccagcagagccacctgtcccagcaccagcagcgtgaggacagtcagctgaagacctactctagtgacagacaggcccaggccatgctgagctcccatggggacctggggcctcctgacacaggaatgggagacccagcgagctcagatctgacccgggtcagcagcaccctcccccatcgccccctcctatcccccagtgggatccacctcaacaacatggggcctcagcatcagcagctgtctcccagtgccatgtggccccagatgcacctacctgatgggagagcccagccagggtcccctgagtcaagtggccaacccaaaggagcgtttggggagcagtttgatgccaagaacaagctgacatgctccatctgcctgaaggagttcaagaacctgcctgccctgaatggccacatgcggtcccacgggggaatgagggcctcccccaacctcaaacaggaggaaggagagaaggtcctgccgcctcagccccagccaccactgccgcctccgcctccgcctccgccgccaccacagctccctcccgaggcagaaagcctcacgcctatggtcatgcccgtgtctgtccctgtcaagcttctcccgcccaagcccagctctcaggggttcaccaacagcaccgttgccgccccctccgccagagacaagccagccagctcgatgtcggac

SEQ ID NO: 15719 - protein, 278 aa, Homo sapiens
MHLQPPSYHRDPHQYTPEQAHTVQLIPLGSMSQYYYQEPQQPYSHPLYQQSHLSQHQQREDSQLKTYSSDRQAQAMLSSHGDLGPPDTGMGDPASSDLTRVSSTLPHRPLLSPSGIHLNNMGPQHQQLSPSAMWPQMHLPDGRAQPGSPESSGQPKGAFGEQFDAKNKLTCSICLKEFKNLPALNGHMRSHGGMRASPNLKQEEGEKVLPPQPQPPLPPPPPPPPPPQLPPEAESLTPMVMPVSVPVKLLPPKPSSQGFTNSTVAAPSARDKPASSMS

SEQ ID NO: 15720 - DNA, 2987 bp, Homo sapiens
tcgcggaggcttggggcagccgggtagctcggaggtcgtggcgctgggggctagcaccagcgctctgtcgggaggcgcagcggttaggtggaccggtcagcggactcaccggccagggcgctcggtgctggaatttgatattcattgatccgggttttatccctcttcttttttcttaaacatttttttttaaaactgtattgtttctcgttttaatttatttttgcttgccattccccacttgaatcgggccgacggcttggggagattgctctacttccccaaatcactgtggattttggaaaccagcagaaagaggaaagaggtagcaagagctccagagagaagtcgaggaagagagagacggggtcagagagagcgcgcgggcgtgcgagcagcgaaagcgacaggggcaaagtgagtgacctgcttttgggggtgaccgccggagcgcggcgtgagccctcccccttgggatcccgcagctgaccagtcgcgctgacggacagacagacagacaccgcccccagccccagctaccacctcctccccggccggcggcggacagtggacgcggcggcgagccgcgggcaggggccggagcccgcgcccggaggcggggtggagggggtcggggctcgcggcgtcgcactgaaacttttcgtccaacttctgggctgttctcgcttcggaggagccgtggtccgcgcgggggaagccgagccgagcggagccgcgagaagtgctagctcgggccgggaggagccgcagccggaggagggggaggaggaagaagagaaggaagaggagagggggccgcagtggcgactcggcgctcggaagccgggctcatggacgggtgaggcggcggtgtgcgcagacagtgctccagccgcgcgcgctccccaggccctggcccgggcctcgggccggggaggaagagtagctcgccgaggcgccgaggagagcgggccgccccacagcccgagccggagagggagcgcgagccgcgccggccccggtcgggcctccgaaaccatgaactttctgctgtcttgggtgcattggagccttgccttgctgctctacctccaccatgccaagtggtcccaggctgcacccatggcagaaggaggagggcagaatcatcacgaagtggtgaagttcatggatgtctatcagcgcagctactgccatccaatcgagaccctggtggacatcttccaggagtaccctgatgagatcgagtacatcttcaagccatcctgtgtgcccctgatgcgatgcgggggctgctgcaatgacgagggcctggagtgtgtgcccactgaggagtccaacatcaccatgcagattatgcggatcaaacctcaccaaggccagcacataggagagatgagcttcctacagcacaacaaatgtgaatgcagaccaaagaaagatagagcaagacaagaaaaaaaatcagttcgaggaaagggaaaggggcaaaaacgaaagcgcaagaaatcccggtataagtcctggagcgttccctgtgggccttgctcagagcggagaaagcatttgtttgtacaagatccgcagacgtgtaaatgttcctgcaaaaacacagactcgcgttgcaaggcgaggcagcttgagttaaacgaacgtacttgcagatgtgacaagccgaggcggtgagccgggcaggaggaaggagcctccctcagggtttcgggaaccagatctctcaccaggaaagactgatacagaacgatcgatacagaaaccacgctgccgccaccacaccatcaccatcgacagaacagtccttaatccagaaacctgaaatgaaggaagaggagactctgcgcagagcactttgggtccggagggcgagactccggcggaagcattcccgggcgggtgacccagcacggtccctcttggaattggattcgccattttatttttcttgctgctaaatcaccgagcccggaagattagagagttttatttctgggattcctgtagacacacccacccacatacatacatttatatatatatatattatatatatataaaaataaatatctctattttatatatataaaatatatatattctttttttaaattaacagtgctaatgttattggtgtcttcactggatgtatttgactgctgtggacttgagttgggaggggaatgttcccactcagatcctgacagggaagaggaggagatgagagactctggcatgatcttttttttgtcccacttggtggggccagggtcctctcccctgcccaggaatgtgcaaggccagggcatgggggcaaatatgacccagttttgggaacaccgacaaacccagccctggcgctgagcctctctaccccaggtcagacggacagaaagacagatcacaggtacagggatgaggacaccggctctgaccaggagtttggggagcttcaggacattgctgtgctttggggattccctccacatgctgcacgcgcatctcgcccccaggggcactgcctggaagattcaggagcctgggcggccttcgcttactctcacctgcttctgagttgcccaggagaccactggcagatgtcccggcgaagagaagagacacattgttggaagaagcagcccatgacagctccccttcctgggactcgccctcatcctcttcctgctccccttcctggggtgcagcctaaaaggacctatgtcctcacaccattgaaaccactagttctgtccccccaggagacctggttgtgtgtgtgtgagtggttgaccttcctccatcccctggtccttcccttcccttcccgaggcacagagagacagggcaggatccacgtgcccattgtggaggcagagaaaagagaaagtgttttatatacggtacttatttaatatccctttttaattagaaattaaaacagttaatttaattaaagagtagggttttttttcagt

SEQ ID NO: 15721 - protein, 215 aa, Homo sapiens
MNFLLSWVHWSLALLLYLHHAKWSQAAPMAEGGGQNHHEVVKFMDVYQRSYCHPIETLVDIFQEYPDEIEYIFKPSCVPLMRCGGCCNDEGLECVPTEESNITMQIMRIKPHQGQHIGEMSFLQHNKCECRPKKDRARQEKKSVRGKGKGQKRKRKKSRYKSWSVPCGPCSERRKHLFVQDPQTCKCSCKNTDSRCKARQLELNERTCRCDKPRR

SEQ ID NO: 15722 - DNA, 3404 bp, Homo sapiens
tcgcggaggcttggggcagccgggtagctcggaggtcgtggcgctgggggctagcaccagcgctctgtcgggaggcgcagcggttaggtggaccggtcagcggactcaccggccagggcgctcggtgctggaatttgatattcattgatccgggttttatccctcttcttttttcttaaacatttttttttaaaactgtattgtttctcgttttaatttatttttgcttgccattccccacttgaatcgggccgacggcttggggagattgctctacttccccaaatcactgtggattttggaaaccagcagaaagaggaaagaggtagcaagagctccagagagaagtcgaggaagagagagacggggtcagagagagcgcgcgggcgtgcgagcagcgaaagcgacaggggcaaagtgagtgacctgcttttgggggtgaccgccggagcgcggcgtgagccctcccccttgggatcccgcagctgaccagtcgcgctgacggacagacagacagacaccgcccccagccccagctaccacctcctccccggccggcggcggacagtggacgcggcggcgagccgcgggcaggggccggagcccgcgcccggaggcggggtggagggggtcggggctcgcggcgtcgcactgaaacttttcgtccaacttctgggctgttctcgcttcggaggagccgtggtccgcgcgggggaagccgagccgagcggagccgcgagaagtgctagctcgggccgggaggagccgcagccggaggagggggaggaggaagaagagaaggaagaggagagggggccgcagtggcgactcggcgctcggaagccgggctcatggacgggtgaggcggcggtgtgcgcagacagtgctccagccgcgcgcgctccccaggccctggcccgggcctcgggccggggaggaagagtagctcgccgaggcgccgaggagagcgggccgccccacagcccgagccggagagggagcgcgagccgcgccggccccggtcgggcctccgaaaccatgaactttctgctgtcttgggtgcattggagccttgccttgctgctctacctccaccatgccaagtggtcccaggctgcacccatggcagaaggaggagggcagaatcatcacgaagtggtgaagttcatggatgtctatcagcgcagctactgccatccaatcgagaccctggtggacatcttccaggagtaccctgatgagatcgagtacatcttcaagccatcctgtgtgcccctgatgcgatgcgggggctgctgcaatgacgagggcctggagtgtgtgcccactgaggagtccaacatcaccatgcagattatgcggatcaaacctcaccaaggccagcacataggagagatgagcttcctacagcacaacaaatgtgaatgcagaccaaagaaagatagagcaagacaagaaaaaaaatcagttcgaggaaagggaaaggggcaaaaacgaaagcgcaagaaatcccggtataagtcctggagcgttccctgtgggccttgctcagagcggagaaagcatttgtttgtacaagatccgcagacgtgtaaatgttcctgcaaaaacacagactcgcgttgcaaggcgaggcagcttgagttaaacgaacgtacttgcagatgtgacaagccgaggcggtgagccgggcaggaggaaggagcctccctcagggtttcgggaaccagatctctcaccaggaaagactgatacagaacgatcgatacagaaaccacgctgccgccaccacaccatcaccatcgacagaacagtccttaatccagaaacctgaaatgaaggaagaggagactctgcgcagagcactttgggtccggagggcgagactccggcggaagcattcccgggcgggtgacccagcacggtccctcttggaattggattcgccattttatttttcttgctgctaaatcaccgagcccggaagattagagagttttatttctgggattcctgtagacacacccacccacatacatacatttatatatatatatattatatatatataaaaataaatatctctattttatatatataaaatatatatattctttttttaaattaacagtgctaatgttattggtgtcttcactggatgtatttgactgctgtggacttgagttgggaggggaatgttcccactcagatcctgacagggaagaggaggagatgagagactctggcatgatcttttttttgtcccacttggtggggccagggtcctctcccctgcccaggaatgtgcaaggccagggcatgggggcaaatatgacccagttttgggaacaccgacaaacccagccctggcgctgagcctctctaccccaggtcagacggacagaaagacagatcacaggtacagggatgaggacaccggctctgaccaggagtttggggagcttcaggacattgctgtgctttggggattccctccacatgctgcacgcgcatctcgcccccaggggcactgcctggaagattcaggagcctgggcggccttcgcttactctcacctgcttctgagttgcccaggagaccactggcagatgtcccggcgaagagaagagacacattgttggaagaagcagcccatgacagctccccttcctgggactcgccctcatcctcttcctgctccccttcctggggtgcagcctaaaaggacctatgtcctcacaccattgaaaccactagttctgtccccccaggagacctggttgtgtgtgtgtgagtggttgaccttcctccatcccctggtccttcccttcccttcccgaggcacagagagacagggcaggatccacgtgcccattgtggaggcagagaaaagagaaagtgttttatatacggtacttatttaatatccctttttaattagaaattaaaacagttaatttaattaaagagtagggttttttttcagtattcttggttaatatttaatttcaactatttatgagatgtatcttttgctctctcttgctctcttatttgtaccggtttttgtatataaaattcatgtttccaatctctctctccctgatcggtgacagtcactagcttatcttgaacagatatttaattttgctaacactcagctctgccctccccgatcccctggctccccagcacacattcctttgaaataaggtttcaatatacatctacatactatatatatatttggcaacttgtatttgtgtgtatatatatatatatatgtttatgtatatatgtgattctgataaaatagacattgctattctgttttttatatgtaaaaacaaaacaagaaaaaatagagaattctacatactaaatctctctccttttttaatttt

SEQ ID NO: 15723 - protein, 215 aa, Homo sapiens; identical to SEQ ID NO: 15721

SEQ ID NO: 15724 - DNA, 3611 bp, Homo sapiens
tcgcggaggcttggggcagccgggtagctcggaggtcgtggcgctgggggctagcaccagcgctctgtcgggaggcgcagcggttaggtggaccggtcagcggactcaccggccagggcgctcggtgctggaatttgatattcattgatccgggttttatccctcttcttttttcttaaacatttttttttaaaactgtattgtttctcgttttaatttatttttgcttgccattccccacttgaatcgggccgacggcttggggagattgctctacttccccaaatcactgtggattttggaaaccagcagaaagaggaaagaggtagcaagagctccagagagaagtcgaggaagagagagacggggtcagagagagcgcgcgggcgtgcgagcagcgaaagcgacaggggcaaagtgagtgacctgcttttgggggtgaccgccggagcgcggcgtgagccctcccccttgggatcccgcagctgaccagtcgcgctgacggacagacagacagacaccgcccccagccccagctaccacctcctccccggccggcggcggacagtggacgcggcggcgagccgcgggcaggggccggagcccgcgcccggaggcggggtggagggggtcggggctcgcggcgtcgcactgaaacttttcgtccaacttctgggctgttctcgcttcggaggagccgtggtccgcgcgggggaagccgagccgagcggagccgcgagaagtgctagctcgggccgggaggagccgcagccggaggagggggaggaggaagaagagaaggaagaggagagggggccgcagtggcgactcggcgctcggaagccgggctcatggacgggtgaggcggcggtgtgcgcagacagtgctccagccgcgcgcgctccccaggccctggcccgggcctcgggccggggaggaagagtagctcgccgaggcgccgaggagagcgggccgccccacagcccgagccggagagggagcgcgagccgcgccggccccggtcgggcctccgaaaccatgaactttctgctgtcttgggtgcattggagccttgccttgctgctctacctccaccatgccaagtggtcccaggctgcacccatggcagaaggaggagggcagaatcatcacgaagtggtgaagttcatggatgtctatcagcgcagctactgccatccaatcgagaccctggtggacatcttccaggagtaccctgatgagatcgagtacatcttcaagccatcctgtgtgcccctgatgcgatgcgggggctgctgcaatgacgagggcctggagtgtgtgcccactgaggagtccaacatcaccatgcagattatgcggatcaaacctcaccaaggccagcacataggagagatgagcttcctacagcacaacaaatgtgaatgcagaccaaagaaagatagagcaagacaagaaaaaaaatcagttcgaggaaagggaaaggggcaaaaacgaaagcgcaagaaatcccggtataagtcctggagcgttccctgtgggccttgctcagagcggagaaagcatttgtttgtacaagatccgcagacgtgtaaatgttcctgcaaaaacacagactcgcgttgcaaggcgaggcagcttgagttaaacgaacgtacttgcagatgtgacaagccgaggcggtgagccgggcaggaggaaggagcctccctcagggtttcgggaaccagatctctcaccaggaaagactgatacagaacgatcgatacagaaaccacgctgccgccaccacaccatcaccatcgacagaacagtccttaatccagaaacctgaaatgaaggaagaggagactctgcgcagagcactttgggtccggagggcgagactccggcggaagcattcccgggcgggtgacccagcacggtccctcttggaattggattcgccattttatttttcttgctgctaaatcaccgagcccggaagattagagagttttatttctgggattcctgtagacacacccacccacatacatacatttatatatatatatattatatatatataaaaataaatatctctattttatatatataaaatatatatattctttttttaaattaacagtgctaatgttattggtgtcttcactggatgtatttgactgctgtggacttgagttgggaggggaatgttcccactcagatcctgacagggaagaggaggagatgagagactctggcatgatcttttttttgtcccacttggtggggccagggtcctctcccctgcccaggaatgtgcaaggccagggcatgggggcaaatatgacccagttttgggaacaccgacaaacccagccctggcgctgagcctctctaccccaggtcagacggacagaaagacagatcacaggtacagggatgaggacaccggctctgaccaggagtttggggagcttcaggacattgctgtgctttggggattccctccacatgctgcacgcgcatctcgcccccaggggcactgcctggaagattcaggagcctgggcggccttcgcttactctcacctgcttctgagttgcccaggagaccactggcagatgtcccggcgaagagaagagacacattgttggaagaagcagcccatgacagctccccttcctgggactcgccctcatcctcttcctgctccccttcctggggtgcagcctaaaaggacctatgtcctcacaccattgaaaccactagttctgtccccccaggagacctggttgtgtgtgtgtgagtggttgaccttcctccatcccctggtccttcccttcccttcccgaggcacagagagacagggcaggatccacgtgcccattgtggaggcagagaaaagagaaagtgttttatatacggtacttatttaatatccctttttaattagaaattaaaacagttaatttaattaaagagtagggttttttttcagtattcttggttaatatttaatttcaactatttatgagatgtatcttttgctctctcttgctctcttatttgtaccggtttttgtatataaaattcatgtttccaatctctctctccctgatcggtgacagtcactagcttatcttgaacagatatttaattttgctaacactcagctctgccctccccgatcccctggctccccagcacacattcctttgaaataaggtttcaatatacatctacatactatatatatatttggcaacttgtatttgtgtgtatatatatatatatatgtttatgtatatatgtgattctgataaaatagacattgctattctgttttttatatgtaaaaacaaaacaagaaaaaatagagaattctacatactaaatctctctccttttttaattttaatatttgttatcatttatttattggtgctactgtttatccgtaataattgtggggaaaagatattaacatcacgtctttgtctctagtgcagtttttcgagatattccgtagtacatatttatttttaaacaacgacaaagaaatacagatatatcttaaaaaaaaaaaagcattttgtattaaagaatttaattctgatctcaaa

SEQ ID NO: 15725 - protein, 215 aa, Homo sapiens; identical to SEQ ID NO: 15721

SEQ ID NO: 15726 - DNA, 3532 bp, Homo sapiens
ggcttggggcagccgggtagctcggaggtcgtggcgctgggggctagcaccagcgctctgtcgggaggcgcagcggttaggtggaccggtcagcggactcaccggccagggcgctcggtgctggaatttgatattcattgatccgggttttatccctcttcttttttcttaaacatttttttttaaaactgtattgtttctcgttttaatttatttttgcttgccattccccacttgaatcgggccgacggcttggggagattgctctacttccccaaatcactgtggattttggaaaccagcagaaagaggaaagaggtagcaagagctccagagagaagtcgaggaagagagagacggggtcagagagagcgcgcgggcgtgcgagcagcgaaagcgacaggggcaaagtgagtgacctgcttttgggggtgaccgccggagcgcggcgtgagccctcccccttgggatcccgcagctgaccagtcgcgctgacggacagacagacagacaccgcccccagccccagctaccacctcctccccggccggcggcggacagtggacgcggcggcgagccgcgggcaggggccggagcccgcgcccggaggcggggtggagggggtcggggctcgcggcgtcgcactgaaacttttcgtccaacttctgggctgttctcgcttcggaggagccgtggtccgcgcgggggaagccgagccgagcggagccgcgagaagtgctagctcgggccgggaggagccgcagccggaggagggggaggaggaagaagagaaggaagaggagagggggccgcagtggcgactcggcgctcggaagccgggctcatggacgggtgaggcggcggtgtgcgcagacagtgctccagccgcgcgcgctccccaggccctggcccgggcctcgggccggggaggaagagtagctcgccgaggcgccgaggagagcgggccgccccacagcccgagccggagagggagcgcgagccgcgccggccccggtcgggcctccgaaaccatgaactttctgctgtcttgggtgcattggagccttgccttgctgctctacctccaccatgccaagtggtcccaggctgcacccatggcagaaggaggagggcagaatcatcacgaagtggtgaagttcatggatgtctatcagcgcagctactgccatccaatcgagaccctggtggacatcttccaggagtaccctgatgagatcgagtacatcttcaagccatcctgtgtgcccctgatgcgatgcgggggctgctgcaatgacgagggcctggagtgtgtgcccactgaggagtccaacatcaccatgcagattatgcggatcaaacctcaccaaggccagcacataggagagatgagcttcctacagcacaacaaatgtgaatgcagaccaaagaaagatagagcaagacaagaaaatccctgtgggccttgctcagagcggagaaagcatttgtttgtacaagatccgcagacgtgtaaatgttcctgcaaaaacacagactcgcgttgcaaggcgaggcagcttgagttaaacgaacgtacttgcagatgtgacaagccgaggcggtgagccgggcaggaggaaggagcctccctcagggtttcgggaaccagatctctcaccaggaaagactgatacagaacgatcgatacagaaaccacgctgccgccaccacaccatcaccatcgacagaacagtccttaatccagaaacctgaaatgaaggaagaggagactctgcgcagagcactttgggtccggagggcgagactccggcggaagcattcccgggcgggtgacccagcacggtccctcttggaattggattcgccattttatttttcttgctgctaaatcaccgagcccggaagattagagagttttatttctgggattcctgtagacacacccacccacatacatacatttatatatatatatattatatatatataaaaataaatatctctattttatatatataaaatatatatattctttttttaaattaacagtgctaatgttattggtgtcttcactggatgtatttgactgctgtggacttgagttgggaggggaatgttcccactcagatcctgacagggaagaggaggagatgagagactctggcatgatcttttttttgtcccacttggtggggccagggtcctctcccctgcccaggaatgtgcaaggccagggcatgggggcaaatatgacccagttttgggaacaccgacaaacccagccctggcgctgagcctctctaccccaggtcagacggacagaaagacagatcacaggtacagggatgaggacaccggctctgaccaggagtttggggagcttcaggacattgctgtgctttggggattccctccacatgctgcacgcgcatctcgcccccaggggcactgcctggaagattcaggagcctgggcggccttcgcttactctcacctgcttctgagttgcccaggagaccactggcagatgtcccggcgaagagaagagacacattgttggaagaagcagcccatgacagctccccttcctgggactcgccctcatcctcttcctgctccccttcctggggtgcagcctaaaaggacctatgtcctcacaccattgaaaccactagttctgtccccccaggagacctggttgtgtgtgtgtgagtggttgaccttcctccatcccctggtccttcccttcccttcccgaggcacagagagacagggcaggatccacgtgcccattgtggaggcagagaaaagagaaagtgttttatatacggtacttatttaatatccctttttaattagaaattaaaacagttaatttaattaaagagtagggttttttttcagtattcttggttaatatttaatttcaactatttatgagatgtatcttttgctctctcttgctctcttatttgtaccggtttttgtatataaaattcatgtttccaatctctctctccctgatcggtgacagtcactagcttatcttgaacagatatttaattttgctaacactcagctctgccctccccgatcccctggctccccagcacacattcctttgaaataaggtttcaatatacatctacatactatatatatatttggcaacttgtatttgtgtgtatatatatatatatatgtttatgtatatatgtgattctgataaaatagacattgctattctgttttttatatgtaaaaacaaaacaagaaaaaatagagaattctacatactaaatctctctccttttttaattttaatatttgttatcatttatttattggtgctactgtttatccgtaataattgtggggaaaagatattaacatcacgtctttgtctctagtgcagtttttcgagatattccgtagtacatatttatttttaaacaacgacaaagaaatacagatatatcttaaaaaaaaaaaagcattttgtattaaagaatttaattctgatctcaaa

SEQ ID NO: 15727 - protein, 191 aa, Homo sapiens
MNFLLSWVHWSLALLLYLHHAKWSQAAPMAEGGGQNHHEVVKFMDVYQRSYCHPIETLVDIFQEYPDEIEYIFKPSCVPLMRCGGCCNDEGLECVPTEESNITMQIMRIKPHQGQHIGEMSFLQHNKCECRPKKDRARQENPCGPCSERRKHLFVQDPQTCKCSCKNTDSRCKARQLELNERTCRCDKPRR

SEQ ID NO: 15728 - DNA, 2907 bp, Homo sapiens
gcttggggcagccgggtagctcggaggtcgtggcgctgggggctagcaccagcgctctgtcgggaggcgcagcggttaggtggaccggtcagcggactcaccggccagggcgctcggtgctggaatttgatattcattgatccgggttttatccctcttcttttttcttaaacatttttttttaaaactgtattgtttctcgttttaatttatttttgcttgccattccccacttgaatcgggccgacggcttggggagattgctctacttccccaaatcactgtggattttggaaaccagcagaaagaggaaagaggtagcaagagctccagagagaagtcgaggaagagagagacggggtcagagagagcgcgcgggcgtgcgagcagcgaaagcgacaggggcaaagtgagtgacctgcttttgggggtgaccgccggagcgcggcgtgagccctcccccttgggatcccgcagctgaccagtcgcgctgacggacagacagacagacaccgcccccagccccagctaccacctcctccccggccggcggcggacagtggacgcggcggcgagccgcgggcaggggccggagcccgcgcccggaggcggggtggagggggtcggggctcgcggcgtcgcactgaaacttttcgtccaacttctgggctgttctcgcttcggaggagccgtggtccgcgcgggggaagccgagccgagcggagccgcgagaagtgctagctcgggccgggaggagccgcagccggaggagggggaggaggaagaagagaaggaagaggagagggggccgcagtggcgactcggcgctcggaagccgggctcatggacgggtgaggcggcggtgtgcgcagacagtgctccagccgcgcgcgctccccaggccctggcccgggcctcgggccggggaggaagagtagctcgccgaggcgccgaggagagcgggccgccccacagcccgagccggagagggagcgcgagccgcgccggccccggtcgggcctccgaaaccatgaactttctgctgtcttgggtgcattggagccttgccttgctgctctacctccaccatgccaagtggtcccaggctgcacccatggcagaaggaggagggcagaatcatcacgaagtggtgaagttcatggatgtctatcagcgcagctactgccatccaatcgagaccctggtggacatcttccaggagtaccctgatgagatcgagtacatcttcaagccatcctgtgtgcccctgatgcgatgcgggggctgctgcaatgacgagggcctggagtgtgtgcccactgaggagtccaacatcaccatgcagattatgcggatcaaacctcaccaaggccagcacataggagagatgagcttcctacagcacaacaaatgtgaatgcagaccaaagaaagatagagcaagacaagaaaatccctgtgggccttgctcagagcggagaaagcatttgtttgtacaagatccgcagacgtgtaaatgttcctgcaaaaacacagactcgcgttgcaaggcgaggcagcttgagttaaacgaacgtacttgcagatgtgacaagccgaggcggtgagccgggcaggaggaaggagcctccctcagggtttcgggaaccagatctctcaccaggaaagactgatacagaacgatcgatacagaaaccacgctgccgccaccacaccatcaccatcgacagaacagtccttaatccagaaacctgaaatgaaggaagaggagactctgcgcagagcactttgggtccggagggcgagactccggcggaagcattcccgggcgggtgacccagcacggtccctcttggaattggattcgccattttatttttcttgctgctaaatcaccgagcccggaagattagagagttttatttctgggattcctgtagacacacccacccacatacatacatttatatatatatatattatatatatataaaaataaatatctctattttatatatataaaatatatatattctttttttaaattaacagtgctaatgttattggtgtcttcactggatgtatttgactgctgtggacttgagttgggaggggaatgttcccactcagatcctgacagggaagaggaggagatgagagactctggcatgatcttttttttgtcccacttggtggggccagggtcctctcccctgcccaggaatgtgcaaggccagggcatgggggcaaatatgacccagttttgggaacaccgacaaacccagccctggcgctgagcctctctaccccaggtcagacggacagaaagacagatcacaggtacagggatgaggacaccggctctgaccaggagtttggggagcttcaggacattgctgtgctttggggattccctccacatgctgcacgcgcatctcgcccccaggggcactgcctggaagattcaggagcctgggcggccttcgcttactctcacctgcttctgagttgcccaggagaccactggcagatgtcccggcgaagagaagagacacattgttggaagaagcagcccatgacagctccccttcctgggactcgccctcatcctcttcctgctccccttcctggggtgcagcctaaaaggacctatgtcctcacaccattgaaaccactagttctgtccccccaggagacctggttgtgtgtgtgtgagtggttgaccttcctccatcccctggtccttcccttcccttcccgaggcacagagagacagggcaggatccacgtgcccattgtggaggcagagaaaagagaaagtgttttatatacggtacttatttaatatccctttttaattagaaattaaaacagttaatttaattaaagagtagggttttttttcagt

SEQ ID NO: 15729 - protein, 191 aa, Homo sapiens; identical to SEQ ID NO: 15727

SEQ ID NO: 15730 - DNA, 3324 bp, Homo sapiens
gcttggggcagccgggtagctcggaggtcgtggcgctgggggctagcaccagcgctctgtcgggaggcgcagcggttaggtggaccggtcagcggactcaccggccagggcgctcggtgctggaatttgatattcattgatccgggttttatccctcttcttttttcttaaacatttttttttaaaactgtattgtttctcgttttaatttatttttgcttgccattccccacttgaatcgggccgacggcttggggagattgctctacttccccaaatcactgtggattttggaaaccagcagaaagaggaaagaggtagcaagagctccagagagaagtcgaggaagagagagacggggtcagagagagcgcgcgggcgtgcgagcagcgaaagcgacaggggcaaagtgagtgacctgcttttgggggtgaccgccggagcgcggcgtgagccctcccccttgggatcccgcagctgaccagtcgcgctgacggacagacagacagacaccgcccccagccccagctaccacctcctccccggccggcggcggacagtggacgcggcggcgagccgcgggcaggggccggagcccgcgcccggaggcggggtggagggggtcggggctcgcggcgtcgcactgaaacttttcgtccaacttctgggctgttctcgcttcggaggagccgtggtccgcgcgggggaagccgagccgagcggagccgcgagaagtgctagctcgggccgggaggagccgcagccggaggagggggaggaggaagaagagaaggaagaggagagggggccgcagtggcgactcggcgctcggaagccgggctcatggacgggtgaggcggcggtgtgcgcagacagtgctccagccgcgcgcgctccccaggccctggcccgggcctcgggccggggaggaagagtagctcgccgaggcgccgaggagagcgggccgccccacagcccgagccggagagggagcgcgagccgcgccggccccggtcgggcctccgaaaccatgaactttctgctgtcttgggtgcattggagccttgccttgctgctctacctccaccatgccaagtggtcccaggctgcacccatggcagaaggaggagggcagaatcatcacgaagtggtgaagttcatggatgtctatcagcgcagctactgccatccaatcgagaccctggtggacatcttccaggagtaccctgatgagatcgagtacatcttcaagccatcctgtgtgcccctgatgcgatgcgggggctgctgcaatgacgagggcctggagtgtgtgcccactgaggagtccaacatcaccatgcagattatgcggatcaaacctcaccaaggccagcacataggagagatgagcttcctacagcacaacaaatgtgaatgcagaccaaagaaagatagagcaagacaagaaaatccctgtgggccttgctcagagcggagaaagcatttgtttgtacaagatccgcagacgtgtaaatgttcctgcaaaaacacagactcgcgttgcaaggcgaggcagcttgagttaaacgaacgtacttgcagatgtgacaagccgaggcggtgagccgggcaggaggaaggagcctccctcagggtttcgggaaccagatctctcaccaggaaagactgatacagaacgatcgatacagaaaccacgctgccgccaccacaccatcaccatcgacagaacagtccttaatccagaaacctgaaatgaaggaagaggagactctgcgcagagcactttgggtccggagggcgagactccggcggaagcattcccgggcgggtgacccagcacggtccctcttggaattggattcgccattttatttttcttgctgctaaatcaccgagcccggaagattagagagttttatttctgggattcctgtagacacacccacccacatacatacatttatatatatatatattatatatatataaaaataaatatctctattttatatatataaaatatatatattctttttttaaattaacagtgctaatgttattggtgtcttcactggatgtatttgactgctgtggacttgagttgggaggggaatgttcccactcagatcctgacagggaagaggaggagatgagagactctggcatgatcttttttttgtcccacttggtggggccagggtcctctcccctgcccaggaatgtgcaaggccagggcatgggggcaaatatgacccagttttgggaacaccgacaaacccagccctggcgctgagcctctctaccccaggtcagacggacagaaagacagatcacaggtacagggatgaggacaccggctctgaccaggagtttggggagcttcaggacattgctgtgctttggggattccctccacatgctgcacgcgcatctcgcccccaggggcactgcctggaagattcaggagcctgggcggccttcgcttactctcacctgcttctgagttgcccaggagaccactggcagatgtcccggcgaagagaagagacacattgttggaagaagcagcccatgacagctccccttcctgggactcgccctcatcctcttcctgctccccttcctggggtgcagcctaaaaggacctatgtcctcacaccattgaaaccactagttctgtccccccaggagacctggttgtgtgtgtgtgagtggttgaccttcctccatcccctggtccttcccttcccttcccgaggcacagagagacagggcaggatccacgtgcccattgtggaggcagagaaaagagaaagtgttttatatacggtacttatttaatatccctttttaattagaaattaaaacagttaatttaattaaagagtagggttttttttcagtattcttggttaatatttaatttcaactatttatgagatgtatcttttgctctctcttgctctcttatttgtaccggtttttgtatataaaattcatgtttccaatctctctctccctgatcggtgacagtcactagcttatcttgaacagatatttaattttgctaacactcagctctgccctccccgatcccctggctccccagcacacattcctttgaaataaggtttcaatatacatctacatactatatatatatttggcaacttgtatttgtgtgtatatatatatatatatgtttatgtatatatgtgattctgataaaatagacattgctattctgttttttatatgtaaaaacaaaacaagaaaaaatagagaattctacatactaaatctctctccttttttaatttt

SEQ ID NO: 15731 - protein, 191 aa, Homo sapiens; identical to SEQ ID NO: 15727

SEQ ID NO: 15732 - DNA, 1639 bp, Homo sapiens
cttggggcagccgggtagctcggaggtcgtggcgctgggggctagcaccagcgctctgtcgggaggcgcagcggttaggtggaccggtcagcggactcaccggccagggcgctcggtgctggaatttgatattcattgatccgggttttatccctcttcttttttcttaaacatttttttttaaaactgtattgtttctcgttttaatttatttttgcttgccattccccacttgaatcgggccgacggcttggggagattgctctacttccccaaatcactgtggattttggaaaccagcagaaagaggaaagaggtagcaagagctccagagagaagtcgaggaagagagagacggggtcagagagagcgcgcgggcgtgcgagcagcgaaagcgacaggggcaaagtgagtgacctgcttttgggggtgaccgccggagcgcggcgtgagccctcccccttgggatcccgcagctgaccagtcgcgctgacggacagacagacagacaccgcccccagccccagctaccacctcctccccggccggcggcggacagtggacgcggcggcgagccgcgggcaggggccggagcccgcgcccggaggcggggtggagggggtcggggctcgcggcgtcgcactgaaacttttcgtccaacttctgggctgttctcgcttcggaggagccgtggtccgcgcgggggaagccgagccgagcggagccgcgagaagtgctagctcgggccgggaggagccgcagccggaggagggggaggaggaagaagagaaggaagaggagagggggccgcagtggcgactcggcgctcggaagccgggctcatggacgggtgaggcggcggtgtgcgcagacagtgctccagccgcgcgcgctccccaggccctggcccgggcctcgggccggggaggaagagtagctcgccgaggcgccgaggagagcgggccgccccacagcccgagccggagagggagcgcgagccgcgccggccccggtcgggcctccgaaaccatgaactttctgctgtcttgggtgcattggagccttgccttgctgctctacctccaccatgccaagtggtcccaggctgcacccatggcagaaggaggagggcagaatcatcacgaagtggtgaagttcatggatgtctatcagcgcagctactgccatccaatcgagaccctggtggacatcttccaggagtaccctgatgagatcgagtacatcttcaagccatcctgtgtgcccctgatgcgatgcgggggctgctgcaatgacgagggcctggagtgtgtgcccactgaggagtccaacatcaccatgcagattatgcggatcaaacctcaccaaggccagcacataggagagatgagcttcctacagcacaacaaatgtgaatgcaggtgaggatgtagtcacggattcattatcagcaagtggctgcagggtgcctgatctgtgccagggttaagcatgctgtactttttggcccccgtccagcttcccgctatgtgacctttggcattttacttcaatgtgcctcagtttctacatctgtaaaatgggcacaatagtagtatacttcatagcattgttataatgattaaacaagttatatatg

SEQ ID NO: 15733 - protein, 131 aa, Homo sapiens
MNFLLSWVHWSLALLLYLHHAKWSQAAPMAEGGGQNHHEVVKFMDVYQRSYCHPIETLVDIFQEYPDEIEYIFKPSCVPLMRCGGCCNDEGLECVPTEESNITMQIMRIKPHQGQHIGEMSFLQHNKCECR

SEQ ID NO: 15734 - DNA, 3029 bp, Homo sapiens
cttggggcagccgggtagctcggaggtcgtggcgctgggggctagcaccagcgctctgtcgggaggcgcagcggttaggtggaccggtcagcggactcaccggccagggcgctcggtgctggaatttgatattcattgatccgggttttatccctcttcttttttcttaaacatttttttttaaaactgtattgtttctcgttttaatttatttttgcttgccattccccacttgaatcgggccgacggcttggggagattgctctacttccccaaatcactgtggattttggaaaccagcagaaagaggaaagaggtagcaagagctccagagagaagtcgaggaagagagagacggggtcagagagagcgcgcgggcgtgcgagcagcgaaagcgacaggggcaaagtgagtgacctgcttttgggggtgaccgccggagcgcggcgtgagccctcccccttgggatcccgcagctgaccagtcgcgctgacggacagacagacagacaccgcccccagccccagctaccacctcctccccggccggcggcggacagtggacgcggcggcgagccgcgggcaggggccggagcccgcgcccggaggcggggtggagggggtcggggctcgcggcgtcgcactgaaacttttcgtccaacttctgggctgttctcgcttcggaggagccgtggtccgcgcgggggaagccgagccgagcggagccgcgagaagtgctagctcgggccgggaggagccgcagccggaggagggggaggaggaagaagagaaggaagaggagagggggccgcagtggcgactcggcgctcggaagccgggctcatggacgggtgaggcggcggtgtgcgcagacagtgctccagccgcgcgcgctccccaggccctggcccgggcctcgggccggggaggaagagtagctcgccgaggcgccgaggagagcgggccgccccacagcccgagccggagagggagcgcgagccgcgccggccccggtcgggcctccgaaaccatgaactttctgctgtcttgggtgcattggagccttgccttgctgctctacctccaccatgccaagtggtcccaggctgcacccatggcagaaggaggagggcagaatcatcacgaagtggtgaagttcatggatgtctatcagcgcagctactgccatccaatcgagaccctggtggacatcttccaggagtaccctgatgagatcgagtacatcttcaagccatcctgtgtgcccctgatgcgatgcgggggctgctgcaatgacgagggcctggagtgtgtgcccactgaggagtccaacatcaccatgcagattatgcggatcaaacctcaccaaggccagcacataggagagatgagcttcctacagcacaacaaatgtgaatgcagaccaaagaaagatagagcaagacaagaaaaaaaatcagttcgaggaaagggaaaggggcaaaaacgaaagcgcaagaaatcccggtataagtcctggagcgtgtacgttggtgcccgctgctgtctaatgccctggagcctccctggcccccatccctgtgggccttgctcagagcggagaaagcatttgtttgtacaagatccgcagacgtgtaaatgttcctgcaaaaacacagactcgcgttgcaaggcgaggcagcttgagttaaacgaacgtacttgcagatgtgacaagccgaggcggtgagccgggcaggaggaaggagcctccctcagggtttcgggaaccagatctctcaccaggaaagactgatacagaacgatcgatacagaaaccacgctgccgccaccacaccatcaccatcgacagaacagtccttaatccagaaacctgaaatgaaggaagaggagactctgcgcagagcactttgggtccggagggcgagactccggcggaagcattcccgggcgggtgacccagcacggtccctcttggaattggattcgccattttatttttcttgctgctaaatcaccgagcccggaagattagagagttttatttctgggattcctgtagacacacccacccacatacatacatttatatatatatatattatatatatataaaaataaatatctctattttatatatataaaatatatatattctttttttaaattaacagtgctaatgttattggtgtcttcactggatgtatttgactgctgtggacttgagttgggaggggaatgttcccactcagatcctgacagggaagaggaggagatgagagactctggcatgatcttttttttgtcccacttggtggggccagggtcctctcccctgcccaggaatgtgcaaggccagggcatgggggcaaatatgacccagttttgggaacaccgacaaacccagccctggcgctgagcctctctaccccaggtcagacggacagaaagacagatcacaggtacagggatgaggacaccggctctgaccaggagtttggggagcttcaggacattgctgtgctttggggattccctccacatgctgcacgcgcatctcgcccccaggggcactgcctggaagattcaggagcctgggcggccttcgcttactctcacctgcttctgagttgcccaggagaccactggcagatgtcccggcgaagagaagagacacattgttggaagaagcagcccatgacagctccccttcctgggactcgccctcatcctcttcctgctccccttcctggggtgcagcctaaaaggacctatgtcctcacaccattgaaaccactagttctgtccccccaggagacctggttgtgtgtgtgtgagtggttgaccttcctccatcccctggtccttcccttcccttcccgaggcacagagagacagggcaggatccacgtgcccattgtggaggcagagaaaagagaaagtgttttatatacggtacttatttaatatccctttttaattagaaattaaaacagttaatttaattaaagagtagggttttttttcagt

SEQ ID NO: 15735 - protein, 232 aa, Homo sapiens
MNFLLSWVHWSLALLLYLHHAKWSQAAPMAEGGGQNHHEVVKFMDVYQRSYCHPIETLVDIFQEYPDEIEYIFKPSCVPLMRCGGCCNDEGLECVPTEESNITMQIMRIKPHQGQHIGEMSFLQHNKCECRPKKDRARQEKKSVRGKGKGQKRKRKKSRYKSWSVYVGARCCLMPWSLPGPHPCGPCSERRKHLFVQDPQTCKCSCKNTDSRCKARQLELNERTCRCDKPRR

SEQ ID NO: 15736 - DNA, 2840 bp, Homo sapiens
cttggggcagccgggtagctcggaggtcgtggcgctgggggctagcaccagcgctctgtcgggaggcgcagcggttaggtggaccggtcagcggactcaccggccagggcgctcggtgctggaatttgatattcattgatccgggttttatccctcttcttttttcttaaacatttttttttaaaactgtattgtttctcgttttaatttatttttgcttgccattccccacttgaatcgggccgacggcttggggagattgctctacttccccaaatcactgtggattttggaaaccagcagaaagaggaaagaggtagcaagagctccagagagaagtcgaggaagagagagacggggtcagagagagcgcgcgggcgtgcgagcagcgaaagcgacaggggcaaagtgagtgacctgcttttgggggtgaccgccggagcgcggcgtgagccctcccccttgggatcccgcagctgaccagtcgcgctgacggacagacagacagacaccgcccccagccccagctaccacctcctccccggccggcggcggacagtggacgcggcggcgagccgcgggcaggggccggagcccgcgcccggaggcggggtggagggggtcggggctcgcggcgtcgcactgaaacttttcgtccaacttctgggctgttctcgcttcggaggagccgtggtccgcgcgggggaagccgagccgagcggagccgcgagaagtgctagctcgggccgggaggagccgcagccggaggagggggaggaggaagaagagaaggaagaggagagggggccgcagtggcgactcggcgctcggaagccgggctcatggacgggtgaggcggcggtgtgcgcagacagtgctccagccgcgcgcgctccccaggccctggcccgggcctcgggccggggaggaagagtagctcgccgaggcgccgaggagagcgggccgccccacagcccgagccggagagggagcgcgagccgcgccggccccggtcgggcctccgaaaccatgaactttctgctgtcttgggtgcattggagccttgccttgctgctctacctccaccatgccaagtggtcccaggctgcacccatggcagaaggaggagggcagaatcatcacgaagtggtgaagttcatggatgtctatcagcgcagctactgccatccaatcgagaccctggtggacatcttccaggagtaccctgatgagatcgagtacatcttcaagccatcctgtgtgcccctgatgcgatgcgggggctgctgcaatgacgagggcctggagtgtgtgcccactgaggagtccaacatcaccatgcagattatgcggatcaaacctcaccaaggccagcacataggagagatgagcttcctacagcacaacaaatgtgaatgcagaccaaagaaagatagagcaagacaagaaaatccctgtgggccttgctcagagcggagaaagcatttgtttgtacaagatccgcagacgtgtaaatgttcctgcaaaaacacagactcgcgttgcaaggcgaggcagcttgagttaaacgaacgtacttgcagatctctcaccaggaaagactgatacagaacgatcgatacagaaaccacgctgccgccaccacaccatcaccatcgacagaacagtccttaatccagaaacctgaaatgaaggaagaggagactctgcgcagagcactttgggtccggagggcgagactccggcggaagcattcccgggcgggtgacccagcacggtccctcttggaattggattcgccattttatttttcttgctgctaaatcaccgagcccggaagattagagagttttatttctgggattcctgtagacacacccacccacatacatacatttatatatatatatattatatatatataaaaataaatatctctattttatatatataaaatatatatattctttttttaaattaacagtgctaatgttattggtgtcttcactggatgtatttgactgctgtggacttgagttgggaggggaatgttcccactcagatcctgacagggaagaggaggagatgagagactctggcatgatcttttttttgtcccacttggtggggccagggtcctctcccctgcccaggaatgtgcaaggccagggcatgggggcaaatatgacccagttttgggaacaccgacaaacccagccctggcgctgagcctctctaccccaggtcagacggacagaaagacagatcacaggtacagggatgaggacaccggctctgaccaggagtttggggagcttcaggacattgctgtgctttggggattccctccacatgctgcacgcgcatctcgcccccaggggcactgcctggaagattcaggagcctgggcggccttcgcttactctcacctgcttctgagttgcccaggagaccactggcagatgtcccggcgaagagaagagacacattgttggaagaagcagcccatgacagctccccttcctgggactcgccctcatcctcttcctgctccccttcctggggtgcagcctaaaaggacctatgtcctcacaccattgaaaccactagttctgtccccccaggagacctggttgtgtgtgtgtgagtggttgaccttcctccatcccctggtccttcccttcccttcccgaggcacagagagacagggcaggatccacgtgcccattgtggaggcagagaaaagagaaagtgttttatatacggtacttatttaatatccctttttaattagaaattaaaacagttaatttaattaaagagtagggttttttttcagt

SEQ ID NO: 15737 - protein, 191 aa, Homo sapiens
MNFLLSWVHWSLALLLYLHHAKWSQAAPMAEGGGQNHHEVVKFMDVYQRSYCHPIETLVDIFQEYPDEIEYIFKPSCVPLMRCGGCCNDEGLECVPTEESNITMQIMRIKPHQGQHIGEMSFLQHNKCECRPKKDRARQENPCGPCSERRKHLFVQDPQTCKCSCKNTDSRCKARQLELNERTCRSLTRKD

SEQ ID NO: 15738 - DNA, 3446 bp, Homo sapiens
cttggggcagccgggtagctcggaggtcgtggcgctgggggctagcaccagcgctctgtcgggaggcgcagcggttaggtggaccggtcagcggactcaccggccagggcgctcggtgctggaatttgatattcattgatccgggttttatccctcttcttttttcttaaacatttttttttaaaactgtattgtttctcgttttaatttatttttgcttgccattccccacttgaatcgggccgacggcttggggagattgctctacttccccaaatcactgtggattttggaaaccagcagaaagaggaaagaggtagcaagagctccagagagaagtcgaggaagagagagacggggtcagagagagcgcgcgggcgtgcgagcagcgaaagcgacaggggcaaagtgagtgacctgcttttgggggtgaccgccggagcgcggcgtgagccctcccccttgggatcccgcagctgaccagtcgcgctgacggacagacagacagacaccgcccccagccccagctaccacctcctccccggccggcggcggacagtggacgcggcggcgagccgcgggcaggggccggagcccgcgcccggaggcggggtggagggggtcggggctcgcggcgtcgcactgaaacttttcgtccaacttctgggctgttctcgcttcggaggagccgtggtccgcgcgggggaagccgagccgagcggagccgcgagaagtgctagctcgggccgggaggagccgcagccggaggagggggaggaggaagaagagaaggaagaggagagggggccgcagtggcgactcggcgctcggaagccgggctcatggacgggtgaggcggcggtgtgcgcagacagtgctccagccgcgcgcgctccccaggccctggcccgggcctcgggccggggaggaagagtagctcgccgaggcgccgaggagagcgggccgccccacagcccgagccggagagggagcgcgagccgcgccggccccggtcgggcctccgaaaccatgaactttctgctgtcttgggtgcattggagccttgccttgctgctctacctccaccatgccaagtggtcccaggctgcacccatggcagaaggaggagggcagaatcatcacgaagtggtgaagttcatggatgtctatcagcgcagctactgccatccaatcgagaccctggtggacatcttccaggagtaccctgatgagatcgagtacatcttcaagccatcctgtgtgcccctgatgcgatgcgggggctgctgcaatgacgagggcctggagtgtgtgcccactgaggagtccaacatcaccatgcagattatgcggatcaaacctcaccaaggccagcacataggagagatgagcttcctacagcacaacaaatgtgaatgcagaccaaagaaagatagagcaagacaagaaaaaaaatcagttcgaggaaagggaaaggggcaaaaacgaaagcgcaagaaatcccggtataagtcctggagcgtgtacgttggtgcccgctgctgtctaatgccctggagcctccctggcccccatccctgtgggccttgctcagagcggagaaagcatttgtttgtacaagatccgcagacgtgtaaatgttcctgcaaaaacacagactcgcgttgcaaggcgaggcagcttgagttaaacgaacgtacttgcagatgtgacaagccgaggcggtgagccgggcaggaggaaggagcctccctcagggtttcgggaaccagatctctcaccaggaaagactgatacagaacgatcgatacagaaaccacgctgccgccaccacaccatcaccatcgacagaacagtccttaatccagaaacctgaaatgaaggaagaggagactctgcgcagagcactttgggtccggagggcgagactccggcggaagcattcccgggcgggtgacccagcacggtccctcttggaattggattcgccattttatttttcttgctgctaaatcaccgagcccggaagattagagagttttatttctgggattcctgtagacacacccacccacatacatacatttatatatatatatattatatatatataaaaataaatatctctattttatatatataaaatatatatattctttttttaaattaacagtgctaatgttattggtgtcttcactggatgtatttgactgctgtggacttgagttgggaggggaatgttcccactcagatcctgacagggaagaggaggagatgagagactctggcatgatcttttttttgtcccacttggtggggccagggtcctctcccctgcccaggaatgtgcaaggccagggcatgggggcaaatatgacccagttttgggaacaccgacaaacccagccctggcgctgagcctctctaccccaggtcagacggacagaaagacagatcacaggtacagggatgaggacaccggctctgaccaggagtttggggagcttcaggacattgctgtgctttggggattccctccacatgctgcacgcgcatctcgcccccaggggcactgcctggaagattcaggagcctgggcggccttcgcttactctcacctgcttctgagttgcccaggagaccactggcagatgtcccggcgaagagaagagacacattgttggaagaagcagcccatgacagctccccttcctgggactcgccctcatcctcttcctgctccccttcctggggtgcagcctaaaaggacctatgtcctcacaccattgaaaccactagttctgtccccccaggagacctggttgtgtgtgtgtgagtggttgaccttcctccatcccctggtccttcccttcccttcccgaggcacagagagacagggcaggatccacgtgcccattgtggaggcagagaaaagagaaagtgttttatatacggtacttatttaatatccctttttaattagaaattaaaacagttaatttaattaaagagtagggttttttttcagtattcttggttaatatttaatttcaactatttatgagatgtatcttttgctctctcttgctctcttatttgtaccggtttttgtatataaaattcatgtttccaatctctctctccctgatcggtgacagtcactagcttatcttgaacagatatttaattttgctaacactcagctctgccctccccgatcccctggctccccagcacacattcctttgaaataaggtttcaatatacatctacatactatatatatatttggcaacttgtatttgtgtgtatatatatatatatatgtttatgtatatatgtgattctgataaaatagacattgctattctgttttttatatgtaaaaacaaaacaagaaaaaatagagaattctacatactaaatctctctccttttttaatttt

SEQ ID NO: 15739 - protein, 232 aa, Homo sapiens; identical to SEQ ID NO: 15735

SEQ ID NO: 15740 - DNA, 3257 bp, Homo sapiens
cttggggcagccgggtagctcggaggtcgtggcgctgggggctagcaccagcgctctgtcgggaggcgcagcggttaggtggaccggtcagcggactcaccggccagggcgctcggtgctggaatttgatattcattgatccgggttttatccctcttcttttttcttaaacatttttttttaaaactgtattgtttctcgttttaatttatttttgcttgccattccccacttgaatcgggccgacggcttggggagattgctctacttccccaaatcactgtggattttggaaaccagcagaaagaggaaagaggtagcaagagctccagagagaagtcgaggaagagagagacggggtcagagagagcgcgcgggcgtgcgagcagcgaaagcgacaggggcaaagtgagtgacctgcttttgggggtgaccgccggagcgcggcgtgagccctcccccttgggatcccgcagctgaccagtcgcgctgacggacagacagacagacaccgcccccagccccagctaccacctcctccccggccggcggcggacagtggacgcggcggcgagccgcgggcaggggccggagcccgcgcccggaggcggggtggagggggtcggggctcgcggcgtcgcactgaaacttttcgtccaacttctgggctgttctcgcttcggaggagccgtggtccgcgcgggggaagccgagccgagcggagccgcgagaagtgctagctcgggccgggaggagccgcagccggaggagggggaggaggaagaagagaaggaagaggagagggggccgcagtggcgactcggcgctcggaagccgggctcatggacgggtgaggcggcggtgtgcgcagacagtgctccagccgcgcgcgctccccaggccctggcccgggcctcgggccggggaggaagagtagctcgccgaggcgccgaggagagcgggccgccccacagcccgagccggagagggagcgcgagccgcgccggccccggtcgggcctccgaaaccatgaactttctgctgtcttgggtgcattggagccttgccttgctgctctacctccaccatgccaagtggtcccaggctgcacccatggcagaaggaggagggcagaatcatcacgaagtggtgaagttcatggatgtctatcagcgcagctactgccatccaatcgagaccctggtggacatcttccaggagtaccctgatgagatcgagtacatcttcaagccatcctgtgtgcccctgatgcgatgcgggggctgctgcaatgacgagggcctggagtgtgtgcccactgaggagtccaacatcaccatgcagattatgcggatcaaacctcaccaaggccagcacataggagagatgagcttcctacagcacaacaaatgtgaatgcagaccaaagaaagatagagcaagacaagaaaatccctgtgggccttgctcagagcggagaaagcatttgtttgtacaagatccgcagacgtgtaaatgttcctgcaaaaacacagactcgcgttgcaaggcgaggcagcttgagttaaacgaacgtacttgcagatctctcaccaggaaagactgatacagaacgatcgatacagaaaccacgctgccgccaccacaccatcaccatcgacagaacagtccttaatccagaaacctgaaatgaaggaagaggagactctgcgcagagcactttgggtccggagggcgagactccggcggaagcattcccgggcgggtgacccagcacggtccctcttggaattggattcgccattttatttttcttgctgctaaatcaccgagcccggaagattagagagttttatttctgggattcctgtagacacacccacccacatacatacatttatatatatatatattatatatatataaaaataaatatctctattttatatatataaaatatatatattctttttttaaattaacagtgctaatgttattggtgtcttcactggatgtatttgactgctgtggacttgagttgggaggggaatgttcccactcagatcctgacagggaagaggaggagatgagagactctggcatgatcttttttttgtcccacttggtggggccagggtcctctcccctgcccaggaatgtgcaaggccagggcatgggggcaaatatgacccagttttgggaacaccgacaaacccagccctggcgctgagcctctctaccccaggtcagacggacagaaagacagatcacaggtacagggatgaggacaccggctctgaccaggagtttggggagcttcaggacattgctgtgctttggggattccctccacatgctgcacgcgcatctcgcccccaggggcactgcctggaagattcaggagcctgggcggccttcgcttactctcacctgcttctgagttgcccaggagaccactggcagatgtcccggcgaagagaagagacacattgttggaagaagcagcccatgacagctccccttcctgggactcgccctcatcctcttcctgctccccttcctggggtgcagcctaaaaggacctatgtcctcacaccattgaaaccactagttctgtccccccaggagacctggttgtgtgtgtgtgagtggttgaccttcctccatcccctggtccttcccttcccttcccgaggcacagagagacagggcaggatccacgtgcccattgtggaggcagagaaaagagaaagtgttttatatacggtacttatttaatatccctttttaattagaaattaaaacagttaatttaattaaagagtagggttttttttcagtattcttggttaatatttaatttcaactatttatgagatgtatcttttgctctctcttgctctcttatttgtaccggtttttgtatataaaattcatgtttccaatctctctctccctgatcggtgacagtcactagcttatcttgaacagatatttaattttgctaacactcagctctgccctccccgatcccctggctccccagcacacattcctttgaaataaggtttcaatatacatctacatactatatatatatttggcaacttgtatttgtgtgtatatatatatatatatgtttatgtatatatgtgattctgataaaatagacattgctattctgttttttatatgtaaaaacaaaacaagaaaaaatagagaattctacatactaaatctctctccttttttaatttt

SEQ ID NO: 15741 - protein, 191 aa, Homo sapiens; identical to SEQ ID NO: 15737

SEQ ID NO: 15742 - DNA, 3653 bp, Homo sapiens
cttggggcagccgggtagctcggaggtcgtggcgctgggggctagcaccagcgctctgtcgggaggcgcagcggttaggtggaccggtcagcggactcaccggccagggcgctcggtgctggaatttgatattcattgatccgggttttatccctcttcttttttcttaaacatttttttttaaaactgtattgtttctcgttttaatttatttttgcttgccattccccacttgaatcgggccgacggcttggggagattgctctacttccccaaatcactgtggattttggaaaccagcagaaagaggaaagaggtagcaagagctccagagagaagtcgaggaagagagagacggggtcagagagagcgcgcgggcgtgcgagcagcgaaagcgacaggggcaaagtgagtgacctgcttttgggggtgaccgccggagcgcggcgtgagccctcccccttgggatcccgcagctgaccagtcgcgctgacggacagacagacagacaccgcccccagccccagctaccacctcctccccggccggcggcggacagtggacgcggcggcgagccgcgggcaggggccggagcccgcgcccggaggcggggtggagggggtcggggctcgcggcgtcgcactgaaacttttcgtccaacttctgggctgttctcgcttcggaggagccgtggtccgcgcgggggaagccgagccgagcggagccgcgagaagtgctagctcgggccgggaggagccgcagccggaggagggggaggaggaagaagagaaggaagaggagagggggccgcagtggcgactcggcgctcggaagccgggctcatggacgggtgaggcggcggtgtgcgcagacagtgctccagccgcgcgcgctccccaggccctggcccgggcctcgggccggggaggaagagtagctcgccgaggcgccgaggagagcgggccgccccacagcccgagccggagagggagcgcgagccgcgccggccccggtcgggcctccgaaaccatgaactttctgctgtcttgggtgcattggagccttgccttgctgctctacctccaccatgccaagtggtcccaggctgcacccatggcagaaggaggagggcagaatcatcacgaagtggtgaagttcatggatgtctatcagcgcagctactgccatccaatcgagaccctggtggacatcttccaggagtaccctgatgagatcgagtacatcttcaagccatcctgtgtgcccctgatgcgatgcgggggctgctgcaatgacgagggcctggagtgtgtgcccactgaggagtccaacatcaccatgcagattatgcggatcaaacctcaccaaggccagcacataggagagatgagcttcctacagcacaacaaatgtgaatgcagaccaaagaaagatagagcaagacaagaaaaaaaatcagttcgaggaaagggaaaggggcaaaaacgaaagcgcaagaaatcccggtataagtcctggagcgtgtacgttggtgcccgctgctgtctaatgccctggagcctccctggcccccatccctgtgggccttgctcagagcggagaaagcatttgtttgtacaagatccgcagacgtgtaaatgttcctgcaaaaacacagactcgcgttgcaaggcgaggcagcttgagttaaacgaacgtacttgcagatgtgacaagccgaggcggtgagccgggcaggaggaaggagcctccctcagggtttcgggaaccagatctctcaccaggaaagactgatacagaacgatcgatacagaaaccacgctgccgccaccacaccatcaccatcgacagaacagtccttaatccagaaacctgaaatgaaggaagaggagactctgcgcagagcactttgggtccggagggcgagactccggcggaagcattcccgggcgggtgacccagcacggtccctcttggaattggattcgccattttatttttcttgctgctaaatcaccgagcccggaagattagagagttttatttctgggattcctgtagacacacccacccacatacatacatttatatatatatatattatatatatataaaaataaatatctctattttatatatataaaatatatatattctttttttaaattaacagtgctaatgttattggtgtcttcactggatgtatttgactgctgtggacttgagttgggaggggaatgttcccactcagatcctgacagggaagaggaggagatgagagactctggcatgatcttttttttgtcccacttggtggggccagggtcctctcccctgcccaggaatgtgcaaggccagggcatgggggcaaatatgacccagttttgggaacaccgacaaacccagccctggcgctgagcctctctaccccaggtcagacggacagaaagacagatcacaggtacagggatgaggacaccggctctgaccaggagtttggggagcttcaggacattgctgtgctttggggattccctccacatgctgcacgcgcatctcgcccccaggggcactgcctggaagattcaggagcctgggcggccttcgcttactctcacctgcttctgagttgcccaggagaccactggcagatgtcccggcgaagagaagagacacattgttggaagaagcagcccatgacagctccccttcctgggactcgccctcatcctcttcctgctccccttcctggggtgcagcctaaaaggacctatgtcctcacaccattgaaaccactagttctgtccccccaggagacctggttgtgtgtgtgtgagtggttgaccttcctccatcccctggtccttcccttcccttcccgaggcacagagagacagggcaggatccacgtgcccattgtggaggcagagaaaagagaaagtgttttatatacggtacttatttaatatccctttttaattagaaattaaaacagttaatttaattaaagagtagggttttttttcagtattcttggttaatatttaatttcaactatttatgagatgtatcttttgctctctcttgctctcttatttgtaccggtttttgtatataaaattcatgtttccaatctctctctccctgatcggtgacagtcactagcttatcttgaacagatatttaattttgctaacactcagctctgccctccccgatcccctggctccccagcacacattcctttgaaataaggtttcaatatacatctacatactatatatatatttggcaacttgtatttgtgtgtatatatatatatatatgtttatgtatatatgtgattctgataaaatagacattgctattctgttttttatatgtaaaaacaaaacaagaaaaaatagagaattctacatactaaatctctctccttttttaattttaatatttgttatcatttatttattggtgctactgtttatccgtaataattgtggggaaaagatattaacatcacgtctttgtctctagtgcagtttttcgagatattccgtagtacatatttatttttaaacaacgacaaagaaatacagatatatcttaaaaaaaaaaaagcattttgtattaaagaatttaattctgatctcaaa

SEQ ID NO: 15743 - protein, 232 aa, Homo sapiens; identical to SEQ ID NO: 15735

SEQ ID NO: 15744 - DNA, 3464 bp, Homo sapiens
cttggggcagccgggtagctcggaggtcgtggcgctgggggctagcaccagcgctctgtcgggaggcgcagcggttaggtggaccggtcagcggactcaccggccagggcgctcggtgctggaatttgatattcattgatccgggttttatccctcttcttttttcttaaacatttttttttaaaactgtattgtttctcgttttaatttatttttgcttgccattccccacttgaatcgggccgacggcttggggagattgctctacttccccaaatcactgtggattttggaaaccagcagaaagaggaaagaggtagcaagagctccagagagaagtcgaggaagagagagacggggtcagagagagcgcgcgggcgtgcgagcagcgaaagcgacaggggcaaagtgagtgacctgcttttgggggtgaccgccggagcgcggcgtgagccctcccccttgggatcccgcagctgaccagtcgcgctgacggacagacagacagacaccgcccccagccccagctaccacctcctccccggccggcggcggacagtggacgcggcggcgagccgcgggcaggggccggagcccgcgcccggaggcggggtggagggggtcggggctcgcggcgtcgcactgaaacttttcgtccaacttctgggctgttctcgcttcggaggagccgtggtccgcgcgggggaagccgagccgagcggagccgcgagaagtgctagctcgggccgggaggagccgcagccggaggagggggaggaggaagaagagaaggaagaggagagggggccgcagtggcgactcggcgctcggaagccgggctcatggacgggtgaggcggcggtgtgcgcagacagtgctccagccgcgcgcgctccccaggccctggcccgggcctcgggccggggaggaagagtagctcgccgaggcgccgaggagagcgggccgccccacagcccgagccggagagggagcgcgagccgcgccggccccggtcgggcctccgaaaccatgaactttctgctgtcttgggtgcattggagccttgccttgctgctctacctccaccatgccaagtggtcccaggctgcacccatggcagaaggaggagggcagaatcatcacgaagtggtgaagttcatggatgtctatcagcgcagctactgccatccaatcgagaccctggtggacatcttccaggagtaccctgatgagatcgagtacatcttcaagccatcctgtgtgcccctgatgcgatgcgggggctgctgcaatgacgagggcctggagtgtgtgcccactgaggagtccaacatcaccatgcagattatgcggatcaaacctcaccaaggccagcacataggagagatgagcttcctacagcacaacaaatgtgaatgcagaccaaagaaagatagagcaagacaagaaaatccctgtgggccttgctcagagcggagaaagcatttgtttgtacaagatccgcagacgtgtaaatgttcctgcaaaaacacagactcgcgttgcaaggcgaggcagcttgagttaaacgaacgtacttgcagatctctcaccaggaaagactgatacagaacgatcgatacagaaaccacgctgccgccaccacaccatcaccatcgacagaacagtccttaatccagaaacctgaaatgaaggaagaggagactctgcgcagagcactttgggtccggagggcgagactccggcggaagcattcccgggcgggtgacccagcacggtccctcttggaattggattcgccattttatttttcttgctgctaaatcaccgagcccggaagattagagagttttatttctgggattcctgtagacacacccacccacatacatacatttatatatatatatattatatatatataaaaataaatatctctattttatatatataaaatatatatattctttttttaaattaacagtgctaatgttattggtgtcttcactggatgtatttgactgctgtggacttgagttgggaggggaatgttcccactcagatcctgacagggaagaggaggagatgagagactctggcatgatcttttttttgtcccacttggtggggccagggtcctctcccctgcccaggaatgtgcaaggccagggcatgggggcaaatatgacccagttttgggaacaccgacaaacccagccctggcgctgagcctctctaccccaggtcagacggacagaaagacagatcacaggtacagggatgaggacaccggctctgaccaggagtttggggagcttcaggacattgctgtgctttggggattccctccacatgctgcacgcgcatctcgcccccaggggcactgcctggaagattcaggagcctgggcggccttcgcttactctcacctgcttctgagttgcccaggagaccactggcagatgtcccggcgaagagaagagacacattgttggaagaagcagcccatgacagctccccttcctgggactcgccctcatcctcttcctgctccccttcctggggtgcagcctaaaaggacctatgtcctcacaccattgaaaccactagttctgtccccccaggagacctggttgtgtgtgtgtgagtggttgaccttcctccatcccctggtccttcccttcccttcccgaggcacagagagacagggcaggatccacgtgcccattgtggaggcagagaaaagagaaagtgttttatatacggtacttatttaatatccctttttaattagaaattaaaacagttaatttaattaaagagtagggttttttttcagtattcttggttaatatttaatttcaactatttatgagatgtatcttttgctctctcttgctctcttatttgtaccggtttttgtatataaaattcatgtttccaatctctctctccctgatcggtgacagtcactagcttatcttgaacagatatttaattttgctaacactcagctctgccctccccgatcccctggctccccagcacacattcctttgaaataaggtttcaatatacatctacatactatatatatatttggcaacttgtatttgtgtgtatatatatatatatatgtttatgtatatatgtgattctgataaaatagacattgctattctgttttttatatgtaaaaacaaaacaagaaaaaatagagaattctacatactaaatctctctccttttttaattttaatatttgttatcatttatttattggtgctactgtttatccgtaataattgtggggaaaagatattaacatcacgtctttgtctctagtgcagtttttcgagatattccgtagtacatatttatttttaaacaacgacaaagaaatacagatatatcttaaaaaaaaaaaagcattttgtattaaagaatttaattctgatctcaaa

SEQ ID NO: 15745 - protein, 191 aa, Homo sapiens; identical to SEQ ID NO: 15737

SEQ ID NO: 15746 - DNA, 3398 bp, Homo sapiens
cttggggcagccgggtagctcggaggtcgtggcgctgggggctagcaccagcgctctgtcgggaggcgcagcggttaggtggaccggtcagcggactcaccggccagggcgctcggtgctggaatttgatattcattgatccgggttttatccctcttcttttttcttaaacatttttttttaaaactgtattgtttctcgttttaatttatttttgcttgccattccccacttgaatcgggccgacggcttggggagattgctctacttccccaaatcactgtggattttggaaaccagcagaaagaggaaagaggtagcaagagctccagagagaagtcgaggaagagagagacggggtcagagagagcgcgcgggcgtgcgagcagcgaaagcgacaggggcaaagtgagtgacctgcttttgggggtgaccgccggagcgcggcgtgagccctcccccttgggatcccgcagctgaccagtcgcgctgacggacagacagacagacaccgcccccagccccagctaccacctcctccccggccggcggcggacagtggacgcggcggcgagccgcgggcaggggccggagcccgcgcccggaggcggggtggagggggtcggggctcgcggcgtcgcactgaaacttttcgtccaacttctgggctgttctcgcttcggaggagccgtggtccgcgcgggggaagccgagccgagcggagccgcgagaagtgctagctcgggccgggaggagccgcagccggaggagggggaggaggaagaagagaaggaagaggagagggggccgcagtggcgactcggcgctcggaagccgggctcatggacgggtgaggcggcggtgtgcgcagacagtgctccagccgcgcgcgctccccaggccctggcccgggcctcgggccggggaggaagagtagctcgccgaggcgccgaggagagcgggccgccccacagcccgagccggagagggagcgcgagccgcgccggccccggtcgggcctccgaaaccatgaactttctgctgtcttgggtgcattggagccttgccttgctgctctacctccaccatgccaagtggtcccaggctgcacccatggcagaaggaggagggcagaatcatcacgaagtggtgaagttcatggatgtctatcagcgcagctactgccatccaatcgagaccctggtggacatcttccaggagtaccctgatgagatcgagtacatcttcaagccatcctgtgtgcccctgatgcgatgcgggggctgctgcaatgacgagggcctggagtgtgtgcccactgaggagtccaacatcaccatgcagattatgcggatcaaacctcaccaaggccagcacataggagagatgagcttcctacagcacaacaaatgtgaatgcagaccaaagaaagatagagcaagacaagaaaaatgtgacaagccgaggcggtgagccgggcaggaggaaggagcctccctcagggtttcgggaaccagatctctcaccaggaaagactgatacagaacgatcgatacagaaaccacgctgccgccaccacaccatcaccatcgacagaacagtccttaatccagaaacctgaaatgaaggaagaggagactctgcgcagagcactttgggtccggagggcgagactccggcggaagcattcccgggcgggtgacccagcacggtccctcttggaattggattcgccattttatttttcttgctgctaaatcaccgagcccggaagattagagagttttatttctgggattcctgtagacacacccacccacatacatacatttatatatatatatattatatatatataaaaataaatatctctattttatatatataaaatatatatattctttttttaaattaacagtgctaatgttattggtgtcttcactggatgtatttgactgctgtggacttgagttgggaggggaatgttcccactcagatcctgacagggaagaggaggagatgagagactctggcatgatcttttttttgtcccacttggtggggccagggtcctctcccctgcccaggaatgtgcaaggccagggcatgggggcaaatatgacccagttttgggaacaccgacaaacccagccctggcgctgagcctctctaccccaggtcagacggacagaaagacagatcacaggtacagggatgaggacaccggctctgaccaggagtttggggagcttcaggacattgctgtgctttggggattccctccacatgctgcacgcgcatctcgcccccaggggcactgcctggaagattcaggagcctgggcggccttcgcttactctcacctgcttctgagttgcccaggagaccactggcagatgtcccggcgaagagaagagacacattgttggaagaagcagcccatgacagctccccttcctgggactcgccctcatcctcttcctgctccccttcctggggtgcagcctaaaaggacctatgtcctcacaccattgaaaccactagttctgtccccccaggagacctggttgtgtgtgtgtgagtggttgaccttcctccatcccctggtccttcccttcccttcccgaggcacagagagacagggcaggatccacgtgcccattgtggaggcagagaaaagagaaagtgttttatatacggtacttatttaatatccctttttaattagaaattaaaacagttaatttaattaaagagtagggttttttttcagtattcttggttaatatttaatttcaactatttatgagatgtatcttttgctctctcttgctctcttatttgtaccggtttttgtatataaaattcatgtttccaatctctctctccctgatcggtgacagtcactagcttatcttgaacagatatttaattttgctaacactcagctctgccctccccgatcccctggctccccagcacacattcctttgaaataaggtttcaatatacatctacatactatatatatatttggcaacttgtatttgtgtgtatatatatatatatatgtttatgtatatatgtgattctgataaaatagacattgctattctgttttttatatgtaaaaacaaaacaagaaaaaatagagaattctacatactaaatctctctccttttttaattttaatatttgttatcatttatttattggtgctactgtttatccgtaataattgtggggaaaagatattaacatcacgtctttgtctctagtgcagtttttcgagatattccgtagtacatatttatttttaaacaacgacaaagaaatacagatatatcttaaaaaaaaaaaagcattttgtattaaagaatttaattctgatctcaaa

SEQ ID NO: 15747 - protein, 147 aa, Homo sapiens
MNFLLSWVHWSLALLLYLHHAKWSQAAPMAEGGGQNHHEVVKFMDVYQRSYCHPIETLVDIFQEYPDEIEYIFKPSCVPLMRCGGCCNDEGLECVPTEESNITMQIMRIKPHQGQHIGEMSFLQHNKCECRPKKDRARQEKCDKPRR

SEQ ID NO: 15748 - DNA, 1494 bp, Homo sapiens
ccgggtagctcggaggtcgtggcgctgggggctagcaccagcgctctgtcgggaggcgcagcggttaggtggaccggtcagcggactcaccggccagggcgctcggtgctggaatttgatattcattgatccgggttttatccctcttcttttttcttaaacatttttttttaaaactgtattgtttctcgttttaatttatttttgcttgccattccccacttgaatcgggccgacggcttggggagattgctctacttccccaaatcactgtggattttggaaaccagcagaaagaggaaagaggtagcaagagctccagagagaagtcgaggaagagagagacggggtcagagagagcgcgcgggcgtgcgagcagcgaaagcgacaggggcaaagtgagtgacctgcttttgggggtgaccgccggagcgcggcgtgagccctcccccttgggatcccgcagctgaccagtcgcgctgacggacagacagacagacaccgcccccagccccagctaccacctcctccccggccggcggcggacagtggacgcggcggcgagccgcgggcaggggccggagcccgcgcccggaggcggggtggagggggtcggggctcgcggcgtcgcactgaaacttttcgtccaacttctgggctgttctcgcttcggaggagccgtggtccgcgcgggggaagccgagccgagcggagccgcgagaagtgctagctcgggccgggaggagccgcagccggaggagggggaggaggaagaagagaaggaagaggagagggggccgcagtggcgactcggcgctcggaagccgggctcatggacgggtgaggcggcggtgtgcgcagacagtgctccagccgcgcgcgctccccaggccctggcccgggcctcgggccggggaggaagagtagctcgccgaggcgccgaggagagcgggccgccccacagcccgagccggagagggagcgcgagccgcgccggccccggtcgggcctccgaaaccatgaactttctgctgtcttgggtgcattggagccttgccttgctgctctacctccaccatgccaagtggtcccaggctgcacccatggcagaaggaggagggcagaatcatcacgaagtggtgaagttcatggatgtctatcagcgcagctactgccatccaatcgagaccctggtggacatcttccaggagtaccctgatgagatcgagtacatcttcaagccatcctgtgtgcccctgatgcgatgcgggggctgctgcaatgacgagggcctggagtgtgtgcccactgaggagtccaacatcaccatgcaggtgggcatctttgggaagtggggcaagggggggatagggaggggggtaacactttgggaacaggtggtcccaggtcgtttcctggctagatttgccttgtctggctcctgcccctgagttgcacaggggaggtatggtggggtcttgccttctgtggaga

SEQ ID NO: 15749 - protein, 143 aa, Homo sapiens
MNFLLSWVHWSLALLLYLHHAKWSQAAPMAEGGGQNHHEVVKFMDVYQRSYCHPIETLVDIFQEYPDEIEYIFKPSCVPLMRCGGCCNDEGLECVPTEESNITMQVGIFGKWGKGGIGRGVTLWEQVVPGRFLARFALSGSCP

SEQ ID NO: 15750 - DNA, 1926 bp, Homo sapiens
cccgggcctggccggccgcgtgttcccggagcctcggctgcccgaatggggagcccagagtggcgagcggcacccctccccccgccagccctccgcgggaaggtgacctctcgagtggtcccaggctgcacccatggcagaaggaggagggcagaatcatcacgaagtggtgaagttcatggatgtctatcagcgcagctactgccatccaatcgagaccctggtggacatcttccaggagtaccctgatgagatcgagtacatcttcaagccatcctgtgtgcccctgatgcgatgcgggggctgctgcaatgacgagggcctggagtgtgtgcccactgaggagtccaacatcaccatgcagattatgcggatcaaacctcaccaaggccagcacataggagagatgagcttcctacagcacaacaaatgtgaatgcagaccaaagaaagatagagcaagacaagaaaatccctgtgggccttgctcagagcggagaaagcatttgtttgtacaagatccgcagacgtgtaaatgttcctgcaaaaacacagactcgcgttgcaaggcgaggcagcttgagttaaacgaacgtacttgcagatgtgacaagccgaggcggtgagccgggcaggaggaaggagcctccctcagggtttcgggaaccagatctctcaccaggaaagactgatacagaacgatcgatacagaaaccacgctgccgccaccacaccatcaccatcgacagaacagtccttaatccagaaacctgaaatgaaggaagaggagactctgcgcagagcactttgggtccggagggcgagactccggcggaagcattcccgggcgggtgacccagcacggtccctcttggaattggattcgccattttatttttcttgctgctaaatcaccgagcccggaagattagagagttttatttctgggattcctgtagacacacccacccacatacatacatttatatatatatatattatatatatataaaaataaatatctctattttatatatataaaatatatatattctttttttaaattaacagtgctaatgttattggtgtcttcactggatgtatttgactgctgtggacttgagttgggaggggaatgttcccactcagatcctgacagggaagaggaggagatgagagactctggcatgatcttttttttgtcccacttggtggggccagggtcctctcccctgcccaggaatgtgcaaggccagggcatgggggcaaatatgacccagttttgggaacaccgacaaacccagccctggcgctgagcctctctaccccaggtcagacggacagaaagacagatcacaggtacagggatgaggacaccggctctgaccaggagtttggggagcttcaggacattgctgtgctttggggattccctccacatgctgcacgcgcatctcgcccccaggggcactgcctggaagattcaggagcctgggcggccttcgcttactctcacctgcttctgagttgcccaggagaccactggcagatgtcccggcgaagagaagagacacattgttggaagaagcagcccatgacagctccccttcctgggactcgccctcatcctcttcctgctccccttcctggggtgcagcctaaaaggacctatgtcctcacaccattgaaaccactagttctgtccccccaggagacctggttgtgtgtgtgtgagtggttgaccttcctccatcccctggtccttcccttcccttcccgaggcacagagagacagggcaggatccacgtgcccattgtggaggcagagaaaagagaaagtgttttatatacggtacttatttaatatccctttttaattagaaattaaaacagttaatttaattaaagagtagggttttttttcagt

SEQ ID NO: 15751 - protein, 163 aa, Homo sapiens
MAEGGGQNHHEVVKFMDVYQRSYCHPIETLVDIFQEYPDEIEYIFKPSCVPLMRCGGCCNDEGLECVPTEESNITMQIMRIKPHQGQHIGEMSFLQHNKCECRPKKDRARQENPCGPCSERRKHLFVQDPQTCKCSCKNTDSRCKARQLELNERTCRCDKPRR

SEQ ID NO: 15752 - DNA, 2343 bp, Homo sapiens
cccgggcctggccggccgcgtgttcccggagcctcggctgcccgaatggggagcccagagtggcgagcggcacccctccccccgccagccctccgcgggaaggtgacctctcgagtggtcccaggctgcacccatggcagaaggaggagggcagaatcatcacgaagtggtgaagttcatggatgtctatcagcgcagctactgccatccaatcgagaccctggtggacatcttccaggagtaccctgatgagatcgagtacatcttcaagccatcctgtgtgcccctgatgcgatgcgggggctgctgcaatgacgagggcctggagtgtgtgcccactgaggagtccaacatcaccatgcagattatgcggatcaaacctcaccaaggccagcacataggagagatgagcttcctacagcacaacaaatgtgaatgcagaccaaagaaagatagagcaagacaagaaaatccctgtgggccttgctcagagcggagaaagcatttgtttgtacaagatccgcagacgtgtaaatgttcctgcaaaaacacagactcgcgttgcaaggcgaggcagcttgagttaaacgaacgtacttgcagatgtgacaagccgaggcggtgagccgggcaggaggaaggagcctccctcagggtttcgggaaccagatctctcaccaggaaagactgatacagaacgatcgatacagaaaccacgctgccgccaccacaccatcaccatcgacagaacagtccttaatccagaaacctgaaatgaaggaagaggagactctgcgcagagcactttgggtccggagggcgagactccggcggaagcattcccgggcgggtgacccagcacggtccctcttggaattggattcgccattttatttttcttgctgctaaatcaccgagcccggaagattagagagttttatttctgggattcctgtagacacacccacccacatacatacatttatatatatatatattatatatatataaaaataaatatctctattttatatatataaaatatatatattctttttttaaattaacagtgctaatgttattggtgtcttcactggatgtatttgactgctgtggacttgagttgggaggggaatgttcccactcagatcctgacagggaagaggaggagatgagagactctggcatgatcttttttttgtcccacttggtggggccagggtcctctcccctgcccaggaatgtgcaaggccagggcatgggggcaaatatgacccagttttgggaacaccgacaaacccagccctggcgctgagcctctctaccccaggtcagacggacagaaagacagatcacaggtacagggatgaggacaccggctctgaccaggagtttggggagcttcaggacattgctgtgctttggggattccctccacatgctgcacgcgcatctcgcccccaggggcactgcctggaagattcaggagcctgggcggccttcgcttactctcacctgcttctgagttgcccaggagaccactggcagatgtcccggcgaagagaagagacacattgttggaagaagcagcccatgacagctccccttcctgggactcgccctcatcctcttcctgctccccttcctggggtgcagcctaaaaggacctatgtcctcacaccattgaaaccactagttctgtccccccaggagacctggttgtgtgtgtgtgagtggttgaccttcctccatcccctggtccttcccttcccttcccgaggcacagagagacagggcaggatccacgtgcccattgtggaggcagagaaaagagaaagtgttttatatacggtacttatttaatatccctttttaattagaaattaaaacagttaatttaattaaagagtagggttttttttcagtattcttggttaatatttaatttcaactatttatgagatgtatcttttgctctctcttgctctcttatttgtaccggtttttgtatataaaattcatgtttccaatctctctctccctgatcggtgacagtcactagcttatcttgaacagatatttaattttgctaacactcagctctgccctccccgatcccctggctccccagcacacattcctttgaaataaggtttcaatatacatctacatactatatatatatttggcaacttgtatttgtgtgtatatatatatatatatgtttatgtatatatgtgattctgataaaatagacattgctattctgttttttatatgtaaaaacaaaacaagaaaaaatagagaattctacatactaaatctctctccttttttaatttt

SEQ ID NO: 15753 - protein, 163 aa, Homo sapiens; identical to SEQ ID NO: 15751

SEQ ID NO: 15754 - DNA, 2550 bp, Homo sapiens
cccgggcctggccggccgcgtgttcccggagcctcggctgcccgaatggggagcccagagtggcgagcggcacccctccccccgccagccctccgcgggaaggtgacctctcgagtggtcccaggctgcacccatggcagaaggaggagggcagaatcatcacgaagtggtgaagttcatggatgtctatcagcgcagctactgccatccaatcgagaccctggtggacatcttccaggagtaccctgatgagatcgagtacatcttcaagccatcctgtgtgcccctgatgcgatgcgggggctgctgcaatgacgagggcctggagtgtgtgcccactgaggagtccaacatcaccatgcagattatgcggatcaaacctcaccaaggccagcacataggagagatgagcttcctacagcacaacaaatgtgaatgcagaccaaagaaagatagagcaagacaagaaaatccctgtgggccttgctcagagcggagaaagcatttgtttgtacaagatccgcagacgtgtaaatgttcctgcaaaaacacagactcgcgttgcaaggcgaggcagcttgagttaaacgaacgtacttgcagatgtgacaagccgaggcggtgagccgggcaggaggaaggagcctccctcagggtttcgggaaccagatctctcaccaggaaagactgatacagaacgatcgatacagaaaccacgctgccgccaccacaccatcaccatcgacagaacagtccttaatccagaaacctgaaatgaaggaagaggagactctgcgcagagcactttgggtccggagggcgagactccggcggaagcattcccgggcgggtgacccagcacggtccctcttggaattggattcgccattttatttttcttgctgctaaatcaccgagcccggaagattagagagttttatttctgggattcctgtagacacacccacccacatacatacatttatatatatatatattatatatatataaaaataaatatctctattttatatatataaaatatatatattctttttttaaattaacagtgctaatgttattggtgtcttcactggatgtatttgactgctgtggacttgagttgggaggggaatgttcccactcagatcctgacagggaagaggaggagatgagagactctggcatgatcttttttttgtcccacttggtggggccagggtcctctcccctgcccaggaatgtgcaaggccagggcatgggggcaaatatgacccagttttgggaacaccgacaaacccagccctggcgctgagcctctctaccccaggtcagacggacagaaagacagatcacaggtacagggatgaggacaccggctctgaccaggagtttggggagcttcaggacattgctgtgctttggggattccctccacatgctgcacgcgcatctcgcccccaggggcactgcctggaagattcaggagcctgggcggccttcgcttactctcacctgcttctgagttgcccaggagaccactggcagatgtcccggcgaagagaagagacacattgttggaagaagcagcccatgacagctccccttcctgggactcgccctcatcctcttcctgctccccttcctggggtgcagcctaaaaggacctatgtcctcacaccattgaaaccactagttctgtccccccaggagacctggttgtgtgtgtgtgagtggttgaccttcctccatcccctggtccttcccttcccttcccgaggcacagagagacagggcaggatccacgtgcccattgtggaggcagagaaaagagaaagtgttttatatacggtacttatttaatatccctttttaattagaaattaaaacagttaatttaattaaagagtagggttttttttcagtattcttggttaatatttaatttcaactatttatgagatgtatcttttgctctctcttgctctcttatttgtaccggtttttgtatataaaattcatgtttccaatctctctctccctgatcggtgacagtcactagcttatcttgaacagatatttaattttgctaacactcagctctgccctccccgatcccctggctccccagcacacattcctttgaaataaggtttcaatatacatctacatactatatatatatttggcaacttgtatttgtgtgtatatatatatatatatgtttatgtatatatgtgattctgataaaatagacattgctattctgttttttatatgtaaaaacaaaacaagaaaaaatagagaattctacatactaaatctctctccttttttaattttaatatttgttatcatttatttattggtgctactgtttatccgtaataattgtggggaaaagatattaacatcacgtctttgtctctagtgcagtttttcgagatattccgtagtacatatttatttttaaacaacgacaaagaaatacagatatatcttaaaaaaaaaaaagcattttgtattaaagaatttaattctgatctcaaa

SEQ ID NO: 15755 - protein, 163 aa, Homo sapiens; identical to SEQ ID NO: 15751

SEQ ID NO: 15756 - DNA, 1765 bp, Homo sapiens
ctactaggagtcagggtgaagcctagagaggatgaaagaaggggaggggatggggagtggtaagaacctaggatttgaattcccagcctggccaacccttgcagccatgtcttggcctcaagtggaacaagggctccttgaggccagcagggttgggggagttggggtgggcctgagcctctttcctgctagagctcttggtcctccctgcctccaccacccatccctgctctgcagaacccctgggtgctgagtggcaggagccccagggttgtcccatctgggtatggctggctgggtcactaacctctgtgatctgcttccttcctttccagattatgcggatcaaacctcaccaaggccagcacataggagagatgagcttcctacagcacaacaaatgtgaatgcagaccaaagaaagatagagcaagacaagaaaaatgtgacaagccgaggcggtgagccgggcaggaggaaggagcctccctcagggtttcgggaaccagatctctcaccaggaaagactgatacagaacgatcgatacagaaaccacgctgccgccaccacaccatcaccatcgacagaacagtccttaatccagaaacctgaaatgaaggaagaggagactctgcgcagagcactttgggtccggagggcgagactccggcggaagcattcccgggcgggtgacccagcacggtccctcttggaattggattcgccattttatttttcttgctgctaaatcaccgagcccggaagattagagagttttatttctgggattcctgtagacacacccacccacatacatacatttatatatatatatattatatatatataaaaataaatatctctattttatatatataaaatatatatattctttttttaaattaacagtgctaatgttattggtgtcttcactggatgtatttgactgctgtggacttgagttgggaggggaatgttcccactcagatcctgacagggaagaggaggagatgagagactctggcatgatcttttttttgtcccacttggtggggccagggtcctctcccctgcccaggaatgtgcaaggccagggcatgggggcaaatatgacccagttttgggaacaccgacaaacccagccctggcgctgagcctctctaccccaggtcagacggacagaaagacagatcacaggtacagggatgaggacaccggctctgaccaggagtttggggagcttcaggacattgctgtgctttggggattccctccacatgctgcacgcgcatctcgcccccaggggcactgcctggaagattcaggagcctgggcggccttcgcttactctcacctgcttctgagttgcccaggagaccactggcagatgtcccggcgaagagaagagacacattgttggaagaagcagcccatgacagctccccttcctgggactcgccctcatcctcttcctgctccccttcctggggtgcagcctaaaaggacctatgtcctcacaccattgaaaccactagttctgtccccccaggagacctggttgtgtgtgtgtgagtggttgaccttcctccatcccctggtccttcccttcccttcccgaggcacagagagacagggcaggatccacgtgcccattgtggaggcagagaaaagagaaagtgttttatatacggtacttatttaatatccctttttaattagaaattaaaacagttaatttaattaaagagtagggttttttttcagt

SEQ ID NO: 15757 - protein, 41 aa, Homo sapiens
MRIKPHQGQHIGEMSFLQHNKCECRPKKDRARQEKCDKPRR

SEQ ID NO: 15758 - DNA, 2182 bp, Homo sapiens
ctactaggagtcagggtgaagcctagagaggatgaaagaaggggaggggatggggagtggtaagaacctaggatttgaattcccagcctggccaacccttgcagccatgtcttggcctcaagtggaacaagggctccttgaggccagcagggttgggggagttggggtgggcctgagcctctttcctgctagagctcttggtcctccctgcctccaccacccatccctgctctgcagaacccctgggtgctgagtggcaggagccccagggttgtcccatctgggtatggctggctgggtcactaacctctgtgatctgcttccttcctttccagattatgcggatcaaacctcaccaaggccagcacataggagagatgagcttcctacagcacaacaaatgtgaatgcagaccaaagaaagatagagcaagacaagaaaaatgtgacaagccgaggcggtgagccgggcaggaggaaggagcctccctcagggtttcgggaaccagatctctcaccaggaaagactgatacagaacgatcgatacagaaaccacgctgccgccaccacaccatcaccatcgacagaacagtccttaatccagaaacctgaaatgaaggaagaggagactctgcgcagagcactttgggtccggagggcgagactccggcggaagcattcccgggcgggtgacccagcacggtccctcttggaattggattcgccattttatttttcttgctgctaaatcaccgagcccggaagattagagagttttatttctgggattcctgtagacacacccacccacatacatacatttatatatatatatattatatatatataaaaataaatatctctattttatatatataaaatatatatattctttttttaaattaacagtgctaatgttattggtgtcttcactggatgtatttgactgctgtggacttgagttgggaggggaatgttcccactcagatcctgacagggaagaggaggagatgagagactctggcatgatcttttttttgtcccacttggtggggccagggtcctctcccctgcccaggaatgtgcaaggccagggcatgggggcaaatatgacccagttttgggaacaccgacaaacccagccctggcgctgagcctctctaccccaggtcagacggacagaaagacagatcacaggtacagggatgaggacaccggctctgaccaggagtttggggagcttcaggacattgctgtgctttggggattccctccacatgctgcacgcgcatctcgcccccaggggcactgcctggaagattcaggagcctgggcggccttcgcttactctcacctgcttctgagttgcccaggagaccactggcagatgtcccggcgaagagaagagacacattgttggaagaagcagcccatgacagctccccttcctgggactcgccctcatcctcttcctgctccccttcctggggtgcagcctaaaaggacctatgtcctcacaccattgaaaccactagttctgtccccccaggagacctggttgtgtgtgtgtgagtggttgaccttcctccatcccctggtccttcccttcccttcccgaggcacagagagacagggcaggatccacgtgcccattgtggaggcagagaaaagagaaagtgttttatatacggtacttatttaatatccctttttaattagaaattaaaacagttaatttaattaaagagtagggttttttttcagtattcttggttaatatttaatttcaactatttatgagatgtatcttttgctctctcttgctctcttatttgtaccggtttttgtatataaaattcatgtttccaatctctctctccctgatcggtgacagtcactagcttatcttgaacagatatttaattttgctaacactcagctctgccctccccgatcccctggctccccagcacacattcctttgaaataaggtttcaatatacatctacatactatatatatatttggcaacttgtatttgtgtgtatatatatatatatatgtttatgtatatatgtgattctgataaaatagacattgctattctgttttttatatgtaaaaacaaaacaagaaaaaatagagaattctacatactaaatctctctccttttttaatttt

SEQ ID NO: 15759 - protein, 41 aa, Homo sapiens; identical to SEQ ID NO: 15757

SEQ ID NO: 15760 - DNA, 2389 bp, Homo sapiens
ctactaggagtcagggtgaagcctagagaggatgaaagaaggggaggggatggggagtggtaagaacctaggatttgaattcccagcctggccaacccttgcagccatgtcttggcctcaagtggaacaagggctccttgaggccagcagggttgggggagttggggtgggcctgagcctctttcctgctagagctcttggtcctccctgcctccaccacccatccctgctctgcagaacccctgggtgctgagtggcaggagccccagggttgtcccatctgggtatggctggctgggtcactaacctctgtgatctgcttccttcctttccagattatgcggatcaaacctcaccaaggccagcacataggagagatgagcttcctacagcacaacaaatgtgaatgcagaccaaagaaagatagagcaagacaagaaaaatgtgacaagccgaggcggtgagccgggcaggaggaaggagcctccctcagggtttcgggaaccagatctctcaccaggaaagactgatacagaacgatcgatacagaaaccacgctgccgccaccacaccatcaccatcgacagaacagtccttaatccagaaacctgaaatgaaggaagaggagactctgcgcagagcactttgggtccggagggcgagactccggcggaagcattcccgggcgggtgacccagcacggtccctcttggaattggattcgccattttatttttcttgctgctaaatcaccgagcccggaagattagagagttttatttctgggattcctgtagacacacccacccacatacatacatttatatatatatatattatatatatataaaaataaatatctctattttatatatataaaatatatatattctttttttaaattaacagtgctaatgttattggtgtcttcactggatgtatttgactgctgtggacttgagttgggaggggaatgttcccactcagatcctgacagggaagaggaggagatgagagactctggcatgatcttttttttgtcccacttggtggggccagggtcctctcccctgcccaggaatgtgcaaggccagggcatgggggcaaatatgacccagttttgggaacaccgacaaacccagccctggcgctgagcctctctaccccaggtcagacggacagaaagacagatcacaggtacagggatgaggacaccggctctgaccaggagtttggggagcttcaggacattgctgtgctttggggattccctccacatgctgcacgcgcatctcgcccccaggggcactgcctggaagattcaggagcctgggcggccttcgcttactctcacctgcttctgagttgcccaggagaccactggcagatgtcccggcgaagagaagagacacattgttggaagaagcagcccatgacagctccccttcctgggactcgccctcatcctcttcctgctccccttcctggggtgcagcctaaaaggacctatgtcctcacaccattgaaaccactagttctgtccccccaggagacctggttgtgtgtgtgtgagtggttgaccttcctccatcccctggtccttcccttcccttcccgaggcacagagagacagggcaggatccacgtgcccattgtggaggcagagaaaagagaaagtgttttatatacggtacttatttaatatccctttttaattagaaattaaaacagttaatttaattaaagagtagggttttttttcagtattcttggttaatatttaatttcaactatttatgagatgtatcttttgctctctcttgctctcttatttgtaccggtttttgtatataaaattcatgtttccaatctctctctccctgatcggtgacagtcactagcttatcttgaacagatatttaattttgctaacactcagctctgccctccccgatcccctggctccccagcacacattcctttgaaataaggtttcaatatacatctacatactatatatatatttggcaacttgtatttgtgtgtatatatatatatatatgtttatgtatatatgtgattctgataaaatagacattgctattctgttttttatatgtaaaaacaaaacaagaaaaaatagagaattctacatactaaatctctctccttttttaattttaatatttgttatcatttatttattggtgctactgtttatccgtaataattgtggggaaaagatattaacatcacgtctttgtctctagtgcagtttttcgagatattccgtagtacatatttatttttaaacaacgacaaagaaatacagatatatcttaaaaaaaaaaaagcattttgtattaaagaatttaattctgatctcaaa

SEQ ID NO: 15761 - protein, 41 aa, Homo sapiens; identical to SEQ ID NO: 15757

SEQ ID NO: 15762 - DNA, 1826 bp, Homo sapiens
gtgaagcctagagaggatgaaagaaggggaggggatggggagtggtaagaacctaggatttgaattcccagcctggccaacccttgcagccatgtcttggcctcaagtggaacaagggctccttgaggccagcagggttgggggagttggggtgggcctgagcctctttcctgctagagctcttggtcctccctgcctccaccacccatccctgctctgcagaacccctgggtgctgagtggcaggagccccagggttgtcccatctgggtatggctggctgggtcactaacctctgtgatctgcttccttcctttccagattatgcggatcaaacctcaccaaggccagcacataggagagatgagcttcctacagcacaacaaatgtgaatgcagaccaaagaaagatagagcaagacaagaaaatccctgtgggccttgctcagagcggagaaagcatttgtttgtacaagatccgcagacgtgtaaatgttcctgcaaaatgtgacaagccgaggcggtgagccgggcaggaggaaggagcctccctcagggtttcgggaaccagatctctcaccaggaaagactgatacagaacgatcgatacagaaaccacgctgccgccaccacaccatcaccatcgacagaacagtccttaatccagaaacctgaaatgaaggaagaggagactctgcgcagagcactttgggtccggagggcgagactccggcggaagcattcccgggcgggtgacccagcacggtccctcttggaattggattcgccattttatttttcttgctgctaaatcaccgagcccggaagattagagagttttatttctgggattcctgtagacacacccacccacatacatacatttatatatatatatattatatatatataaaaataaatatctctattttatatatataaaatatatatattctttttttaaattaacagtgctaatgttattggtgtcttcactggatgtatttgactgctgtggacttgagttgggaggggaatgttcccactcagatcctgacagggaagaggaggagatgagagactctggcatgatcttttttttgtcccacttggtggggccagggtcctctcccctgcccaggaatgtgcaaggccagggcatgggggcaaatatgacccagttttgggaacaccgacaaacccagccctggcgctgagcctctctaccccaggtcagacggacagaaagacagatcacaggtacagggatgaggacaccggctctgaccaggagtttggggagcttcaggacattgctgtgctttggggattccctccacatgctgcacgcgcatctcgcccccaggggcactgcctggaagattcaggagcctgggcggccttcgcttactctcacctgcttctgagttgcccaggagaccactggcagatgtcccggcgaagagaagagacacattgttggaagaagcagcccatgacagctccccttcctgggactcgccctcatcctcttcctgctccccttcctggggtgcagcctaaaaggacctatgtcctcacaccattgaaaccactagttctgtccccccaggagacctggttgtgtgtgtgtgagtggttgaccttcctccatcccctggtccttcccttcccttcccgaggcacagagagacagggcaggatccacgtgcccattgtggaggcagagaaaagagaaagtgttttatatacggtacttatttaatatccctttttaattagaaattaaaacagttaatttaattaaagagtagggttttttttcagt

SEQ ID NO: 15763 - protein, 61 aa, Homo sapiens
MRIKPHQGQHIGEMSFLQHNKCECRPKKDRARQENPCGPCSERRKHLFVQDPQTCKCSCKM

SEQ ID NO: 15764 - DNA, 2243 bp, Homo sapiens
gtgaagcctagagaggatgaaagaaggggaggggatggggagtggtaagaacctaggatttgaattcccagcctggccaacccttgcagccatgtcttggcctcaagtggaacaagggctccttgaggccagcagggttgggggagttggggtgggcctgagcctctttcctgctagagctcttggtcctccctgcctccaccacccatccctgctctgcagaacccctgggtgctgagtggcaggagccccagggttgtcccatctgggtatggctggctgggtcactaacctctgtgatctgcttccttcctttccagattatgcggatcaaacctcaccaaggccagcacataggagagatgagcttcctacagcacaacaaatgtgaatgcagaccaaagaaagatagagcaagacaagaaaatccctgtgggccttgctcagagcggagaaagcatttgtttgtacaagatccgcagacgtgtaaatgttcctgcaaaatgtgacaagccgaggcggtgagccgggcaggaggaaggagcctccctcagggtttcgggaaccagatctctcaccaggaaagactgatacagaacgatcgatacagaaaccacgctgccgccaccacaccatcaccatcgacagaacagtccttaatccagaaacctgaaatgaaggaagaggagactctgcgcagagcactttgggtccggagggcgagactccggcggaagcattcccgggcgggtgacccagcacggtccctcttggaattggattcgccattttatttttcttgctgctaaatcaccgagcccggaagattagagagttttatttctgggattcctgtagacacacccacccacatacatacatttatatatatatatattatatatatataaaaataaatatctctattttatatatataaaatatatatattctttttttaaattaacagtgctaatgttattggtgtcttcactggatgtatttgactgctgtggacttgagttgggaggggaatgttcccactcagatcctgacagggaagaggaggagatgagagactctggcatgatcttttttttgtcccacttggtggggccagggtcctctcccctgcccaggaatgtgcaaggccagggcatgggggcaaatatgacccagttttgggaacaccgacaaacccagccctggcgctgagcctctctaccccaggtcagacggacagaaagacagatcacaggtacagggatgaggacaccggctctgaccaggagtttggggagcttcaggacattgctgtgctttggggattccctccacatgctgcacgcgcatctcgcccccaggggcactgcctggaagattcaggagcctgggcggccttcgcttactctcacctgcttctgagttgcccaggagaccactggcagatgtcccggcgaagagaagagacacattgttggaagaagcagcccatgacagctccccttcctgggactcgccctcatcctcttcctgctccccttcctggggtgcagcctaaaaggacctatgtcctcacaccattgaaaccactagttctgtccccccaggagacctggttgtgtgtgtgtgagtggttgaccttcctccatcccctggtccttcccttcccttcccgaggcacagagagacagggcaggatccacgtgcccattgtggaggcagagaaaagagaaagtgttttatatacggtacttatttaatatccctttttaattagaaattaaaacagttaatttaattaaagagtagggttttttttcagtattcttggttaatatttaatttcaactatttatgagatgtatcttttgctctctcttgctctcttatttgtaccggtttttgtatataaaattcatgtttccaatctctctctccctgatcggtgacagtcactagcttatcttgaacagatatttaattttgctaacactcagctctgccctccccgatcccctggctccccagcacacattcctttgaaataaggtttcaatatacatctacatactatatatatatttggcaacttgtatttgtgtgtatatatatatatatatgtttatgtatatatgtgattctgataaaatagacattgctattctgttttttatatgtaaaaacaaaacaagaaaaaatagagaattctacatactaaatctctctccttttttaatttt

SEQ ID NO: 15765 - protein, 61 aa, Homo sapiens; identical to SEQ ID NO: 15763

SEQ ID NO: 15766 - DNA, 2450 bp, Homo sapiens
gtgaagcctagagaggatgaaagaaggggaggggatggggagtggtaagaacctaggatttgaattcccagcctggccaacccttgcagccatgtcttggcctcaagtggaacaagggctccttgaggccagcagggttgggggagttggggtgggcctgagcctctttcctgctagagctcttggtcctccctgcctccaccacccatccctgctctgcagaacccctgggtgctgagtggcaggagccccagggttgtcccatctgggtatggctggctgggtcactaacctctgtgatctgcttccttcctttccagattatgcggatcaaacctcaccaaggccagcacataggagagatgagcttcctacagcacaacaaatgtgaatgcagaccaaagaaagatagagcaagacaagaaaatccctgtgggccttgctcagagcggagaaagcatttgtttgtacaagatccgcagacgtgtaaatgttcctgcaaaatgtgacaagccgaggcggtgagccgggcaggaggaaggagcctccctcagggtttcgggaaccagatctctcaccaggaaagactgatacagaacgatcgatacagaaaccacgctgccgccaccacaccatcaccatcgacagaacagtccttaatccagaaacctgaaatgaaggaagaggagactctgcgcagagcactttgggtccggagggcgagactccggcggaagcattcccgggcgggtgacccagcacggtccctcttggaattggattcgccattttatttttcttgctgctaaatcaccgagcccggaagattagagagttttatttctgggattcctgtagacacacccacccacatacatacatttatatatatatatattatatatatataaaaataaatatctctattttatatatataaaatatatatattctttttttaaattaacagtgctaatgttattggtgtcttcactggatgtatttgactgctgtggacttgagttgggaggggaatgttcccactcagatcctgacagggaagaggaggagatgagagactctggcatgatcttttttttgtcccacttggtggggccagggtcctctcccctgcccaggaatgtgcaaggccagggcatgggggcaaatatgacccagttttgggaacaccgacaaacccagccctggcgctgagcctctctaccccaggtcagacggacagaaagacagatcacaggtacagggatgaggacaccggctctgaccaggagtttggggagcttcaggacattgctgtgctttggggattccctccacatgctgcacgcgcatctcgcccccaggggcactgcctggaagattcaggagcctgggcggccttcgcttactctcacctgcttctgagttgcccaggagaccactggcagatgtcccggcgaagagaagagacacattgttggaagaagcagcccatgacagctccccttcctgggactcgccctcatcctcttcctgctccccttcctggggtgcagcctaaaaggacctatgtcctcacaccattgaaaccactagttctgtccccccaggagacctggttgtgtgtgtgtgagtggttgaccttcctccatcccctggtccttcccttcccttcccgaggcacagagagacagggcaggatccacgtgcccattgtggaggcagagaaaagagaaagtgttttatatacggtacttatttaatatccctttttaattagaaattaaaacagttaatttaattaaagagtagggttttttttcagtattcttggttaatatttaatttcaactatttatgagatgtatcttttgctctctcttgctctcttatttgtaccggtttttgtatataaaattcatgtttccaatctctctctccctgatcggtgacagtcactagcttatcttgaacagatatttaattttgctaacactcagctctgccctccccgatcccctggctccccagcacacattcctttgaaataaggtttcaatatacatctacatactatatatatatttggcaacttgtatttgtgtgtatatatatatatatatgtttatgtatatatgtgattctgataaaatagacattgctattctgttttttatatgtaaaaacaaaacaagaaaaaatagagaattctacatactaaatctctctccttttttaattttaatatttgttatcatttatttattggtgctactgtttatccgtaataattgtggggaaaagatattaacatcacgtctttgtctctagtgcagtttttcgagatattccgtagtacatatttatttttaaacaacgacaaagaaatacagatatatcttaaaaaaaaaaaagcattttgtattaaagaatttaattctgatctcaaa

SEQ ID NO: 15767 - protein, 61 aa, Homo sapiens; identical to SEQ ID NO: 15763

SEQ ID NO: 15768 - DNA, 1620 bp, Homo sapiens
gctgggtcactaacctctgtgatctgcttccttcctttccagattatgcggatcaaacctcaccaaggccagcacataggagagatgagcttcctacagcacaacaaatgtgaatgcagaccaaagaaagatagagcaagacaagaaaaaaaatcagttcgaggaaagggaaaggggcaaaaacgaaagcgcaagaaatcccggtataagtcctggagcgttccctgtgggccttgctcagagcggagaaagcatttgtttgtacaagatccgcagacgtgtaaatgttcctgcaaaatgtgacaagccgaggcggtgagccgggcaggaggaaggagcctccctcagggtttcgggaaccagatctctcaccaggaaagactgatacagaacgatcgatacagaaaccacgctgccgccaccacaccatcaccatcgacagaacagtccttaatccagaaacctgaaatgaaggaagaggagactctgcgcagagcactttgggtccggagggcgagactccggcggaagcattcccgggcgggtgacccagcacggtccctcttggaattggattcgccattttatttttcttgctgctaaatcaccgagcccggaagattagagagttttatttctgggattcctgtagacacacccacccacatacatacatttatatatatatatattatatatatataaaaataaatatctctattttatatatataaaatatatatattctttttttaaattaacagtgctaatgttattggtgtcttcactggatgtatttgactgctgtggacttgagttgggaggggaatgttcccactcagatcctgacagggaagaggaggagatgagagactctggcatgatcttttttttgtcccacttggtggggccagggtcctctcccctgcccaggaatgtgcaaggccagggcatgggggcaaatatgacccagttttgggaacaccgacaaacccagccctggcgctgagcctctctaccccaggtcagacggacagaaagacagatcacaggtacagggatgaggacaccggctctgaccaggagtttggggagcttcaggacattgctgtgctttggggattccctccacatgctgcacgcgcatctcgcccccaggggcactgcctggaagattcaggagcctgggcggccttcgcttactctcacctgcttctgagttgcccaggagaccactggcagatgtcccggcgaagagaagagacacattgttggaagaagcagcccatgacagctccccttcctgggactcgccctcatcctcttcctgctccccttcctggggtgcagcctaaaaggacctatgtcctcacaccattgaaaccactagttctgtccccccaggagacctggttgtgtgtgtgtgagtggttgaccttcctccatcccctggtccttcccttcccttcccgaggcacagagagacagggcaggatccacgtgcccattgtggaggcagagaaaagagaaagtgttttatatacggtacttatttaatatccctttttaattagaaattaaaacagttaatttaattaaagagtagggttttttttcagt

SEQ ID NO: 15769 - protein, 85 aa, Homo sapiens
MRIKPHQGQHIGEMSFLQHNKCECRPKKDRARQEKKSVRGKGKGQKRKRKKSRYKSWSVPCGPCSERRKHLFVQDPQTCKCSCKM

SEQ ID NO: 15770 - DNA, 2037 bp, Homo sapiens
gctgggtcactaacctctgtgatctgcttccttcctttccagattatgcggatcaaacctcaccaaggccagcacataggagagatgagcttcctacagcacaacaaatgtgaatgcagaccaaagaaagatagagcaagacaagaaaaaaaatcagttcgaggaaagggaaaggggcaaaaacgaaagcgcaagaaatcccggtataagtcctggagcgttccctgtgggccttgctcagagcggagaaagcatttgtttgtacaagatccgcagacgtgtaaatgttcctgcaaaatgtgacaagccgaggcggtgagccgggcaggaggaaggagcctccctcagggtttcgggaaccagatctctcaccaggaaagactgatacagaacgatcgatacagaaaccacgctgccgccaccacaccatcaccatcgacagaacagtccttaatccagaaacctgaaatgaaggaagaggagactctgcgcagagcactttgggtccggagggcgagactccggcggaagcattcccgggcgggtgacccagcacggtccctcttggaattggattcgccattttatttttcttgctgctaaatcaccgagcccggaagattagagagttttatttctgggattcctgtagacacacccacccacatacatacatttatatatatatatattatatatatataaaaataaatatctctattttatatatataaaatatatatattctttttttaaattaacagtgctaatgttattggtgtcttcactggatgtatttgactgctgtggacttgagttgggaggggaatgttcccactcagatcctgacagggaagaggaggagatgagagactctggcatgatcttttttttgtcccacttggtggggccagggtcctctcccctgcccaggaatgtgcaaggccagggcatgggggcaaatatgacccagttttgggaacaccgacaaacccagccctggcgctgagcctctctaccccaggtcagacggacagaaagacagatcacaggtacagggatgaggacaccggctctgaccaggagtttggggagcttcaggacattgctgtgctttggggattccctccacatgctgcacgcgcatctcgcccccaggggcactgcctggaagattcaggagcctgggcggccttcgcttactctcacctgcttctgagttgcccaggagaccactggcagatgtcccggcgaagagaagagacacattgttggaagaagcagcccatgacagctccccttcctgggactcgccctcatcctcttcctgctccccttcctggggtgcagcctaaaaggacctatgtcctcacaccattgaaaccactagttctgtccccccaggagacctggttgtgtgtgtgtgagtggttgaccttcctccatcccctggtccttcccttcccttcccgaggcacagagagacagggcaggatccacgtgcccattgtggaggcagagaaaagagaaagtgttttatatacggtacttatttaatatccctttttaattagaaattaaaacagttaatttaattaaagagtagggttttttttcagtattcttggttaatatttaatttcaactatttatgagatgtatcttttgctctctcttgctctcttatttgtaccggtttttgtatataaaattcatgtttccaatctctctctccctgatcggtgacagtcactagcttatcttgaacagatatttaattttgctaacactcagctctgccctccccgatcccctggctccccagcacacattcctttgaaataaggtttcaatatacatctacatactatatatatatttggcaacttgtatttgtgtgtatatatatatatatatgtttatgtatatatgtgattctgataaaatagacattgctattctgttttttatatgtaaaaacaaaacaagaaaaaatagagaattctacatactaaatctctctccttttttaatttt

SEQ ID NO: 15771 - protein, 85 aa, Homo sapiens; identical to SEQ ID NO: 15769

SEQ ID NO: 15772 - DNA, 2244 bp, Homo sapiens
gctgggtcactaacctctgtgatctgcttccttcctttccagattatgcggatcaaacctcaccaaggccagcacataggagagatgagcttcctacagcacaacaaatgtgaatgcagaccaaagaaagatagagcaagacaagaaaaaaaatcagttcgaggaaagggaaaggggcaaaaacgaaagcgcaagaaatcccggtataagtcctggagcgttccctgtgggccttgctcagagcggagaaagcatttgtttgtacaagatccgcagacgtgtaaatgttcctgcaaaatgtgacaagccgaggcggtgagccgggcaggaggaaggagcctccctcagggtttcgggaaccagatctctcaccaggaaagactgatacagaacgatcgatacagaaaccacgctgccgccaccacaccatcaccatcgacagaacagtccttaatccagaaacctgaaatgaaggaagaggagactctgcgcagagcactttgggtccggagggcgagactccggcggaagcattcccgggcgggtgacccagcacggtccctcttggaattggattcgccattttatttttcttgctgctaaatcaccgagcccggaagattagagagttttatttctgggattcctgtagacacacccacccacatacatacatttatatatatatatattatatatatataaaaataaatatctctattttatatatataaaatatatatattctttttttaaattaacagtgctaatgttattggtgtcttcactggatgtatttgactgctgtggacttgagttgggaggggaatgttcccactcagatcctgacagggaagaggaggagatgagagactctggcatgatcttttttttgtcccacttggtggggccagggtcctctcccctgcccaggaatgtgcaaggccagggcatgggggcaaatatgacccagttttgggaacaccgacaaacccagccctggcgctgagcctctctaccccaggtcagacggacagaaagacagatcacaggtacagggatgaggacaccggctctgaccaggagtttggggagcttcaggacattgctgtgctttggggattccctccacatgctgcacgcgcatctcgcccccaggggcactgcctggaagattcaggagcctgggcggccttcgcttactctcacctgcttctgagttgcccaggagaccactggcagatgtcccggcgaagagaagagacacattgttggaagaagcagcccatgacagctccccttcctgggactcgccctcatcctcttcctgctccccttcctggggtgcagcctaaaaggacctatgtcctcacaccattgaaaccactagttctgtccccccaggagacctggttgtgtgtgtgtgagtggttgaccttcctccatcccctggtccttcccttcccttcccgaggcacagagagacagggcaggatccacgtgcccattgtggaggcagagaaaagagaaagtgttttatatacggtacttatttaatatccctttttaattagaaattaaaacagttaatttaattaaagagtagggttttttttcagtattcttggttaatatttaatttcaactatttatgagatgtatcttttgctctctcttgctctcttatttgtaccggtttttgtatataaaattcatgtttccaatctctctctccctgatcggtgacagtcactagcttatcttgaacagatatttaattttgctaacactcagctctgccctccccgatcccctggctccccagcacacattcctttgaaataaggtttcaatatacatctacatactatatatatatttggcaacttgtatttgtgtgtatatatatatatatatgtttatgtatatatgtgattctgataaaatagacattgctattctgttttttatatgtaaaaacaaaacaagaaaaaatagagaattctacatactaaatctctctccttttttaattttaatatttgttatcatttatttattggtgctactgtttatccgtaataattgtggggaaaagatattaacatcacgtctttgtctctagtgcagtttttcgagatattccgtagtacatatttatttttaaacaacgacaaagaaatacagatatatcttaaaaaaaaaaaagcattttgtattaaagaatttaattctgatctcaaa

SEQ ID NO: 15773 - protein, 85 aa, Homo sapiens; identical to SEQ ID NO: 15769

SEQ ID NO: 15774 - DNA, 1200 bp, Homo sapiens
gaggcggtgagccgggcaggaggaaggagcctccctcagggtttcgggaaccagatctctcaccaggaaagactgatacagaacgatcgatacagaaaccacgctgccgccaccacaccatcaccatcgacagaacagtccttaatccagaaacctgaaatgaaggaagaggagactctgcgcagagcactttgggtccggagggcgagactccggcggaagcattcccgggcgggtgacccagcacggtccctcttggaattggattcgccattttatttttcttgctgctaaatcaccgagcccggaagattagagagttttatttctgggattcctgtagacacacccacccacatacatacatttatatatatatatattatatatatataaaaataaatatctctattttatatatataaaatatatatattctttttttaaattaacagtgctaatgttattggtgtcttcactggatgtatttgactgctgtggacttgagttgggaggggaatgttcccactcagatcctgacagggaagaggaggagatgagagactctggcatgatcttttttttgtcccacttggtggggccagggtcctctcccctgcccaggaatgtgcaaggccagggcatgggggcaaatatgacccagagtttggggagcttcaggacattgctgtgctttggggattccctccacatgctgcacgcgcatctcgcccccaggggcactgcctggaagattcaggagcctgggcggccttcgcttactctcacctgcttctgagttgcccaggagaccactggcagatgtcccggcgaagagaagagacacattgttggaagaagcagcccatgacagctccccttcctgggactcgccctcatcctcttcctgctccccttcctggggtgcagcctaaaaggacctatgtcctcacaccattgaaaccactagttctgtccccccaggagacctggttgtgtgtgtgtgagtggttgaccttcctccatcccctggtccttcccttcccttcccgaggcacagagagacagggcaggatccacgtgcccattgtggaggcagagaaaagagaaagtgttttatatacggtacttatttaatatccctttttaattagaaattaaaacagttaatttaattaaagagtagggttttttttcagt

SEQ ID NO: 15775 - protein, 112 aa, Homo sapiens
MLLVSSLDVFDCCGLELGGECSHSDPDREEEEMRDSGMIFFLSHLVGPGSSPLPRNVQGQGMGANMTQSLGSFRTLLCFGDSLHMLHAHLAPRGTAWKIQEPGRPSLTLTCF

SEQ ID NO: 15776 - DNA, 1027 bp, Homo sapiens
accatcaccatcgacagaacagtccttaatccagaaacctgaaatgaaggaagaggagactctgcgcagagcactttgggtccggagggcgagactccggcggaagcattcccgggcgggtgacccagcacggtccctcttggaattggattcgccattttatttttcttgctgctaaatcaccgagcccggaagattagagagttttatttctgggattcctgtagacacacccacccacatacatacatttatatatatatatattatatatatataaaaataaatatctctattttatatatataaaatatatatattctttttttaaattaacagtgctaatgttattggtgtcttcactggatgtatttgactgctgtggacttgagttgggaggggaatgttcccactcagatcctgacagggaagaggaggagatgagagactctggcatgatcttttttttgtcccaaccggctctgaccaggagtttggggagcttcaggacattgctgtgctttggggattccctccacatgctgcacgcgcatctcgcccccaggggcactgcctggaagattcaggagcctgggcggccttcgcttactctcacctgcttctgagttgcccaggagaccactggcagatgtcccggcgaagagaagagacacattgttggaagaagcagcccatgacagctccccttcctgggactcgccctcatcctcttcctgctccccttcctggggtgcagcctaaaaggacctatgtcctcacaccattgaaaccactagttctgtccccccaggagacctggttgtgtgtgtgtgagtggttgaccttcctccatcccctggtccttcccttcccttcccgaggcacagagagacagggcaggatccacgtgcccattgtggaggcagagaaaagagaaagtgttttatatacggtacttatttaatatccctttttaattagaaattaaaacagttaatttaattaaagagtagggttttttttcagt

SEQ ID NO: 15777 - protein, 93 aa, Homo sapiens
MLLVSSLDVFDCCGLELGGECSHSDPDREEEEMRDSGMIFFLSQPALTRSLGSFRTLLCFGDSLHMLHAHLAPRGTAWKIQEPGRPSLTLTCF

SEQ ID NO: 15778 - DNA, 1444 bp, Homo sapiens
accatcaccatcgacagaacagtccttaatccagaaacctgaaatgaaggaagaggagactctgcgcagagcactttgggtccggagggcgagactccggcggaagcattcccgggcgggtgacccagcacggtccctcttggaattggattcgccattttatttttcttgctgctaaatcaccgagcccggaagattagagagttttatttctgggattcctgtagacacacccacccacatacatacatttatatatatatatattatatatatataaaaataaatatctctattttatatatataaaatatatatattctttttttaaattaacagtgctaatgttattggtgtcttcactggatgtatttgactgctgtggacttgagttgggaggggaatgttcccactcagatcctgacagggaagaggaggagatgagagactctggcatgatcttttttttgtcccaaccggctctgaccaggagtttggggagcttcaggacattgctgtgctttggggattccctccacatgctgcacgcgcatctcgcccccaggggcactgcctggaagattcaggagcctgggcggccttcgcttactctcacctgcttctgagttgcccaggagaccactggcagatgtcccggcgaagagaagagacacattgttggaagaagcagcccatgacagctccccttcctgggactcgccctcatcctcttcctgctccccttcctggggtgcagcctaaaaggacctatgtcctcacaccattgaaaccactagttctgtccccccaggagacctggttgtgtgtgtgtgagtggttgaccttcctccatcccctggtccttcccttcccttcccgaggcacagagagacagggcaggatccacgtgcccattgtggaggcagagaaaagagaaagtgttttatatacggtacttatttaatatccctttttaattagaaattaaaacagttaatttaattaaagagtagggttttttttcagtattcttggttaatatttaatttcaactatttatgagatgtatcttttgctctctcttgctctcttatttgtaccggtttttgtatataaaattcatgtttccaatctctctctccctgatcggtgacagtcactagcttatcttgaacagatatttaattttgctaacactcagctctgccctccccgatcccctggctccccagcacacattcctttgaaataaggtttcaatatacatctacatactatatatatatttggcaacttgtatttgtgtgtatatatatatatatatgtttatgtatatatgtgattctgataaaatagacattgctattctgttttttatatgtaaaaacaaaacaagaaaaaatagagaattctacatactaaatctctctccttttttaatttt

SEQ ID NO: 15779 - protein, 93 aa, Homo sapiens; identical to SEQ ID NO: 15777

SEQ ID NO: 15780 - DNA, 1651 bp, Homo sapiens
accatcaccatcgacagaacagtccttaatccagaaacctgaaatgaaggaagaggagactctgcgcagagcactttgggtccggagggcgagactccggcggaagcattcccgggcgggtgacccagcacggtccctcttggaattggattcgccattttatttttcttgctgctaaatcaccgagcccggaagattagagagttttatttctgggattcctgtagacacacccacccacatacatacatttatatatatatatattatatatatataaaaataaatatctctattttatatatataaaatatatatattctttttttaaattaacagtgctaatgttattggtgtcttcactggatgtatttgactgctgtggacttgagttgggaggggaatgttcccactcagatcctgacagggaagaggaggagatgagagactctggcatgatcttttttttgtcccaaccggctctgaccaggagtttggggagcttcaggacattgctgtgctttggggattccctccacatgctgcacgcgcatctcgcccccaggggcactgcctggaagattcaggagcctgggcggccttcgcttactctcacctgcttctgagttgcccaggagaccactggcagatgtcccggcgaagagaagagacacattgttggaagaagcagcccatgacagctccccttcctgggactcgccctcatcctcttcctgctccccttcctggggtgcagcctaaaaggacctatgtcctcacaccattgaaaccactagttctgtccccccaggagacctggttgtgtgtgtgtgagtggttgaccttcctccatcccctggtccttcccttcccttcccgaggcacagagagacagggcaggatccacgtgcccattgtggaggcagagaaaagagaaagtgttttatatacggtacttatttaatatccctttttaattagaaattaaaacagttaatttaattaaagagtagggttttttttcagtattcttggttaatatttaatttcaactatttatgagatgtatcttttgctctctcttgctctcttatttgtaccggtttttgtatataaaattcatgtttccaatctctctctccctgatcggtgacagtcactagcttatcttgaacagatatttaattttgctaacactcagctctgccctccccgatcccctggctccccagcacacattcctttgaaataaggtttcaatatacatctacatactatatatatatttggcaacttgtatttgtgtgtatatatatatatatatgtttatgtatatatgtgattctgataaaatagacattgctattctgttttttatatgtaaaaacaaaacaagaaaaaatagagaattctacatactaaatctctctccttttttaattttaatatttgttatcatttatttattggtgctactgtttatccgtaataattgtggggaaaagatattaacatcacgtctttgtctctagtgcagtttttcgagatattccgtagtacatatttatttttaaacaacgacaaagaaatacagatatatcttaaaaaaaaaaaagcattttgtattaaagaatttaattctgatctcaaa

SEQ ID NO: 15781 - protein, 93 aa, Homo sapiens; identical to SEQ ID NO: 15777

SEQ ID NO: 15782 - DNA, 1397 bp, Homo sapiens
agaaacctgaaatgaaggaagaggagactctgcgcagagcactttgggtccggagggcgagactccggcggaagcattcccgggcgggtgacccagcacggtccctcttggaattggattcgccattttatttttcttgctgctaaatcaccgagcccggaagattagagagttttatttctgggattcctgtagacacacccacccacatacatacatttatatatatatatattatatatatataaaaataaatatctctattttatatatataaaatatatatattctttttttaaattaacagtgctaatgttattggtgtcttcactggatgtatttgactgctgtggacttgagttgggaggggaatgttcccactcagatcctgacagggaagaggaggagatgagagactctggcatgatcttttttttgtcccacttggtggggccagggtcctctcccctgcccaggaatgtgcaaggccagggcatgggggcaaatatgacccagttttgggaacaccgacaaacccagccctggcgctgagcctctctaccccaggtcagacggacagaaagacagatcacaggtacagggatgaggacaccggctctgaccaggagtttggggagaagcagcccatgacagctccccttcctgggactcgccctcatcctcttcctgctccccttcctggggtgcagcctaaaaggacctatgtcctcacaccattgaaaccactagttctgtccccccaggagacctggttgtgtgtgtgtgagtggttgaccttcctccatcccctggtccttcccttcccttcccgaggcacagagagacagggcaggatccacgtgcccattgtggaggcagagaaaagagaaagtgttttatatacggtacttatttaatatccctttttaattagaaattaaaacagttaatttaattaaagagtagggttttttttcagtattcttggttaatatttaatttcaactatttatgagatgtatcttttgctctctcttgctctcttatttgtaccggtttttgtatataaaattcatgtttccaatctctctctccctgatcggtgacagtcactagcttatcttgaacagatatttaattttgctaacactcagctctgccctccccgatcccctggctccccagcacacattcctttgaaataaggtttcaatatacatctacatactatatatatatttggcaacttgtatttgtgtgtatatatatatatatatgtttatgtatatatgtgattctgataaaatagacattgctattctgttttttatatgtaaaaacaaaacaagaaaaaatagagaattctacatactaaatctctctccttttttaatttt

SEQ ID NO: 15783 - protein, 89 aa, Homo sapiens [sequence omitted]

SEQ ID NO: 15784 - DNA, 1604 bp, Homo sapiens
agaaacctgaaatgaaggaagaggagactctgcgcagagcactttgggtccggagggcgagactccggcggaagcattcccgggcgggtgacccagcacggtccctcttggaattggattcgccattttatttttcttgctgctaaatcaccgagcccggaagattagagagttttatttctgggattcctgtagacacacccacccacatacatacatttatatatatatatattatatatatataaaaataaatatctctattttatatatataaaatatatatattctttttttaaattaacagtgctaatgttattggtgtcttcactggatgtatttgactgctgtggacttgagttgggaggggaatgttcccactcagatcctgacagggaagaggaggagatgagagactctggcatgatcttttttttgtcccacttggtggggccagggtcctctcccctgcccaggaatgtgcaaggccagggcatgggggcaaatatgacccagttttgggaacaccgacaaacccagccctggcgctgagcctctctaccccaggtcagacggacagaaagacagatcacaggtacagggatgaggacaccggctctgaccaggagtttggggagaagcagcccatgacagctccccttcctgggactcgccctcatcctcttcctgctccccttcctggggtgcagcctaaaaggacctatgtcctcacaccattgaaaccactagttctgtccccccaggagacctggttgtgtgtgtgtgagtggttgaccttcctccatcccctggtccttcccttcccttcccgaggcacagagagacagggcaggatccacgtgcccattgtggaggcagagaaaagagaaagtgttttatatacggtacttatttaatatccctttttaattagaaattaaaacagttaatttaattaaagagtagggttttttttcagtattcttggttaatatttaatttcaactatttatgagatgtatcttttgctctctcttgctctcttatttgtaccggtttttgtatataaaattcatgtttccaatctctctctccctgatcggtgacagtcactagcttatcttgaacagatatttaattttgctaacactcagctctgccctccccgatcccctggctccccagcacacattcctttgaaataaggtttcaatatacatctacatactatatatatatttggcaacttgtatttgtgtgtatatatatatatatatgtttatgtatatatgtgattctgataaaatagacattgctattctgttttttatatgtaaaaacaaaacaagaaaaaatagagaattctacatactaaatctctctccttttttaattttaatatttgttatcatttatttattggtgctactgtttatccgtaataattgtggggaaaagatattaacatcacgtctttgtctctagtgcagtttttcgagatattccgtagtacatatttatttttaaacaacgacaaagaaatacagatatatcttaaaaaaaaaaaagcattttgtattaaagaatttaattctgatctcaaa

SEQ ID NO: 15785 - protein, 89 aa, Homo sapiens [sequence omitted]

SEQ ID NO: 15786 - DNA, 406 bp, Homo sapiens
cagggatgagcagcagccgaggggttttaaacactgagcggctcagtcagatagacttttccataggtgcctggcaacagtatgggaggcagagaggccggtagaggctgttgtggtcttccaggaggaattgtgctggtggtggggaagcacctttggtgactggcagtgccggccattgcaaggtctcagcctcaggcagcttttggtctagtaagtgctcctttcccaatcactgaccacgtgccgacccctacattggttaacactgaatctgcacagcagccctgggagtacctgtagccacctgacagactctagaacagtgctacccaacagaaatatagtgtgagccacttatggagtttaaaattttccaggcaccagagttcgaaagctataaaaa

SEQ ID NO: 15787 - protein, 32 aa, Homo sapiens
MSSSRGVLNTERLSQIDFSIGAWQQYGRQRGR

SEQ ID NO: 15788 - DNA, 2204 bp, Homo sapiens
atctgcctccttctgtgcctgcctggctgcccctaccctggggctccctcctagcccccacctcacctactggctcactgagacagagccaaacatgaaagggaaggtgacggcctggccatagggcccaggaaaatgcagatgctgacgatacgacagtgaatacaacatgaaaaaacaagcacacttctcacccctatggagctttattctggtcaggcagaaggagaaggaaatgtaaacatgcaaggagcaactttttggcactcccattttgcagaagaggaaacagcctgcctaggtctgctgattcctgtcctggtgagctcactgccccatactcccacccttgtacacaaatggaggtgctcttacagaagttctgagcctgattctgctgctgcttctccagctaaccttaggatgtgtccccatcgttaggtgatgcatgactctactctgacatcctctccagctttcatctgtttttatttttatgatgtgctgaagacaggacattgtatctgctcttccctctgtaagtcttgccatgccctttggccaaaggcaactcaaatatggacttcctactgtcaccatcaaggtcactatgatctaagtgttttttagggcttgtgcagagaaggaagaagatgccccctgccttctctgctccccatcatgtaggaaagaagacacaggctgagccccgggaggagagatcaaagctttggatctgaaagagtggttccagcccagcagcatgaacatggcctgggaatgtgttagacatgcaggttctcaggccccaccccacacctgctggatcaaaaactctgatttctgcacttgagcatacatcactcaagtttgagaaccactgcattagagaacagaaaccctcaaccatagcatgcaggaacagcgaagccatgaagacacatccaggtctgaggaagtcattttagcctggaaaggaaaagaaggagggcatcatcggcataggcctgggagccccccacactcagcactcctgaaagcgcacagacagggaggtctggggtctggaaaaacaacaggaatcttgggaattataaggctgagaaggaggtggggaggaggcaacgtgcctggctgctgctcagtcctcctcactggcagggggtcccagcagccttgttccccaggcccatgctgaatttgctagtgatgctggcattcccagctgtggttcggcaccaaggtccagtgacccccctagacccagcccagggccatttccctaatagagacctaaccagagggccagagtttggggtgctgacgcattgactatgtaagggccccgacccactaccccatccactgtcctccctgtgctgggattacaagcgtgagccaccgcaccctgcctgaatcaacatattgaaggaatatgcagctgaccttagcagagactttcaggagccttttgctggctgtagaccagtctagaccatatggtgggctggcttctcccaacaaactccttgacagactcaggcaggtataggggagaggggcttgaaggccaaatgatcccccaagaaactccataacagacttctctgcccaaacaaatttgagaaatgatatgttcaaatgaaacacacactctgttggtgaggctgaggaaacaggctcaaactcagctggtggcccagtgactgggaccaccccttaagggggacaacctgatgatatctttcaaaattaaaaatgcacacggtctttgacccagcaattctactccctggaatttttcctgttgatgcactcccacaaggagcaaatgacgtgtggggaaggctatttgtttgcagcattgtttataataataaaagtctggaaacagcccagctctctcaaaaagggtctggcaaaataacctcaggaggagcagcgaacacttattgagtgcttactgcacaccaggcactgtcctaagccatttacaagctttatcttattgaatctccacaaaatgcttcaaggtagatgatgctgttatctttggatcacaaatgaggaaactgagtcactcagacattgagtaactggctcaacattaaacaactggcttgaacgagagcattctgcctccaaagactatgctcttaaccaccttattatacaatctcttccaaataaacatttgaaacatc

SEQ ID NO: 15789 - protein, 80 aa, Homo sapiens
MELYSGQAEGEGNVNMQGATFWHSHFAEEETACLGLLIPVLVSSLPHTPTLVHKWRCSYRSSEPDSAAASPANLRMCPHR

SEQ ID NO: 15790 - DNA, 887 bp, Homo sapiens
aatcatctgcctccttctgtgcctgcctggctgcccctaccctggggctccctcctagcccccacctcacctactggctcactgagacagagccaaacatgaaagggaaggtgacggcctggccatagggcccaggaaaatgcaggtatcattaacagcctggagcactgtggcctgtccactctcaaccctctgctgcccaccccttcctggaatagaccccaggccacatacagagggggcaagcccaaggtatgataccagcagggccaagtggactgtccagatgggtaacgggggcctgccttcctctggcctccacataggggccgcaggtgttcacatggttggaaatgggagggccaatgctgttcataggccgctgtctggtccacaggactcaactggccctccgaacgctatcccactttccagccaggattgaaggagatcccatcttgggtctaaaggaatgggggtgaagactgcatcttgtcgttccagttccaccccattctggcatgggaagcatgtgtgggcttctactctatgggagattcatagcctcaatccttaaggaattctcaatctgaaaggaaaacacaaaccctgacctcagggagctcccagtttgacagtggagacagagaggccctgcatcaagtagaaaaacaacccccactgctctcaagcacacagcaatgaagatatgtatccttggtgctacaggcaaatgctgacgatacgacagtgaatacaacatgaaaaaacaagcacacttctcacccctatggagctttattctggtcaggcagaaggagaaggaaatgtaaacatgcaaggtcaggtactgctgtgaagcaaaataaagctgtgggtactgtgcg

SEQ ID NO: 15791 - protein, 101 aa, Homo sapiens
MQVSLTAWSTVACPLSTLCCPPLPGIDPRPHTEGASPRYDTSRAKWTVQMGNGGLPSSGLHIGAAGVHMVGNGRANAVHRPLSGPQDSTGPPNAIPLSSQD

SEQ ID NO: 15792 - DNA, 394 bp, Homo sapiens
tggccaggcaccaatcatctgcctccttctgtgcctgcctggctgcccctaccctggggctccctcctagcccccacctcacctactggctcactgagacagagccaaacatgaaagggaaggtgacggcctggccatagggcccaggaaaatgcaggtatcattaacagcctggagcactgtggcctgtccactctcaaccctctgctgcccaccccttcctggaatagaccccaggccacatacagagggggcaagcccaagccaggattgaaggagatcccatcttgggtctaaaggaatgggggtgaagactgcatcttgtcgttccagttccaccccattctggcatgggaagcatgtgtgggcttctactctatgggagattcatagc

SEQ ID NO: 15793 - protein, 40 aa, Homo sapiens
MQVSLTAWSTVACPLSTLCCPPLPGIDPRPHTEGASPSQD

SEQ ID NO: 15794 - DNA, 470 bp, Homo sapiens
catccttcctgaccagtccaggtggctgtgctcctgcagtctcctccctggtctcgcacactttgacttccttactcaggaggcattgtgaagtctccccgcgatgccactccacctcctctgggattctctgccactcaagtgctgggacgggaaggaggcaccctgagtttattgtgtgagttgaagtggaaggtgatgaatggcggcttcccttggacaacagatctggccttggagtgaaaggaggaagaggctgagtgcagaatgagagatccatgtagccaccactgagaacttcagaccagaagagacaagcagagatactgcaacgcactcatccagagcagaggaaccctattttgagtttacctataggaccttataacaggcaaacatatgatgtcttcatagtattagaaataatgaaatgaaggactatatcagtgacctcctgaaaggttaactgg

SEQ ID NO: 15795 - protein, 59 aa, Homo sapiens
SFLTSPGGCAPAVSSLVSHTLTSLLRRHCEVSPRCHSTSSGILCHSSAGTGRRHPEFIV

SEQ ID NO: 15796 - DNA, 747 bp, Homo sapiens
gcaaaaaagcagagttaggcggtgaggtgggttaaatacttcaccataaaaagttccagaaacttggatctgaatgggggcctttgaaatatttcagcctgaccttttcatgtacagatgagaaaactgtgatccagacctggccagtgacttgctaagggtcacacagctaagtaacagcaaaggtagaacgcagggctccagtccctgccatgattccccaacttggatctagtaatgctctctatagatgagacgacagccttctcagcttctcggtccatgggactataaaatggaatgttgggcttggcacatcacaatgcaattgtctatttacaagtttattcccagtctccaatggaggtgaatgccccaaggatggggaccatgacttcctcatctttgtcactgggtaccttccacaaggcctgacacatagcagatcttcaggtgcaagagattcagactctttgtgctctccttcagcaaggcacaggttgaactcaggaaaagtaagtcagagattaaataaatgtcttcatataaaggtgtgagtttacaaagaagaatcaaatgaggaacccaagcaactgttgctttcacataacttggaggtttctaaggcagtgtttctcaatgtcaagatgtcacgtttcaaaagacaacctgaattctcagatgatttcaatgcaagattaattttcacttgcctccattttacaaataaataaatgccatactgtg

SEQ ID NO: 15797 - protein, 44 aa, Homo sapiens
MLGLAHHNAIVYLQVYSQSPMEVNAPRMGTMTSSSLSLGTFHKA

SEQ ID NO: 15798 - DNA, 601 bp, Homo sapiens
ctcatctatagagagcattactagatccaagttggggaatcatggcagggactggagccctgcgttctacctttgctgttacttagctgtgtgacccttagcaagtcactggccaggtctggatcacagttttctcatctgtacatgaaaaggttttcagcttctcgtgagtgactgggaaccacacttaccctatgtccacacaaccacctggagccgagtagaggtggctcctgctaaaaatgacatctcatgtctgtccaggtcctggtcctccattccactcaggggcagggcctttcttcatgtcctggttgacccagaggccccgagtctgtggtctgggttcccctgtttccttaggctgagccagttgtagccacagaactcaattctcctccacacccgaagctgctcggaaatgtccttccagcattacctgcaccaatggtaataggcagctatgctcactgggaaagaaaatctgaacaagacaaatggaacctctcctgaggcaaatctaccccagtgggttgaagatggaattgtaatttggagacagaagaaaagaaaaaaataataaacagcagcacgattccca

SEQ ID NO: 15799 - protein, 41 aa, Homo sapiens
MTSHVCPGPGPPFHSGAGPFFMSWLTQRPRVCGLGSPVSLG

SEQ ID NO: 15800 - DNA, 674 bp, Homo sapiens
tcatcgaggaacaatatggcatctgcaaggtgaaaaaagagcgataacaggagatgccgcaaagtgtggcttccagacacaagagtgtgctgggaggagagctgaggaggatcccatccagaatatcatgttacatttagtcatcatgtctccctgagctcttcttggctgaccatttctcagtctttctttgtttttcacgaccttgaagagtactggccaggtgttttgcaatacacccctcaatttgggtgtgacatattctcttgattagactagagttatgggtttaggtgacaaccacagaggtgaagcacccttctctttgtaccataccagggagtacatgctatgaacaggacttatcactgctgatgtcacttgatcacctggccaaggtagtgtttgccaggtgacttgtaattctctgctgtaaagcaattccctgcatcccttaccctcaccacactctattctttggaagcgagtggctatgtgcagtctccactcaaggaagagggagctccttgtcctcgtggaggaagtatctacacaggatttggaattcctctgcagaagatgggtctcttctccacagttatttgtttattctgtcatgtatttatatcagtacggactcgtggatatttatattagactttggcttataatcc

SEQ ID NO: 15801 - protein, 59 aa, Homo sapiens
MCSLHSRKRELLVLVEEVSTQDLEFLCRRWVSSPQLFVYSVMYLYQYGLVDIYIRLWLI

SEQ ID NO: 15802 - DNA, 735 bp, Homo sapiens
cccggtagcagaaggaacagggatgggaccagtcctggttgaatactcacatccaggtggccacagcatgacataggcttgagtgaactgagagaaccagcctggatggcagagcttttgtttcagctcacctgcactgaagctgtttcccaagaggatgacccgggtgcctgcctggctaagtaacaagcaaacatttcggagcctaagtttgggaaagagcctgaaggcccctacaccctgaagcaacattccaagccttgctgctcacaatgcggtcccgggaccagcggcagcagcagcagcccaggacgcttgttagaaatgcggcacctccggccccacttcagacgttctgaacccaaatctgcattttatcacgatcccaggtgattcatgtgcccgttagagtgagcgaagccctggattagagaacagaaattagacgtgacccttcctttgacaggaatttatcaccaggctctatctcaagaactgtgagaattcggttcagatgtttgtgataactctgcagcagtaactgactagcgtggtggttctcttccctgactgggcgttggaatcagcgagggaagttttaaaagatgttgatgtgcagaatttacccaagaggttgtgattcaatgggtgtctgggaaggggctgggacatctgtgtttacttagagttccccaggtgattctactgtgcagccagggctaagaggccctgggg

SEQ ID NO: 15803 - protein, 36 aa, Homo sapiens
CAEFTQEVVIQWVSGKGLGHLCLLRVPQVILLCSQG

SEQ ID NO: 15804 - DNA, 1582 bp, Homo sapiens
atctcgctctgtcctgctaagaatctgcctgcctgagtgatgcagccaggctcccttgttccctggggcaaggaaccagtagagggatagggaatcacagtgtttcccggctgcaagggcccttggagatggttttacagatgaggaagcagagtccagagaaaggaagtgatctgctgggaaccactgtacttttcacacaagcaactttccgggcatctgctatgtgctgtccacaggatggcgaggggtcctatctccagtaatggtatctgcaaaggagtgcagctcccagcctgctatctgcaggagcccgagtggggaagcctgtgtagtctcaggtctcagccttgactttcacggtgtgactgtggtgtctcaggactctgcgacccaggatcatcattgtgaccatcttcctagtcttcactgcttcctttacacctcaattctgaggacctgctctgagccgcacacggttctgggctctaggaatggcggaggacttgggtgccacgagagcaccaggtagtagctccagctcagcctcccctaaccctgactcaaacaaaaccatcagatgcatcccctaccactatctatctgtctgaggattctcagaacctttccactggtgggaatgtaaagtgatgcagccctgcggaaagaagtttggccattcctcaaaagtatattatatagaattactatatgacccggcaactcccctcctaggcatatgcccaaaagaattgaaagcaaggactcaaacaaatacttgggcgtacatgcttataggagcattattcacactagccaaaggtgggcacagttgtccatcagcagatgaatggctacacaaggtgtagtatatacatacaaagaaatactactattcagccataaaaaggaatggaattctgatacatgcaacaacatggatgaacttcagaaacatgctaagtttctaagccaagctaacatgctaagaagccagacactgaaggtcacatattgtatgattctgcttatatgaaacatctggaaagagacagaaagcacatcagtgactgccagggcctgggatgaggagaacttgggagtgattgcttcgtgggcatgagttttccctttggggtgaagaaaatgttctgcaactaaatagaggcagcagatgcatgacactgtgaatgtactaagtgctactgaattgtgtttaaaatggttaattttatattatgtgaatttcacctctaagaatttttttttctttttttctttttttttttttgagaccaagtctcactctgtcacccagactggagtgcagtggtgcaatcttggctcactgcaacctctgcctcctgggttcaagtgattctcctgcctcagcctcccaagtagctgggactacaggtgcccgataccacaccacacctggctaattttcgtatttttagtagatatggggttttgccatgttggccaggctggtcttgaactcctgacctcatgtgatctgcccacctcagcctcccaaagtgctgggattacaggtatgagccaacatgcctggcctaag

SEQ ID NO: 15805 - protein, 45 aa, Homo sapiens
MVLQMRKQSPEKGSDLLGTTVLFTQATFRASAMCCPQDGEGSYLQ

SEQ ID NO: 15806 - DNA, 395 bp, Homo sapiens
tttttgcattagactctccatgggctccatagactctcctgtaccttacgactaggcacaggagcgtttccccggtgaaatggagaagaggacacttggtcttttcaactttactaggagggctcctttcttcccagtccaaacatatgaagctcatttctgccacccttcctagaaaactggttcctgacagagacatgtggaaaggttactacatgaagagctgggactggaatacaggttttctatgttcacctggggatagcttttccatcatccctcctgagtctgtgaggtatcccagtttttaagccagaactttgaaaccagaagtaaatggttaagtttatctgtctatgcctatgtgtattctagccaaataaaccatgacactt

SEQ ID NO: 15807 - protein, 54 aa, Homo sapiens
MKLISATLPRKLVPDRDMWKGYYMKSWDWNTGFLCSPGDSFSIIPPESVRYPSF

SEQ ID NO: 15808 - DNA, 483 bp, Homo sapiens
tctgagccagttccagcccggcccagatgttggcccctgacaactagctgtggctggtgcggagggaggagcgagggaagaggggcagatcgaggctgccagaaacatatgaagctcatttctgccacccttcctagaaaactggttcctgacagagacatgtggaaaggtatctgcacaagaaaaagtgaaaacatatgtccaagcaaggattgtttacaaatgtgcatagcagttttgttaataatagccccaaactggaaacaatccaaatattcatcaacagacggatacagtgtagtatagtgaaacaatggactagcattcaactaaaaggagcaagctactaatacatgtagcaatgtgcataaatcgcaaaaactatgttgtgtacaaggcaaacacaaatgagtacatactatatgatcccatgtatataaaattctggaaaatgcaaactaatataaagtgacacaacctaaa

SEQ ID NO: 15809 - protein, 65 aa, Homo sapiens
MKLISATLPRKLVPDRDMWKGICTRKSENICPSKDCLQMCIAVLLIIAPNWKQSKYSSTDGYSVV

SEQ ID NO: 15810 - DNA, 2524 bp, Homo sapiens
acttctggggcagccgtgagcagcgggcacacgggcagccacgaaagcagcagcgagggtggtgcaaacacctcaaaactacaccgaatccagtagcgcctggcgcccccggcgcgcaaggccgcctctactccgcctcatctttgtcccaagtcctttcacagtctgccttcctcaaacggcccgatgcgcccccgtctttgccggagtaagcagaccgccagcagccggcccgcaggtcagtcgaccctctctggatgcaggtcgccgggaaaacccggagcggagcatccctcgggccgggaaacgccctcggcgcgcacccactggcgcgcatgctcagtccgcgcggcggctgcgagtaggaagctccgcgcggcggcgggggcggcgacggcgactggcgggtgggagtggaggcaccggctggcgggcgggggtacagggacggggcaggggctcccgctccaggttccttgaagcacttccgaccgcgaagcccggcgcgagaagcgagctaacccaagagccaacaacgagcgcggagagggcagcggactgagcggagccgccggccagagcgggctcggagcccgggtctccgccgctcgggacccggctaggcggcggcgggggcggcgatgttccactgcatccccctgtggcggtgcaaccgtcatgtggagagcatcgacaagcgccactgctcgctggtctacgtccccgaggagatctaccgctatgcccggagcctggaggagctgctgctggacgccaaccagctccgcgagctgcccgagcaatttttccagctagtcaaattacgaaagcttggacttagtgataatgaaattcagcggctccctccagaaatagcaaacttcatgcagctggtggaactagatgtgtctcgaaatgagattcctgaaattccagaaagcatttcattctgtaaagcactgcaggtagctgacttcagcggaaacccactgactaggttgccagaaagctttcctgaattacagaatttaacatgtctttctgtaaatgacatctcactacagtctctacctgaaaatattggcaatctttataacctggcttcactggaactgagagagaatcttcttacatatcttcctgactctcttacccagctgcgaagactagaagaacttgatttaggaaacaatgaaatatataatttgccagaatcaattggagccctcttacatctaaaagatctctggttggatggaaatcaactgtcagaattacctcaggaaataggaaatctgaagaacctgctgtgtttagatgtctctgaaaacaggttggaaagacttcctgaagaaatcagtggcctgacttcattaacggatttagtcatttcccagaacttattagaaacgattccggatggcattggaaaactaaagaaactgtcaatcttgaaggtggatcagaatagactcacacagttgcctgaagcagttggggaatgtgaaagtctcactgagttagttcttacagaaaatcagctcctgaccctgcctaaaagcattggaaaactaaagaagttgagcaacttgaatgcagacagaaataaattagtgtccttaccaaaagaggtatgtgcttttagagaaatcacatgataataattatgaagaaataataataatacataagggatcaaaaatgtcaaatgctttgaaaagacgcatgtgttgttttttaaaggtgtgaactctaaatctgtgagtatagagccaactggaggaattatgtcaaagaatgatcatcagtaacattaaggagagttggaaaaggtgaatttataggattttaaatgggagaaagaaagagattgacattttgggtttgatatacagagaatggtgacaccattggcagaaattgataatttgggagtttgacagaggaagtggatgcctttgggtttgatttttgaatttaatgtgaaattaagctccatcccataagcaattggaattataaaaattgatcttgatgcaaccatatttctgggcagagatttacattgggccatgctcatgtcttggatgaggttgaacaaactgttcacaaaggcatacacatagaggaaggtgaatgggaagctaaagccagcttcctaggactttttttttggttagtagtctaagcacgagaaaatgagacatcaccatctgttgtggagagtagctgtatggactgagaggcatttaaattctggcaagggaggtggaaatgctgacaatgaggaggaagcttatagtgggtcaaacaaggaggtgtctagtgtgttgtttaaaaagaaggcttacaattagccaggcgtggtggcgggcgcctgtagtcccagctactcgggaggctgaggcaagagaattgcctgaacccgggaggctaaggttgcagtgagccgagaccacgccactgcactccagcccgggtgacagagcgagactctatctcaaaaaaaaaaaaaaaaaaaaaa

SEQ ID NO: 15811 - protein, 338 aa, Homo sapiens
MFHCIPLWRCNRHVESIDKRHCSLVYVPEEIYRYARSLEELLLDANQLRELPEQFFQLVKLRKLGLSDNEIQRLPPEIANFMQLVELDVSRNEIPEIPESISFCKALQVADFSGNPLTRLPESFPELQNLTCLSVNDISLQSLPENIGNLYNLASLELRENLLTYLPDSLTQLRRLEELDLGNNEIYNLPESIGALLHLKDLWLDGNQLSELPQEIGNLKNLLCLDVSENRLERLPEEISGLTSLTDLVISQNLLETIPDGIGKLKKLSILKVDQNRLTQLPEAVGECESLTELVLTENQLLTLPKSIGKLKKLSNLNADRNKLVSLPKEVCAFREIT

SEQ ID NO: 15812 - DNA, 4102 bp, Homo sapiens
acttctggggcagccgtgagcagcgggcacacgggcagccacgaaagcagcagcgagggtggtgcaaacacctcaaaactacaccgaatccagtagcgcctggcgcccccggcgcgcaaggccgcctctactccgcctcatctttgtcccaagtcctttcacagtctgccttcctcaaacggcccgatgcgcccccgtctttgccggagtaagcagaccgccagcagccggcccgcaggtcagtcgaccctctctggatgcaggtcgccgggaaaacccggagcggagcatccctcgggccgggaaacgccctcggcgcgcacccactggcgcgcatgctcagtccgcgcggcggctgcgagtaggaagctccgcgcggcggcgggggcggcgacggcgactggcgggtgggagtggaggcaccggctggcgggcgggggtacagggacggggcaggggctcccgctccaggttccttgaagcacttccgaccgcgaagcccggcgcgagaagcgagctaacccaagagccaacaacgagcgcggagagggcagcggactgagcggagccgccggccagagcgggctcggagcccgggtctccgccgctcgggacccggctaggcggcggcgggggcggcgatgttccactgcatccccctgtggcggtgcaaccgtcatgtggagagcatcgacaagcgccactgctcgctggtctacgtccccgaggagatctaccgctatgcccggagcctggaggagctgctgctggacgccaaccagctccgcgagctgcccgagcaatttttccagctagtcaaattacgaaagcttggacttagtgataatgaaattcagcggctccctccagaaatagcaaacttcatgcagctggtggaactagatgtgtctcgaaatgagattcctgaaattccagaaagcatttcattctgtaaagcactgcaggtagctgacttcagcggaaacccactgactaggttgccagaaagctttcctgaattacagaatttaacatgtctttctgtaaatgacatctcactacagtctctacctgaaaatattggcaatctttataacctggcttcactggaactgagagagaatcttcttacatatcttcctgactctcttacccagctgcgaagactagaagaacttgatttaggaaacaatgaaatatataatttgccagaatcaattggagccctcttacatctaaaagatctctggttggatggaaatcaactgtcagaattacctcaggaaataggaaatctgaagaacctgctgtgtttagatgtctctgaaaacaggttggaaagacttcctgaagaaatcagtggcctgacttcattaacggatttagtcatttcccagaacttattagaaacgattccggatggcattggaaaactaaagaaactgtcaatcttgaaggtggatcagaatagactcacacagttgcctgaagcagttggggaatgtgaaagtctcactgagttagttcttacagaaaatcagctcctgaccctgcctaaaagcattggaaaactaaagaagttgagcaacttgaatgcagacagaaataaattagtgtccttaccaaaagagatcggcgggtgctgcagcctcactgtgttctgtgtacgtgacaacagactaactcggatacctgcagaggtgtcacaggcaacagaacttcatgtcctggatgtggcagggaacaggttgctgcatctacctttatccctgactgccttgaagttgaaggctctgtggctatctgacaaccagtcccagcccctgcttacattccagacagacacagactacaccacaggagagaagattttaacctgtgtcttacttcctcagctgccttctgaacctacttgtcaagagaatctgcctcgctgtggtgcactggagaacttggtaaatgatgtctctgatgaagcctggaacgagcgtgctgtcaacagagtcagtgcgatccgatttgtggaggatgagaaagatgaagaagacaatgagacgagaacacttctaaggcgagccactccacacccaggggagttaaagcacatgaaaaagacagtggagaatttacggaatgacatgaatgctgctaaaggactggactcaaacaaaaacgaggtcaatcatgccattgaccgagtgaccacttctgtgtagagtttcacctccaagttttacctcctgtgtcttcctctgctgtcgagacgttcctgtctgcttcccgggagcctcacgtgctccttgtcctaaccagcccccgcgcgccatcttcccgtggagtgtggggaagctgctgtctcccaggaagtgccttactcatcccgcaaccagtcagcgcaccagtggtctcccggtgtgattttttttttttttaatttcagttgtttgtaataagtagaatacactactgtaaacatacgacctttgtttttgtcttatgttggggtaaaggaaagcaggaaggggaatttttatcctcctcccttccgtaaagtgctgggatattttgaatcccccaagttcccttggacctactgatgagagatagttttatgtatggggaaaaatggatactttttaaaccttttttggcagctcagatggtgtaaattttaaaattttgtataggtatttcataacaaaaatatgtatttcttttttgttattttatcttgaaaacggtacatattttagtatttgtgcagaaaaacaagtcctaaagtatttgtttttatttgtaccatccacttgtgccttactgtatcctgtgtcatgtccaatcagttgtaaacaatggcatctttgaacagtgtgatgagaataggaatgtggtgttttaaagcagtgttgcattttaatcagtaatctacctggtggatttgtttttaaccaaaaagatgaattatcaatgatttgtaattatatcagttgattttttttgaaaagatgaaccaaaggatttgactgctaatattttattccttacactttttttctgaataagtctctcataatgagtgcagtgtcagactgtgcctactctgatggtatgtgccatttgtaaaataaaatagagcagaaaaacacaaaaagagaacactggttcagacattcagtgggcaagtaaattatggactgcaaaataatgatttttattcaagaaagctttaaaagttttatatccagatatacaaccacaataaagcaaaataacctactatcaaaatagaaatgttgctatctttataagtgcaatttaatttgtaaatagagtttgaatcaaagtatcacaaaatactgcttcaagatttaattttaaatctgctaatttaagggatattgggaaaagttttggtgtgtttctgttgatttcttttttgtatgctgtgataaaagagaaatgaaaagtgccagtcactgtgtggtgtctaggaaaatcatatatatttttttctccaagaaataaattcatcctggacattggccatacagctttttaaaattattactttgtatgttcaagtgatagcaggtagccaaattctttgacagtgtgctctggtctgttaaatatctaaattacccgtcagttgtgagtgacctcctgtgggacttgcattcacatggggcagagcccagaattgcctttgactctggctagtaattttgggttgtggctatctggccaattggactccttataaacccgtcttcaaccaaccaaatacaatacttttttttacttctatacatttacttattgggttcacttagctttttagtctgtgtgtatgtaaatatgtgtgtattttaaaaactatttatggagctgaaagtacataacacataagtgagtttcggctggtcagttttataccttgttccctaatctgtgcataccaattttcttttctctgttttaagatttttgacatcctctattttgttttaagcttataaagataatgccactatctcatgggctgattatatataagcaaattggttttatttaatgagaattgtcttgacgtggaagaaca

SEQ ID NO: 15813 - protein, 524 aa, Homo sapiens; identical to SEQ ID NO: 1806

SEQ ID NO: 15814 - DNA, 1051 bp, Homo sapiens
taacattttgcagagatttttatgaacatatggggctgcgttttgtaagatttaaattaatgattgttggtcatcagtgagaccggtgagttatgtggtataagtttatgcatcctttttatactgtttggtaaacaaggtactctgatcctactccatctcccctagaaaactggaaaaaagatgtattttctttctcaccatagatcggcgggtgctgcagcctcactgtgttctgtgtacgtgacaacagactaactcggatacctgcagaggtgtcacaggcaacagaacttcatgtcctggatgtggcagggaacaggttgctgcatctacctttatccctgactgccttgaagttgaaggctctgtggctatctgacaaccagtcccagcccctgcttacattccagacagacacagactacaccacaggagagaagattttaacctgtgtcttacttcctcagctgccttctgaacctacttgtcaagagaatctgcctcgctgtggtgcactggagaacttggtaaatgatgtctctgatgaagcctggaacgagcgtgctgtcaacagagtcagtgcgatccgatttgtggaggatgagaaagatgaagaagacaatgagacgagaacacttctaaggcgagccactccacacccaggggagttaaagcacatgaaaaagacagtggagaatttacggaatgacatgaatgctgctaaaggactggactcaaacaaaaacgaggtcaatcatgccattgaccgagtgaccacttctgtgtagagtttcacctccaagttttacctcctgtgtcttcctctgctgtcgagacgttcctgtctgcttcccgggagcctcacgtgctccttgtcctaaccagcccccgcgcgccatcttcccgtggagtgtggggaagctgctgtctcccaggaagtgccttactcatcccgcaaccagtcagcgcaccagtggtctcccggtgtgattttttttttttttaatttcagttgtttgtaataagtagaatacactactgtaaacat

SEQ ID NO: 15815 - protein, 36 aa, Homo sapiens
MMSLMKPGTSVLSTESVRSDLWRMRKMKKTMRREHF

SEQ ID NO: 15816 - DNA, 1856 bp, Homo sapiens
taacattttgcagagatttttatgaacatatggggctgcgttttgtaagatttaaattaatgattgttggtcatcagtgagaccggtgagttatgtggtataagtttatgcatcctttttatactgtttggtaaacaaggtactctgatcctactccatctcccctagaaaactggaaaaaagatgtattttctttctcaccatagatcggcgggtgctgcagcctcactgtgttctgtgtacgtgacaacagactaactcggatacctgcagaggtgtcacaggcaacagaacttcatgtcctggatgtggcagggaacaggttgctgcatctacctttatccctgactgccttgaagttgaaggctctgtggctatctgacaaccagtcccagcccctgcttacattccagacagacacagactacaccacaggagagaagattttaacctgtgtcttacttcctcagctgccttctgaacctacttgtcaagagaatctgcctcgctgtggtgcactggagaacttggtaaatgatgtctctgatgaagcctggaacgagcgtgctgtcaacagagtcagtgcgatccgatttgtggaggatgagaaagatgaagaagacaatgagacgagaacacttctaaggcgagccactccacacccaggggagttaaagcacatgaaaaagacagtggagaatttacggaatgacatgaatgctgctaaaggactggactcaaacaaaaacgaggtcaatcatgccattgaccgagtgaccacttctgtgtagagtttcacctccaagttttacctcctgtgtcttcctctgctgtcgagacgttcctgtctgcttcccgggagcctcacgtgctccttgtcctaaccagcccccgcgcgccatcttcccgtggagtgtggggaagctgctgtctcccaggaagtgccttactcatcccgcaaccagtcagcgcaccagtggtctcccggtgtgattttttttttttttaatttcagttgtttgtaataagtagaatacactactgtaaacatacgacctttgtttttgtcttatgttggggtaaaggaaagcaggaaggggaatttttatcctcctcccttccgtaaagtgctgggatattttgaatcccccaagttcccttggacctactgatgagagatagttttatgtatggggaaaaatggatactttttaaaccttttttggcagctcagatggtgtaaattttaaaattttgtataggtatttcataacaaaaatatgtatttcttttttgttattttatcttgaaaacggtacatattttagtatttgtgcagaaaaacaagtcctaaagtatttgtttttatttgtaccatccacttgtgccttactgtatcctgtgtcatgtccaatcagttgtaaacaatggcatctttgaacagtgtgatgagaataggaatgtggtgttttaaagcagtgttgcattttaatcagtaatctacctggtggatttgtttttaaccaaaaagatgaattatcaatgatttgtaattatatcagttgattttttttgaaaagatgaaccaaaggatttgactgctaatattttattccttacactttttttctgaataagtctctcataatgagtgcagtgtcagactgtgcctactctgatggtatgtgccatttgtaaaataaaatagagcagaaaaacacaaaaagagaacactggttcagacattcagtgggcaagtaaattatggactgcaaaataatgatttttattcaagaaagctttaaaagttttatatccagatatacaaccacaataaagcaaaataacctactatc

SEQ ID NO: 15817 - protein, 36 aa, Homo sapiens; identical to SEQ ID NO: 15815

SEQ ID NO: 15818 - DNA, 2677 bp, Homo sapiens
taacattttgcagagatttttatgaacatatggggctgcgttttgtaagatttaaattaatgattgttggtcatcagtgagaccggtgagttatgtggtataagtttatgcatcctttttatactgtttggtaaacaaggtactctgatcctactccatctcccctagaaaactggaaaaaagatgtattttctttctcaccatagatcggcgggtgctgcagcctcactgtgttctgtgtacgtgacaacagactaactcggatacctgcagaggtgtcacaggcaacagaacttcatgtcctggatgtggcagggaacaggttgctgcatctacctttatccctgactgccttgaagttgaaggctctgtggctatctgacaaccagtcccagcccctgcttacattccagacagacacagactacaccacaggagagaagattttaacctgtgtcttacttcctcagctgccttctgaacctacttgtcaagagaatctgcctcgctgtggtgcactggagaacttggtaaatgatgtctctgatgaagcctggaacgagcgtgctgtcaacagagtcagtgcgatccgatttgtggaggatgagaaagatgaagaagacaatgagacgagaacacttctaaggcgagccactccacacccaggggagttaaagcacatgaaaaagacagtggagaatttacggaatgacatgaatgctgctaaaggactggactcaaacaaaaacgaggtcaatcatgccattgaccgagtgaccacttctgtgtagagtttcacctccaagttttacctcctgtgtcttcctctgctgtcgagacgttcctgtctgcttcccgggagcctcacgtgctccttgtcctaaccagcccccgcgcgccatcttcccgtggagtgtggggaagctgctgtctcccaggaagtgccttactcatcccgcaaccagtcagcgcaccagtggtctcccggtgtgattttttttttttttaatttcagttgtttgtaataagtagaatacactactgtaaacatacgacctttgtttttgtcttatgttggggtaaaggaaagcaggaaggggaatttttatcctcctcccttccgtaaagtgctgggatattttgaatcccccaagttcccttggacctactgatgagagatagttttatgtatggggaaaaatggatactttttaaaccttttttggcagctcagatggtgtaaattttaaaattttgtataggtatttcataacaaaaatatgtatttcttttttgttattttatcttgaaaacggtacatattttagtatttgtgcagaaaaacaagtcctaaagtatttgtttttatttgtaccatccacttgtgccttactgtatcctgtgtcatgtccaatcagttgtaaacaatggcatctttgaacagtgtgatgagaataggaatgtggtgttttaaagcagtgttgcattttaatcagtaatctacctggtggatttgtttttaaccaaaaagatgaattatcaatgatttgtaattatatcagttgattttttttgaaaagatgaaccaaaggatttgactgctaatattttattccttacactttttttctgaataagtctctcataatgagtgcagtgtcagactgtgcctactctgatggtatgtgccatttgtaaaataaaatagagcagaaaaacacaaaaagagaacactggttcagacattcagtgggcaagtaaattatggactgcaaaataatgatttttattcaagaaagctttaaaagttttatatccagatatacaaccacaataaagcaaaataacctactatcaaaatagaaatgttgctatctttataagtgcaatttaatttgtaaatagagtttgaatcaaagtatcacaaaatactgcttcaagatttaattttaaatctgctaatttaagggatattgggaaaagttttggtgtgtttctgttgatttcttttttgtatgctgtgataaaagagaaatgaaaagtgccagtcactgtgtggtgtctaggaaaatcatatatatttttttctccaagaaataaattcatcctggacattggccatacagctttttaaaattattactttgtatgttcaagtgatagcaggtagccaaattctttgacagtgtgctctggtctgttaaatatctaaattacccgtcagttgtgagtgacctcctgtgggacttgcattcacatggggcagagcccagaattgcctttgactctggctagtaattttgggttgtggctatctggccaattggactccttataaacccgtcttcaaccaaccaaatacaatacttttttttacttctatacatttacttattgggttcacttagctttttagtctgtgtgtatgtaaatatgtgtgtattttaaaaactatttatggagctgaaagtacataacacataagtgagtttcggctggtcagttttataccttgttccctaatctgtgcataccaattttcttttctctgttttaagatttttgacatcctctattttgttttaagcttataaagataatgccactatctcatgggctgattatatataagcaaattggttttatttaatgagaattgtcttgacgtggaagaaca

SEQ ID NO: 15819 - protein, 36 aa, Homo sapiens; identical to SEQ ID NO: 15815

SEQ ID NO: 15820 - DNA, 1258 bp, Homo sapiens
caaaatggtgtttaatctttattttggctgcaacttaaatgctttgacaccgcaggcacctccttcctcttggcctgattcatcaggtgctcctggaaacaggtaatcctgcagcttcacaccagccctgtcagtgaggctgtggccatcagaggtaaagaactcctccttctgggtccttccaaaatcaccttgactttctctctttacattgaaacctagtacaagaccataaaaatgtgtcctgtaattttctctctcttttttttttttttttttttttttttgctctgtaatctggaggttctaatgggagaagtgagagcagaaaagggaagcacaggaacctactgaggaatccacttgcaaagagtatgttgcgtcttaaaaacataacaccgtttttacattttgaaaccaatctcaggaagctccttttaatttttcctcattttgttgatagggattgatttgattacaaaatttgaggttgtgatgtctctttttttaaaaaaaaaaaaaaaaacaggttgctgcatctacctttatccctgactgccttgaagttgaaggctctgtggctatctgacaaccagtcccagcccctgcttacattccagacagacacagactacaccacaggagagaagattttaacctgtgtcttacttcctcagctgccttctgaacctacttgtcaagagaatctgcctcgctgtggtgcactggagaacttggtaaatgatgtctctgatgaagcctggaacgagcgtgctgtcaacagagtcagtgcgatccgatttgtggaggatgagaaagatgaagaagacaatgagacgagaacacttctaaggcgagccactccacacccaggggagttaaagcacatgaaaaagacagtggagaatttacggaatgacatgaatgctgctaaaggactggactcaaacaaaaacgaggtcaatcatgccattgaccgagtgaccacttctgtgtagagtttcacctccaagttttacctcctgtgtcttcctctgctgtcgagacgttcctgtctgcttcccgggagcctcacgtgctccttgtcctaaccagcccccgcgcgccatcttcccgtggagtgtggggaagctgctgtctcccaggaagtgccttactcatcccgcaaccagtcagcgcaccagtggtctcccggtgtgattttttttttttttaatttcagttgtttgtaataagtagaatacactactgtaaacat

SEQ ID NO: 15821 - protein, 36 aa, Homo sapiens; identical to SEQ ID NO: 15815

SEQ ID NO: 15822 - DNA, 2063 bp, Homo sapiens
caaaatggtgtttaatctttattttggctgcaacttaaatgctttgacaccgcaggcacctccttcctcttggcctgattcatcaggtgctcctggaaacaggtaatcctgcagcttcacaccagccctgtcagtgaggctgtggccatcagaggtaaagaactcctccttctgggtccttccaaaatcaccttgactttctctctttacattgaaacctagtacaagaccataaaaatgtgtcctgtaattttctctctcttttttttttttttttttttttttttgctctgtaatctggaggttctaatgggagaagtgagagcagaaaagggaagcacaggaacctactgaggaatccacttgcaaagagtatgttgcgtcttaaaaacataacaccgtttttacattttgaaaccaatctcaggaagctccttttaatttttcctcattttgttgatagggattgatttgattacaaaatttgaggttgtgatgtctctttttttaaaaaaaaaaaaaaaaacaggttgctgcatctacctttatccctgactgccttgaagttgaaggctctgtggctatctgacaaccagtcccagcccctgcttacattccagacagacacagactacaccacaggagagaagattttaacctgtgtcttacttcctcagctgccttctgaacctacttgtcaagagaatctgcctcgctgtggtgcactggagaacttggtaaatgatgtctctgatgaagcctggaacgagcgtgctgtcaacagagtcagtgcgatccgatttgtggaggatgagaaagatgaagaagacaatgagacgagaacacttctaaggcgagccactccacacccaggggagttaaagcacatgaaaaagacagtggagaatttacggaatgacatgaatgctgctaaaggactggactcaaacaaaaacgaggtcaatcatgccattgaccgagtgaccacttctgtgtagagtttcacctccaagttttacctcctgtgtcttcctctgctgtcgagacgttcctgtctgcttcccgggagcctcacgtgctccttgtcctaaccagcccccgcgcgccatcttcccgtggagtgtggggaagctgctgtctcccaggaagtgccttactcatcccgcaaccagtcagcgcaccagtggtctcccggtgtgattttttttttttttaatttcagttgtttgtaataagtagaatacactactgtaaacatacgacctttgtttttgtcttatgttggggtaaaggaaagcaggaaggggaatttttatcctcctcccttccgtaaagtgctgggatattttgaatcccccaagttcccttggacctactgatgagagatagttttatgtatggggaaaaatggatactttttaaaccttttttggcagctcagatggtgtaaattttaaaattttgtataggtatttcataacaaaaatatgtatttcttttttgttattttatcttgaaaacggtacatattttagtatttgtgcagaaaaacaagtcctaaagtatttgtttttatttgtaccatccacttgtgccttactgtatcctgtgtcatgtccaatcagttgtaaacaatggcatctttgaacagtgtgatgagaataggaatgtggtgttttaaagcagtgttgcattttaatcagtaatctacctggtggatttgtttttaaccaaaaagatgaattatcaatgatttgtaattatatcagttgattttttttgaaaagatgaaccaaaggatttgactgctaatattttattccttacactttttttctgaataagtctctcataatgagtgcagtgtcagactgtgcctactctgatggtatgtgccatttgtaaaataaaatagagcagaaaaacacaaaaagagaacactggttcagacattcagtgggcaagtaaattatggactgcaaaataatgatttttattcaagaaagctttaaaagttttatatccagatatacaaccacaataaagcaaaataacctactatc

SEQ ID NO: 15823 - protein, 36 aa, Homo sapiens; identical to SEQ ID NO: 15815

SEQ ID NO: 15824 - DNA, 2884 bp, Homo sapiens
caaaatggtgtttaatctttattttggctgcaacttaaatgctttgacaccgcaggcacctccttcctcttggcctgattcatcaggtgctcctggaaacaggtaatcctgcagcttcacaccagccctgtcagtgaggctgtggccatcagaggtaaagaactcctccttctgggtccttccaaaatcaccttgactttctctctttacattgaaacctagtacaagaccataaaaatgtgtcctgtaattttctctctcttttttttttttttttttttttttttgctctgtaatctggaggttctaatgggagaagtgagagcagaaaagggaagcacaggaacctactgaggaatccacttgcaaagagtatgttgcgtcttaaaaacataacaccgtttttacattttgaaaccaatctcaggaagctccttttaatttttcctcattttgttgatagggattgatttgattacaaaatttgaggttgtgatgtctctttttttaaaaaaaaaaaaaaaaacaggttgctgcatctacctttatccctgactgccttgaagttgaaggctctgtggctatctgacaaccagtcccagcccctgcttacattccagacagacacagactacaccacaggagagaagattttaacctgtgtcttacttcctcagctgccttctgaacctacttgtcaagagaatctgcctcgctgtggtgcactggagaacttggtaaatgatgtctctgatgaagcctggaacgagcgtgctgtcaacagagtcagtgcgatccgatttgtggaggatgagaaagatgaagaagacaatgagacgagaacacttctaaggcgagccactccacacccaggggagttaaagcacatgaaaaagacagtggagaatttacggaatgacatgaatgctgctaaaggactggactcaaacaaaaacgaggtcaatcatgccattgaccgagtgaccacttctgtgtagagtttcacctccaagttttacctcctgtgtcttcctctgctgtcgagacgttcctgtctgcttcccgggagcctcacgtgctccttgtcctaaccagcccccgcgcgccatcttcccgtggagtgtggggaagctgctgtctcccaggaagtgccttactcatcccgcaaccagtcagcgcaccagtggtctcccggtgtgattttttttttttttaatttcagttgtttgtaataagtagaatacactactgtaaacatacgacctttgtttttgtcttatgttggggtaaaggaaagcaggaaggggaatttttatcctcctcccttccgtaaagtgctgggatattttgaatcccccaagttcccttggacctactgatgagagatagttttatgtatggggaaaaatggatactttttaaaccttttttggcagctcagatggtgtaaattttaaaattttgtataggtatttcataacaaaaatatgtatttcttttttgttattttatcttgaaaacggtacatattttagtatttgtgcagaaaaacaagtcctaaagtatttgtttttatttgtaccatccacttgtgccttactgtatcctgtgtcatgtccaatcagttgtaaacaatggcatctttgaacagtgtgatgagaataggaatgtggtgttttaaagcagtgttgcattttaatcagtaatctacctggtggatttgtttttaaccaaaaagatgaattatcaatgatttgtaattatatcagttgattttttttgaaaagatgaaccaaaggatttgactgctaatattttattccttacactttttttctgaataagtctctcataatgagtgcagtgtcagactgtgcctactctgatggtatgtgccatttgtaaaataaaatagagcagaaaaacacaaaaagagaacactggttcagacattcagtgggcaagtaaattatggactgcaaaataatgatttttattcaagaaagctttaaaagttttatatccagatatacaaccacaataaagcaaaataacctactatcaaaatagaaatgttgctatctttataagtgcaatttaatttgtaaatagagtttgaatcaaagtatcacaaaatactgcttcaagatttaattttaaatctgctaatttaagggatattgggaaaagttttggtgtgtttctgttgatttcttttttgtatgctgtgataaaagagaaatgaaaagtgccagtcactgtgtggtgtctaggaaaatcatatatatttttttctccaagaaataaattcatcctggacattggccatacagctttttaaaattattactttgtatgttcaagtgatagcaggtagccaaattctttgacagtgtgctctggtctgttaaatatctaaattacccgtcagttgtgagtgacctcctgtgggacttgcattcacatggggcagagcccagaattgcctttgactctggctagtaattttgggttgtggctatctggccaattggactccttataaacccgtcttcaaccaaccaaatacaatacttttttttacttctatacatttacttattgggttcacttagctttttagtctgtgtgtatgtaaatatgtgtgtattttaaaaactatttatggagctgaaagtacataacacataagtgagtttcggctggtcagttttataccttgttccctaatctgtgcataccaattttcttttctctgttttaagatttttgacatcctctattttgttttaagcttataaagataatgccactatctcatgggctgattatatataagcaaattggttttatttaatgagaattgtcttgacgtggaagaaca

SEQ ID NO: 15825 - protein, 36 aa, Homo sapiens; identical to SEQ ID NO: 15815

SEQ ID NO: 15826 - DNA, 456 bp, Homo sapiens
agaggcaaagaatctgcatttccataccgtctcattgtcttcttcatctttctcatcctccacaaatcggatcgcactgactctgttgacagcacgctcgttccaggcttcatcagagacatcatttaccaagttctccagtgcaccacagcgaggcagattctctgcagtgacaaagaccacataagcagggaattgcgtttcatgtgatcagtaaatgctatgaactttgcggctgacaaggtttcaatgtaaagagagaaagtcaaggtgattttggaaggacccagaaggaggagttctttacctctgatggccacagcctcactgacagggctggtgtgaagctgcaggattacctgtttccaggagcacctgatgaatcaggccaagaggaaggaggtgcctgcggtgtcaaagcatttaagttgcagccaaaataaagattaaacacca

SEQ ID NO: 15827 - protein, 67 aa, Homo sapiens
QGFNVKRESQGDFGRTQKEEFFTSDGHSLTDRAGVKLQDYLFPGAPDESGQEEGGACGVKAFKLQPK

SEQ ID NO: 15828 - DNA, 3166 bp, Homo sapiens
ttgctcttggttttaatccttttggaatgtcttgagggtcaggagcgttgccattgatggctatgggagttgtcaggctgtggctctctttctcacagagaatgccagaggcactcgggaaggcatttgccagggctctgacagatgtaaagtaagccttatccatgttgtgttctcacctggacacctggaaggtgctcagtatagaaaagtcacgagctagatgagataccagcttgatgtcgactccctccccaacaatggctgcctgtcttcgtcttgatgcctgccagcaggaaagcactgtcttagaacctggctcacctgattttgccgatgagtcaactttgaagtgtgcctcattctggaaagtgaatcacgtaatcacaatggagtctccctcttgttgcccaggctggagtgcaatggtgtgatcttggctcactgcaacctccacctcccagtagatacggggtttcatcatgttggccaggctgatttcgaactcctgacctcaagagagctgcccgcctcgacttcccaaagtgctaggattacaggcatgagccatcacacccagcctcatatattgtattctgtatataattaagacctttccttttcaaggcaatatatataacaataaaaagatgaattaagtaagccctctgaattaatatattaagtggtccctcagaagggagaaattttgaaattaaatattatctaaagattttgatattcacttaatgggagtatctgaattaagtgtcacaactaaaatagtagagtggtcacattccctagcaccagttctcaaactttgttaaaaatgcagattcctgagctctatcattaaacatttttatttagaagtggggagtgtggccttcgtatttcagctgcttaactagtagcacagcgaagacggtataagggtctttggatcactttttgaaaagcatggtcttagagagaaggaacagcccacactcgttcacagtgtagcaacacgcgggaaagagaacagtcaaattgttttgatgatgacgaaaggaaatgcaggctttctagtatatacaaaacatattcaaaaatctagaagtttatcactaaggtttttggaagtaaatctacatttagcaactcaattttttagattttattctcaattatctggacatgagatttaggtctgtgattctcaggtcttcttagttatacatatcactcaaggagctatggactccaaatgacttatgtttgtgataaagcctcatttaccccacaataataggaaagctgctctgattttctgaagttagaaatgaaagattaagtaagtacatttgttatagtttaatattacacattgtatgatgaaaacattgtctcctacactgcctcctattatctggaaaattagtaatactaaagtgttctttcaaaaccagagacctaaatggctggaagcaataattgctagagctctccaccaagctttgactataaatatttggccatattgtgtgttagaaaatataagacacacttgctttcattttctgagcctgactcactgaattttcttgtccagattggttttcatctgtttattcctttagagcatagattagagtccattgtggttctcatctctgttatgcatgtttttttatgaataaaatgccaggcacacagagcatacatatgcacattttactacgagatagtaaaagctcaatgtgctgggactgcattcccaatgtgaccttattttcccactctttgcagttttaaaatgttacgttaatctggcgttctggacggggattttctcttctttacagtgagtcccagcagtatatagcggccatagaatagctaaacttgaagaggctttttggcaaagatttgaatatatgtcctttggccttttctggttcttgtctgtatttcataatacaaaactaatgaggatttcactttggtgaaatctgccttactaaatgatgcttgcaaataacacattcatttgttagcatttgggattctgattaaatcattttgctttagtagctgttaaagattatagtttgaaagaaaaaagtgttttggcattgagtactttgagacccctgtacagtgtaccaaaatctatgcaaattgttacgaggccttttaattacaggtgaaccccagcacttattatcatctgatgcacagattatgcacatgtcatatattggtaataaaatatcaaagttagactgacactcttaaagtgcttaacactgttttattggcttactagccctaactggattcattgcatccatttttttcattctgccacttaaaacatttgccacgttgttttattcatgcttttatcacagctttgtctgtaactacattgacttgattactcatattctatggcaattcctgacatttggcttatttttccactagcctccttacttttaaaaaccactccatctcatttttcaacaacctctgattatctcaaagttacctcggattatcctgacacgtccttcggcttctgaggatattgactcagtatttcaagactgaggtgactctgagacagaagacggagccagtggtgatgtgctcccttattcagactctttgaataatgctttttactcagctatggactctgctagaaagacactttaatatttttgccatttatatttttctgttgttgaaaaataatagaaaccagtgccttagttggtttaacaattcaacaaagttgttttcaaaagaagaaagaaaatgtaactccatttaggttgtctttcatttgcaaacactaactgaaacttgagttagggattgtataacttggaaacagtattaataaaatgaagtcattgtcatattaaaaatgtcctaatgttcactttaagtgtatttttaaaaacctcacaggcaatggtgtgaaagaaaccaaggagatgtttacattcattagttccactggaaaaaactggttaatgtaattgtatagatttttcccttcttgttttgtgtgctgtataacccagtctttgctttatgtacaaataccctggtttctaaatgctacttattttcttcagaaataaagtatgctttcaatttagtgagt

SEQ ID NO: 15829 - protein, 64 aa, Homo sapiens; identical to SEQ ID NO: 4771

SEQ ID NO: 15830 - DNA, 1193 bp, Homo sapiens
tagacaatggcacaagtgcagagaacaggctggacacaacccaccttaatgattggttcttccctttatcattttaaaattgatattggtcacattaagtttgtttacaataacaaataactgcatattataggcaaataaaattatcaaatttcccaaaagtaagaaaaacaaaatcagtgaagcactgtaattctacgtccatgaataatctatgcttcttacttgctataaatggtgtgtcagcaggagctcttgataaaatatctattgttttttaaaaatacatcaatcattatgtacactataatattctagtagtaatacatgctcactagagatatttccaaaaacacccaaaagtaaagccatcttatatagtaatacttgattgcaggaacagaaactgacttgagaataaataataataacactgtatattataagccaggcttcatgaaggctacaaccagaaactggaaagtcatcattaaccagttcctctgttagatctcatgaactcttgtctttttctttctttgtatatctgcttttgtcttattttcctgaaaatctgctttctttgtgcaagtgggagaagatgcccgcacctccagtccaaaatgttcatgtctctcaatccaaggcatgcatacaaactgacttgttttctctgaatttccaagtctaattcccagaagaaaagatccagtttgcccaccatgagtcaggtgtccatcatgatccaatttcaatgctaggtgtttcaattcatggttcaaccaggaaccttctccactgggatttgcaatactagaggcagtaaaacatctggaccatgaggtcacttcttctcctacgacaggttttcttgtgagtgtaaaaaaattatgccagatttttagcggtgaagattcttcctgtgttaggaggattgaagacctatgactccaacagccaaaagagtaagatgtgcttggaatgcttgccttccagaatatttgaagcaattaagcaatttgctcttatttcctctaactaccttactcagctccagcttactgttgccatatgggaatgcaggcccaggatttccagatcttctcatttttccagaaaaactagtttcatctgtgaaatctcttgattgtgaaatgttggaaactaattcaattttttattctgtacaggtt

SEQ ID NO: 15831 - protein, 82 aa, Homo sapiens
MTPTAKRVRCAWNACLPEYLKQLSNLLLFPLTTLLSSSLLLPYGNAGPGFPDLLIFPEKLVSSVKSLDCEMLETNSIFYSVQ

SEQ ID NO: 15832 - DNA, 5689 bp, Homo sapiens
agacagaatctgaacctctgtgtctctcagtctttctctctttctcattctctttcaatatggaacttgaaaagcgtgaaaaaagaagcttattaaacaagaatttagaggagaaactgacggtctctgctggtggttctgaagccaaacctctgatcttcacatttgtccccactgtcagaagactaccaacccatactcagttggctgacacctctaaattccttgttaaaattccagaagaatcaagtgataagagtccagaaactgtaaataggtctaaatccaatgactacttgaccttgaatgctgggagccaacaagagagagaccaagcgaaattgacttgtccttcagaggtcagtggaacgattttacaagaaagggaattcgaagcaaacaaacttcaagggatgcagcaaagtgacctcttcaaagctgaatatgtccttattgtggactccgaaggggaagatgaggctgcaagcagaaaagttgaacaaggccccccaggggggattggcaccgcagctgtccggcccaagtctctagctatctcgtccagtctggtctctgatgtagtgcgtcccaaaacacaggggactgatctcaagacctcatcacatcctgaaatgcttcatgggatggcccctcagcaaaagcatgggcagttaacttcttctcccactacctctgagcagcttgcctgtaaaccacctgctttctcctttgtttctccaactaatccgaacacaccacccgacccagttaacctcgagggagcctctgtcctagaggagttccacactaggaggctggatgtcggtggggccgtggtggaagaatcagctacgtattttcaaactaccgctcactctacacccttttctgcatcgaagggcacctcctcgacgttactgtttccccattccactcaactatcaggttctaatttacccagttcaactgcagcagatccaaagcctggactgacctctgaagttctcaagaagacaactttaacctcgcatgtccttagtcacggagaaagtccgagaacctcttcttctccaccgtcctccagtgcttctctgaagtcgaattcggcctcgtacataccagtccgcattgtcacgcattcactctctccgagccccaaaccatttacctcctctttccacggctcttcttccaccatctgcagccaaatgtcatctagtggaaatctttcaaagtcaggggtaaaatccccggtgccttcccggcttgcccttctcactgccattctcaagtcaaacccttcccaccaaagacccttttcccctgcatcctgtcccaccttctctctcaactccccggcctcttccacgctcacacttgaccaaaaagaaaagcagaccccacccacgcctaaaaaatctctctcaagttgttccctgagagccgggtcaccagatcaaggggaactccaggtttctgaattgacccagcaatcttttcacctgcctgttttcaccaagtctactccgctttctcaggcgccctccctctctcctacaaaacaggctagtagcagccttgcttccatgaatgtagagagaacaccatcacctactttgaagagcaataccatgctctccctgctacaaaccagtacatccagttctgtgggtcttcctcctgttccaccaagctcttctctttcctctttgaagagtaaacaggatggtgacctcaggggtccagaaaaccccagaaacattcacacgtacccttctacattagcctcctctgcattatcttctctatctcctcctattaatcaaagagctacgttctcttcttcagagaaatgtttccatccttccccagctctttcaagcctgataaacagatctaaaagagcatcatcccaactatctggccaggagctgaatccttcagctcttccttcactccctgtctccagtgctgactttgcctctcttcccaacttgaggtcctcctctctccctcatgccaatctgcccaccctggtgccccagctcagtccctcagctctgcacccacattgcggcagtggtaccttgccttcaagacttgggaaatctgaaagcaccacccccaaccacaggtcacctgtttcaaccccatcacttcccatatctctaacaaggacagaggagctgatttcaccttgtgcattgtccatgtcaacaggcccagaaaataagaaatcaaagcaatacaagaccaagtcaagctacaaggcttttgcagcaatccctacaaacacattgcttttggaacagaaggcactagatgaaccagccaagactgaaagtgtctccaaggacaacacattagaaccaccagtggagctctattttcctgcacagctcaggcagcaaactgaagagctctgtgctaccattgataaggtcttacaggattccttgtctatgcattcttctgattctccttcaaggtccccaaagacattgttgggttctgacacagtcaaaactcctacaactcttccaagagcagctggtcgagaaaccaaatatgcaaatctctcctcaccatcttctacagtatctgagagtcagctgactaagcctggagtaattcgcccagtacctgtaaaatccagaatattactgaaaaaagaggaggaagtctatgaacccaaccctttcagtaaatacttggaagataacagcgacctcttttctgaacaggctgcacattctgtggactcctactgcaacggaagtgacacgtctggtccttggctcctctgatcattgaggaaccctatccttgtggctagttactgtagcctttgactttcctacttcctgaaaaagagaaaaagacgatgatagaattcaatggcaagaacatgggctcttgtgatttttgaaaaaatcagtccttactgaacttcaattttatcctacaaaaatggggctactaatcaccatttctaatggaacccatactaataagtatttgtgatttttttaaaagtataatttctttaaattttttccaagtgctttcatctttattgcagtataattgacaaaaattatacctatttaaggtgtaaaatgtgatgatttgatgtatgtgtacattgtataatgattaccacagttaaattaatcaatgtaactattaatgtactagttactctgtgtgtgtatatgggagaagagatgaggacacataaaatctattctcagcaaatttcaagtaaaaagtaaaatattattaactgtagtcaccatgctatacattagctctccagaacttattcctttgataactgaatgtttctaccctttaaacaccatttttccttttcacttaaatcccttattaagacaataatagattcaaaacaacaaaacatccatttcaaccaaaagtccattccaacccctggcaaccatcattctactctttgcttctgtaattctgactattttagattccactaaagtgagatcacgcaatatttgtccttttgtgactggctcatttcacttggcataatatatttggaattcattcatgttattggaaatggcaggatttctttcttttttaaggctgaataatatttcattgtttaacacgttttatttattcatttatccatcaacagacacttcggttgttgccatatctaattgttaagaatgatactgcaatggttgaatgaaatactcactatcaaagggctctaaagacttaaatgtttcttgttatcatttcctttagaatcacttcaattttggaagaaagaggttgatttcctgctaaagggtcaactgaatatattgtcttctttctctcttccattatgagcaattgtagaagcctattttctatgttacttttgacttcttcaattttaactgctcctccatcctaaacacctccacatgggaaataaaagaccagaatccaactatatgtatagaaaaacataaaactcagcattgtagtcctctgctgctcactgtgattgattatggagtgtttttctttcttttcccttgagtgtacctccatcagatacttccatgctgatccatgccatctgttctgtgaaacttgctgtcagacaaccatacactttaagcactaagttatccaaattctatcttaaaaattatgttgtgattattaaaaatctttttttatatagaggatttcaaatagctaagcatatgctaaatttttcatacttcacaagttcaaattttcttggttcaaatcaggattcaaaatatatgtgttgctttaaatatgtctgtttgaaaaaatgcatatggattctccaaaatttgggtttctaagcaagaagatatgccatataatcgaaaccaatttatattggctttatcttagtgaaatgtagataatcacaatctcttatttcatagtaacatgaggtttttgtgatgctgtctgtaaagtgttggtgtctttagataaaggggtcgctctttaagaaaatattactactgttcatgattttattagcaaggtgttgatttaaattaaaactgtagcaaaaatgctatggctctgattttaaactgctgtaagttctagacagcaaaggaaagctgaaaataaatgctgcatttaaaaataaatgttgctttaccaaagaggtgggaagatggaagacaggatggagtgaaaggctccagtaattttacctatggtactctgagttcacaaaggtgtcttgtactcagacagaaaaccgcagcgtgaagaggggacagcatgagtgaagaggaagtgaattttcacccttcacttccaaaccacaggaaaggaagtgactttaaaatgccaggatggaacaaaagcatttcagatgtgcaggctttaataagaagagctcaaaatgccgtaaaatgccctttgatgttgcaatggaaacagtttttgaagttaaacagtatgatttgatggttgagtagaaagtaggctttttctagagcaccaaatgcatcagatatggctataacactaattttctgatgtgtctgtcagttaagcagagctaaattaatatattcactgcatatttgtctgctaatttttctttaatgaacaaagatattacttgcttcataagttcctgtcttcttgaagttttgtagaatgatagtatcatctcaaaaataattaattcttttcaaaaatcaagctcctcagtaaagcctttttttgaaacattagttctatgtatactgaaattgaaagaggacaattctcaagtgactaaaaagcggtttaaagcattttatcagaaataactatgttacctatctcattgatagaaacatgtccaagactgttttatgatccctgtacatccctcaaaaactaaaacattaaaagattcatatattgcatgctaaagcaggatagagtgatgttcattttcaagaatcatttagaatagtgatctctaaagtattaggtaccaacctcaagataattcgctggggtggaagtagggcacaagttagacgtgatagagatgccattagtgtgttttgaagcaaatctcaaacaggggtcacaaactatggtctgtgggccaaacctggctcaccagtgtttttataaataaagtattattggaaca

SEQ ID NO: 15833 - protein, 915 aa, Homo sapiens
MELEKREKRSLLNKNLEEKLTVSAGGSEAKPLIFTFVPTVRRLPTHTQLADTSKFLVKIPEESSDKSPETVNRSKSNDYLTLNAGSQQERDQAKLTCPSEVSGTILQEREFEANKLQGMQQSDLFKAEYVLIVDSEGEDEAASRKVEQGPPGGIGTAAVRPKSLAISSSLVSDVVRPKTQGTDLKTSSHPEMLHGMAPQQKHGQLTSSPTTSEQLACKPPAFSFVSPTNPNTPPDPVNLEGASVLEEFHTRRLDVGGAVVEESATYFQTTAHSTPFSASKGTSSTLLFPHSTQLSGSNLPSSTAADPKPGLTSEVLKKTTLTSHVLSHGESPRTSSSPPSSSASLKSNSASYIPVRIVTHSLSPSPKPFTSSFHGSSSTICSQMSSSGNLSKSGVKSPVPSRLALLTAILKSNPSHQRPFSPASCPTFSLNSPASSTLTLDQKEKQTPPTPKKSLSSCSLRAGSPDQGELQVSELTQQSFHLPVFTKSTPLSQAPSLSPTKQASSSLASMNVERTPSPTLKSNTMLSLLQTSTSSSVGLPPVPPSSSLSSLKSKQDGDLRGPENPRNIHTYPSTLASSALSSLSPPINQRATFSSSEKCFHPSPALSSLINRSKRASSQLSGQELNPSALPSLPVSSADFASLPNLRSSSLPHANLPTLVPQLSPSALHPHCGSGTLPSRLGKSESTTPNHRSPVSTPSLPISLTRTEELISPCALSMSTGPENKKSKQYKTKSSYKAFAAIPTNTLLLEQKALDEPAKTESVSKDNTLEPPVELYFPAQLRQQTEELCATIDKVLQDSLSMHSSDSPSRSPKTLLGSDTVKTPTTLPRAAGRETKYANLSSPSSTVSESQLTKPGVIRPVPVKSRILLKKEEEVYEPNPFSKYLEDNSDLFSEQAAHSVDSYCNGSDTSGPWLL

SEQ ID NO: 15834 - DNA, 1738 bp, Homo sapiens
gtctctcagtctttctctctttctcattctctttcaatatggaacttgaaaagcgtgaaaaaagaagcttattaaacaagaatttagaggagaaactgacggtctctgctggtggttctgaagccaaacctctgatcttcacatttgtccccactgtcagaagactaccaacccatactcagttggctgacacctctaaattccttgttaaaattccagaagaatcaagtgataagagtccagaaactgtaaataggtctaaatccaatgactacttgaccttgaatgctgggagccaacaagagagagaccaagcgaaattgacttgtccttcagaggtcagtggaacgattttacaagaaagggaattcgaagcaaacaaacttcaagggatgcagcaaagtgacctcttcaaagctgaatatgtccttattgtggactccgaaggggaagatgaggctgcaagcagaaaagttgaacaaggccccccaggggggattggcaccgcagctgtccggcccaagtctctagctatctcgtccagtctggtctctgatgtagtgcgtcccaaaacacaggggactgatctcaagacctcatcacatcctgaaatgcttcatgggatggcccctcagcaaaagcatgggcagcaatacaagaccaagtcaagctacaaggcttttgcagcaatccctacaaacacattgcttttggaacagaaggcactagatgaaccagccaagactgaaagtgtctccaaggacaacacattagaaccaccagtggagctctattttcctgcacagctcaggcagcaaactgaagagctctgtgctaccattgataaggtcttacaggattccttgtctatgcattcttctgattctccttcaaggtccccaaagacattgttgggttctgacacagtcaaaactcctacaactcttccaagagcagctggtcgagaaaccaaatatgcaaatctctcctcaccatcttctacagtatctgagagtcagctgactaagcctggagtaattcgcccagtacctgtaaaatccagaatattactgaaaaaagaggaggaagtctatgaacccaaccctttcagtaaatacttggaagataacagcgacctcttttctgaacaggatgtaacagtccctcccaagcctgtctcgctccatcctttatatcagactaaactctatcctcctgctaagtcactgctgcatccacagaccctctcacatgctgactgtcttgccccaggacccttcagtcatctgtccttctccttgagtgatgaacaggagaattctcacaccctcctcagtcacaacgcatgcaacaagctgagtcatccaatggtggctattcctgaacatgaagctcttgattccaaagagcaatgaagttggagcagaggctgaaaacacaggctgctgaagttttttggaatgctggtgctaaccacttgctagatttaacttttttttttttttccagaatgagtgctccctttatgagctgcagtgcagcagaaccaaaaaaaaagtttgctgcaattatatagcatcacagtgctctgctaacagccagcatagaagagatttacctacagctttttgcaccactgttctagcctttaatgccttctacttaatattaagctgaccgcaatactaacgtgcccctatatttggcagccaaataaagaagaatcgtgggtaaatag

SEQ ID NO: 15835 - protein, 458 aa, Homo sapiens
MELEKREKRSLLNKNLEEKLTVSAGGSEAKPLIFTFVPTVRRLPTHTQLADTSKFLVKIPEESSDKSPETVNRSKSNDYLTLNAGSQQERDQAKLTCPSEVSGTILQEREFEANKLQGMQQSDLFKAEYVLIVDSEGEDEAASRKVEQGPPGGIGTAAVRPKSLAISSSLVSDVVRPKTQGTDLKTSSHPEMLHGMAPQQKHGQQYKTKSSYKAFAAIPTNTLLLEQKALDEPAKTESVSKDNTLEPPVELYFPAQLRQQTEELCATIDKVLQDSLSMHSSDSPSRSPKTLLGSDTVKTPTTLPRAAGRETKYANLSSPSSTVSESQLTKPGVIRPVPVKSRILLKKEEEVYEPNPFSKYLEDNSDLFSEQDVTVPPKPVSLHPLYQTKLYPPAKSLLHPQTLSHADCLAPGPFSHLSFSLSDEQENSHTLLSHNACNKLSHPMVAIPEHEALDSKEQ

SEQ ID NO: 15836 - DNA, 2178 bp, Homo sapiens
gtctctcagtctttctctctttctcattctctttcaatatggaacttgaaaagcgtgaaaaaagaagcttattaaacaagaatttagaggagaaactgacggtctctgctggtggttctgaagccaaacctctgatcttcacatttgtccccactgtcagaagactaccaacccatactcagttggctgacacctctaaattccttgttaaaattccagaagaatcaagtgataagagtccagaaactgtaaataggtctaaatccaatgactacttgaccttgaatgctgggagccaacaagagagagaccaagcgaaattgacttgtccttcagaggtcagtggaacgattttacaagaaagggaattcgaagcaaacaaacttcaagggatgcagcaaagtgacctcttcaaagctgaatatgtccttattgtggactccgaaggggaagatgaggctgcaagcagaaaagttgaacaaggccccccaggggggattggcaccgcagctgtccggcccaagtctctagctatctcgtccagtctggtctctgatgtagtgcgtcccaaaacacaggggactgatctcaagacctcatcacatcctgaaatgcttcatgggatggcccctcagcaaaagcatgggcagcaatacaagaccaagtcaagctacaaggcttttgcagcaatccctacaaacacattgcttttggaacagaaggcactagatgaaccagccaagactgaaagtgtctccaaggacaacacattagaaccaccagtggagctctattttcctgcacagctcaggcagcaaactgaagagctctgtgctaccattgataaggtcttacaggattccttgtctatgcattcttctgattctccttcaaggtccccaaagacattgttgggttctgacacagtcaaaactcctacaactcttccaagagcagctggtcgagaaaccaaatatgcaaatctctcctcaccatcttctacagtatctgagagtcagctgactaagcctggagtaattcgcccagtacctgtaaaatccagaatattactgaaaaaagaggaggaagtctatgaacccaaccctttcagtaaatacttggaagataacagcgacctcttttctgaacaggatgtaacagtccctcccaagcctgtctcgctccatcctttatatcagactaaactctatcctcctgctaagtcactgctgcatccacagaccctctcacatgctgactgtcttgccccaggacccttcagtcatctgtccttctccttgagtgatgaacaggagaattctcacaccctcctcagtcacaacgcatgcaacaagctgagtcatccaatggtggctattcctgaacatgaagctcttgattccaaagagcaatgaagttggagcagaggctgaaaacacaggctgctgaagttttttggaatgctggtgctaaccacttgctagatttaacttttttttttttttccagaatgagtgctccctttatgagctgcagtgcagcagaaccaaaaaaaaagtttgctgcaattatatagcatcacagtgctctgctaacagccagcatagaagagatttacctacagctttttgcaccactgttctagcctttaatgccttctacttaatattaagctgaccgcaatactaacgtgcccctatatttggcagccaaataaagaagaatcgtgggtaaatagaagaatggctgtgactatttttcaatacaaattttatttaatgcatacatttctaactgagtcaggtttttattccccttttacttcacttttttacatgaaaaaaatcacaacttttaaagtaactaattagctttcagaagacgctgatattcagaggttctctggtgagatcttgaacatgagaaagttggtattttgtataacacacattgctttcctgttctgttgggattcggtgctgctgggacagactatgtgccaggagcagcccagtgctgatgaacatcgcgttactggagtgtctgtgtctgggataccactgtctctctgcctgtcaccacatgattcttgtgaagactactttagagttagtttgtatccaaaatcctgagagcagcagagaccatagagcaaacccatacttgatgacagtcctg

SEQ ID NO: 15837 - protein, 458 aa, Homo sapiens; identical to SEQ ID NO: 15835

SEQ ID NO: 15838 - DNA, 723 bp, Homo sapiens
gggttccgcttgactctgcattctcctacttccctgcctgcttactctctgccatcatagttttttgcttcaaccttcaaatgtagccattctttttctaaagcggtacttattctctttattagttaaaattattaattttatgcacttactgttctagctccaattttgcatttccagttccctgctgggaataaattaaattggcagaagctcagtctaagtgcctgcaacagaatttgtcccatatccatacaacttgctcctccacaacaaatgggagaatcatcctcttacctccagcacctgcctcaaacaaagtttctgatccatctaccacgtaactttgacgctgaccaagaattacagcttcaaagaaatcattcgaggatcattaatatcttggtcatgaataacttttatgtgaaaggctctgcagctaatctcaagtgcagtgaactctgtttcattactgtatttccaaatttagagttatttgggttgtatataggtcagataatttacttttttgttttcaacctaatataaagcacctccaaactttctgccatttgctattacttttctccctcagtgagtgccaaattagctcaattttagttaatttgcaaggtctgacaatcaagactatcctcagcagcaagcagaaaaatttctgaatgactagatacaatttcaagggacaagaaatttctctgtccc

SEQ ID NO: 15839 - protein, 90 aa, Homo sapiens
MGESSSYLQHLPQTKFLIHLPRNFDADQELQLQRNHSRIINILVMNNFYVKGSAANLKCSELCFITVFPNLELFGLYIGQIIYFFVFNLI

SEQ ID NO: 15840 - DNA, 1074 bp, Homo sapiens
actgctttcttgacatctgctagtttgacacgtggcaccggattccatgtgcagctggtaccttggatttgaatgttcttctaaatccaatgactacttgaccttgaatgctgggagccaacaagagagagaccaagcgaaattgacttgtccttcagaggtcagtggaacgattttacaagaaagggaattcgaagcaaacaaacttcaagggatgcagcaaagtgacctcttcaaagctgaatatgtccttattgtggactccgaaggggaagatgaggctgcaagcagaaaagttgaacaaggccccccaggggggattggcaccgcagctgtccggcccaagtctctagctatctcgtccagtctggtctctgatgtagtgcgtcccaaaacacaggggactgatctcaagacctcatcacatcctgaaatgcttcatgggatggcccctcagcaaaagcatgggcagactcctacaactcttccaagagcagctggtcgagaaaccaaatatgcaaatctctcctcaccatcttctacagtatctgagagtcagctgactaagcctggagtaattcgcccagtacctgtaaaatccagaatattactgaaaaaagaggaggaagtctatgaacccaaccctttcagtaaatacttggaagataacagcgacctcttttctgaacagctgagtcatccaatggtggctattcctgaacatgaagctcttgattccaaagagcaatgaagttggagcagaggctgaaaacacaggctgctgaagttttttggaatgctggtgctaaccacttgctagatttaacttttttttttttttccagaatgagtgctccctttatgagctgcagtgcagcagaaccaaaaaaaaagtttgctgcaattatatagcatcacagtgctctgctaacagccagcatagaagagatttacctacagctttttgcaccactgttctagcctttaatgccttctacttaatattaagctgaccgcaatactaacgtgcccctatatttggcagccaaataaagaagaatcgtgggtaaatag

SEQ ID NO: 15841 - protein, 234 aa, Homo sapiens
MCSWYLGFECSSKSNDYLTLNAGSQQERDQAKLTCPSEVSGTILQEREFEANKLQGMQQSDLFKAEYVLIVDSEGEDEAASRKVEQGPPGGIGTAAVRPKSLAISSSLVSDVVRPKTQGTDLKTSSHPEMLHGMAPQQKHGQTPTTLPRAAGRETKYANLSSPSSTVSESQLTKPGVIRPVPVKSRILLKKEEEVYEPNPFSKYLEDNSDLFSEQLSHPMVAIPEHEALDSKEQ

SEQ ID NO: 15842 - DNA, 1115 bp, Homo sapiens
cttatagattgccagcctgctcagcgtctctaacccttttcaggtctctgctggtggttctgaagccaaacctctgatcttcacatttgtccccactgtcagaagactaccaacccatactcagttggctgacacctctaaattccttgttaaaattccagaagaatcaagtgataagagtccagaaactgtaaataggtctaaatccaatgactacttgaccttgaatgctgggagccaacaagagagagaccaagcgaaattgacttgtccttcagaggtcagtggaacgattttacaagaaagggaattcgaagcaaacaaacttcaagggatgcagcaaagtgacctcttcaaagctgaatatgtccttattgtggactccgaaggggaagatgaggctgcaagcagaaaagttgaacaaggccccccaggggggattggcaccgcagctgtccggcccaagtctctagctatctcgtccagtctggtctctgatgtagtgcgtcccaaaacacaggggactgatctcaagacctcatcacatcctgaaatgcttcatgggatggcccctcagcaaaagcatgggcagttaacttcttctcccactacctctgagcagcttgcctgtaaaccacctgctttctcctttgtttctccaactaatccgaacacaccacccgacccagttaacctcgagggagcctctgtcctagaggagttccacactaggaggctggatgtcggtggggccgtggtggaagaatcagctacgtattttcaaactaccgctcactctacacccttttctgcatcgaagggcacctcctcgacgttactgtttccccattccactcaactatcaggttctaatttacccagttcaactgcagcagatccaaagcctggactgacctctgaagttctcaagaagacaactttaacctcgcatgtccttagtcacggagaaagtccgagaacctcttcttctccaccgtcctccagtgcttctctgaagtcgaattcggcctcgtacataccagtccgcattgtcacgcattcactctctccgagccccaaaccatttacctcctctttccacggctcttcttcca

SEQ ID NO: 15843 - protein, 259 aa, Homo sapiens
MQQSDLFKAEYVLIVDSEGEDEAASRKVEQGPPGGIGTAAVRPKSLAISSSLVSDVVRPKTQGTDLKTSSHPEMLHGMAPQQKHGQLTSSPTTSEQLACKPPAFSFVSPTNPNTPPDPVNLEGASVLEEFHTRRLDVGGAVVEESATYFQTTAHSTPFSASKGTSSTLLFPHSTQLSGSNLPSSTAADPKPGLTSEVLKKTTLTSHVLSHGESPRTSSSPPSSSASLKSNSASYIPVRIVTHSLSPSPKPFTSSFHGSS

SEQ ID NO: 15844 - DNA, 4998 bp, Homo sapiens
ggaagcccgggagtgagagaaagcggctccgggggcatagcgggccagtaagggccgctcctcctttgaagaggttttgcgtctctttccgccggtggcgtcggcgctcacgcaggggcgggtcccggtagcgccaggcggtgcagggcgggaaggggattcgtggcgacggcggcggcagggacagcaggagcagtggtgctgtcagcgcggccgtcggagacatgggagacccggggtcggagataatagaatctgtccctccagctggccctgaggcatctgagtcaacaacggatgaaaatgaagacgacattcagtttgtcagtgaaggaccattacgacctgttcttgaatacattgatctggtcagcagtgatgatgaagagcctagcacctcttatactgatgagaatattaaacgtaaagaccatattgattatcagaaggataaagttgctttaactctggctcgtctagcccgccatgttgaagtggagaaacagcagaaagaagagaagaatagagcattcagagaaaaaattgattttcagcatgctcatgggttacaagaattggaatttattcgaggacattctgatacagaagcagcaagactgtgtgtggaccagtggctaaaaatgccaggactcaaaacaggcacaattaattgtggaacaaaaagttcattccgaagaggaggccacacgtgggtgtctgggaaaccaattttatgtcctataatgcactgtaacaaggagtttgacaatgggcaccttctcttaggacatttgaaaaggttcgatcactctccatgtgatccaacaattacactacatggacctttcttcagctcctttgcttgtgtagtatgttataaaaaatttgttactcaacaacaatatagagatcacctttttgataaggaagccacagatgatggacataacaacaaccttcttcctcagattattcagtgttttgcatgtccaaattgcttccttctttttagcagaaaggaggagtgttcaaagcatatgtctggaaagaatcatttccatcagagtttcaaactgggtgataacaaaggaattgcacatccaatatctttcccatcttttgcaaagaaacttttgatctctctgtgcaaagatgttccctttcaagttaagtgtgtggcctgccacaagacactgcgttcccacatggagctcactgcccatttcagagttcattgtcgaaatgctggacctgtagctgtagctgagaagagcattacccaggttgcagagaaattcatattaagaggttattgtccagattgcaatcaagtctttgtggatgaaaccagcacccaaaatcataagcagaattcaggacacaaagtccgagtcattaactcagtggaagaatcagtcttactctattgccacagcagcgaagggaacaaggatccttcttctgacttgcatttattgttggatcaatcaaaattttcatcacttaaaagaaccatgtctattaaagaatctagctcactggagtgcattgccattccaaaaaagaagatgaatttaaaagataaaagccatgaaggtgttgcttgtgtccagaaagaaaaatcagtagttaaaacctggttctgtgaatgcaatcagcgattcccaagtgaagatgcagtagaaaagcatgttttctcagcaaacacaatgggttataaatgtgtggtctgtggaaaggtatgtgatgattcaggggtcattcgtttacacatgagccggattcacggaggggcacatttaaataactttcttttctggtgtcggacatgcaaaaaggagttaacaaggaaagatactatcatggcacatgtgactgaatttcataatggacacagatatttttatgagatggatgaggtagaaggtgaaactttgccatcatcctctacaacattggataatttgactgctaacaagccttcatcagctattactgttattgatcattccccggcaaatagttctccgaggggtaaatggcaatgccggatttgtgaagatatgtttgattcccaggaatatgtaaaacagcactgcatgtctttggcaagccacaagtttcatagatacagctgtgctcactgcagaaagccttttcataagatagaaacattgtaccgacattgccaagatgagcatgacaatgagataaagattaaatacttctgtgggctttgtgatcttatctttaatgtggaagaagcatttctgagtcattatgaggagcaccacagcatagattatgtatttgtgtcagaaaaaactgaaacttcaattaaaaccgaagatgattttccagtaatagagaccagtaaccagttaacttgtggttgccgtgagagttacatctgtaaagtcaacagaaaagaagattatagcagatgtctccaaatcatgctggataaaggaaaactgtggtttcgctgcagtttatgttcggcaacagcacagaatttaaccgacatgaacactcatatccatcaagtgcacaaagaaaagagtgatgaggaggagcagcagtatgtaatcaagtgtggcacctgcaccaaagcatttcatgatcctgagagtgcacagcagcatttccatagaaaacattgcttcttacagaaacccagtgtggctcattttggatctgaaaaatcaaacctgtacaagtttactgctagtgcctcacatacagagagaaaactgaaacaggcaataaactattcaaaaagtttagacatggagaaaggagttgagaatgacctaagctatcagaatataggaggaaacaccaattggaagcctccgctcaactgtaagatttataactacctgaacaggattggatgcttcttccttcatcctcgctgtagtaaaagaaaagatgctgctgattttgccatatgtatgcatgctggccgtctagatgaacaactacccaagcaaattcctttcaccatcctctcaggagatcaaggttttctggagctagagaatcaatttaagaagactcagaggccagctcatatactaaaccctcaccacttagagggagatatgatgtgtgccttgttaaatagcatatctgataccaccaaagaatgtgacagtgatgataacatgggtgccaaaaatacttcaataggagaagaatttatatccacagaagatgtggaattagaagaagctattagaagaagtcttgaggaaatgtaattaaagatattaccacacaacatcaagtggccttgaagagactgagataacgaattcttgagtttgttttctaaaggagaccagaaatccactattacaaatgtatttgaaaacatgtttttgctttcatatgttcaaaatctgatctttgttttgtatttttgtgctaatgtgcaaacatgtacagaagaaatagaatacatgttcatgcaaatataaattatgtattctaatataggtgtaacagtttcccagttaactttgaatttatatatttagatttaaaggattaaaaaaaaggaaagctcttgacagttgtttcccaaatagcattagttctttaattttatttgtactgtacaaatgatgctagtttatttttttagcagtgaaaatgaatataaaaaaggtgacataggtcaagttttccataaattctacttctcatgtggcactattatataatacctttgagatctttgtttatgtttattagaagagggtaatggaaactgatcatggaaacatttaaaattttatcagcaatgttctttgtgggtgccatgcatatgtaaattattgctttaattagagcagcacattgctaaaataaaaaatacaccttaatttttaagaaataatttaaatgaaacaatttccattccttttacctgcttagacttttatgtgacttgtatggtctcctggttaaagggaatggtgtcagaatatttgcataaaattatttttcataacagtccttttttatatattggtgtaaacataatattcttcaagaaataatgttgaaagcctactcaggaataatcttccttaactctttaaatttttatttcatgtgaagtgttttcagtttagttattcactgaattgtcagtttccttcatttggtattacatatttaattcttaaatattgaggccccattgtgagtaataaaaaatacgacataagtagaagactaagaagggcttgtcatattatctttgtgtatatgcttcatgttatttaaccagaaatgtcttatctctaaaaatttttagtagtaattatttaccaaacttaaaaacatttctataaatataaagcttttctttatatttaagacaaaatataaaggctagaatttggttccttctctgtaacactaaatattttagtgtgaaattgaatttttttattactatagtcttttcaatctataatttgtgtttttaatttcttgatatgtcacttctgttcctccctgcttgcattttttaaaaactagacattgtggcttgagaatttatcaatcatctttccgaaatgaccacattgtgcttttagtttgtatgtttaagtggtcaagcaaggctctaggaggtagtcactgagctggaccttaaacacatctgcaggagctcacaaaatgggagcaaaagaggcattccagaaagaagagtagttaagcagatgtgggggcagggcaagaggagacagcaccttgttgccagagattctacacaaaggtgtgatggacactgatgctctattaagaagcttttgtggtgtgtgtggtagagaataattaaggcttctgataagacaggaaagggatatttcatcatgactgttaagaaaaggtaactgggttgtttaatgttttaattgataattgtcactgatcgtatttctacttgttaaataattaaaaatcatcttaaaattc

SEQ ID NO: 15845 - protein, 1013 aa, Homo sapiens; identical to SEQ ID NO: 1812

SEQ ID NO: 15846 - DNA, 5104 bp, Homo sapiens
ggaagcccgggagtgagagaaagcggctccgggggcatagcgggccagtaagggccgctcctcctttgaagaggttttgcgtctctttccgccggtggcgtcggcgctcacgcaggggcgggtcccggtagcgccaggcggtgcagggcgggaaggggattcgtggcgacggcggcggcagggacagcaggagcagtggtgctgtcagcgcggccgtcggagacatgggagacccggggtcggagataatagaatctgtccctccagctggccctgaggcatctgagtcaacaacggatgaaaatgaagacgacattcagtttgtcagtgaaggaccattacgacctgttcttgaatacattgatctggtcagcagtgatgatgaagagcctagcacctcttatactgatgagaatattaaacgtaaagaccatattgattatcagaaggataaagttgctttaactctggctcgtctagcccgccatgttgaagtggagaaacagcagaaagaagagaagaatagagcattcagagaaaaaattgattttcagcatgctcatgggttacaagaattggaatttattcgaggacattctgatacagaagcagcaagactgtgtgtggaccagtggctaaaaatgccaggactcaaaacaggcacaattaattgtggaacaaaaagttcattccgaagaggaggccacacgtgggtgtctgggaaaccaattttatgtcctataatgcactgtaacaaggagtttgacaatgggcaccttctcttaggacatttgaaaaggttcgatcactctccatgtgatccaacaattacactacatggacctttcttcagctcctttgcttgtgtagtatgttataaaaaatttgttactcaacaacaatatagagatcacctttttgataaggaagccacagatgatggacataacaacaaccttcttcctcagattattcagtgttttgcatgtccaaattgcttccttctttttagcagaaaggaggagtgttcaaagcatatgtctggaaagaatcatttccatcagagtttcaaactgggtgataacaaaggaattgcacatccaatatctttcccatcttttgcaaagaaacttttgatctctctgtgcaaagatgttccctttcaagttaagtgtgtggcctgccacaagacactgcgttcccacatggagctcactgcccatttcagagttcattgtcgaaatgctggacctgtagctgtagctgagaagagcattacccaggttgcagagaaattcatattaagaggttattgtccagattgcaatcaagtctttgtggatgaaaccagcacccaaaatcataagcagaattcaggacacaaagtccgagtcattaactcagtggaagaatcagtcttactctattgccacagcagcgaagggaacaaggatccttcttctgacttgcatttattgttggatcaatcaaaattttcatcacttaaaagaaccatgtctattaaagaatctagctcactggagtgcattgccattccaaaaaagaagatgaatttaaaagataaaagccatgaaggtgttgcttgtgtccagaaagaaaaatcagtagttaaaacctggttctgtgaatgcaatcagcgattcccaagtgaagatgcagtagaaaagcatgttttctcagcaaacacaatgggttataaatgtgtggtctgtggaaaggtatgtgatgattcaggggtcattcgtttacacatgagccggattcacggaggggcacatttaaataactttcttttctggtgtcggacatgcaaaaaggagttaacaaggaaagatactatcatggcacatgtgactgaatttcataatggacacagatatttttatgagatggatgaggtagaaggtgaaactttgccatcatcctctacaacattggataatttgactgctaacaagccttcatcagctattactgttattgatcattccccggcaaatagttctccgaggggtaaatggcaatgccggatttgtgaagatatgtttgattcccaggaatatgtaaaacagcactgcatgtctttggcaagccacaagtttcatagatacagctgtgctcactgcagaaagccttttcataagatagaaacattgtaccgacattgccaagatgagcatgacaatgagataaagattaaatacttctgtgggctttgtgatcttatctttaatgtggaagaagcatttctgagtcattatgaggagcaccacagcatagattatgtatttgtgtcagaaaaaactgaaacttcaattaaaaccgaagatgattttccagtaatagagaccagtaaccagttaacttgtggttgccgtgagagttacatctgtaaagtcaacagaaaagaagattatagcagatgtctccaaatcatgctggataaaggaaaactgtggtttcgctgcagtttatgttcggcaacagcacagaatttaaccgacatgaacactcatatccatcaagtgcacaaagaaaagagtgatgaggaggagcagcagtatgtaatcaagtgtggcacctgcaccaaagcatttcatgatcctgagagtgcacagcagcatttccatagaaaacattgcttcttacagaaacccagtgtggctcattttggatctgaaaaatcaaacctgtacaagtttactgctagtgcctcacatacagagagaaaactgaaacaggcaataaactattcaaaaagtttagacatggagaaaggagttgagaatgacctaagctatcagaatataggaggaaacaccaattggaagcctccgctcaactgtaagatttataactacctgaacaggattggatgcttcttccttcatcctcgctgtagtaaaagaaaagatgctgctgattttgccatatgtatgcatgctggccgtctagatgaacaactacccaagcaaattcctttcaccatcctctcaggagatcaaggttttctggagctagagaatcaatttaagaagactcagaggccagctcatatactaaaccctcaccacttagagggagatatgatgtgtgccttgttaaatagcatatctgataccaccaaagaatgtgacagtgatgataacatgggtgccaaaaatacttcaataggagaagaatttatatccacagaagatgtggaattagaagaagctattagaagaagtcttgaggaaatgtaattaaagatattaccacacaacatcaagtggccttgaagagactgagataacgaattcttgagtttgttttctaaaggagaccagaaatccactattacaaatgtatttgaaaacatgtttttgctttcatatgttcaaaatctgatctttgttttgtatttttgtgctaatgtgcaaacatgtacagaagaaatagaatacatgttcatgcaaatataaattatgtattctaatataggtgtaacagtttcccagttaactttgaatttatatatttagatttaaaggattaaaaaaaaggaaagctcttgacagttgtttcccaaatagcattagttctttaattttatttgtactgtacaaatgatgctagtttatttttttagcagtgaaaatgaatataaaaaaggtgacataggtcaagttttccataaattctacttctcatgtggcactattatataatacctttgagatctttgtttatgtttattagaagagggtaatggaaactgatcatggaaacatttaaaattttatcagcaatgttctttgtgggtgccatgcatatgtaaattattgctttaattagagcagcacattgctaaaataaaaaatacaccttaatttttaagaaataatttaaatgaaacaatttccattccttttacctgcttagacttttatgtgacttgtatggtctcctggttaaagggaatggtgtcagaatatttgcataaaattatttttcataacagtccttttttatatattggtgtaaacataatattcttcaagaaataatgttgaaagcctactcaggaataatcttccttaactctttaaatttttatttcatgtgaagtgttttcagtttagttattcactgaattgtcagtttccttcatttggtattacatatttaattcttaaatattgaggccccattgtgagtaataaaaaatacgacataagtagaagactaagaagggcttgtcatattatctttgtgtatatgcttcatgttatttaaccagaaatgtcttatctctaaaaatttttagtagtaattatttaccaaacttaaaaacatttctataaatataaagcttttctttatatttaagacaaaatataaaggctagaatttggttccttctctgtaacactaaatattttagtgtgaaattgaatttttttattactatagtcttttcaatctataatttgtgtttttaatttcttgatatgtcacttctgttcctccctgcttgcattttttaaaaactagacattgtggcttgagaatttatcaatcatctttccgaaatgaccacattgtgcttttagtttgtatgtttaagtggtcaagcaaggctctaggaggtagtcactgagctggaccttaaacacatctgcaggagctcacaaaatgggagcaaaagaggcattccagaaagaagagtagttaagcagatgtgggggcagggcaagaggagacagcaccttgttgccagagattctacacaaaggtgtgatggacactgatgctctattaagaagcttttgtggtgtgtgtggtagagaataattaaggcttctgataagacaggaaagggatatttcatcatgactgttaagaaaaggtaactgggttgtttaatgttttaattgataattgtcactgatcgtatttctacttgttaaataattaaaaatcatcttaaaattcatactttgactttaatttagacacaaggagatgtaatcgctgtgtaacatcagagaaagctatatggattatcgtcagaagtaaatgtttctaacattgacaaaga

SEQ ID NO: 15847 - protein, 1013 aa, Homo sapiens; identical to SEQ ID NO: 1812

SEQ ID NO: 15848 - DNA, 3756 bp, Homo sapiens
gggagtgagagaaagcggctccgggggcatagcgggccagtaagggccgctcctcctttgaagaggttttgcgtctctttccgccggtggcgtcggcgctcacgcaggggcgggtcccggtagcgccaggcggtgcagggcgggaaggggattcgtggcgacggcggcggcagggacagcaggagcagtggtgctgtcagcgcggccgtcggagacatgggagacccggggtcggagataatagaatctgtccctccagctggccctgaggcatctgagtcaacaacggatgaaaatgaagacgacattcagtttgtcagtgaaggaccattacgacctgttcttgaatacattgatctggtcagcagtgatgatgaagagcctagcacctcttatactgatgagaatattaaacgtaaagaccatattgattatcagaaggataaagttgctttaactctggctcgtctagcccgccatgttgaagtggagaaacagcagaaagaagagaagaatagagcattcagagaaaaaattgattttcagcatgctcatgggttacaagaattggaatttattcgaggacattctgatacagaagcagcaagactgtgtgtggaccagtggctaaaaatgccaggactcaaaacaggcacaattaattgtggaacaaaaagttcattccgaagaggaggccacacgtgggtgtctgggaaaccaattttatgtcctataatgcactgtaacaaggagtttgacaatgggcaccttctcttaggacatttgaaaaggttcgatcactctccatgtgatccaacaattacactacatggacctttcttcagctcctttgcttgtgtagtatgttataaaaaatttgttactcaacaacaatatagagatcacctttttgataaggaagccacagatgatggacataacaacaaccttcttcctcagattattcagtgttttgcatgtccaaattgcttccttctttttagcagaaaggaggagtgttcaaagcatatgtctggaaagaatcatttccatcagagtttcaaactgggtgataacaaaggaattgcacatccaatatctttcccatcttttgcaaagaaacttttgatctctctgtgcaaagatgttccctttcaagttaagtgtgtggcctgccacaagacactgcgttcccacatggagctcactgcccatttcagagttcattgtcgaaatgctggacctgtagctgtagctgagaagagcattacccaggttgcagagaaattcatattaagaggttattgtccagattgcaatcaagtctttgtggatgaaaccagcacccaaaatcataagcagaattcaggacacaaagtccgagtcattaactcagtggaagaatcagtcttactctattgccacagcagcgaagggaacaaggatccttcttctgacttgcatttattgttggatcaatcaaaattttcatcacttaaaagaaccatgtctattaaagaatctagctcactggagtgcattgccattccaaaaaagaagatgaatttaaaagataaaagccatgaaggtgttgcttgtgtccagaaagaaaaatcagtagttaaaacctggttctgtgaatgcaatcagcgattcccaagtgaagatgcagtagaaaagcatgttttctcagcaaacacaatgggttataaatgtgtggtctgtggaaaggtatgtgatgattcaggggtcattcgtttacacatgagccggattcacggaggggcacatttaaataactttcttttctggtgtcggacatgcaaaaaggagttaacaaggaaagatactatcatggcacatgtgactgaatttcataatggacacagatatttttatgagatggatgaggtagaaggtgaaactttgccatcatcctctacaacattggataatttgactgctaacaagccttcatcagctattactgttattgatcattccccggcaaatagttctccgaggggtaaatggcaatgccggatttgtgaagatatgtttgattcccaggaatatgtaaaacagcactgcatgtctttggcaagccacaagtttcatagatacagctgtgctcactgcagaaagccttttcataagatagaaacattgtaccgacattgccaagatgagcatgacaatgagataaagattaaatacttctgtgggctttgtgatcttatctttaatgtggaagaagcatttctgagtcattatgaggagcaccacagcatagattatgtatttgtgtcagaaaaaactgaaacttcaattaaaaccgaagatgattttccagtaatagagaccagtaaccagttaacttgtggttgccgtgagagttacatctgtaaagtcaacagaaaagaagattatagcagatgtctccaaatcatgctggataaaggaaaactgtggtttcgctgcagtttatgttcggcaacagcacagaatttaaccgacatgaacactcatatccatcaagtgcacaaagaaaagagtgatgaggaggagcagcagtatgtaatcaagtgtggcacctgcaccaaagcatttcatgatcctgagagtgcacagcagcatttccatagaaaacattgcttcttacagaaacccagtgtggctcattttggatctgaaaaatcaaacctgtacaagtttactgctagtgcctcacatacagagagaaaactgaaacaggcaataaactattcaaaaagtttagacatggagaaaggagttgagaatgacctaagctatcagaatatagaggaagaaattgttgagcttccagatttggattacctgcgaaccatgactcatatagtctttgtagattttgataactggtcaaacttttttggtcatctaccagggcatctaaaccaaggaacatttatttggggctttcaaggtacggttaataagaaaaacaaaagaaaactttttcccacctcttagaatatagttcagtttaaaaggctcctcttaaaccttcctggatagaacataggaacataattggaatattgttcttttgtattatagttactctgctagaatcgttttctttacatgcctctgtggtaaatgttagctctatctggtgactcaaagtttatggatcttttggccgggcgcggtggctcacgtctgtaatcccagaactttggaaggctgaggcggacggatcacgaggtcagaagatcgagaccatcctggctaacatggtgaaaccccgtctctactaaaaagaaaaaaaaaatacaaaaaattagctgggcgtggtggcgggcccctgtagtcccagctccttgggaggctgaggcaggagaatggtgtgaacccaggaggcgaagcttgcagtgagctgagatcgcaccactgctctccagcctgggcaacagagtgagactctgtcttaaaaaaaaaaaaaaaaaaaaaaaaaagtttatggatcttttgatacagattgaaaaagcctttattcaacacctaaaatgtgtcaggtgctttggctttgtactaacatggttactgattattatggttttatcccttttaaaatacaaagaagcagatgttttgtttttgtttttgttttttttccctcaaagttttaaaactaataaatagcagaattatttggcctctcagctataggactaatgttattttcaacatgccataactgcctcttcg

SEQ ID NO: 15849 - protein, 932 aa, Homo sapiens
MGDPGSEIIESVPPAGPEASESTTDENEDDIQFVSEGPLRPVLEYIDLVSSDDEEPSTSYTDENIKRKDHIDYQKDKVALTLARLARHVEVEKQQKEEKNRAFREKIDFQHAHGLQELEFIRGHSDTEAARLCVDQWLKMPGLKTGTINCGTKSSFRRGGHTWVSGKPILCPIMHCNKEFDNGHLLLGHLKRFDHSPCDPTITLHGPFFSSFACVVCYKKFVTQQQYRDHLFDKEATDDGHNNNLLPQIIQCFACPNCFLLFSRKEECSKHMSGKNHFHQSFKLGDNKGIAHPISFPSFAKKLLISLCKDVPFQVKCVACHKTLRSHMELTAHFRVHCRNAGPVAVAEKSITQVAEKFILRGYCPDCNQVFVDETSTQNHKQNSGHKVRVINSVEESVLLYCHSSEGNKDPSSDLHLLLDQSKFSSLKRTMSIKESSSLECIAIPKKKMNLKDKSHEGVACVQKEKSVVKTWFCECNQRFPSEDAVEKHVFSANTMGYKCVVCGKVCDDSGVIRLHMSRIHGGAHLNNFLFWCRTCKKELTRKDTIMAHVTEFHNGHRYFYEMDEVEGETLPSSSTTLDNLTANKPSSAITVIDHSPANSSPRGKWQCRICEDMFDSQEYVKQHCMSLASHKFHRYSCAHCRKPFHKIETLYRHCQDEHDNEIKIKYFCGLCDLIFNVEEAFLSHYEEHHSIDYVFVSEKTETSIKTEDDFPVIETSNQLTCGCRESYICKVNRKEDYSRCLQIMLDKGKLWFRCSLCSATAQNLTDMNTHIHQVHKEKSDEEEQQYVIKCGTCTKAFHDPESAQQHFHRKHCFLQKPSVAHFGSEKSNLYKFTASASHTERKLKQAINYSKSLDMEKGVENDLSYQNIEEEIVELPDLDYLRTMTHIVFVDFDNWSNFFGHLPGHLNQGTFIWGFQGTVNKKNKRKLFPTS

SEQ ID NO: 15850 - DNA, 5134 bp, Homo sapiens
gggagtgagagaaagcggctccgggggcatagcgggccagtaagggccgctcctcctttgaagaggttttgcgtctctttccgccggtggcgtcggcgctcacgcaggggcgggtcccggtagcgccaggcggtgcagggcgggaaggggattcgtggcgacggcggcggcagggacagcaggagcagtggtgctgtcagcgcggccgtcggagacatgggagacccggggtcggagataatagaatctgtccctccagctggccctgaggcatctgagtcaacaacggatgaaaatgaagacgacattcagtttgtcagtgaaggaccattacgacctgttcttgaatacattgatctggtcagcagtgatgatgaagagcctagcacctcttatactgatgagaatattaaacgtaaagaccatattgattatcagaaggataaagttgctttaactctggctcgtctagcccgccatgttgaagtggagaaacagcagaaagaagagaagaatagagcattcagagaaaaaattgattttcagcatgctcatgggttacaagaattggaatttattcgaggacattctgatacagaagcagcaagactgtgtgtggaccagtggctaaaaatgccaggactcaaaacaggcacaattaattgtggaacaaaaagttcattccgaagaggaggccacacgtgggtgtctgggaaaccaattttatgtcctataatgcactgtaacaaggagtttgacaatgggcaccttctcttaggacatttgaaaaggttcgatcactctccatgtgatccaacaattacactacatggacctttcttcagctcctttgcttgtgtagtatgttataaaaaatttgttactcaacaacaatatagagatcacctttttgataaggaagccacagatgatggacataacaacaaccttcttcctcagattattcagtgttttgcatgtccaaattgcttccttctttttagcagaaaggaggagtgttcaaagcatatgtctggaaagaatcatttccatcagagtttcaaactgggtgataacaaaggaattgcacatccaatatctttcccatcttttgcaaagaaacttttgatctctctgtgcaaagatgttccctttcaagttaagtgtgtggcctgccacaagacactgcgttcccacatggagctcactgcccatttcagagttcattgtcgaaatgctggacctgtagctgtagctgagaagagcattacccaggttgcagagaaattcatattaagaggttattgtccagattgcaatcaagtctttgtggatgaaaccagcacccaaaatcataagcagaattcaggacacaaagtccgagtcattaactcagtggaagaatcagtcttactctattgccacagcagcgaagggaacaaggatccttcttctgacttgcatttattgttggatcaatcaaaattttcatcacttaaaagaaccatgtctattaaagaatctagctcactggagtgcattgccattccaaaaaagaagatgaatttaaaagataaaagccatgaaggtgttgcttgtgtccagaaagaaaaatcagtagttaaaacctggttctgtgaatgcaatcagcgattcccaagtgaagatgcagtagaaaagcatgttttctcagcaaacacaatgggttataaatgtgtggtctgtggaaaggtatgtgatgattcaggggtcattcgtttacacatgagccggattcacggaggggcacatttaaataactttcttttctggtgtcggacatgcaaaaaggagttaacaaggaaagatactatcatggcacatgtgactgaatttcataatggacacagatatttttatgagatggatgaggtagaaggtgaaactttgccatcatcctctacaacattggataatttgactgctaacaagccttcatcagctattactgttattgatcattccccggcaaatagttctccgaggggtaaatggcaatgccggatttgtgaagatatgtttgattcccaggaatatgtaaaacagcactgcatgtctttggcaagccacaagtttcatagatacagctgtgctcactgcagaaagccttttcataagatagaaacattgtaccgacattgccaagatgagcatgacaatgagataaagattaaatacttctgtgggctttgtgatcttatctttaatgtggaagaagcatttctgagtcattatgaggagcaccacagcatagattatgtatttgtgtcagaaaaaactgaaacttcaattaaaaccgaagatgattttccagtaatagagaccagtaaccagttaacttgtggttgccgtgagagttacatctgtaaagtcaacagaaaagaagattatagcagatgtctccaaatcatgctggataaaggaaaactgtggtttcgctgcagtttatgttcggcaacagcacagaatttaaccgacatgaacactcatatccatcaagtgcacaaagaaaagagtgatgaggaggagcagcagtatgtaatcaagtgtggcacctgcaccaaagcatttcatgatcctgagagtgcacagcagcatttccatagaaaacattgcttcttacagaaacccagtgtggctcattttggatctgaaaaatcaaacctgtacaagtttactgctagtgcctcacatacagagagaaaactgaaacaggcaataaactattcaaaaagtttagacatggagaaaggagttgagaatgacctaagctatcagaatatagaggaagaaattgttgagcttccagatttggattacctgcgaaccatgactcatatagtctttgtagattttgataactggtcaaacttttttggtcatctaccagggcatctaaaccaaggaacatttatttggggctttcaaggaggaaacaccaattggaagcctccgctcaactgtaagatttataactacctgaacaggattggatgcttcttccttcatcctcgctgtagtaaaagaaaagatgctgctgattttgccatatgtatgcatgctggccgtctagatgaacaactacccaagcaaattcctttcaccatcctctcaggagatcaaggttttctggagctagagaatcaatttaagaagactcagaggccagctcatatactaaaccctcaccacttagagggagatatgatgtgtgccttgttaaatagcatatctgataccaccaaagaatgtgacagtgatgataacatgggtgccaaaaatacttcaataggagaagaatttatatccacagaagatgtggaattagaagaagctattagaagaagtcttgaggaaatgtaattaaagatattaccacacaacatcaagtggccttgaagagactgagataacgaattcttgagtttgttttctaaaggagaccagaaatccactattacaaatgtatttgaaaacatgtttttgctttcatatgttcaaaatctgatctttgttttgtatttttgtgctaatgtgcaaacatgtacagaagaaatagaatacatgttcatgcaaatataaattatgtattctaatataggtgtaacagtttcccagttaactttgaatttatatatttagatttaaaggattaaaaaaaaggaaagctcttgacagttgtttcccaaatagcattagttctttaattttatttgtactgtacaaatgatgctagtttatttttttagcagtgaaaatgaatataaaaaaggtgacataggtcaagttttccataaattctacttctcatgtggcactattatataatacctttgagatctttgtttatgtttattagaagagggtaatggaaactgatcatggaaacatttaaaattttatcagcaatgttctttgtgggtgccatgcatatgtaaattattgctttaattagagcagcacattgctaaaataaaaaatacaccttaatttttaagaaataatttaaatgaaacaatttccattccttttacctgcttagacttttatgtgacttgtatggtctcctggttaaagggaatggtgtcagaatatttgcataaaattatttttcataacagtccttttttatatattggtgtaaacataatattcttcaagaaataatgttgaaagcctactcaggaataatcttccttaactctttaaatttttatttcatgtgaagtgttttcagtttagttattcactgaattgtcagtttccttcatttggtattacatatttaattcttaaatattgaggccccattgtgagtaataaaaaatacgacataagtagaagactaagaagggcttgtcatattatctttgtgtatatgcttcatgttatttaaccagaaatgtcttatctctaaaaatttttagtagtaattatttaccaaacttaaaaacatttctataaatataaagcttttctttatatttaagacaaaatataaaggctagaatttggttccttctctgtaacactaaatattttagtgtgaaattgaatttttttattactatagtcttttcaatctataatttgtgtttttaatttcttgatatgtcacttctgttcctccctgcttgcattttttaaaaactagacattgtggcttgagaatttatcaatcatctttccgaaatgaccacattgtgcttttagtttgtatgtttaagtggtcaagcaaggctctaggaggtagtcactgagctggaccttaaacacatctgcaggagctcacaaaatgggagcaaaagaggcattccagaaagaagagtagttaagcagatgtgggggcagggcaagaggagacagcaccttgttgccagagattctacacaaaggtgtgatggacactgatgctctattaagaagcttttgtggtgtgtgtggtagagaataattaaggcttctgataagacaggaaagggatatttcatcatgactgttaagaaaaggtaactgggttgtttaatgttttaattgataattgtcactgatcgtatttctacttgttaaataattaaaaatcatcttaaaattc

SEQ ID NO: 15851 - protein, 1061 aa, Homo sapiens; identical to SEQ ID NO: 1810

SEQ ID NO: 15852 - DNA, 5240 bp, Homo sapiens
gggagtgagagaaagcggctccgggggcatagcgggccagtaagggccgctcctcctttgaagaggttttgcgtctctttccgccggtggcgtcggcgctcacgcaggggcgggtcccggtagcgccaggcggtgcagggcgggaaggggattcgtggcgacggcggcggcagggacagcaggagcagtggtgctgtcagcgcggccgtcggagacatgggagacccggggtcggagataatagaatctgtccctccagctggccctgaggcatctgagtcaacaacggatgaaaatgaagacgacattcagtttgtcagtgaaggaccattacgacctgttcttgaatacattgatctggtcagcagtgatgatgaagagcctagcacctcttatactgatgagaatattaaacgtaaagaccatattgattatcagaaggataaagttgctttaactctggctcgtctagcccgccatgttgaagtggagaaacagcagaaagaagagaagaatagagcattcagagaaaaaattgattttcagcatgctcatgggttacaagaattggaatttattcgaggacattctgatacagaagcagcaagactgtgtgtggaccagtggctaaaaatgccaggactcaaaacaggcacaattaattgtggaacaaaaagttcattccgaagaggaggccacacgtgggtgtctgggaaaccaattttatgtcctataatgcactgtaacaaggagtttgacaatgggcaccttctcttaggacatttgaaaaggttcgatcactctccatgtgatccaacaattacactacatggacctttcttcagctcctttgcttgtgtagtatgttataaaaaatttgttactcaacaacaatatagagatcacctttttgataaggaagccacagatgatggacataacaacaaccttcttcctcagattattcagtgttttgcatgtccaaattgcttccttctttttagcagaaaggaggagtgttcaaagcatatgtctggaaagaatcatttccatcagagtttcaaactgggtgataacaaaggaattgcacatccaatatctttcccatcttttgcaaagaaacttttgatctctctgtgcaaagatgttccctttcaagttaagtgtgtggcctgccacaagacactgcgttcccacatggagctcactgcccatttcagagttcattgtcgaaatgctggacctgtagctgtagctgagaagagcattacccaggttgcagagaaattcatattaagaggttattgtccagattgcaatcaagtctttgtggatgaaaccagcacccaaaatcataagcagaattcaggacacaaagtccgagtcattaactcagtggaagaatcagtcttactctattgccacagcagcgaagggaacaaggatccttcttctgacttgcatttattgttggatcaatcaaaattttcatcacttaaaagaaccatgtctattaaagaatctagctcactggagtgcattgccattccaaaaaagaagatgaatttaaaagataaaagccatgaaggtgttgcttgtgtccagaaagaaaaatcagtagttaaaacctggttctgtgaatgcaatcagcgattcccaagtgaagatgcagtagaaaagcatgttttctcagcaaacacaatgggttataaatgtgtggtctgtggaaaggtatgtgatgattcaggggtcattcgtttacacatgagccggattcacggaggggcacatttaaataactttcttttctggtgtcggacatgcaaaaaggagttaacaaggaaagatactatcatggcacatgtgactgaatttcataatggacacagatatttttatgagatggatgaggtagaaggtgaaactttgccatcatcctctacaacattggataatttgactgctaacaagccttcatcagctattactgttattgatcattccccggcaaatagttctccgaggggtaaatggcaatgccggatttgtgaagatatgtttgattcccaggaatatgtaaaacagcactgcatgtctttggcaagccacaagtttcatagatacagctgtgctcactgcagaaagccttttcataagatagaaacattgtaccgacattgccaagatgagcatgacaatgagataaagattaaatacttctgtgggctttgtgatcttatctttaatgtggaagaagcatttctgagtcattatgaggagcaccacagcatagattatgtatttgtgtcagaaaaaactgaaacttcaattaaaaccgaagatgattttccagtaatagagaccagtaaccagttaacttgtggttgccgtgagagttacatctgtaaagtcaacagaaaagaagattatagcagatgtctccaaatcatgctggataaaggaaaactgtggtttcgctgcagtttatgttcggcaacagcacagaatttaaccgacatgaacactcatatccatcaagtgcacaaagaaaagagtgatgaggaggagcagcagtatgtaatcaagtgtggcacctgcaccaaagcatttcatgatcctgagagtgcacagcagcatttccatagaaaacattgcttcttacagaaacccagtgtggctcattttggatctgaaaaatcaaacctgtacaagtttactgctagtgcctcacatacagagagaaaactgaaacaggcaataaactattcaaaaagtttagacatggagaaaggagttgagaatgacctaagctatcagaatatagaggaagaaattgttgagcttccagatttggattacctgcgaaccatgactcatatagtctttgtagattttgataactggtcaaacttttttggtcatctaccagggcatctaaaccaaggaacatttatttggggctttcaaggaggaaacaccaattggaagcctccgctcaactgtaagatttataactacctgaacaggattggatgcttcttccttcatcctcgctgtagtaaaagaaaagatgctgctgattttgccatatgtatgcatgctggccgtctagatgaacaactacccaagcaaattcctttcaccatcctctcaggagatcaaggttttctggagctagagaatcaatttaagaagactcagaggccagctcatatactaaaccctcaccacttagagggagatatgatgtgtgccttgttaaatagcatatctgataccaccaaagaatgtgacagtgatgataacatgggtgccaaaaatacttcaataggagaagaatttatatccacagaagatgtggaattagaagaagctattagaagaagtcttgaggaaatgtaattaaagatattaccacacaacatcaagtggccttgaagagactgagataacgaattcttgagtttgttttctaaaggagaccagaaatccactattacaaatgtatttgaaaacatgtttttgctttcatatgttcaaaatctgatctttgttttgtatttttgtgctaatgtgcaaacatgtacagaagaaatagaatacatgttcatgcaaatataaattatgtattctaatataggtgtaacagtttcccagttaactttgaatttatatatttagatttaaaggattaaaaaaaaggaaagctcttgacagttgtttcccaaatagcattagttctttaattttatttgtactgtacaaatgatgctagtttatttttttagcagtgaaaatgaatataaaaaaggtgacataggtcaagttttccataaattctacttctcatgtggcactattatataatacctttgagatctttgtttatgtttattagaagagggtaatggaaactgatcatggaaacatttaaaattttatcagcaatgttctttgtgggtgccatgcatatgtaaattattgctttaattagagcagcacattgctaaaataaaaaatacaccttaatttttaagaaataatttaaatgaaacaatttccattccttttacctgcttagacttttatgtgacttgtatggtctcctggttaaagggaatggtgtcagaatatttgcataaaattatttttcataacagtccttttttatatattggtgtaaacataatattcttcaagaaataatgttgaaagcctactcaggaataatcttccttaactctttaaatttttatttcatgtgaagtgttttcagtttagttattcactgaattgtcagtttccttcatttggtattacatatttaattcttaaatattgaggccccattgtgagtaataaaaaatacgacataagtagaagactaagaagggcttgtcatattatctttgtgtatatgcttcatgttatttaaccagaaatgtcttatctctaaaaatttttagtagtaattatttaccaaacttaaaaacatttctataaatataaagcttttctttatatttaagacaaaatataaaggctagaatttggttccttctctgtaacactaaatattttagtgtgaaattgaatttttttattactatagtcttttcaatctataatttgtgtttttaatttcttgatatgtcacttctgttcctccctgcttgcattttttaaaaactagacattgtggcttgagaatttatcaatcatctttccgaaatgaccacattgtgcttttagtttgtatgtttaagtggtcaagcaaggctctaggaggtagtcactgagctggaccttaaacacatctgcaggagctcacaaaatgggagcaaaagaggcattccagaaagaagagtagttaagcagatgtgggggcagggcaagaggagacagcaccttgttgccagagattctacacaaaggtgtgatggacactgatgctctattaagaagcttttgtggtgtgtgtggtagagaataattaaggcttctgataagacaggaaagggatatttcatcatgactgttaagaaaaggtaactgggttgtttaatgttttaattgataattgtcactgatcgtatttctacttgttaaataattaaaaatcatcttaaaattcatactttgactttaatttagacacaaggagatgtaatcgctgtgtaacatcagagaaagctatatggattatcgtcagaagtaaatgtttctaacattgacaaaga

SEQ ID NO: 15853 - protein, 1061 aa, Homo sapiens; identical to SEQ ID NO: 1810

SEQ ID NO: 15854 - DNA, 949 bp, Homo sapiens
gtaagggccgctcctcctttgaagaggttttgcgtctctttccgccggtggcgtcggcgctcacgcaggggcgggtcccggtagcgccaggcggtgcagggcgggaaggggattcgtggcgacggcggcggcagggacagcaggagcagtggtgctgtcagcgcggccgtcggagacatgggagacccggggtcggagataatagaatctgtccctccagctggccctgaggcatctgagtcaacaacggatgaaaatgaagacgacattcagtttgtcagtgaaggaccattacgacctgttcttgaatacattgatctggtcagcagtgatgatgaagagcctagcacctcttatactgatgggtcggcgctttgcctgatgaccctacctctctgacagatctgagaagagtttactcttcagcttttaagtgaataaagatgataaatgtcctagcagctcatttgtctaacttcttgaaaaccaaagatgctggtggataattgacagacctacaaaataccacataaaacctacaatacacaaaataggttcttataactcaagtaaatggttctttagtatagtagctgttttatgaatggatgtatattatccaaatgctaattttgttaaaaggaatgaaaatttttttcatgttataggagaatattaaacgtaaagaccatattgattatcagaaggataaagttgctttaactctggctcgtctagcccgccatgttgaagtggagaaacagcagaaagaagagaagaatagagcattcagagtatgtgctattttaattggtattttatataattaaaaaattatttataataaagttggtaaaaagcctttaatcaaaaaaagatatgatttaatcaaagctcagtatgtaccctagatagctcatgaatttagtagtaattcataatagctttt

SEQ ID NO: 15855 - protein, 73 aa, Homo sapiens
MGDPGSEIIESVPPAGPEASESTTDENEDDIQFVSEGPLRPVLEYIDLVSSDDEEPSTSYTDGSALCLMTLPL

SEQ ID NO: 15856 - DNA, 2777 bp, Homo sapiens
cgggaaggggattcgtggcgacggcggcggcagggacagcaggagcagtggtgctgtcagcgcggccgtcggagacatgggagacccggggtcggagataatagaatctgtccctccagctggccctgaggcatctgagtcaacaacggatgaaaatgaagacgacattcagtttgtcagtgaaggaccattacgacctgttcttgaatacattgatctggtcagcagtgatgatgaagagcctagcacctcttatactgatagaatgcctgaatctaaggtgccatcctctgagaatcatcgcccagaaatgtgctctagctgcaatgttcctcttcccattggagatagcagctccttctctgggagttgttccagcagtccagaaaggatagtttctcaaacttcctctgttgagaacccattggagaaccagaaaaatgatcaaaataattcagatactaagatctctgagacagagacccttaaatcatcacagaattttcagactctgccttcatctccacttctggtcccccaagaatctttggcctcttctgaggtcaaagagaatttacgtatagattcttcttcagcttcacagcatggacgggatgccatcctctatctccagacacaagtagctgaaatgtcccgagtgatacgtgatctgcagtccaggagctgttttagatttcatcattctaggccaagtgagaactcctcagttccttgggacatctccacctctaaagaggaaaatttatccacagttgaagaagaaactgattacaaatcaccatcagctgatgacaaagggcagccatctgaccccagccaatctagtttcacaggtcttttgaagagaatggaacaaagaggtgttataaaaagggtgacattacaatctgaagcggagtcatgtgaagggaaacctgattgtgtgacttctaaaaaacgtttggttcctccattgcatcctcttctgagaattgccaccactgaggtttttaaagaccctgctgattgccatccttcttccttcatgggacacagggtatatcctgtggccaaggacacctctcctttccaaccaaacccaccagctgaaggccccattgtagaagcattagaacacagcaaaagaggaaacacaacatcccctctagattctacctcaaaagaaatggaggtcatgggttgtaggttttaccacgctgcctccattgcagcccgagctgctagctacatggcctatatgactcaatatcagcgtaaactctgggaagacatggaagatctggttcatgacccagaatttgatcgtggaaaagcaagatgcataatatctgatggtatggatgcaggcctttggcaactttgtactactagggacataatggactctgtagtcagagttatggccatggccatagactatagacggcaggcctggcttcgacttacatctctcactaagaaaacccaggagaagatctcccacttgccctttgatggtacttccctttttggacaagatgtgaaagctgttgttgcagaagacaacaatataaaagaaaatgactataaagatcacaaatactataatcagcatcgatacttttatagtcatgatcagaaagcacattatcacaatagaggatactccaaaggggattggtacaaacctcgaaaccacccctatagatatagaaagaagggagactctccagaacgccatgggtacaagaattaataacctgtttaatgttcagcagagtagtcattcaagatcctaactattttacttgttcctccttgtacaaataggatctacaggtaggagatcatctcaaaaactggatgcatgtctggaatgatcacagctgacatttgaattctagacttttgaaatgaagtatataataaagaaactcatgacttattggccaagtgagcagtggagactttcttgaaagggttggacaaatgtttatcctttatttctggtccaaaaataagtgtggaggaggaccactcaggaatctgaatcctcttgtgattaaagaaaaatataaagatgtgttcctcaggaaaatcttatttgtaaactgaggactagcagattttgaatctagaaataatactagatgtctgtttactaagaccagaggtaaatccttaacttttaggttatcagtgcttccttgttcaggcttcagtttgacagatcttcacaaaatgacacatctgttaaaatgtctttatgtcaagatggtcaactcaccaagagtccgtactactatcaagctctgtgagacttcagaatcagccatgaagctttgtgtcaactggaattcaaatcaaattttgccaaatccagtttgcttccccttggaatggctagatgtcgcaggtctattatggacaccaactggaaaaagacttctacctgtaacatctctgtagaaattgcacagtaactatcttcatcaagactttgatggccaccataccatcactactcataaagctacatgtgagagaattgtttgttgttatcaatcctaatagtctttgacctatcaagctctcgtatcaagctgtaagactgagtcatggtagtctctcactgtaagctgggcctttcaccaagatggccttcttaaacaacctaccttctaaacatttaattcttttgagcttgatagtgcatcacactctaaatacaaaaaagatacgcacatcagtgccctggaaataaaggatgttacacg

SEQ ID NO: 15857 - protein, 559 aa, Homo sapiens
MGDPGSEIIESVPPAGPEASESTTDENEDDIQFVSEGPLRPVLEYIDLVSSDDEEPSTSYTDRMPESKVPSSENHRPEMCSSCNVPLPIGDSSSFSGSCSSSPERIVSQTSSVENPLENQKNDQNNSDTKISETETLKSSQNFQTLPSSPLLVPQESLASSEVKENLRIDSSSASQHGRDAILYLQTQVAEMSRVIRDLQSRSCFRFHHSRPSENSSVPWDISTSKEENLSTVEEETDYKSPSADDKGQPSDPSQSSFTGLLKRMEQRGVIKRVTLQSEAESCEGKPDCVTSKKRLVPPLHPLLRIATTEVFKDPADCHPSSFMGHRVYPVAKDTSPFQPNPPAEGPIVEALEHSKRGNTTSPLDSTSKEMEVMGCRFYHAASIAARAASYMAYMTQYQRKLWEDMEDLVHDPEFDRGKARCIISDGMDAGLWQLCTTRDIMDSVVRVMAMAIDYRRQAWLRLTSLTKKTQEKISHLPFDGTSLFGQDVKAVVAEDNNIKENDYKDHKYYNQHRYFYSHDQKAHYHNRGYSKGDWYKPRNHPYRYRKKGDSPERHGYKN

SEQ ID NO: 15858 - DNA, 5277 bp, Homo sapiens
cgggaaggggattcgtggcgacggcggcggcagggacagcaggagcagtggtgctgtcagcgcggccgtcggagacatgggagacccggggtcggagataatagaatctgtccctccagctggccctgaggcatctgagtcaacaacggatgaaaatgaagacgacattcagtttgtcagtgaaggaccattacgacctgttcttgaatacattgatctggtcagcagtgatgatgaagagcctagcacctcttatactgatagaatgcctgaatctaaggtgccatcctctgagaatcatcgcccagaaatgtgctctagctgcaatgttcctcttcccattggagatagcagctccttctctgggagttgttccagcagtccagaaaggatagtttctcaaacttcctctgttgagaacccattggagaaccagaaaaatgatcaaaataattcagatactaagatctctgagacagagacccttaaatcatcacagaattttcagactctgccttcatctccacttctggtcccccaagaatctttggcctcttctgaggtcaaagagaatttacgtatagattcttcttcagcttcacagcatggacgggatgccatcctctatctccagacacaagtagctgaaatgtcccgagtgatacgtgatctgcagtccaggagctgttttagatttcatcattctaggccaagtgagaactcctcagttccttgggacatctccacctctaaagaggaaaatttatccacagttgaagaagaaactgattacaaatcaccatcagctgatgacaaagggcagccatctgaccccagccaatctagtttcacaggtcttttgaagagaatggaacaaagaggtgttataaaaagggtgacattacaatctgaagcggagtcatgtgaagggaaacctgattgtgtgacttctaaaaaacgtttggttcctccattgcatcctcttctgagaattgccaccactgaggtttttaaagaccctgctgattgccatccttcttccttcatgggacacagggtatatcctgtggccaaggacacctctcctttccaaccaaacccaccagctgaaggccccattgtagaagcattagaacacagcaaaagaggaaacacaacatcccctctagattctacctcaaaagaaatggaggtcatgggttgtaggttttaccacgctgcctccattgcagcccgagctgctagctacatggcctatatgactcaatatcagcgtaaactctgggaagacatggaagatctggttcatgacccagaatttgatcgtggaaaagcaagatgcataatatctgatggtatggatgcaggcctttggcaactttgtactactagggacataatggactctgtagtcagagttatggccatggccatagactatagacggcaggcctggcttcgacttacatctctcactaagaaaacccaggagaagatctcccacttgccctttgatggtacttccctttttggacaagatgtgaaagctgttgttgcagaagacaacaatataaaagaaaatgactataaagatcacaaatactataatcagcatcgatacttttatagtcatgatcagaaagcacattatcacaatagaggatactccaaaggggattggtacaaacctcgaaaccacccctatagatatagaaagaagggagactctccagaacgccatgggtacaagaattaataacctgtttaatgttcagcagagtagtcattcaagatcctaactattttacttgttcctccttgtacaaataggatctacaggtaggagatcatctcaaaaactggatgcatgtctggaatgatcacagctgacatttgaattctagacttttgaaatgaagtatataataaagaaactcatgacttattggccaagtgagcagtggagactttcttgaaagggttggacaaatgtttatcctttatttctggtccaaaaataagtgtggaggaggaccactcaggaatctgaatcctcttgtgattaaagaaaaatataaagatgtgttcctcaggaaaatcttatttgtaaactgaggactagcagattttgaatctagaaataatactagatgtctgtttactaagaccagaggtaaatccttaacttttaggttatcagtgcttccttgttcaggcttcagtttgacagatcttcacaaaatgacacatctgttaaaatgtctttatgtcaagatggtcaactcaccaagagtccgtactactatcaagctctgtgagacttcagaatcagccatgaagctttgtgtcaactggaattcaaatcaaattttgccaaatccagtttgcttccccttggaatggctagatgtcgcaggtctattatggacaccaactggaaaaagacttctacctgtaacatctctgtagaaattgcacagtaactatcttcatcaagactttgatggccaccataccatcactactcataaagctacatgtgagagaattgtttgttgttatcaatcctaatagtctttgacctatcaagctctcgtatcaagctgtaagactgagtcatggtagtctctcactgtaagctgggcctttcaccaagatggccttcttaaacaacctaccttctaaacatttaattcttttgagcttgatagtgcatcacactctaaatacaaaaaagatacgcacatcagtgccctggaaataaaggatgttacacgatccaggcatgcaaatctgaactcctaagaccaagaattccaaacatgcctgacaatcttgtccccttattgtaataaagagggataccatcagtctagattttattgagaatccttaagatttaaagcatagctgtggatgtggtgaagagaacaagccacacagctctgtttctggatatctaagtgatgatatccattaatgatttgaaaggctgaaatcaagatttaagtgatacgctcttggttaattggttacttaatttagtcagattcttagtgtaagagacagcttatctttttgctcccaattggtcccattaatagtttttcaccatactggaactggcagcagatacctcaattatatgtcccacagtatcttctctttagactcaaggtagtggatgtatggtatatcagcccttagatccatgtcttcacagcatgacatcaggaatggagaatatgtcaaatttgaggggtctgaatacatcacctagtattatttgcttggcagccaaaaacagttgtttttattgacagacttaattctgtaacttctgcgttttttcatctgcttgatcaaggcattttggatgtactgctaatggaatatggcactgttttacggtttatgtggcttctgttcttgccacagttgttgcacagtggtaattgatgttttctctggtgccacactttttaataatctattggaagctcattcctcctcccccatcataaccatattcagcacccatttttaaatctacttttcttccttatttgtgctacagaggttgatggcgtaaattttcctacttggaagaaattactttatcagttaatttcagggtactgtattgatcttgtttgtcctatttgtagattaaacttgaactagtcttaataaaggggatattgttttgcaaatttagcccagtcatatcaagagttaatatttatcttatttttctgtattttactcaaaattttatttccacttctgtagaaataggtccatgccagtgttctctacaaagtgtctttcaaactaaactctagaagaatatcgattacctgaacagaaacaaaggcctaagaaatcatacatttttgtagcttatgtgtattgcaccaatcaagcaatcccatgtgctcttgatattggcactgtagttttatcttagaggacttgccactggagaactcagtggtgagagaccttggaaatgttttatgtggctgcacataagtgtttctgactagctaaggctacttcagacttttcactttccatttgtccccttttccttccctgaattagatgctatgtcataaacttggtggtttttgaaatactcttatttcaaaccttaaactaaaccgaaataagttatgcctgagaatgcgtttgtctgaaacgattttggcacttccctttaatatgcttccccttccctttgccttttaaattgtggttaaaaaaaaagaaaaaaaaaggcacataaagctgagcaccttaaccattttttaagcgtatggtagtgttgactatatttgcattgttgcgcagctcctccattcttaaatatttgtaagatgatgttgctgttctcttttcctcctgtgatatttatgttgcccagtaataagtaaaagtatcctttcttagttactctaactgatatgcccaagtgtctccagatactctgttttcctggaagtgtaaaggtattgggaaattatcaaattggtgaccaagtagttctgaaaggatttgaccgtttaatagggatggggacagaatgcagatcaggaagagtttttagtaatagattagtttcttgattgcaaaagaaatatctttaatgtgttaattttttattattttaaaatctctggcatacttgaatgataatgttataaaacttaaagtgaggatttggtctagggagattaccccaatagaatcagaaactcttagtcagataataaatcctcatattatgcctgccatgttcagaacctgcaacaaaattccctactaggccaacctctaacgtttaaatacctctaggttttctaggaggccttggaatagttgcaagtttaatgatctggtattctcaaaaaggatgtatctaatgatcttgattcttcaaaatgttatttcttgattagatatacaatgtatatagagacaatatggtttcttgtagttactgtgtatagagaagtactgtttccatttttatatgaagtgcctttttaattctacacttttctttaaaacttaaactttgatgtcttgcatatattgctggtggtatttatgtgaattttgtacagtgatttaatcttgtagtttatcatttgtacaattgcactatctaaatgtactcccttctgaatgttaatttgttttctttatagcactgttgattcatttcagaaggttgtagagtatacctccctcccccttatttaactaact

SEQ ID NO: 15859 - protein, 559 aa, Homo sapiens; identical to SEQ ID NO: 15857

SEQ ID NO: 15860 - DNA, 831 bp, Homo sapiens
aggagcagtggtgctgtcagcgcggccgtcggagacatgggagacccggggtcggagataatagaatctgtccctccagctggccctgaggcatctgagtcaacaacggatgaaaatgaagacgacattcagtttgtcagtgaaggaccattacgacctgttcttgaatacattgatctggtcagcagtgatgatgaagagcctagcacctcttatactgatgtgccctatacaacaggattcttttgttccagaaccacatgaccacagaaaatttgttttctcttagaaaaaaggatatgtagagatccttttaggaatggaaagtgggggaagggtttataggggatatattacttcagtcatcatccctttaaccttgtctgtgccccacatatttggagttatttatcttacctgtgatgtactggttgtaggtttgacccttggaccaatacttcccttgctctgagaattgaactagttgagccctttgtaacagtcttgcctttcatttgtccttgctttagcccaaacttctgttaatgagctgttttcatcttggattagaaaactcttagttattgttcagagtggccacaaacttcttgctctgtgatataggggattgagacttggacttggaatcagaatacctgggtttgagtcccagctttactctttacaaattctgtgactttggataaattaagtaaccttttagcctccgttttttaatcaaataatacctacctcacagggttgttgtgaggatgaaatgaggtaacaaattataacttcttataactacaaaccataaagtaggactat

SEQ ID NO: 15861 - protein, 75 aa, Homo sapiens
MGDPGSEIIESVPPAGPEASESTTDENEDDIQFVSEGPLRPVLEYIDLVSSDDEEPSTSYTDVPYTTGFFCSRTT

SEQ ID NO: 15862 - DNA, 691 bp, Homo sapiens
cacgcgaaggttcctatcggtcgacgggctgtgggtgtattgctcagtgacggcttcgtttagtttctcccagcacccataattcaaagcaagaacaacgacattatggggagaaaacgtccttttgtgaaacagaaggcaatccacaccattagtaaaccccatcaattttgccttcagaatatatccagattcttcccaattctaccgccaccattctggttcaagctacctggtaaaacatgcacagagcaaatttcggttgtatcctagaaatgatagccatattgaggatactggttacacctgacgaaacatctccatgaaagttaagcatacacaggatctcactttgttacccaggctagagtgcaatggtgtgaccacagctcactgaagcctcaacctcctgagctcacttttaagcaatcctctcacttcggcctcctgagtagctgggcctacaggcatgtaccaacactcccagcaagtttttcttatttttgtgaagacagagtcttgcagtattgcccaagctggacttgaactcctggcctcaagcaatcctcccatctaggcctcccaaagtgctaggattacaggcatgagccactgtgccaagcaacacttgcagtttttaagtgaaaatgatcctgtaaatatatatatgaataaaatctagaaagctata

SEQ ID NO: 15863 - protein, 55 aa, Homo sapiens
MGRKRPFVKQKAIHTISKPHQFCLQNISRFFPILPPPFWFKLPGKTCTEQISVVS

SEQ ID NO: 15864 - DNA, 1198 bp, Homo sapiens
aggcggctggagcggtcagccatggaggaggagcggcagaagcgcccctcgttggctttagcgttgatcttcgcctgagccatctaagcctccgacgcggggtagccaagaggtcaccggcccctccggcggcagcgagtggagcgctccttgggctgcaggcgtcgccgtcaccacgcgggcgcccgccctccctctgacgcccgcgggggcaacccgggaggactcgccgacaccgcggctgcagcgtagccaaagaagggcaggcgcggcgcccgcggggctcggggacgccgggcctgggagggggctgcagcggctggagttagaggttcgcgagccacacgggctcgaggatgggccgacaggggctcgggcctggggagcgcaagtctctgaggcacgggaggggcggacgcagagaccgagcgcctaatgtggctagcggatcgtctgctccccggacccaggaactacccgaagcccgcgcggacccacagaccacccccagctccgccccgcgaggccccgcctcttcatgcaacctaaaagtaaccaactccccccacgcgaaggttcctatcggtcgacgggctgtgggtgtattgctcagtgacggcttcgtttagtttctcccagcacccataattcaaagcaagaacaacgacattatggggagaaaacgtccttttgtgaaacagaaggcaatccacaccattagtaaaccccatcaattttgccttcagaatatatccagattcttcccaattctaccgccaccattctggttcaagctacctgtagagacggggtttcaccatgttagccaggatggtctcgatcttctgacctcgtgatccgtccgcctcagccttccaaagttctgggattacagacgtgagccaccgcgcccggccaaaagatccataaactttgagtcaccagatagagctaacatttaccacagaggcatgtaaagaaaacgattctagcagagtaactataatacaaaagaacaatattccaattatgttcctatgttctatccaggaaggtttaagaggagccttttaaactgaactatattctaagaggtgggaaaaagttttcttttgtttttcttattaaccgtaccttgaaagccccaaataaatgttccttggtttagatgccctggtagatgaccaaaaaagtttga

SEQ ID NO: 15865 - protein, 61 aa, Homo sapiens
MGRKRPFVKQKAIHTISKPHQFCLQNISRFFPILPPPFWFKLPVETGFHHVSQDGLDLLTS

SEQ ID NO: 15866 - DNA, 792 bp, Homo sapiens
gataaaatttttggcctttcctctcctgtttgattatcatttttgccttttctaaaattaataggaggaaacaccaattggaagcctccgctcaactgtaagatttataactacctgaacaggattggatgcttcttccttcatcctcgctgtagtaaaagaaaagatgctgctgattttgccatatgtatgcatgctggccgtctagatgaacaactacccaagcaaattcctttcaccatcctctcaggagatcaaggttttctggagctagagaatcaatttaagaagactcagaggccagctcatatactaaaccctcaccacttagagggagatatgatgtgtgccttgttaaatagcatatctgataccaccaaaggtacgcagctgcagtcacagtgcaaaccacccaagaggaggagacttcactgctgagagaaaccaataaactgctgtccgctagtgaactgttgcctgcttgctaaaccatcatgttctcttacttctatcttacttatcttttttaaaaaaatctcactttcattctttagtgttttagaaggaggatgaattcataataattttctggagctttttttgatctagtagataaaatctatattgatgtatataaaacatatattcatgtgttacagtatgttactacaattttaaaagctcagaattcagatcttcactttgtttctgaaattccaagttgaccttcagttttttagaaagcagtgcgcttagaggtgaaaaccagaaagcaataacaaaggtgatcat

SEQ ID NO: 15867 - protein, 82 aa, Homo sapiens
MHAGRLDEQLPKQIPFTILSGDQGFLELENQFKKTQRPAHILNPHHLEGDMMCALLNSISDTTKGTQLQSQCKPPKRRRLHC

SEQ ID NO: 15868 - DNA, 2424 bp, Homo sapiens
tatttttggtagagacagggttttgctgtgttgcccaggctggtctcgaactcctgagctcaggtgatccacccacttcggcctcccaaagtgctggaattacaggtgtgaacaaccacgcctggcctcaatatcctttttctaccccaggacctcttgggatcccacatgacatttagacattaatctccttaggctccatggttcaaattttaagtgagttttgcagtgccttttcagtcataccgtattataaagccttcggtctcttattatgaaagcacgtaagacatcaggtaagtaagtttgtgctatgcaagaggcattgttaatgaaaacctatggtgttatctccatagagatgaatgcatatgattttcaaaacaggagaatttaatgtcaccatttttaatattatttggcaagcactggaaaaaacctagtgtgggaaagtagtgtaacactaatgaactgtattataatgagtaagcttgggtatgagcagttattgaaaataatattgagaatacataaatttatggcacaataactgcatgtattgattcttctttacagaatgtgacagtgatgataacatgggtgccaaaaatacttcaataggagaagaatttatatccacagaagatgtggaattagaagaagctattagaagaagtcttgaggaaatgtaattaaagatattaccacacaacatcaagtggccttgaagagactgagataacgaattcttgagtttgttttctaaaggagaccagaaatccactattacaaatgtatttgaaaacatgtttttgctttcatatgttcaaaatctgatctttgttttgtatttttgtgctaatgtgcaaacatgtacagaagaaatagaatacatgttcatgcaaatataaattatgtattctaatataggtgtaacagtttcccagttaactttgaatttatatatttagatttaaaggattaaaaaaaaggaaagctcttgacagttgtttcccaaatagcattagttctttaattttatttgtactgtacaaatgatgctagtttatttttttagcagtgaaaatgaatataaaaaaggtgacataggtcaagttttccataaattctacttctcatgtggcactattatataatacctttgagatctttgtttatgtttattagaagagggtaatggaaactgatcatggaaacatttaaaattttatcagcaatgttctttgtgggtgccatgcatatgtaaattattgctttaattagagcagcacattgctaaaataaaaaatacaccttaatttttaagaaataatttaaatgaaacaatttccattccttttacctgcttagacttttatgtgacttgtatggtctcctggttaaagggaatggtgtcagaatatttgcataaaattatttttcataacagtccttttttatatattggtgtaaacataatattcttcaagaaataatgttgaaagcctactcaggaataatcttccttaactctttaaatttttatttcatgtgaagtgttttcagtttagttattcactgaattgtcagtttccttcatttggtattacatatttaattcttaaatattgaggccccattgtgagtaataaaaaatacgacataagtagaagactaagaagggcttgtcatattatctttgtgtatatgcttcatgttatttaaccagaaatgtcttatctctaaaaatttttagtagtaattatttaccaaacttaaaaacatttctataaatataaagcttttctttatatttaagacaaaatataaaggctagaatttggttccttctctgtaacactaaatattttagtgtgaaattgaatttttttattactatagtcttttcaatctataatttgtgtttttaatttcttgatatgtcacttctgttcctccctgcttgcattttttaaaaactagacattgtggcttgagaatttatcaatcatctttccgaaatgaccacattgtgcttttagtttgtatgtttaagtggtcaagcaaggctctaggaggtagtcactgagctggaccttaaacacatctgcaggagctcacaaaatgggagcaaaagaggcattccagaaagaagagtagttaagcagatgtgggggcagggcaagaggagacagcaccttgttgccagagattctacacaaaggtgtgatggacactgatgctctattaagaagcttttgtggtgtgtgtggtagagaataattaaggcttctgataagacaggaaagggatatttcatcatgactgttaagaaaaggtaactgggttgtttaatgttttaattgataattgtcactgatcgtatttctacttgttaaataattaaaaatcatcttaaaattc

SEQ ID NO: 15869 - protein, 31 aa, Homo sapiens
MGAKNTSIGEEFISTEDVELEEAIRRSLEEM

SEQ ID NO: 15870 - DNA, 2530 bp, Homo sapiens
tatttttggtagagacagggttttgctgtgttgcccaggctggtctcgaactcctgagctcaggtgatccacccacttcggcctcccaaagtgctggaattacaggtgtgaacaaccacgcctggcctcaatatcctttttctaccccaggacctcttgggatcccacatgacatttagacattaatctccttaggctccatggttcaaattttaagtgagttttgcagtgccttttcagtcataccgtattataaagccttcggtctcttattatgaaagcacgtaagacatcaggtaagtaagtttgtgctatgcaagaggcattgttaatgaaaacctatggtgttatctccatagagatgaatgcatatgattttcaaaacaggagaatttaatgtcaccatttttaatattatttggcaagcactggaaaaaacctagtgtgggaaagtagtgtaacactaatgaactgtattataatgagtaagcttgggtatgagcagttattgaaaataatattgagaatacataaatttatggcacaataactgcatgtattgattcttctttacagaatgtgacagtgatgataacatgggtgccaaaaatacttcaataggagaagaatttatatccacagaagatgtggaattagaagaagctattagaagaagtcttgaggaaatgtaattaaagatattaccacacaacatcaagtggccttgaagagactgagataacgaattcttgagtttgttttctaaaggagaccagaaatccactattacaaatgtatttgaaaacatgtttttgctttcatatgttcaaaatctgatctttgttttgtatttttgtgctaatgtgcaaacatgtacagaagaaatagaatacatgttcatgcaaatataaattatgtattctaatataggtgtaacagtttcccagttaactttgaatttatatatttagatttaaaggattaaaaaaaaggaaagctcttgacagttgtttcccaaatagcattagttctttaattttatttgtactgtacaaatgatgctagtttatttttttagcagtgaaaatgaatataaaaaaggtgacataggtcaagttttccataaattctacttctcatgtggcactattatataatacctttgagatctttgtttatgtttattagaagagggtaatggaaactgatcatggaaacatttaaaattttatcagcaatgttctttgtgggtgccatgcatatgtaaattattgctttaattagagcagcacattgctaaaataaaaaatacaccttaatttttaagaaataatttaaatgaaacaatttccattccttttacctgcttagacttttatgtgacttgtatggtctcctggttaaagggaatggtgtcagaatatttgcataaaattatttttcataacagtccttttttatatattggtgtaaacataatattcttcaagaaataatgttgaaagcctactcaggaataatcttccttaactctttaaatttttatttcatgtgaagtgttttcagtttagttattcactgaattgtcagtttccttcatttggtattacatatttaattcttaaatattgaggccccattgtgagtaataaaaaatacgacataagtagaagactaagaagggcttgtcatattatctttgtgtatatgcttcatgttatttaaccagaaatgtcttatctctaaaaatttttagtagtaattatttaccaaacttaaaaacatttctataaatataaagcttttctttatatttaagacaaaatataaaggctagaatttggttccttctctgtaacactaaatattttagtgtgaaattgaatttttttattactatagtcttttcaatctataatttgtgtttttaatttcttgatatgtcacttctgttcctccctgcttgcattttttaaaaactagacattgtggcttgagaatttatcaatcatctttccgaaatgaccacattgtgcttttagtttgtatgtttaagtggtcaagcaaggctctaggaggtagtcactgagctggaccttaaacacatctgcaggagctcacaaaatgggagcaaaagaggcattccagaaagaagagtagttaagcagatgtgggggcagggcaagaggagacagcaccttgttgccagagattctacacaaaggtgtgatggacactgatgctctattaagaagcttttgtggtgtgtgtggtagagaataattaaggcttctgataagacaggaaagggatatttcatcatgactgttaagaaaaggtaactgggttgtttaatgttttaattgataattgtcactgatcgtatttctacttgttaaataattaaaaatcatcttaaaattcatactttgactttaatttagacacaaggagatgtaatcgctgtgtaacatcagagaaagctatatggattatcgtcagaagtaaatgtttctaacattgacaaaga

SEQ ID NO: 15871 - protein, 31 aa, Homo sapiens; identical to SEQ ID NO: 15869

SEQ ID NO: 15872 - DNA, 1091 bp, Homo sapiens
ggtctcctggttaaagggaatggtgtcagaatatttgcataaaattatttttcataacagtccttttttatatattggtgtaaacataatattcttcaagaaataatgttgaaagcctactcaggaataatcttccttaactctttaaatttttatttcatgtgaagtgttttcagtttagttattcactgaattgtcagtttccttcatttggtattacatatttaattcttaaatattgaggccccattgtgagtaataaaaaatacgacataagtagaagactaagaagggcttgtcatattatctttgtgtatatgcttcatgttatttaaccagaaatgtcttatctctaaaaatttttagtagtaattatttaccaaacttaaaaacatttctataaatataaagcttttctttatatttaagacaaaatataaaggctagaatttggttccttctctgtaacactaaatattttagtgtgaaattgaatttttttattactatagtcttttcaatctataatttgtgtttttaatttcttgatatgtcacttctgttcctccctgcttgcattttttaaaaactagacattgtggcttgagaatttatcaatcatctttccgaaatgaccacattgtgcttttagtttgtatgtttaagtggtcaagcaaggctctaggaggtagtcactgagctggaccttaaacacatctgcaggagctcacaaaatgggagcaaaagaggcattccagaaagaagagtagttaagcagatgtgggggcagggcaagaggagacagcaccttgttgccagagattctacacaaaggtgtgatggacactgatgctctattaagaagcttttgaaagggatatttcatcatgactgttaagaaaaggtaactgggttgtttaatgttttaattgataattgtcactgatcgtatttctacttgttaaataattaaaaatcatcttaaaattcatactttgactttaatttagacacaaggagatgtaatcgctgtgtaacatcagagaaagctatatggattatcgtcagaagtaaatgtttctaacattgac

SEQ ID NO: 15873 - protein, 43 aa, Homo sapiens
SFSLYLRQNIKARIWFLLCNTKYFSVKLNFFITIVFSIYNLCF

SEQ ID NO: 15874 - DNA, 1631 bp, Homo sapiens
agttcctgggtccggggagcagacgatccgctagccacattaggcgctcggtctctgcgtccgcccctcccgtgcctcagagacttgcgctccccaggcccgagcccctgtcggcccatcctcgagcccgtgtggctcgcgaacctctaactccagccgctgcagccccctcccaggcccggcgtccccgagccccgcgggcgccgcgcctgcccttctttggctacgctgcagccgcggtgtcggcgagtcctcccgggttgcccccgcgggcgtcagagggagggcgggcgcccgcgtggtgacggcgacgcctgcagcccaaggagcgctccactcgctgccgccggaggggccggtgacctcttggctaccccgcgtcggaggcttagatggctcaggcgaagatcaacgctaaagccaacgaggggcgcttctgccgctcctcctccatggctgaccgctccagccgcctgctggagagcctggaccagctggagctcagggttgaagctttgagagaagcagcaactgctgttgagcaagagaaagaaatccttctggaaatgatccacagtatccaaaatagccaggacatgaggcagatcagtgacggagaaagagaagaattaaatctgactgcaaaccgtttgatgggaagaactctcaccgttgaagtgtcagtagaaacaattagaaacccccagcagcaagaatccctaaagcatgccacaaggattattgatgaggtggtcaataagtttctggatgatttgggaaatgccaagagtcatttaatgtcgctctacagtgcatgttcatctgaggtgccacatgggccagttgatcagaagtttcaatccatagtaattggctgtgctcttgaagatcagaagaaaattaagagaagattagagactctgcttagaaatattgaaaactctgacaaggccatcaagctattagagcattctaaaggagctggttccaaaactctgcaacaaaatgctgaaagcagattcaattagtcttcaaacctaagagcatttacacaatacacaaggtgtaaaaatgataaaatactattttaattgataactagttctttgttaggtataaccacttagttgacactgatagttgtttcagatgaggaaaatattccatcaagtatcttcagttttgtgaataacaaaactagcaatattttaattatctatctagagattttttagattgaattcttgtcttgtactaggatctagcatatttcactattctgtggatgaatacatagtttgtggggaaaacaaacgttcagctaggggcaaaaagcatgactgctttttcctgtctggcatggaatcacgcagtcaccttgggcatttagtttactagaaattctttaccttaagcagcacacacatttactacacacacagtgttaacaaagcactgtgcttagagggtaaaaaggaatcacaaaacaagaatctttccaaagttgtctcattcagcaatgttaaggcatctgtatcaaattattttggatgtaaagattcctgtgtctcataatatgaatgtattttttgatatacaagaaactgacataaaatgtgagaaaaccacct

SEQ ID NO: 15875 - protein, 211 aa, Homo sapiens; identical to SEQ ID NO: 1814

SEQ ID NO: 15876 - DNA, 1706 bp, Homo sapiens
agttcctgggtccggggagcagacgatccgctagccacattaggcgctcggtctctgcgtccgcccctcccgtgcctcagagacttgcgctccccaggcccgagcccctgtcggcccatcctcgagcccgtgtggctcgcgaacctctaactccagccgctgcagccccctcccaggcccggcgtccccgagccccgcgggcgccgcgcctgcccttctttggctacgctgcagccgcggtgtcggcgagtcctcccgggttgcccccgcgggcgtcagagggagggcgggcgcccgcgtggtgacggcgacgcctgcagcccaaggagcgctccactcgctgccgccggaggggccggtgacctcttggctaccccgcgtcggaggcttagatggctcaggcgaagatcaacgctaaagccaacgaggggcgcttctgccgctcctcctccatggctgaccgctccagccgcctgctggagagcctggaccagctggagctcagggttgaagctttgagagaagcagcaactgctgttgagcaagagaaagaaatccttctggaaatgatccacagtatccaaaatagccaggacatgaggcagatcagtgacggagaaagagaagaattaaatctgactgcaaaccgtttgatgggaagaactctcaccgttgaagtgtcagtagaaacaattagaaacccccagcagcaagaatccctaaagcatgccacaaggattattgatgaggtggtcaataagtttctggatgatttgggaaatgccaagagtcatttaatgtcgctctacagtgcatgttcatctgaggtgccacatgggccagttgatcagaagtttcaatccatagtaattggctgtgctcttgaagatcagaagaaaattaagagaagattagagactctgcttagaaatattgaaaactctgacaaggccatcaagctattagagcattctaaaggagctggttccaaaactctgcaacaaaatgctgaaagcagattcaattagtcttcaaacctaagagcatttacacaatacacaaggtgtaaaaatgataaaatactattttaattgataactagttctttgttaggtataaccacttagttgacactgatagttgtttcagatgaggaaaatattccatcaagtatcttcagttttgtgaataacaaaactagcaatattttaattatctatctagagattttttagattgaattcttgtcttgtactaggatctagcatatttcactattctgtggatgaatacatagtttgtggggaaaacaaacgttcagctaggggcaaaaagcatgactgctttttcctgtctggcatggaatcacgcagtcaccttgggcatttagtttactagaaattctttaccttaagcagcacacacatttactacacacacagtgttaacaaagcactgtgcttagagggtaaaaaggaatcacaaaacaagaatctttccaaagttgtctcattcagcaatgttaaggcatctgtatcaaattattttggatgtaaagattcctgtgtctcataatatgaatgtattttttgatatacaagaaactgacataaaatgtgagaaaaccacctataatttaccactgtgaacaattatatatctatctgcttcatcttttctcaaatgcatcaattctctaaaattcc

SEQ ID NO: 15877 - protein, 211 aa, Homo sapiens; identical to SEQ ID NO: 1814

SEQ ID NO: 15878 - DNA, 1777 bp, Homo sapiens
agttcctgggtccggggagcagacgatccgctagccacattaggcgctcggtctctgcgtccgcccctcccgtgcctcagagacttgcgctccccaggcccgagcccctgtcggcccatcctcgagcccgtgtggctcgcgaacctctaactccagccgctgcagccccctcccaggcccggcgtccccgagccccgcgggcgccgcgcctgcccttctttggctacgctgcagccgcggtgtcggcgagtcctcccgggttgcccccgcgggcgtcagagggagggcgggcgcccgcgtggtgacggcgacgcctgcagcccaaggagcgctccactcgctgccgccggaggggccggtgacctcttggctaccccgcgtcggaggcttagatggctcaggcgaagatcaacgctaaagccaacgaggggcgcttctgccgctcctcctccatggctgaccgctccagccgcctgctggagagcctggaccagctggagctcagggttgaagctttgagagaagcagcaactgctgttgagcaagagaaagaaatccttctggaaatgatccacagtatccaaaatagccaggacatgaggcagatcagtgacggagaaagagaagaattaaatctgactgcaaaccgtttgatgggaagaactctcaccgttgaagtgtcagtagaaacaattagaaacccccagcagcaagaatccctaaagcatgccacaaggattattgatgaggtggtcaataagtttctggatgatttgggaaatgccaagagtcatttaatgtcgctctacagtgcatgttcatctgaggtgccacatgggccagttgatcagaagtttcaatccatagtaattggctgtgctcttgaagatcagaagaaaattaagagaagattagagactctgcttagaaatattgaaaactctgacaaggccatcaagctattagagcattctaaaggagctggttccaaaactctgcaacaaaatgctgaaagcagattcaattagtcttcaaacctaagagcatttacacaatacacaaggtgtaaaaatgataaaatactattttaattgataactagttctttgttaggtataaccacttagttgacactgatagttgtttcagatgaggaaaatattccatcaagtatcttcagttttgtgaataacaaaactagcaatattttaattatctatctagagattttttagattgaattcttgtcttgtactaggatctagcatatttcactattctgtggatgaatacatagtttgtggggaaaacaaacgttcagctaggggcaaaaagcatgactgctttttcctgtctggcatggaatcacgcagtcaccttgggcatttagtttactagaaattctttaccttaagcagcacacacatttactacacacacagtgttaacaaagcactgtgcttagagggtaaaaaggaatcacaaaacaagaatctttccaaagttgtctcattcagcaatgttaaggcatctgtatcaaattattttggatgtaaagattcctgtgtctcataatatgaatgtattttttgatatacaagaaactgacataaaatgtgagaaaaccacctataatttaccactgtgaacaattatatatctatctgcttcatcttttctcaaatgcatcaattctctaaaattcctatattgtaacttgcctttttttaaaaaagttagatgctgatataaagtctgcttaattgtcaacttaatg

SEQ ID NO: 15879 - protein, 211 aa, Homo sapiens; identical to SEQ ID NO: 1814

SEQ ID NO: 15880 - DNA, 2053 bp, Homo sapiens
agttcctgggtccggggagcagacgatccgctagccacattaggcgctcggtctctgcgtccgcccctcccgtgcctcagagacttgcgctccccaggcccgagcccctgtcggcccatcctcgagcccgtgtggctcgcgaacctctaactccagccgctgcagccccctcccaggcccggcgtccccgagccccgcgggcgccgcgcctgcccttctttggctacgctgcagccgcggtgtcggcgagtcctcccgggttgcccccgcgggcgtcagagggagggcgggcgcccgcgtggtgacggcgacgcctgcagcccaaggagcgctccactcgctgccgccggaggggccggtgacctcttggctaccccgcgtcggaggcttagatggctcaggcgaagatcaacgctaaagccaacgaggggcgcttctgccgctcctcctccatggctgaccgctccagccgcctgctggagagcctggaccagctggagctcagggttgaagctttgagagaagcagcaactgctgttgagcaagagaaagaaatccttctggaaatgatccacagtatccaaaatagccaggacatgaggcagatcagtgacggagaaagagaagaattaaatctgactgcaaaccgtttgatgggaagaactctcaccgttgaagtgtcagtagaaacaattagaaacccccagcagcaagaatccctaaagcatgccacaaggattattgatgaggtggtcaataagtttctggatgatttgggaaatgccaagagtcatttaatgtcgctctacagtgcatgttcatctgaggtgccacatgggccagttgatcagaagtttcaatccatagtaattggctgtgctcttgaagatcagaagaaaattaagagaagattagagactctgcttagaaatattgaaaactctgacaaggccatcaagctattagagcattctaaaggagctggttccaaaactctgcaacaaaatgctgaaagcagattcaattagtcttcaaacctaagagcatttacacaatacacaaggtgtaaaaatgataaaatactattttaattgataactagttctttgttaggtataaccacttagttgacactgatagttgtttcagatgaggaaaatattccatcaagtatcttcagttttgtgaataacaaaactagcaatattttaattatctatctagagattttttagattgaattcttgtcttgtactaggatctagcatatttcactattctgtggatgaatacatagtttgtggggaaaacaaacgttcagctaggggcaaaaagcatgactgctttttcctgtctggcatggaatcacgcagtcaccttgggcatttagtttactagaaattctttaccttaagcagcacacacatttactacacacacagtgttaacaaagcactgtgcttagagggtaaaaaggaatcacaaaacaagaatctttccaaagttgtctcattcagcaatgttaaggcatctgtatcaaattattttggatgtaaagattcctgtgtctcataatatgaatgtattttttgatatacaagaaactgacataaaatgtgagaaaaccacctataatttaccactgtgaacaattatatatctatctgcttcatcttttctcaaatgcatcaattctctaaaattcctatattgtaacttgcctttttttaaaaaagttagatgctgatataaagtctgcttaattgtcaacttaatgagctctattttgtgtagttatatctttatccattcctcttttatggacatttaggttgtttccaacttgttgctattactgcaacatatttttgtacacaggactttttccttctttcatttttgtttttctctgtataaaggcccagcagtgaattatattgggtcaaaggatatagacgttttcatggcctcacacatattaaactttttttgtataaaggttacagcaatttatacttttttcagtaattaaaatatagctatttcactgaaa

SEQ ID NO: 15881 - protein, 211 aa, Homo sapiens; identical to SEQ ID NO: 1814

SEQ ID NO: 15882 - DNA, 1004 bp, Homo sapiens
agacgatccgctagccacattaggcgctcggtctctgcgtccgcccctcccgtgcctcagagacttgcgctccccaggcccgagcccctgtcggcccatcctcgagcccgtgtggctcgcgaacctctaactccagccgctgcagccccctcccaggcccggcgtccccgagccccgcgggcgccgcgcctgcccttctttggctacgctgcagccgcggtgtcggcgagtcctcccgggttgcccccgcgggcgtcagagggagggcgggcgcccgcgtggtgacggcgacgcctgcagcccaaggagcgctccactcgctgccgccggaggggccggtgacctcttggctaccccgcgtcggaggcttagatggctcaggcgaagatcaacgctaaagccaacgaggggcgcttctgccgctcctcctccatggctgaccgctccagccgcctgctggagagcctggaccagctggagctcagggttgaagctttgagagaagcagcaactgctgttgagcaagagaaagaaatccttctggaaatgatccacagtatccaaaatagccaggacatgaggcagatcagtgacggtgagagccatctccacagaaggggctcatcttttacactcctttaaagagtttatgataagtgtgggtcaatttttgcttgacttttggtatgcgtacaccaggccacagcatttaatgtgagccacagagagcagctgcagctgtcagttcattacagcagccacttactcagagatttcttccagcatgctctctaccccaagcccctggctaggagagataggaaaaagcctgcaagctcagaaaagctggccccaagcagtaaggccatgtgttttatcccaggttcacagtcctaacttcagttcctcacaagttactggactgcaagagattaaaaaagcagaggaagagggtgagagagtggaagcagagaagtagagaccaaaaaaaaaaaaaaaaaaaa

SEQ ID NO: 15883 - protein, 89 aa, Homo sapiens
MAQAKINAKANEGRFCRSSSMADRSSRLLESLDQLELRVEALREAATAVEQEKEILLEMIHSIQNSQDMRQISDGESHLHRRGSSFTLL

SEQ ID NO: 15884 - DNA, 1747 bp, Homo sapiens
agacgatccgctagccacattaggcgctcggtctctgcgtccgcccctcccgtgcctcagagacttgcgctccccaggcccgagcccctgtcggcccatcctcgagcccgtgtggctcgcgaacctctaactccagccgctgcagccccctcccaggcccggcgtccccgagccccgcgggcgccgcgcctgcccttctttggctacgctgcagccgcggtgtcggcgagtcctcccgggttgcccccgcgggcgtcagagggagggcgggcgcccgcgtggtgacggcgacgcctgcagcccaaggagcgctccactcgctgccgccggaggggccggtgacctcttggctaccccgcgtcggaggcttagatggctcaggcgaagatcaacgctaaagccaacgaggggcgcttctgccgctcctcctccatggctgaccgctccagccgcctgctggagagcctggaccagctggagctcagggagccacataacaagtaacacacatctctccatgtcttcagaacgttgagggcatgttctcaaccacttcattctcctctcccttagccagaaagaaaagttttcctaaaggaatggggaggttgttactccactccgccttccttcaagctgagtcattgtcctccaacttgaattaatgcctcacatgtgggttgaagctttgagagaagcagcaactgctgttgagcaagagaaagaaatccttctggaaatgatccacaatctgactgcaaaccgtttgatgggaagaactctcaccgttgaagtgtcagtagaaacaattagaaacccccagcagcaagaatccctaaagcatgccacaaggattattgatgaggtggtcaataagtttctggatgatttgggaaatgccaagagtcatttaatgtcgctctacagtgcatgttcatctgaggtgccacatgggccagttgatcagaagtttcaatccatagtaattggctgtgctcttgaagatcagaagaaaattaagagaagattagagactctgcttagaaatattgaaaactctgacaaggccatcaagctattagagcattctaaaggagctggttccaaaactctgcaacaaaatgctgaaagcagattcaattagtcttcaaacctaagagcatttacacaatacacaaggtgtaaaaatgataaaatactattttaattgataactagttctttgttaggtataaccacttagttgacactgatagttgtttcagatgaggaaaatattccatcaagtatcttcagttttgtgaataacaaaactagcaatattttaattatctatctagagattttttagattgaattcttgtcttgtactaggatctagcatatttcactattctgtggatgaatacatagtttgtggggaaaacaaacgttcagctaggggcaaaaagcatgactgctttttcctgtctggcatggaatcacgcagtcaccttgggcatttagtttactagaaattctttaccttaagcagcacacacatttactacacacacagtgttaacaaagcactgtgcttagagggtaaaaaggaatcacaaaacaagaatctttccaaagttgtctcattcagcaatgttaaggcatctgtatcaaattattttggatgtaaagattcctgtgtctcataatatgaatgtattttttgatatacaagaaactgacataaaatgtgagaaaaccacct

SEQ ID NO: 15885 - protein, 159 aa, Homo sapiens
MPHMWVEALREAATAVEQEKEILLEMIHNLTANRLMGRTLTVEVSVETIRNPQQQESLKHATRIIDEVVNKFLDDLGNAKSHLMSLYSACSSEVPHGPVDQKFQSIVIGCALEDQKKIKRRLETLLRNIENSDKAIKLLEHSKGAGSKTLQQNAESRFN

SEQ ID NO: 15886 - DNA, 1822 bp, Homo sapiens
agacgatccgctagccacattaggcgctcggtctctgcgtccgcccctcccgtgcctcagagacttgcgctccccaggcccgagcccctgtcggcccatcctcgagcccgtgtggctcgcgaacctctaactccagccgctgcagccccctcccaggcccggcgtccccgagccccgcgggcgccgcgcctgcccttctttggctacgctgcagccgcggtgtcggcgagtcctcccgggttgcccccgcgggcgtcagagggagggcgggcgcccgcgtggtgacggcgacgcctgcagcccaaggagcgctccactcgctgccgccggaggggccggtgacctcttggctaccccgcgtcggaggcttagatggctcaggcgaagatcaacgctaaagccaacgaggggcgcttctgccgctcctcctccatggctgaccgctccagccgcctgctggagagcctggaccagctggagctcagggagccacataacaagtaacacacatctctccatgtcttcagaacgttgagggcatgttctcaaccacttcattctcctctcccttagccagaaagaaaagttttcctaaaggaatggggaggttgttactccactccgccttccttcaagctgagtcattgtcctccaacttgaattaatgcctcacatgtgggttgaagctttgagagaagcagcaactgctgttgagcaagagaaagaaatccttctggaaatgatccacaatctgactgcaaaccgtttgatgggaagaactctcaccgttgaagtgtcagtagaaacaattagaaacccccagcagcaagaatccctaaagcatgccacaaggattattgatgaggtggtcaataagtttctggatgatttgggaaatgccaagagtcatttaatgtcgctctacagtgcatgttcatctgaggtgccacatgggccagttgatcagaagtttcaatccatagtaattggctgtgctcttgaagatcagaagaaaattaagagaagattagagactctgcttagaaatattgaaaactctgacaaggccatcaagctattagagcattctaaaggagctggttccaaaactctgcaacaaaatgctgaaagcagattcaattagtcttcaaacctaagagcatttacacaatacacaaggtgtaaaaatgataaaatactattttaattgataactagttctttgttaggtataaccacttagttgacactgatagttgtttcagatgaggaaaatattccatcaagtatcttcagttttgtgaataacaaaactagcaatattttaattatctatctagagattttttagattgaattcttgtcttgtactaggatctagcatatttcactattctgtggatgaatacatagtttgtggggaaaacaaacgttcagctaggggcaaaaagcatgactgctttttcctgtctggcatggaatcacgcagtcaccttgggcatttagtttactagaaattctttaccttaagcagcacacacatttactacacacacagtgttaacaaagcactgtgcttagagggtaaaaaggaatcacaaaacaagaatctttccaaagttgtctcattcagcaatgttaaggcatctgtatcaaattattttggatgtaaagattcctgtgtctcataatatgaatgtattttttgatatacaagaaactgacataaaatgtgagaaaaccacctataatttaccactgtgaacaattatatatctatctgcttcatcttttctcaaatgcatcaattctctaaaattcc

SEQ ID NO: 15887 - protein, 159 aa, Homo sapiens; identical to SEQ ID NO: 15885

SEQ ID NO: 15888 - DNA, 1893 bp, Homo sapiens
agacgatccgctagccacattaggcgctcggtctctgcgtccgcccctcccgtgcctcagagacttgcgctccccaggcccgagcccctgtcggcccatcctcgagcccgtgtggctcgcgaacctctaactccagccgctgcagccccctcccaggcccggcgtccccgagccccgcgggcgccgcgcctgcccttctttggctacgctgcagccgcggtgtcggcgagtcctcccgggttgcccccgcgggcgtcagagggagggcgggcgcccgcgtggtgacggcgacgcctgcagcccaaggagcgctccactcgctgccgccggaggggccggtgacctcttggctaccccgcgtcggaggcttagatggctcaggcgaagatcaacgctaaagccaacgaggggcgcttctgccgctcctcctccatggctgaccgctccagccgcctgctggagagcctggaccagctggagctcagggagccacataacaagtaacacacatctctccatgtcttcagaacgttgagggcatgttctcaaccacttcattctcctctcccttagccagaaagaaaagttttcctaaaggaatggggaggttgttactccactccgccttccttcaagctgagtcattgtcctccaacttgaattaatgcctcacatgtgggttgaagctttgagagaagcagcaactgctgttgagcaagagaaagaaatccttctggaaatgatccacaatctgactgcaaaccgtttgatgggaagaactctcaccgttgaagtgtcagtagaaacaattagaaacccccagcagcaagaatccctaaagcatgccacaaggattattgatgaggtggtcaataagtttctggatgatttgggaaatgccaagagtcatttaatgtcgctctacagtgcatgttcatctgaggtgccacatgggccagttgatcagaagtttcaatccatagtaattggctgtgctcttgaagatcagaagaaaattaagagaagattagagactctgcttagaaatattgaaaactctgacaaggccatcaagctattagagcattctaaaggagctggttccaaaactctgcaacaaaatgctgaaagcagattcaattagtcttcaaacctaagagcatttacacaatacacaaggtgtaaaaatgataaaatactattttaattgataactagttctttgttaggtataaccacttagttgacactgatagttgtttcagatgaggaaaatattccatcaagtatcttcagttttgtgaataacaaaactagcaatattttaattatctatctagagattttttagattgaattcttgtcttgtactaggatctagcatatttcactattctgtggatgaatacatagtttgtggggaaaacaaacgttcagctaggggcaaaaagcatgactgctttttcctgtctggcatggaatcacgcagtcaccttgggcatttagtttactagaaattctttaccttaagcagcacacacatttactacacacacagtgttaacaaagcactgtgcttagagggtaaaaaggaatcacaaaacaagaatctttccaaagttgtctcattcagcaatgttaaggcatctgtatcaaattattttggatgtaaagattcctgtgtctcataatatgaatgtattttttgatatacaagaaactgacataaaatgtgagaaaaccacctataatttaccactgtgaacaattatatatctatctgcttcatcttttctcaaatgcatcaattctctaaaattcctatattgtaacttgcctttttttaaaaaagttagatgctgatataaagtctgcttaattgtcaacttaatg

SEQ ID NO: 15889 - protein, 159 aa, Homo sapiens; identical to SEQ ID NO: 15885

SEQ ID NO: 15890 - DNA, 2169 bp, Homo sapiens
agacgatccgctagccacattaggcgctcggtctctgcgtccgcccctcccgtgcctcagagacttgcgctccccaggcccgagcccctgtcggcccatcctcgagcccgtgtggctcgcgaacctctaactccagccgctgcagccccctcccaggcccggcgtccccgagccccgcgggcgccgcgcctgcccttctttggctacgctgcagccgcggtgtcggcgagtcctcccgggttgcccccgcgggcgtcagagggagggcgggcgcccgcgtggtgacggcgacgcctgcagcccaaggagcgctccactcgctgccgccggaggggccggtgacctcttggctaccccgcgtcggaggcttagatggctcaggcgaagatcaacgctaaagccaacgaggggcgcttctgccgctcctcctccatggctgaccgctccagccgcctgctggagagcctggaccagctggagctcagggagccacataacaagtaacacacatctctccatgtcttcagaacgttgagggcatgttctcaaccacttcattctcctctcccttagccagaaagaaaagttttcctaaaggaatggggaggttgttactccactccgccttccttcaagctgagtcattgtcctccaacttgaattaatgcctcacatgtgggttgaagctttgagagaagcagcaactgctgttgagcaagagaaagaaatccttctggaaatgatccacaatctgactgcaaaccgtttgatgggaagaactctcaccgttgaagtgtcagtagaaacaattagaaacccccagcagcaagaatccctaaagcatgccacaaggattattgatgaggtggtcaataagtttctggatgatttgggaaatgccaagagtcatttaatgtcgctctacagtgcatgttcatctgaggtgccacatgggccagttgatcagaagtttcaatccatagtaattggctgtgctcttgaagatcagaagaaaattaagagaagattagagactctgcttagaaatattgaaaactctgacaaggccatcaagctattagagcattctaaaggagctggttccaaaactctgcaacaaaatgctgaaagcagattcaattagtcttcaaacctaagagcatttacacaatacacaaggtgtaaaaatgataaaatactattttaattgataactagttctttgttaggtataaccacttagttgacactgatagttgtttcagatgaggaaaatattccatcaagtatcttcagttttgtgaataacaaaactagcaatattttaattatctatctagagattttttagattgaattcttgtcttgtactaggatctagcatatttcactattctgtggatgaatacatagtttgtggggaaaacaaacgttcagctaggggcaaaaagcatgactgctttttcctgtctggcatggaatcacgcagtcaccttgggcatttagtttactagaaattctttaccttaagcagcacacacatttactacacacacagtgttaacaaagcactgtgcttagagggtaaaaaggaatcacaaaacaagaatctttccaaagttgtctcattcagcaatgttaaggcatctgtatcaaattattttggatgtaaagattcctgtgtctcataatatgaatgtattttttgatatacaagaaactgacataaaatgtgagaaaaccacctataatttaccactgtgaacaattatatatctatctgcttcatcttttctcaaatgcatcaattctctaaaattcctatattgtaacttgcctttttttaaaaaagttagatgctgatataaagtctgcttaattgtcaacttaatgagctctattttgtgtagttatatctttatccattcctcttttatggacatttaggttgtttccaacttgttgctattactgcaacatatttttgtacacaggactttttccttctttcatttttgtttttctctgtataaaggcccagcagtgaattatattgggtcaaaggatatagacgttttcatggcctcacacatattaaactttttttgtataaaggttacagcaatttatacttttttcagtaattaaaatatagctatttcactgaaa

SEQ ID NO: 15891 - protein, 159 aa, Homo sapiens; identical to SEQ ID NO: 15885

SEQ ID NO: 15892 - DNA, 1887 bp, Homo sapiens
gcgggccggggcctggggcacagtgaggctgcggcaaccgaagttgcttgttgagatttgttgtggatggacgtggtgtagttttgtttgtttcttggattatctcccctagtccgagagaaaacgcattcgatttaagctaaacctgtgagggcgttatcggtggccacactttgattaatttacctaggtgttagggagcggaaaaaaatcagaggagataaaagttacagtgagattccatgcgattaaggactgtggcagcttgggtctgcagaacttctagaaccttctgtgtggccccaaacgttttaacttactcttctcgttatgcattttttaagggaggcagcagtttacagtggccctccacgtgaagttaagtttccttgcttcagaacaaaaatgaataaaacaaaaccaacccagcaatccattgagagcaaagattagacaggagtgaggggtaggcagtaagttaccgggtgcttcgtgcagcagagacgttgccgcttctgtttctcccctaacctcgcggacgggattcagcggttccgttcgtctctcgggagccacataacaagtaacacacatctctccatgtcttcagaacgttgagggcatgttctcaaccacttcattctcctctcccttagccagaaagaaaagttttcctaaaggaatggggaggttgttactccactccgccttccttcaagctgagtcattgtcctccaacttgaattaatgcctcacatgtgggttgaagctttgagagaagcagcaactgctgttgagcaagagaaagaaatccttctggaaatgatccacagtatccaaaatagccaggacatgaggcagatcagtgacggagaaagagaagaattaaatctgactgcaaaccgtttgatgggaagaactctcaccgttgaagtgtcagtagaaacaattagaaacccccagcagcaagaatccctaaagcatgccacaaggattattgatgaggtggtcaataagtttctggatgatttgggaaatgccaagagtcatttaatgtcgctctacagtgcatgttcatctgaggtgccacatgggccagttgatcagaagtttcaatccatagtaattggctgtgctcttgaagatcagaagaaaattaagagaagattagagactctgcttagaaatattgaaaactctgacaaggccatcaagctattagagcattctaaaggagctggttccaaaactctgcaacaaaatgctgaaagcagattcaattagtcttcaaacctaagagcatttacacaatacacaaggtgtaaaaatgataaaatactattttaattgataactagttctttgttaggtataaccacttagttgacactgatagttgtttcagatgaggaaaatattccatcaagtatcttcagttttgtgaataacaaaactagcaatattttaattatctatctagagattttttagattgaattcttgtcttgtactaggatctagcatatttcactattctgtggatgaatacatagtttgtggggaaaacaaacgttcagctaggggcaaaaagcatgactgctttttcctgtctggcatggaatcacgcagtcaccttgggcatttagtttactagaaattctttaccttaagcagcacacacatttactacacacacagtgttaacaaagcactgtgcttagagggtaaaaaggaatcacaaaacaagaatctttccaaagttgtctcattcagcaatgttaaggcatctgtatcaaattattttggatgtaaagattcctgtgtctcataatatgaatgtattttttgatatacaagaaactgacataaaatgtgagaaaaccacct

SEQ ID NO: 15893 - protein, 178 aa, Homo sapiens
MPHMWVEALREAATAVEQEKEILLEMIHSIQNSQDMRQISDGEREELNLTANRLMGRTLTVEVSVETIRNPQQQESLKHATRIIDEVVNKFLDDLGNAKSHLMSLYSACSSEVPHGPVDQKFQSIVIGCALEDQKKIKRRLETLLRNIENSDKAIKLLEHSKGAGSKTLQQNAESRFN

SEQ ID NO: 15894 - DNA, 1962 bp, Homo sapiens
gcgggccggggcctggggcacagtgaggctgcggcaaccgaagttgcttgttgagatttgttgtggatggacgtggtgtagttttgtttgtttcttggattatctcccctagtccgagagaaaacgcattcgatttaagctaaacctgtgagggcgttatcggtggccacactttgattaatttacctaggtgttagggagcggaaaaaaatcagaggagataaaagttacagtgagattccatgcgattaaggactgtggcagcttgggtctgcagaacttctagaaccttctgtgtggccccaaacgttttaacttactcttctcgttatgcattttttaagggaggcagcagtttacagtggccctccacgtgaagttaagtttccttgcttcagaacaaaaatgaataaaacaaaaccaacccagcaatccattgagagcaaagattagacaggagtgaggggtaggcagtaagttaccgggtgcttcgtgcagcagagacgttgccgcttctgtttctcccctaacctcgcggacgggattcagcggttccgttcgtctctcgggagccacataacaagtaacacacatctctccatgtcttcagaacgttgagggcatgttctcaaccacttcattctcctctcccttagccagaaagaaaagttttcctaaaggaatggggaggttgttactccactccgccttccttcaagctgagtcattgtcctccaacttgaattaatgcctcacatgtgggttgaagctttgagagaagcagcaactgctgttgagcaagagaaagaaatccttctggaaatgatccacagtatccaaaatagccaggacatgaggcagatcagtgacggagaaagagaagaattaaatctgactgcaaaccgtttgatgggaagaactctcaccgttgaagtgtcagtagaaacaattagaaacccccagcagcaagaatccctaaagcatgccacaaggattattgatgaggtggtcaataagtttctggatgatttgggaaatgccaagagtcatttaatgtcgctctacagtgcatgttcatctgaggtgccacatgggccagttgatcagaagtttcaatccatagtaattggctgtgctcttgaagatcagaagaaaattaagagaagattagagactctgcttagaaatattgaaaactctgacaaggccatcaagctattagagcattctaaaggagctggttccaaaactctgcaacaaaatgctgaaagcagattcaattagtcttcaaacctaagagcatttacacaatacacaaggtgtaaaaatgataaaatactattttaattgataactagttctttgttaggtataaccacttagttgacactgatagttgtttcagatgaggaaaatattccatcaagtatcttcagttttgtgaataacaaaactagcaatattttaattatctatctagagattttttagattgaattcttgtcttgtactaggatctagcatatttcactattctgtggatgaatacatagtttgtggggaaaacaaacgttcagctaggggcaaaaagcatgactgctttttcctgtctggcatggaatcacgcagtcaccttgggcatttagtttactagaaattctttaccttaagcagcacacacatttactacacacacagtgttaacaaagcactgtgcttagagggtaaaaaggaatcacaaaacaagaatctttccaaagttgtctcattcagcaatgttaaggcatctgtatcaaattattttggatgtaaagattcctgtgtctcataatatgaatgtattttttgatatacaagaaactgacataaaatgtgagaaaaccacctataatttaccactgtgaacaattatatatctatctgcttcatcttttctcaaatgcatcaattctctaaaattcc

SEQ ID NO: 15895 - protein, 178 aa, Homo sapiens; identical to SEQ ID NO: 15893

SEQ ID NO: 15896 - DNA, 2033 bp, Homo sapiens
gcgggccggggcctggggcacagtgaggctgcggcaaccgaagttgcttgttgagatttgttgtggatggacgtggtgtagttttgtttgtttcttggattatctcccctagtccgagagaaaacgcattcgatttaagctaaacctgtgagggcgttatcggtggccacactttgattaatttacctaggtgttagggagcggaaaaaaatcagaggagataaaagttacagtgagattccatgcgattaaggactgtggcagcttgggtctgcagaacttctagaaccttctgtgtggccccaaacgttttaacttactcttctcgttatgcattttttaagggaggcagcagtttacagtggccctccacgtgaagttaagtttccttgcttcagaacaaaaatgaataaaacaaaaccaacccagcaatccattgagagcaaagattagacaggagtgaggggtaggcagtaagttaccgggtgcttcgtgcagcagagacgttgccgcttctgtttctcccctaacctcgcggacgggattcagcggttccgttcgtctctcgggagccacataacaagtaacacacatctctccatgtcttcagaacgttgagggcatgttctcaaccacttcattctcctctcccttagccagaaagaaaagttttcctaaaggaatggggaggttgttactccactccgccttccttcaagctgagtcattgtcctccaacttgaattaatgcctcacatgtgggttgaagctttgagagaagcagcaactgctgttgagcaagagaaagaaatccttctggaaatgatccacagtatccaaaatagccaggacatgaggcagatcagtgacggagaaagagaagaattaaatctgactgcaaaccgtttgatgggaagaactctcaccgttgaagtgtcagtagaaacaattagaaacccccagcagcaagaatccctaaagcatgccacaaggattattgatgaggtggtcaataagtttctggatgatttgggaaatgccaagagtcatttaatgtcgctctacagtgcatgttcatctgaggtgccacatgggccagttgatcagaagtttcaatccatagtaattggctgtgctcttgaagatcagaagaaaattaagagaagattagagactctgcttagaaatattgaaaactctgacaaggccatcaagctattagagcattctaaaggagctggttccaaaactctgcaacaaaatgctgaaagcagattcaattagtcttcaaacctaagagcatttacacaatacacaaggtgtaaaaatgataaaatactattttaattgataactagttctttgttaggtataaccacttagttgacactgatagttgtttcagatgaggaaaatattccatcaagtatcttcagttttgtgaataacaaaactagcaatattttaattatctatctagagattttttagattgaattcttgtcttgtactaggatctagcatatttcactattctgtggatgaatacatagtttgtggggaaaacaaacgttcagctaggggcaaaaagcatgactgctttttcctgtctggcatggaatcacgcagtcaccttgggcatttagtttactagaaattctttaccttaagcagcacacacatttactacacacacagtgttaacaaagcactgtgcttagagggtaaaaaggaatcacaaaacaagaatctttccaaagttgtctcattcagcaatgttaaggcatctgtatcaaattattttggatgtaaagattcctgtgtctcataatatgaatgtattttttgatatacaagaaactgacataaaatgtgagaaaaccacctataatttaccactgtgaacaattatatatctatctgcttcatcttttctcaaatgcatcaattctctaaaattcctatattgtaacttgcctttttttaaaaaagttagatgctgatataaagtctgcttaattgtcaacttaatg

SEQ ID NO: 15897 - protein, 178 aa, Homo sapiens; identical to SEQ ID NO: 15893

SEQ ID NO: 15898 - DNA, 2309 bp, Homo sapiens
gcgggccggggcctggggcacagtgaggctgcggcaaccgaagttgcttgttgagatttgttgtggatggacgtggtgtagttttgtttgtttcttggattatctcccctagtccgagagaaaacgcattcgatttaagctaaacctgtgagggcgttatcggtggccacactttgattaatttacctaggtgttagggagcggaaaaaaatcagaggagataaaagttacagtgagattccatgcgattaaggactgtggcagcttgggtctgcagaacttctagaaccttctgtgtggccccaaacgttttaacttactcttctcgttatgcattttttaagggaggcagcagtttacagtggccctccacgtgaagttaagtttccttgcttcagaacaaaaatgaataaaacaaaaccaacccagcaatccattgagagcaaagattagacaggagtgaggggtaggcagtaagttaccgggtgcttcgtgcagcagagacgttgccgcttctgtttctcccctaacctcgcggacgggattcagcggttccgttcgtctctcgggagccacataacaagtaacacacatctctccatgtcttcagaacgttgagggcatgttctcaaccacttcattctcctctcccttagccagaaagaaaagttttcctaaaggaatggggaggttgttactccactccgccttccttcaagctgagtcattgtcctccaacttgaattaatgcctcacatgtgggttgaagctttgagagaagcagcaactgctgttgagcaagagaaagaaatccttctggaaatgatccacagtatccaaaatagccaggacatgaggcagatcagtgacggagaaagagaagaattaaatctgactgcaaaccgtttgatgggaagaactctcaccgttgaagtgtcagtagaaacaattagaaacccccagcagcaagaatccctaaagcatgccacaaggattattgatgaggtggtcaataagtttctggatgatttgggaaatgccaagagtcatttaatgtcgctctacagtgcatgttcatctgaggtgccacatgggccagttgatcagaagtttcaatccatagtaattggctgtgctcttgaagatcagaagaaaattaagagaagattagagactctgcttagaaatattgaaaactctgacaaggccatcaagctattagagcattctaaaggagctggttccaaaactctgcaacaaaatgctgaaagcagattcaattagtcttcaaacctaagagcatttacacaatacacaaggtgtaaaaatgataaaatactattttaattgataactagttctttgttaggtataaccacttagttgacactgatagttgtttcagatgaggaaaatattccatcaagtatcttcagttttgtgaataacaaaactagcaatattttaattatctatctagagattttttagattgaattcttgtcttgtactaggatctagcatatttcactattctgtggatgaatacatagtttgtggggaaaacaaacgttcagctaggggcaaaaagcatgactgctttttcctgtctggcatggaatcacgcagtcaccttgggcatttagtttactagaaattctttaccttaagcagcacacacatttactacacacacagtgttaacaaagcactgtgcttagagggtaaaaaggaatcacaaaacaagaatctttccaaagttgtctcattcagcaatgttaaggcatctgtatcaaattattttggatgtaaagattcctgtgtctcataatatgaatgtattttttgatatacaagaaactgacataaaatgtgagaaaaccacctataatttaccactgtgaacaattatatatctatctgcttcatcttttctcaaatgcatcaattctctaaaattcctatattgtaacttgcctttttttaaaaaagttagatgctgatataaagtctgcttaattgtcaacttaatgagctctattttgtgtagttatatctttatccattcctcttttatggacatttaggttgtttccaacttgttgctattactgcaacatatttttgtacacaggactttttccttctttcatttttgtttttctctgtataaaggcccagcagtgaattatattgggtcaaaggatatagacgttttcatggcctcacacatattaaactttttttgtataaaggttacagcaatttatacttttttcagtaattaaaatatagctatttcactgaaa

SEQ ID NO: 15899 - protein, 178 aa, Homo sapiens; identical to SEQ ID NO: 15893

SEQ ID NO: 15900 - DNA, 1246 bp, Homo sapiens
ggttccgttcgtctctcggtatttattgggcacctccctacatagaagactaagtgctagttactggcctgaaagcatgaaaagatagttttccccttttcttgcttaagaatttatttgggttgaagctttgagagaagcagcaactgctgttgagcaagagaaagaaatccttctggaaatgatccacagtatccaaaatagccaggacatgaggcagatcagtgacggagaaagagaagaattaaatctgactgcaaaccgtttgatgggaagaactctcaccgttgaagtgtcagtagaaacaattagaaacccccagcagcaagaatccctaaagcatgccacaaggattattgatgaggtggtcaataagtttctggatgatttgggaaatgccaagagtcatttaatgtcgctctacagtgcatgttcatctgaggtgccacatgggccagttgatcagaagtttcaatccatagtaattggctgtgctcttgaagatcagaagaaaattaagagaagattagagactctgcttagaaatattgaaaactctgacaaggccatcaagctattagagcattctaaaggagctggttccaaaactctgcaacaaaatgctgaaagcagattcaattagtcttcaaacctaagagcatttacacaatacacaaggtgtaaaaatgataaaatactattttaattgataactagttctttgttaggtataaccacttagttgacactgatagttgtttcagatgaggaaaatattccatcaagtatcttcagttttgtgaataacaaaactagcaatattttaattatctatctagagattttttagattgaattcttgtcttgtactaggatctagcatatttcactattctgtggatgaatacatagtttgtggggaaaacaaacgttcagctaggggcaaaaagcatgactgctttttcctgtctggcatggaatcacgcagtcaccttgggcatttagtttactagaaattctttaccttaagcagcacacacatttactacacacacagtgttaacaaagcactgtgcttagagggtaaaaaggaatcacaaaacaagaatctttccaaagttgtctcattcagcaatgttaaggcatctgtatcaaattattttggatgtaaagattcctgtgtctcataatatgaatgtattttttgatatacaagaaactgacataaaatgtgagaaaaccacct

SEQ ID NO: 15901 - protein, 153 aa, Homo sapiens
MIHSIQNSQDMRQISDGEREELNLTANRLMGRTLTVEVSVETIRNPQQQESLKHATRIIDEVVNKFLDDLGNAKSHLMSLYSACSSEVPHGPVDQKFQSIVIGCALEDQKKIKRRLETLLRNIENSDKAIKLLEHSKGAGSKTLQQNAESRFN

SEQ ID NO: 15902 - DNA, 1321 bp, Homo sapiens
ggttccgttcgtctctcggtatttattgggcacctccctacatagaagactaagtgctagttactggcctgaaagcatgaaaagatagttttccccttttcttgcttaagaatttatttgggttgaagctttgagagaagcagcaactgctgttgagcaagagaaagaaatccttctggaaatgatccacagtatccaaaatagccaggacatgaggcagatcagtgacggagaaagagaagaattaaatctgactgcaaaccgtttgatgggaagaactctcaccgttgaagtgtcagtagaaacaattagaaacccccagcagcaagaatccctaaagcatgccacaaggattattgatgaggtggtcaataagtttctggatgatttgggaaatgccaagagtcatttaatgtcgctctacagtgcatgttcatctgaggtgccacatgggccagttgatcagaagtttcaatccatagtaattggctgtgctcttgaagatcagaagaaaattaagagaagattagagactctgcttagaaatattgaaaactctgacaaggccatcaagctattagagcattctaaaggagctggttccaaaactctgcaacaaaatgctgaaagcagattcaattagtcttcaaacctaagagcatttacacaatacacaaggtgtaaaaatgataaaatactattttaattgataactagttctttgttaggtataaccacttagttgacactgatagttgtttcagatgaggaaaatattccatcaagtatcttcagttttgtgaataacaaaactagcaatattttaattatctatctagagattttttagattgaattcttgtcttgtactaggatctagcatatttcactattctgtggatgaatacatagtttgtggggaaaacaaacgttcagctaggggcaaaaagcatgactgctttttcctgtctggcatggaatcacgcagtcaccttgggcatttagtttactagaaattctttaccttaagcagcacacacatttactacacacacagtgttaacaaagcactgtgcttagagggtaaaaaggaatcacaaaacaagaatctttccaaagttgtctcattcagcaatgttaaggcatctgtatcaaattattttggatgtaaagattcctgtgtctcataatatgaatgtattttttgatatacaagaaactgacataaaatgtgagaaaaccacctataatttaccactgtgaacaattatatatctatctgcttcatcttttctcaaatgcatcaattctctaaaattcc

SEQ ID NO: 15903 - protein, 153 aa, Homo sapiens; identical to SEQ ID NO: 15901

SEQ ID NO: 15904 - DNA, 1392 bp, Homo sapiens
ggttccgttcgtctctcggtatttattgggcacctccctacatagaagactaagtgctagttactggcctgaaagcatgaaaagatagttttccccttttcttgcttaagaatttatttgggttgaagctttgagagaagcagcaactgctgttgagcaagagaaagaaatccttctggaaatgatccacagtatccaaaatagccaggacatgaggcagatcagtgacggagaaagagaagaattaaatctgactgcaaaccgtttgatgggaagaactctcaccgttgaagtgtcagtagaaacaattagaaacccccagcagcaagaatccctaaagcatgccacaaggattattgatgaggtggtcaataagtttctggatgatttgggaaatgccaagagtcatttaatgtcgctctacagtgcatgttcatctgaggtgccacatgggccagttgatcagaagtttcaatccatagtaattggctgtgctcttgaagatcagaagaaaattaagagaagattagagactctgcttagaaatattgaaaactctgacaaggccatcaagctattagagcattctaaaggagctggttccaaaactctgcaacaaaatgctgaaagcagattcaattagtcttcaaacctaagagcatttacacaatacacaaggtgtaaaaatgataaaatactattttaattgataactagttctttgttaggtataaccacttagttgacactgatagttgtttcagatgaggaaaatattccatcaagtatcttcagttttgtgaataacaaaactagcaatattttaattatctatctagagattttttagattgaattcttgtcttgtactaggatctagcatatttcactattctgtggatgaatacatagtttgtggggaaaacaaacgttcagctaggggcaaaaagcatgactgctttttcctgtctggcatggaatcacgcagtcaccttgggcatttagtttactagaaattctttaccttaagcagcacacacatttactacacacacagtgttaacaaagcactgtgcttagagggtaaaaaggaatcacaaaacaagaatctttccaaagttgtctcattcagcaatgttaaggcatctgtatcaaattattttggatgtaaagattcctgtgtctcataatatgaatgtattttttgatatacaagaaactgacataaaatgtgagaaaaccacctataatttaccactgtgaacaattatatatctatctgcttcatcttttctcaaatgcatcaattctctaaaattcctatattgtaacttgcctttttttaaaaaagttagatgctgatataaagtctgcttaattgtcaacttaatg

SEQ ID NO: 15905 - protein, 153 aa, Homo sapiens; identical to SEQ ID NO: 15901

SEQ ID NO: 15906 - DNA, 1668 bp, Homo sapiens
ggttccgttcgtctctcggtatttattgggcacctccctacatagaagactaagtgctagttactggcctgaaagcatgaaaagatagttttccccttttcttgcttaagaatttatttgggttgaagctttgagagaagcagcaactgctgttgagcaagagaaagaaatccttctggaaatgatccacagtatccaaaatagccaggacatgaggcagatcagtgacggagaaagagaagaattaaatctgactgcaaaccgtttgatgggaagaactctcaccgttgaagtgtcagtagaaacaattagaaacccccagcagcaagaatccctaaagcatgccacaaggattattgatgaggtggtcaataagtttctggatgatttgggaaatgccaagagtcatttaatgtcgctctacagtgcatgttcatctgaggtgccacatgggccagttgatcagaagtttcaatccatagtaattggctgtgctcttgaagatcagaagaaaattaagagaagattagagactctgcttagaaatattgaaaactctgacaaggccatcaagctattagagcattctaaaggagctggttccaaaactctgcaacaaaatgctgaaagcagattcaattagtcttcaaacctaagagcatttacacaatacacaaggtgtaaaaatgataaaatactattttaattgataactagttctttgttaggtataaccacttagttgacactgatagttgtttcagatgaggaaaatattccatcaagtatcttcagttttgtgaataacaaaactagcaatattttaattatctatctagagattttttagattgaattcttgtcttgtactaggatctagcatatttcactattctgtggatgaatacatagtttgtggggaaaacaaacgttcagctaggggcaaaaagcatgactgctttttcctgtctggcatggaatcacgcagtcaccttgggcatttagtttactagaaattctttaccttaagcagcacacacatttactacacacacagtgttaacaaagcactgtgcttagagggtaaaaaggaatcacaaaacaagaatctttccaaagttgtctcattcagcaatgttaaggcatctgtatcaaattattttggatgtaaagattcctgtgtctcataatatgaatgtattttttgatatacaagaaactgacataaaatgtgagaaaaccacctataatttaccactgtgaacaattatatatctatctgcttcatcttttctcaaatgcatcaattctctaaaattcctatattgtaacttgcctttttttaaaaaagttagatgctgatataaagtctgcttaattgtcaacttaatgagctctattttgtgtagttatatctttatccattcctcttttatggacatttaggttgtttccaacttgttgctattactgcaacatatttttgtacacaggactttttccttctttcatttttgtttttctctgtataaaggcccagcagtgaattatattgggtcaaaggatatagacgttttcatggcctcacacatattaaactttttttgtataaaggttacagcaatttatacttttttcagtaattaaaatatagctatttcactgaaa

SEQ ID NO: 15907 - protein, 153 aa, Homo sapiens; identical to SEQ ID NO: 15901

SEQ ID NO: 15908 - DNA, 4597 bp, Homo sapiens
agtaagggcgtgaagtgctcaggttaggtttgatggcgaagagagtcctcagctccaccctggcatttagactcctccctgcagtgcgaccactctttacccgcgaccccacccttccctagtttcttgttcatagagtgctggaatatgaatgagccaaattgtgctgttccattgacactggttgctacagaattaactttactcggagatccgaggagccatcggcagttcccaggagtaagaacctgagagcgtgtgagaatttgagagggaagatctgatctcctagaattagagttggtacagaaaccatttcagctccaaaaatgttggaggaagatatggaagtcgccataaagatggtggttgtagggaatggagcagttggaaaatcaagtatgattcagcgatattgcaaaggcatttttacaaaagactacaagaaaaccattggagttgattttttggagcgacaaattcaagttaatgatgaagatgtcagactaatgttatgggacactgcaggtcaggaggaatttgatgcaattacaaaggcctactatcgaggagcccaggcttgtgtgctcgtgttctctaccacagatagggaatcttttgaagcagtttccagttggagagagaaagtagtagccgaagtgggagatataccaactgtacttgtgcaaaacaagattgatcttctggatgattcttgtataaagaatgaggaagctgaggcactggcaaaaaggttaaagttaagattctacagaacatcagtgaaagaagatctaaatgtgaatgaagtttttaagtatttggctgaaaaataccttcagaaactcaaacaacaaatagctgaggatccagaactaacgcattcaagtagtaacaagattggtgtctttaatacatctggtggaagtcactccggtcagaattcaggtaccctcaatggtggagatgtcatcaatcttagacccaacaaacaaaggaccaagaaaaacagaaatccttttagcagctgtagcataccctaagatgttttgggaggaaaacaattgaattacattgtgcaatgcattaagaaacccatccagctgtcatggtatgttacaaggttttcagcagactttgctcctaatggctctctgaaagtgacagacttaaatattgctctgcagtgcttttcagaatgtagagtgagacctctggtggaaaaattattgccctgtggactcctttaattttttttacattagacgaagcttctcctgtttgtaaaggaatgctataagaaatttcaaacacaggttttgcggaattttaaatgctggaaaacataaatgaaatgcctaaatatattgttacagattttaatactgtggatcaaggaaagatagcaagcattcttttcctgaaattggtcatgtagcttttctgcgaaatagtattgaatctgaatactttcacaaaataatactgaaaggtaaaccctaaatcttgccagactgcattagtattttggcattgaaacttgtgcaatatctgtgtaatgtagaatgtggggtgtgcatgcagatgtctggtactggagtaagctgaaggtatgtgcagtatttaagaaaatgtacattctaattaattcacttataaaaccatttacatattgtgtatatgtttttattttcaaatgataaactctagacatatattttgcaaaatgagcttgggtttaaaaagtgctttgtgccaaaaatatcatacctaatttttatagtgctttactatcagaatttatattgtttattatatcttttaaaagcagtaagcagttttcatctgacagcgtagataaaagaggagtataggaatttgaatgctagagcatctcccaggtgagccttattgcagatctttttgatatagtcacccataagcatggtgagctcctgctctcataaggtcagccaaagccccttaagaaggtacacagcacatctgcagtcattcaggaggtcctgtgaagtgtggtgatgcatctaacaccttttgctgctcactgagaacccagctttgaacttacaagattacactaaccatttttaaagtgcacaaaaatattattattagtcttaactaaaattacatattttataatgccctgcaactctaaaccatccttttgtttacacatttttgtatggtattttaagattatcaatcacttcaacatttctataaccttgtttgtatagcactttctcaagagctgtcagtcccacatacagaatcatttcttttacaaaatgatttaatatgtaatcatgtgtcaggacataaattttgtcacttgggacagtagctttccagctaagataattgcgtgaactctgttaaaactgattatcactcatcaatggctttatttttaacctataaataacccctttcaatatacctggtttttacagcattgcaaaatctgtaaaaataacttttattggaaaatgtcatgaagtcatttttcattatttgtactaaacaatgttttatgtactccttttgtgttttatcttttgtttttccatctgtactcccctcatcctcctaatgttgagaaaatcaaatttcctgggtgtgtccttgttaagtgatcaaaagtaaatgttctctttgccattttagatggaaaaataaaaaaaattaaaaagtaaatttttgcttttcattatattgaaatgatctggcattatctatttcacagtaatgtaaaatgcttatttttatgtcaccagttgtcaccactcccattgctgatagtgacataggttttgggggcaaaattcagttcctaacaaacagtggatactgctaatgagtcatcttttctactctcttcaattttctactctctactctcctctttaatttttgcacaaaataatactttgcaacaaatagtcttttgtctttattggcagaaaaatcacttgttatatgtgttctagttagttctttttcatgttagctgtgtggctaaaagcgtgttacctttctatatttaaaaaaagtaatctctgaggatagttacagttcctgtaatataattttatgtacctagttttatctttttttaaataagaactgaagagagagctttgttacatatttgaatttttaatttgcactgctgtattttaaacctaaccataattagtcatttaaaataattaagtaggcctgaaagtcagccatgttaatttctcaatttaatcaattcttaaagccttcaaaaattgacattttttttccaagacccttcattctcttaaataactttaattttatgaaaccatgtatactaaagaaaaacttttccaagattccaggtgattgtgcatttgtgctctaatctacttttttaacattacggctaatcttttgcgtagacatatcgctgtggaataactgccatatttcagagttcctcaggtttccttttccttttccagtctctgtctatgaattaaatagtatatagaatgacccatataaggcaatatagttaaataaaaccaggttaaatgatttcctttgtatctgcccaaagttgatagcacacgttactttttcaaaataaagctaaaactaccaaaaagaggatgaaaactttttcctcattatggagtgaagttctaggtggttgctttagaagttggcagtgcagtgctcagaaggaactctcaataaataacatgtactccttggacctgtgagttttaggaaactggaccttttctgaagaccttagaatagggagttggccttaggacctaatgtcccaacttagtgttggacccttttaatataagatattgttaattattagcatacttttcaaaacctttgaaatagttactgctaacctgataaaatgttcccattaatctatcattagtctgtttctctgaaaacaaaatgcattgatgaggtgaaagcttgttccacatggcacctacctaatgaacaggacttactcagtttttaactgttaagaatgtcacatgtactattgtcactccttaggttttcagctataaaacatgtaagtctctcatcatacagatgaattcatttgctaacaaaatatttaaaacccgcagtagactctgaaatatccagtcatcaaactcctggctaactggatgatttggctataataatctttattattattattttcatctgtctctcgaaatatctacagtaggatgttagtaaatggtcttttaaaagcaaaaaattggggataaaaggaaaactgaattccttctatatttttattactaataaataatgcttttgtaaatttgaatggaaaaccacttgtatgtattgctatttggttgcagttacactctggagcttaatttaaaacactactctaaaaatttcatgaaggatgaattccaataatcagaaaataaatgcatttcaaagctaaaattttgtgtgatatgtatgattgtatcaacagtgtggatctaaatagtaaaatatataatgcaacttctttaaagatcaaagcaac

SEQ ID NO: 15909 - protein, 237 aa, Homo sapiens; identical to SEQ ID NO: 1816

SEQ ID NO: 15910 - DNA, 4899 bp, Homo sapiens
cgggtccacagatgaggggagtcgagactcccgcgccccaccacccccggcggagctgctgctgagccactcaatctgagccctggctactaataaagttcgtttaaaaatcataatcattcttaagagagcgaaagagggtgcgaactagccgctcggccccgcagggagagctggcgcgtcgggaggagacagcggcggcagcggttgcgccgcgaccaggaggagccggtggcgccgggcggcgggtccgcggccggtgggggacggtgagtagcggctcgcgctgcggtgcagcggcgctgcactcactcgccctctccaggggctgggggttcgtccggctccactggggaagactcagcttctccccggggtcccgggttgtgccttactctccggagtgggcaggggtatcgagggcaggggcctcccggcccggctcccccatcccccggttcggaccgccgagcgccggctctcccctccctgagcaccgatcccaagttccagctagagaaggtgggcggcagcgccagcccggcgccccctcccagctcccagcgatttgagagggaagatctgatctcctagaattagagttggtacagaaaccatttcagctccaaaaatgttggaggaagatatggaagtcgccataaagatggtggttgtagggaatggagcagttggaaaatcaagtatgattcagcgatattgcaaaggcatttttacaaaagactacaagaaaaccattggagttgattttttggagcgacaaattcaagttaatgatgaagatgtcagactaatgttatgggacactgcaggtcaggaggaatttgatgcaattacaaaggcctactatcgaggagcccaggcttgtgtgctcgtgttctctaccacagatagggaatcttttgaagcagtttccagttggagagagaaagtagtagccgaagtgggagatataccaactgtacttgtgcaaaacaagattgatcttctggatgattcttgtataaagaatgaggaagctgaggcactggcaaaaaggttaaagttaagattctacagaacatcagtgaaagaagatctaaatgtgaatgaagtttttaagtatttggctgaaaaataccttcagaaactcaaacaacaaatagctgaggatccagaactaacgcattcaagtagtaacaagattggtgtctttaatacatctggtggaagtcactccggtcagaattcaggtaccctcaatggtggagatgtcatcaatcttagacccaacaaacaaaggaccaagaaaaacagaaatccttttagcagctgtagcataccctaagatgttttgggaggaaaacaattgaattacattgtgcaatgcattaagaaacccatccagctgtcatggtatgttacaaggttttcagcagactttgctcctaatggctctctgaaagtgacagacttaaatattgctctgcagtgcttttcagaatgtagagtgagacctctggtggaaaaattattgccctgtggactcctttaattttttttacattagacgaagcttctcctgtttgtaaaggaatgctataagaaatttcaaacacaggttttgcggaattttaaatgctggaaaacataaatgaaatgcctaaatatattgttacagattttaatactgtggatcaaggaaagatagcaagcattcttttcctgaaattggtcatgtagcttttctgcgaaatagtattgaatctgaatactttcacaaaataatactgaaaggtaaaccctaaatcttgccagactgcattagtattttggcattgaaacttgtgcaatatctgtgtaatgtagaatgtggggtgtgcatgcagatgtctggtactggagtaagctgaaggtatgtgcagtatttaagaaaatgtacattctaattaattcacttataaaaccatttacatattgtgtatatgtttttattttcaaatgataaactctagacatatattttgcaaaatgagcttgggtttaaaaagtgctttgtgccaaaaatatcatacctaatttttatagtgctttactatcagaatttatattgtttattatatcttttaaaagcagtaagcagttttcatctgacagcgtagataaaagaggagtataggaatttgaatgctagagcatctcccaggtgagccttattgcagatctttttgatatagtcacccataagcatggtgagctcctgctctcataaggtcagccaaagccccttaagaaggtacacagcacatctgcagtcattcaggaggtcctgtgaagtgtggtgatgcatctaacaccttttgctgctcactgagaacccagctttgaacttacaagattacactaaccatttttaaagtgcacaaaaatattattattagtcttaactaaaattacatattttataatgccctgcaactctaaaccatccttttgtttacacatttttgtatggtattttaagattatcaatcacttcaacatttctataaccttgtttgtatagcactttctcaagagctgtcagtcccacatacagaatcatttcttttacaaaatgatttaatatgtaatcatgtgtcaggacataaattttgtcacttgggacagtagctttccagctaagataattgcgtgaactctgttaaaactgattatcactcatcaatggctttatttttaacctataaataacccctttcaatatacctggtttttacagcattgcaaaatctgtaaaaataacttttattggaaaatgtcatgaagtcatttttcattatttgtactaaacaatgttttatgtactccttttgtgttttatcttttgtttttccatctgtactcccctcatcctcctaatgttgagaaaatcaaatttcctgggtgtgtccttgttaagtgatcaaaagtaaatgttctctttgccattttagatggaaaaataaaaaaaattaaaaagtaaatttttgcttttcattatattgaaatgatctggcattatctatttcacagtaatgtaaaatgcttatttttatgtcaccagttgtcaccactcccattgctgatagtgacataggttttgggggcaaaattcagttcctaacaaacagtggatactgctaatgagtcatcttttctactctcttcaattttctactctctactctcctctttaatttttgcacaaaataatactttgcaacaaatagtcttttgtctttattggcagaaaaatcacttgttatatgtgttctagttagttctttttcatgttagctgtgtggctaaaagcgtgttacctttctatatttaaaaaaagtaatctctgaggatagttacagttcctgtaatataattttatgtacctagttttatctttttttaaataagaactgaagagagagctttgttacatatttgaatttttaatttgcactgctgtattttaaacctaaccataattagtcatttaaaataattaagtaggcctgaaagtcagccatgttaatttctcaatttaatcaattcttaaagccttcaaaaattgacattttttttccaagacccttcattctcttaaataactttaattttatgaaaccatgtatactaaagaaaaacttttccaagattccaggtgattgtgcatttgtgctctaatctacttttttaacattacggctaatcttttgcgtagacatatcgctgtggaataactgccatatttcagagttcctcaggtttccttttccttttccagtctctgtctatgaattaaatagtatatagaatgacccatataaggcaatatagttaaataaaaccaggttaaatgatttcctttgtatctgcccaaagttgatagcacacgttactttttcaaaataaagctaaaactaccaaaaagaggatgaaaactttttcctcattatggagtgaagttctaggtggttgctttagaagttggcagtgcagtgctcagaaggaactctcaataaataacatgtactccttggacctgtgagttttaggaaactggaccttttctgaagaccttagaatagggagttggccttaggacctaatgtcccaacttagtgttggacccttttaatataagatattgttaattattagcatacttttcaaaacctttgaaatagttactgctaacctgataaaatgttcccattaatctatcattagtctgtttctctgaaaacaaaatgcattgatgaggtgaaagcttgttccacatggcacctacctaatgaacaggacttactcagtttttaactgttaagaatgtcacatgtactattgtcactccttaggttttcagctataaaacatgtaagtctctcatcatacagatgaattcatttgctaacaaaatatttaaaacccgcagtagactctgaaatatccagtcatcaaactcctggctaactggatgatttggctataataatctttattattattattttcatctgtctctcgaaatatctacagtaggatgttagtaaatggtcttttaaaagcaaaaaattggggataaaaggaaaactgaattccttctatatttttattactaataaataatgcttttgtaaatttgaatggaaaaccacttgtatgtattgctatttggttgcagttacactctggagcttaatttaaaacactactctaaaaatttcatgaaggatgaattccaataatcagaaaataaatgcatttcaaagctaaaattttgtgtgatatgtatgattgtatcaacagtgtggatctaaatagtaaaatatataatgcaacttctttaaagatcaaagcaac

SEQ ID NO: 15911 - protein, 237 aa, Homo sapiens; identical to SEQ ID NO: 1816

SEQ ID NO: 15912 - DNA, 4508 bp, Homo sapiens
agtaagggcgtgaagtgctcaggttaggtttgatggcgaagagagtcctcagctccaccctggcatttagactcctccctgcagtgcgaccactctttacccgcgaccccacccttccctagtttcttgttcatagagtgctggaatatgaatgagccaaattgtgctgttccattgacactggttgctacagaattaactttactcggagatccgaggagccatcggcagttcccaggagtaagaacctgagagcgtgtgagaatttgagagggaagatctgatctcctagaattagagttggtacagaaaccatttcagctccaaaaatgttggaggaagatatggaagtcgccataaagatggtggttgtagggaatggagcagttggaaaatcaagtatgattcagcgatattgcaaaggcatttttacaaaagactacaagaaaaccattggagttgattttttggagcgacaaattcaagttaatgatgaagatgtcagactaatgttatgggacactgcaggtcaggaggaatttgatgcaattacaaaggcctactatcgaggagcccaggcttgtgtgctcgtgttctctaccacagatagggaatcttttgaagcagtttccagttggagagagaaagtagtagccgaagtgggagatataccaactgtacttgtgcaaaacaagattgatcttctggatgattcttgtataaagaatgaggaagctgaggcactggcaaaaaggttaaagttaagattctacagaacatcagtgaaagaagatctaaatgtgaatgaagtttttaagtatttggctgaaaaataccttcagaaactcaaacaacaaatagctgaggatccagaactaacgcattcaagtagtaacaagattggtgtctttaatacatctggtggaagtcactccggtcagaattcaggtaccctcaatggtggagatgtcatcaatcttagacccaacaaacaaaggaccaagaaaaacagaaatccttttagcagctgtagcataccctaagatgttttgggaggaaaacaattgaattacattgtgcaatgcattaagaaacccatccagctgtcatggtatgttacaaggttttcagcagactttgctcctaatggctctctgaaagtgacagacttaaatattgctctgcagtgcttttcagaatgtagagtgagacctctggtggaaaaattattgccctgtggactcctttaattttttttacattagacgaagcttctcctgtttgtaaaggaatgctataagaaatttcaaacacaggttttgcggaattttaaatgctggaaaacataaatgaaatgcctaaatatattgttacagattttaatactgtggatcaaggaaagatagcaagcattcttttcctgaaattggtcatgtagcttttctgcgaaatagtattgaatctgaatactttcacaaaataatactgaaaggtaaaccctaaatcttgccagactgcattagtattttggcattgaaacttgtgcaatatctgtgtaatgtagaatgtggggtgtgcatgcagatgtctggtactggagtaagctgaaggtatgtgcagtatttaagaaaatgtacattctaattaattcacttataaaaccatttacatattgtgtatatgtttttattttcaaatgataaactctagacatatattttgcaaaatgagcttgggtttaaaaagtgctttgtgccaaaaatatcatacctaatttttatagtgctttactatcagaatttatattgtttattatatcttttaaaagcagtaagcagttttcatctgacagcgtagataaaagaggagtataggaatttgaatgctagagcatctcccaggtgagccttattgcagatctttttgatatagtcacccataagcatggtgagctcctgctctcataaggtcagccaaagccccttaagaaggtacacagcacatctgcagtcattcaggaggtcctgtgaagtgtggtgatgcatctaacaccttttgctgctcactgagaacccagctttgaacttacaagattacactaaccatttttaaagtgcacaaaaatattattattagtcttaactaaaattacatattttataatgccctgcaactctaaaccatccttttgtttacacatttttgtatggtattttaagattatcaatcacttcaacatttctataaccttgtttgtatagcactttctcaagagctgtcagtcccacatacagaatcatttcttttacaaaatgatttaatatgtaatcatgtgtcaggacataaattttgtcacttgggacagtagctttccagctaagataattgcgtgaactctgttaaaactgattatcactcatcaatggctttatttttaacctataaataacccctttcaatatacctggtttttacagcattgcaaaatctgtaaaaataacttttattggaaaatgtcatgaagtcatttttcattatttgtactaaacaatgttttatgtactccttttgtgttttatcttttgtttttccatctgtactcccctcatcctcctaatgttgagaaaatcaaatttcctgggtgtgtccttgttaagtgatcaaaagtaaatgttctctttgccattttagatggaaaaataaaaaaaattaaaaagtaaatttttgcttttcattatattgaaatgatctggcattatctatttcacagtaatgtaaaatgcttatttttatgtcaccagttgtcaccactcccattgctgatagtgacataggttttgggggcaaaattcagttcctaacaaacagtggatactgctaatgagtcatcttttctactctcttcaattttctactctctactctcctctttaatttttgcacaaaataatactttgcaacaaatagtcttttgtctttattggcagaaaaatcacttgttatatgtgttctagttagttctttttcatgttagctgtgtggctaaaagcgtgttacctttctatatttaaaaaaagtaatctctgaggatagttacagttcctgtaatataattttatgtacctagttttatctttttttaaataagaactgaagagagagctttgttacatatttgaatttttaatttgcactgctgtattttaaacctaaccataattagtcatttaaaataattaagtaggcctgaaagtcagccatgttaatttctcaatttaatcaattcttaaagccttcaaaaattgacattttttttccaagacccttcattctcttaaataactttaattttatgaaaccatgtatactaaagaaaaacttttccaagattccaggtgattgtgcatttgtgctctaatctacttttttaacattacggctaatcttttgcgtagacatatcgctgtggaataactgccatatttcagagttcctcaggtttccttttccttttccagtctctgtctatgaattaaatagtatatagaatgacccatataaggcaatatagttaaataaaaccaggttaaatgatttcctttgtatctgcccaaagttgatagcacacgttactttttcaaaataaagctaaaactaccaaaaagaggatgaaaactttttcctcattatggagtgaagttctaggtggttgctttagaagttggcagtgcagtgctcagaaggaactctcaataaataacatgtactccttggacctgtgagttttaggaaactggaccttttctgaagaccttagaatagggagttggccttaggacctaatgtcccaacttagtgttggacccttttaatataagatattgttaattattagcatacttttcaaaacctttgaaatagttactgctaacctgataaaatgttcccattaatctatcattagtctgtttctctgaaaacaaaatgcattgatgaggtgaaagcttgttccacatggcacctacctaatgaacaggacttactcagtttttaactgttaagaatgtcacatgtactattgtcactccttaggttttcagctataaaacatgtaagtctctcatcatacagatgaattcatttgctaacaaaatatttaaaacccgcagtagactctgaaatatccagtcatcaaactcctggctaactggatgatttggctataataatctttattattattattttcatctgtctctcgaaatatctacagtaggatgttagtaaatggtcttttaaaagcaaaaaattggggataaaaggaaaactgaattccttctatatttttattactaataaataatgcttttgtaaatttgaatggaaaaccacttgtatgtattgctatttggttgcagttacactctggagcttaatttaaaacactactctaaaaatttcatgaaggatgaattccaataatcagaaaataaatgcatttcaaagct

SEQ ID NO: 15913 - protein, 237 aa, Homo sapiens; identical to SEQ ID NO: 1816

SEQ ID NO: 15914 - DNA, 4810 bp, Homo sapiens
cgggtccacagatgaggggagtcgagactcccgcgccccaccacccccggcggagctgctgctgagccactcaatctgagccctggctactaataaagttcgtttaaaaatcataatcattcttaagagagcgaaagagggtgcgaactagccgctcggccccgcagggagagctggcgcgtcgggaggagacagcggcggcagcggttgcgccgcgaccaggaggagccggtggcgccgggcggcgggtccgcggccggtgggggacggtgagtagcggctcgcgctgcggtgcagcggcgctgcactcactcgccctctccaggggctgggggttcgtccggctccactggggaagactcagcttctccccggggtcccgggttgtgccttactctccggagtgggcaggggtatcgagggcaggggcctcccggcccggctcccccatcccccggttcggaccgccgagcgccggctctcccctccctgagcaccgatcccaagttccagctagagaaggtgggcggcagcgccagcccggcgccccctcccagctcccagcgatttgagagggaagatctgatctcctagaattagagttggtacagaaaccatttcagctccaaaaatgttggaggaagatatggaagtcgccataaagatggtggttgtagggaatggagcagttggaaaatcaagtatgattcagcgatattgcaaaggcatttttacaaaagactacaagaaaaccattggagttgattttttggagcgacaaattcaagttaatgatgaagatgtcagactaatgttatgggacactgcaggtcaggaggaatttgatgcaattacaaaggcctactatcgaggagcccaggcttgtgtgctcgtgttctctaccacagatagggaatcttttgaagcagtttccagttggagagagaaagtagtagccgaagtgggagatataccaactgtacttgtgcaaaacaagattgatcttctggatgattcttgtataaagaatgaggaagctgaggcactggcaaaaaggttaaagttaagattctacagaacatcagtgaaagaagatctaaatgtgaatgaagtttttaagtatttggctgaaaaataccttcagaaactcaaacaacaaatagctgaggatccagaactaacgcattcaagtagtaacaagattggtgtctttaatacatctggtggaagtcactccggtcagaattcaggtaccctcaatggtggagatgtcatcaatcttagacccaacaaacaaaggaccaagaaaaacagaaatccttttagcagctgtagcataccctaagatgttttgggaggaaaacaattgaattacattgtgcaatgcattaagaaacccatccagctgtcatggtatgttacaaggttttcagcagactttgctcctaatggctctctgaaagtgacagacttaaatattgctctgcagtgcttttcagaatgtagagtgagacctctggtggaaaaattattgccctgtggactcctttaattttttttacattagacgaagcttctcctgtttgtaaaggaatgctataagaaatttcaaacacaggttttgcggaattttaaatgctggaaaacataaatgaaatgcctaaatatattgttacagattttaatactgtggatcaaggaaagatagcaagcattcttttcctgaaattggtcatgtagcttttctgcgaaatagtattgaatctgaatactttcacaaaataatactgaaaggtaaaccctaaatcttgccagactgcattagtattttggcattgaaacttgtgcaatatctgtgtaatgtagaatgtggggtgtgcatgcagatgtctggtactggagtaagctgaaggtatgtgcagtatttaagaaaatgtacattctaattaattcacttataaaaccatttacatattgtgtatatgtttttattttcaaatgataaactctagacatatattttgcaaaatgagcttgggtttaaaaagtgctttgtgccaaaaatatcatacctaatttttatagtgctttactatcagaatttatattgtttattatatcttttaaaagcagtaagcagttttcatctgacagcgtagataaaagaggagtataggaatttgaatgctagagcatctcccaggtgagccttattgcagatctttttgatatagtcacccataagcatggtgagctcctgctctcataaggtcagccaaagccccttaagaaggtacacagcacatctgcagtcattcaggaggtcctgtgaagtgtggtgatgcatctaacaccttttgctgctcactgagaacccagctttgaacttacaagattacactaaccatttttaaagtgcacaaaaatattattattagtcttaactaaaattacatattttataatgccctgcaactctaaaccatccttttgtttacacatttttgtatggtattttaagattatcaatcacttcaacatttctataaccttgtttgtatagcactttctcaagagctgtcagtcccacatacagaatcatttcttttacaaaatgatttaatatgtaatcatgtgtcaggacataaattttgtcacttgggacagtagctttccagctaagataattgcgtgaactctgttaaaactgattatcactcatcaatggctttatttttaacctataaataacccctttcaatatacctggtttttacagcattgcaaaatctgtaaaaataacttttattggaaaatgtcatgaagtcatttttcattatttgtactaaacaatgttttatgtactccttttgtgttttatcttttgtttttccatctgtactcccctcatcctcctaatgttgagaaaatcaaatttcctgggtgtgtccttgttaagtgatcaaaagtaaatgttctctttgccattttagatggaaaaataaaaaaaattaaaaagtaaatttttgcttttcattatattgaaatgatctggcattatctatttcacagtaatgtaaaatgcttatttttatgtcaccagttgtcaccactcccattgctgatagtgacataggttttgggggcaaaattcagttcctaacaaacagtggatactgctaatgagtcatcttttctactctcttcaattttctactctctactctcctctttaatttttgcacaaaataatactttgcaacaaatagtcttttgtctttattggcagaaaaatcacttgttatatgtgttctagttagttctttttcatgttagctgtgtggctaaaagcgtgttacctttctatatttaaaaaaagtaatctctgaggatagttacagttcctgtaatataattttatgtacctagttttatctttttttaaataagaactgaagagagagctttgttacatatttgaatttttaatttgcactgctgtattttaaacctaaccataattagtcatttaaaataattaagtaggcctgaaagtcagccatgttaatttctcaatttaatcaattcttaaagccttcaaaaattgacattttttttccaagacccttcattctcttaaataactttaattttatgaaaccatgtatactaaagaaaaacttttccaagattccaggtgattgtgcatttgtgctctaatctacttttttaacattacggctaatcttttgcgtagacatatcgctgtggaataactgccatatttcagagttcctcaggtttccttttccttttccagtctctgtctatgaattaaatagtatatagaatgacccatataaggcaatatagttaaataaaaccaggttaaatgatttcctttgtatctgcccaaagttgatagcacacgttactttttcaaaataaagctaaaactaccaaaaagaggatgaaaactttttcctcattatggagtgaagttctaggtggttgctttagaagttggcagtgcagtgctcagaaggaactctcaataaataacatgtactccttggacctgtgagttttaggaaactggaccttttctgaagaccttagaatagggagttggccttaggacctaatgtcccaacttagtgttggacccttttaatataagatattgttaattattagcatacttttcaaaacctttgaaatagttactgctaacctgataaaatgttcccattaatctatcattagtctgtttctctgaaaacaaaatgcattgatgaggtgaaagcttgttccacatggcacctacctaatgaacaggacttactcagtttttaactgttaagaatgtcacatgtactattgtcactccttaggttttcagctataaaacatgtaagtctctcatcatacagatgaattcatttgctaacaaaatatttaaaacccgcagtagactctgaaatatccagtcatcaaactcctggctaactggatgatttggctataataatctttattattattattttcatctgtctctcgaaatatctacagtaggatgttagtaaatggtcttttaaaagcaaaaaattggggataaaaggaaaactgaattccttctatatttttattactaataaataatgcttttgtaaatttgaatggaaaaccacttgtatgtattgctatttggttgcagttacactctggagcttaatttaaaacactactctaaaaatttcatgaaggatgaattccaataatcagaaaataaatgcatttcaaagct

SEQ ID NO: 15915 - protein, 237 aa, Homo sapiens; identical to SEQ ID NO: 1816

SEQ ID NO: 15916 - DNA, 2718 bp, Homo sapiens
agtaagggcgtgaagtgctcaggttaggtttgatggcgaagagagtcctcagctccaccctggcatttagactcctccctgcagtgcgaccactctttacccgcgaccccacccttccctagtttcttgttcatagagtgctggaatatgaatgagccaaattgtgctgttccattgacactggttgctacagaattaactttactcggagatccgaggagccatcggcagttcccaggagtaagaacctgagagcgtgtgagaatttgagagggaagatctgatctcctagaattagagttggtacagaaaccatttcagctccaaaaatgttggaggaagatatggaagtcgccataaagatggtggttgtagggaatggagcagttggaaaatcaagtatgattcagcgatattgcaaaggcatttttacaaaagactacaagaaaaccattggagttgattttttggagcgacaaattcaagttaatgatgaagatgtcagactaatgttatgggacactgcaggtcaggaggaatttgatgcaattacaaaggcctactatcgaggagcccaggcttgtgtgctcgtgttctctaccacagatagggaatcttttgaagcagtttccagttggagagagaaagtagtagccgaagtgggagatataccaactgtacttgtgcaaaacaagattgatcttctggatgattcttgtataaagaatgaggaagctgaggcactggcaaaaaggttaaagttaagattctacagaacatcagtgaaagaagatctaaatgtgaatgaagtttttaagtatttggctgaaaaataccttcagaaactcaaacaacaaatagctgaggatccagaactaacgcattcaagtagtaacaagattggtgtctttaatacatctggtggaagtcactccggtcagaattcaggtaccctcaatggtggagatgtcatcaatcttagacccaacaaacaaaggaccaagaaaaacagaaatccttttagcagctgtagcataccctaagatgttttgggaggaaaacaattgaattacattgtgcaatgcattaagaaacccatccagctgtcatggtatgttacaaggttttcagcagactttgctcctaatggctctctgaaagtgacagacttaaatattgctctgcagtgcttttcagaatgtagagtgagacctctggtggaaaaattattgccctgtggactcctttaattttttttacattagacgaagcttctcctgtttgtaaaggaatgctataagaaatttcaaacacaggttttgcggaattttaaatgctggaaaacataaatgaaatgcctaaatatattgttacagattttaatactgtggatcaaggaaagatagcaagcattcttttcctgaaattggtcatgtagcttttctgcgaaatagtattgaatctgaatactttcacaaaataatactgaaaggtaaaccctaaatcttgccagactgcattagtattttggcattgaaacttgtgcaatatctgtgtaatgtagaatgtggggtgtgcatgcagatgtctggtactggagtaagctgaaggtatgtgcagtatttaagaaaatgtacattctaattaattcacttataaaaccatttacatattgtgtatatgtttttattttcaaatgataaactctagacatatattttgcaaaatgagcttgggtttaaaaagtgctttgtgccaaaaatatcatacctaatttttatagtgctttactatcagaatttatattgtttattatatcttttaaaagcagtaagcagttttcatctgacagcgtagataaaagaggagtataggaatttgaatgctagagcatctcccaggtgagccttattgcagatctttttgatatagtcacccataagcatggtgagctcctgctctcataaggtcagccaaagccccttaagaaggtacacagcacatctgcagtcattcaggaggtcctgtgaagtgtggtgatgcatctaacaccttttgctgctcactgagaacccagctttgaacttacaagattacactaaccatttttaaagtgcacaaaaatattattattagtcttaactaaaattacatattttataatgccctgcaactctaaaccatccttttgtttacacatttttgtatggtattttaagattatcaatcacttcaacatttctataaccttgtttgtatagcactttctcaagagctgtcagtcccacatacagaatcatttcttttacaaaatgatttaatatgtaatcatgtgtcaggacataaattttgtcacttgggacagtagctttccagctaagataattgcgtgaactctgttaaaactgattatcactcatcaatggctttatttttaacctataaataacccctttcaatatacctggtttttacagcattgcaaaatctgtaaaaataacttttattggaaaatgtcatgaagtcatttttcattatttgtactaaacaatgttttatgtactccttttgtgttttatcttttgtttttccatctgtactcccctcatcctcctaatgttgagaaaatcaaatttcctgggtgtgtccttgttaagtgatcaaaagtaaatgttctctttgccattttagatggaaaaataaaaaaaattaaaaagt

SEQ ID NO: 15917 - protein, 237 aa, Homo sapiens; identical to SEQ ID NO: 1816

SEQ ID NO: 15918 - DNA, 2538 bp, Homo sapiens
gaggggagtcgagactcccgcgccccaccacccccggcggagctgctgctgagccactcaatctgagccctggctactaataaaatttgagagggaagatctgatctcctagaattagagttggtacagaaaccatttcagctccaaaaatgttggaggaagatatggaagtcgccataaagatggtggttgtagggaatggagcagttggaaaatcaagtatgattcagcgatattgcaaaggcatttttacaaaagactacaagaaaaccattggagttgattttttggagcgacaaattcaagttaatgatgaagatgtcagactaatgttatgggacactgcaggtcaggaggaatttgatgcaattacaaaggcctactatcgaggagcccaggcttgtgtgctcgtgttctctaccacagatagggaatcttttgaagcagtttccagttggagagagaaagtagtagccgaagtgggagatataccaactgtacttgtgcaaaacaagattgatcttctggatgattcttgtataaagaatgaggaagctgaggcactggcaaaaaggttaaagttaagattctacagaacatcagtgaaagaagatctaaatgtgaatgaagtttttaagtatttggctgaaaaataccttcagaaactcaaacaacaaatagctgaggatccagaactaacgcattcaagtagtaacaagattggtgtctttaatacatctggtggaagtcactccggtcagaattcaggtaccctcaatggtggagatgtcatcaatcttagacccaacaaacaaaggaccaagaaaaacagaaatccttttagcagctgtagcataccctaagatgttttgggaggaaaacaattgaattacattgtgcaatgcattaagaaacccatccagctgtcatggtatgttacaaggttttcagcagactttgctcctaatggctctctgaaagtgacagacttaaatattgctctgcagtgcttttcagaatgtagagtgagacctctggtggaaaaattattgccctgtggactcctttaattttttttacattagacgaagcttctcctgtttgtaaaggaatgctataagaaatttcaaacacaggttttgcggaattttaaatgctggaaaacataaatgaaatgcctaaatatattgttacagattttaatactgtggatcaaggaaagatagcaagcattcttttcctgaaattggtcatgtagcttttctgcgaaatagtattgaatctgaatactttcacaaaataatactgaaaggtaaaccctaaatcttgccagactgcattagtattttggcattgaaacttgtgcaatatctgtgtaatgtagaatgtggggtgtgcatgcagatgtctggtactggagtaagctgaaggtatgtgcagtatttaagaaaatgtacattctaattaattcacttataaaaccatttacatattgtgtatatgtttttattttcaaatgataaactctagacatatattttgcaaaatgagcttgggtttaaaaagtgctttgtgccaaaaatatcatacctaatttttatagtgctttactatcagaatttatattgtttattatatcttttaaaagcagtaagcagttttcatctgacagcgtagataaaagaggagtataggaatttgaatgctagagcatctcccaggtgagccttattgcagatctttttgatatagtcacccataagcatggtgagctcctgctctcataaggtcagccaaagccccttaagaaggtacacagcacatctgcagtcattcaggaggtcctgtgaagtgtggtgatgcatctaacaccttttgctgctcactgagaacccagctttgaacttacaagattacactaaccatttttaaagtgcacaaaaatattattattagtcttaactaaaattacatattttataatgccctgcaactctaaaccatccttttgtttacacatttttgtatggtattttaagattatcaatcacttcaacatttctataaccttgtttgtatagcactttctcaagagctgtcagtcccacatacagaatcatttcttttacaaaatgatttaatatgtaatcatgtgtcaggacataaattttgtcacttgggacagtagctttccagctaagataattgcgtgaactctgttaaaactgattatcactcatcaatggctttatttttaacctataaataacccctttcaatatacctggtttttacagcattgcaaaatctgtaaaaataacttttattggaaaatgtcatgaagtcatttttcattatttgtactaaacaatgttttatgtactccttttgtgttttatcttttgtttttccatctgtactcccctcatcctcctaatgttgagaaaatcaaatttcctgggtgtgtccttgttaagtgatcaaaagtaaatgttctctttgccattttagatggaaaaataaaaaaaattaaaaagt

SEQ ID NO: 15919 - protein, 237 aa, Homo sapiens; identical to SEQ ID NO: 1816

SEQ ID NO: 15920 - DNA, 3020 bp, Homo sapiens
cgggtccacagatgaggggagtcgagactcccgcgccccaccacccccggcggagctgctgctgagccactcaatctgagccctggctactaataaagttcgtttaaaaatcataatcattcttaagagagcgaaagagggtgcgaactagccgctcggccccgcagggagagctggcgcgtcgggaggagacagcggcggcagcggttgcgccgcgaccaggaggagccggtggcgccgggcggcgggtccgcggccggtgggggacggtgagtagcggctcgcgctgcggtgcagcggcgctgcactcactcgccctctccaggggctgggggttcgtccggctccactggggaagactcagcttctccccggggtcccgggttgtgccttactctccggagtgggcaggggtatcgagggcaggggcctcccggcccggctcccccatcccccggttcggaccgccgagcgccggctctcccctccctgagcaccgatcccaagttccagctagagaaggtgggcggcagcgccagcccggcgccccctcccagctcccagcgatttgagagggaagatctgatctcctagaattagagttggtacagaaaccatttcagctccaaaaatgttggaggaagatatggaagtcgccataaagatggtggttgtagggaatggagcagttggaaaatcaagtatgattcagcgatattgcaaaggcatttttacaaaagactacaagaaaaccattggagttgattttttggagcgacaaattcaagttaatgatgaagatgtcagactaatgttatgggacactgcaggtcaggaggaatttgatgcaattacaaaggcctactatcgaggagcccaggcttgtgtgctcgtgttctctaccacagatagggaatcttttgaagcagtttccagttggagagagaaagtagtagccgaagtgggagatataccaactgtacttgtgcaaaacaagattgatcttctggatgattcttgtataaagaatgaggaagctgaggcactggcaaaaaggttaaagttaagattctacagaacatcagtgaaagaagatctaaatgtgaatgaagtttttaagtatttggctgaaaaataccttcagaaactcaaacaacaaatagctgaggatccagaactaacgcattcaagtagtaacaagattggtgtctttaatacatctggtggaagtcactccggtcagaattcaggtaccctcaatggtggagatgtcatcaatcttagacccaacaaacaaaggaccaagaaaaacagaaatccttttagcagctgtagcataccctaagatgttttgggaggaaaacaattgaattacattgtgcaatgcattaagaaacccatccagctgtcatggtatgttacaaggttttcagcagactttgctcctaatggctctctgaaagtgacagacttaaatattgctctgcagtgcttttcagaatgtagagtgagacctctggtggaaaaattattgccctgtggactcctttaattttttttacattagacgaagcttctcctgtttgtaaaggaatgctataagaaatttcaaacacaggttttgcggaattttaaatgctggaaaacataaatgaaatgcctaaatatattgttacagattttaatactgtggatcaaggaaagatagcaagcattcttttcctgaaattggtcatgtagcttttctgcgaaatagtattgaatctgaatactttcacaaaataatactgaaaggtaaaccctaaatcttgccagactgcattagtattttggcattgaaacttgtgcaatatctgtgtaatgtagaatgtggggtgtgcatgcagatgtctggtactggagtaagctgaaggtatgtgcagtatttaagaaaatgtacattctaattaattcacttataaaaccatttacatattgtgtatatgtttttattttcaaatgataaactctagacatatattttgcaaaatgagcttgggtttaaaaagtgctttgtgccaaaaatatcatacctaatttttatagtgctttactatcagaatttatattgtttattatatcttttaaaagcagtaagcagttttcatctgacagcgtagataaaagaggagtataggaatttgaatgctagagcatctcccaggtgagccttattgcagatctttttgatatagtcacccataagcatggtgagctcctgctctcataaggtcagccaaagccccttaagaaggtacacagcacatctgcagtcattcaggaggtcctgtgaagtgtggtgatgcatctaacaccttttgctgctcactgagaacccagctttgaacttacaagattacactaaccatttttaaagtgcacaaaaatattattattagtcttaactaaaattacatattttataatgccctgcaactctaaaccatccttttgtttacacatttttgtatggtattttaagattatcaatcacttcaacatttctataaccttgtttgtatagcactttctcaagagctgtcagtcccacatacagaatcatttcttttacaaaatgatttaatatgtaatcatgtgtcaggacataaattttgtcacttgggacagtagctttccagctaagataattgcgtgaactctgttaaaactgattatcactcatcaatggctttatttttaacctataaataacccctttcaatatacctggtttttacagcattgcaaaatctgtaaaaataacttttattggaaaatgtcatgaagtcatttttcattatttgtactaaacaatgttttatgtactccttttgtgttttatcttttgtttttccatctgtactcccctcatcctcctaatgttgagaaaatcaaatttcctgggtgtgtccttgttaagtgatcaaaagtaaatgttctctttgccattttagatggaaaaataaaaaaaattaaaaagt

SEQ ID NO: 15921 - protein, 237 aa, Homo sapiens; identical to SEQ ID NO: 1816

SEQ ID NO: 15922 - DNA, 1537 bp, Homo sapiens
tctatcaatgtcttgatttcaaacttccagcctccagaactaggccaaatggaggcttcccaaggaccagactctttgggaacactaagaggcaacacccttggcatgtgctgtgttctcatgatggacagtgaccctggaaaagtttcagcctcggcaaagcctcagcaagtggccctgcaagcagaagctggacatgtgggagctggggcagaagcaaaataacagggcagaagacgatggcaactgtgaaagaacgactgtctcctgctgctgccacccattggctgtgcccccacctggaaaccagctatcaagggagcctggggcaataagtggcaggaattagagactcctggaaacagaagaggaggaagacattgccatggagagcagagaagttgaggccatgtgctagtcttgtcctgttttgctcttagatttatcccctgtccccgctctaccctgttccgtatcacagagaattactttttccttgttcctttgccctctggtttctgggtcagttcagccattggatggccctgaagagagagcagaaagggagaagctgggtatttttccccacttctctcagcttcaagtattgtctctggcagcggccatctcttctatggacccagctcttgctccaagagcttctgtggttccaacttctccctggtggcctggctccttttgtcccttaagctttaggcagtggtagcagcttcctgctcttgataatctcaaggatgccttactctcccactttaggcttcttacctttgtcatctcctggtattaaatctcttctttaaaatatcaagaatatttagaatcctgactgatagaggaaactatcacatgggagagcctcaaccttcacagaaaagcatgagggaaatgaaaatacacatggcttgcatatcataaatatggaaaaacttccattgaatctgtcactgctgtgtgcctattccctcctctcactggggcctccaatccctcaaccaccagtgttctggtccactttttagcctggcttgcccttcatacccctggagatcatgaacagtcatatccgcaatattctgttagaattcttgattttcctgctgacttttccttctgctgtagctattttatcaatccctatccctgagtacagtaaattatctattttctctcctcctgctttttttactggacaaaggaacatgacctggccaaaatttcttctcctgggatgtttgtctgcccggctacttatatccattgtacccatttccaacaaccatgcacccatggctttgcccagagtccctggaatcttttcaggttcatgtaaacttaaaatttatgcaaaggaaatccaccaaggattggagaccaaaaaacaaacgtatgacatcatgctataatttcacacacacagaattattttaaaaatagaatgggttcataaaaatgaaataaattgctgatatgtaaaactcatcatagaaaaatcaatgttattaaaatggttattcat

SEQ ID NO: 15923 - protein, 50 aa, Homo sapiens
MWELGQKQNNRAEDDGNCERTTVSCCCHPLAVPPPGNQLSREPGAISGRN

SEQ ID NO: 15924 - DNA, 898 bp, Homo sapiens
gatttactgaacatggctgctgaaatgtataacattattgtgcattattgctaccgtgatatgcggatttatattgcaattgcctctggattcagaaaaacacccttcacagtgaggtgaccaagatggagttttctggaagaaagtggaggaagctgaggttggcaggtgaccagaggaatgcttcctaccctcattgccttcagttttacttgcagccaccttctgaaaacatatctttaatagaatttgaaaacttggctattgatagagttaaattgttaaaatcagttgaaaatcttggagtgagctatgtgaaaggaactgaacaataccagagtaagttggagagtgagcttcggaagctcaagttttcctacagagaaaacttagaagatgaatatgaaccacgaagaagagatcatatttctcattttattttgcggcttgcttattgccagtctgaagaacttagacgctggttcattcaacaagaaatggatctccttcgatttagatttagtattttacccaaggataaaattcaggatttcttaaaggatagccaattgcagtttgaggctgtaagtatatttttgtagttatttctaattgttctcaccattcatttttcccttctgtcttaagtgctggtactaatgtgtagtgtgttctctttacattctccaagtacctgcctgaaacagtagctaatagctttggataacaatatatctttccttctctatgactagaagaaaaggactccttaataacaaagtctcacacttacttgctctgttaaatgtgtgctttattaaagcacaagaaggtttagtttataaaggttcatctttaaccaaaattttgtcggccaaaataaagctaataatgtgtt

SEQ ID NO: 15925 - protein, 158 aa, Homo sapiens
MEFSGRKWRKLRLAGDQRNASYPHCLQFYLQPPSENISLIEFENLAIDRVKLLKSVENLGVSYVKGTEQYQSKLESELRKLKFSYRENLEDEYEPRRRDHISHFILRLAYCQSEELRRWFIQQEMDLLRFRFSILPKDKIQDFLKDSQLQFEAVSIFL

SEQ ID NO: 15926 - DNA, 871 bp, Homo sapiens
ctcttccggtttcatatgaactctcccgccacccgggaacagtggctgccaccgtttgtgttttcccgagtttgaattcttgcaggtgaccaagatggagttttctggaagaaagtggaggaagctgaggttggcaggtgaccagaggaatgcttcctaccctcattgccttcagttttacttgcagccaccttctgaaaacatatctttaatagaatttgaaaacttggctattgatagagttaaattgttaaaatcagttgaaaatcttggagtgagctatgtgaaaggaactgaacaataccagagtaagttggagagtgagcttcggaagctcaagttttcctacagagaaaacttagaagatgaatatgaaccacgaagaagagatcatatttctcattttattttgcggcttgcttattgccagtctgaagaacttagacgctggttcattcaacaagaaatggatctccttcgatttagatttagtattttacccaaggataaaattcaggatttcttaaaggatagccaattgcagtttgaggctgtaagtatatttttgtagttatttctaattgttctcaccattcatttttcccttctgtcttaagtgctggtactaatgtgtagtgtgttctctttacattctccaagtacctgcctgaaacagtagctaatagctttggataacaatatatctttccttctctatgactagaagaaaaggactccttaataacaaagtctcacacttacttgctctgttaaatgtgtgctttattaaagcacaagaaggtttagtttataaaggttcatctttaaccaaaattttgtcggccaaaataaagctaataatgtgttaaac

SEQ ID NO: 15927 - protein, 158 aa, Homo sapiens; identical to SEQ ID NO: 15925

SEQ ID NO: 15928 - DNA, 615 bp, Homo sapiens
tccggtttcatatgaactctcccgccacccgggaacagtggctgccaccgtttgtgttttcccgagtttgaattcttgcaggtgaccaagatggagttttctggaagaaagtggaggaagctgaggttggcaggtgaccagaggaatgcttcctaccctcattgccttcagttttacttgcagccaccttctgaaaacatatctttaatagaatttgaaaacttggctattgatagagttaaattgttaaaatcagttgaaaatcttggagtgagctatgtgaaaggaactgaacaataccagagtaagttggagagtgagcttcggaagctcaagttttcctacagagaaaacttagaagatgaatatgaaccacgaagaagagatcatatttctcattttattttgcggcttgcttattgccagtctgaagaacttagacgctggttcattcaacaagaaatggatctccttcgatttagatttagtattttacccaaggataaaattcaggatttcttaaaggatagccaattgcagtttgaggctagatggggtctcaccgtgttgcccaggctggtctcaaactcctggattcaagtgatcctcccgcct

SEQ ID NO: 15929 - protein, 174 aa, Homo sapiens
MEFSGRKWRKLRLAGDQRNASYPHCLQFYLQPPSENISLIEFENLAIDRVKLLKSVENLGVSYVKGTEQYQSKLESELRKLKFSYRENLEDEYEPRRRDHISHFILRLAYCQSEELRRWFIQQEMDLLRFRFSILPKDKIQDFLKDSQLQFEARWGLTVLPRLVSNSWIQVILP

SEQ ID NO: 15930 - DNA, 2296 bp, Homo sapiens
ggtttcatatgaactctcccgccacccgggaacagtggctgccaccgtttgtgttttcccgagtttgaattcttgcaggtgaccaagatggagttttctggaagaaagtggaggaagctgaggttggcaggtgaccagaggaatgcttcctaccctcattgccttcagttttacttgcagccaccttctgaaaacatatctttaatagaatttgaaaacttggctattgatagagttaaattgttaaaatcagttgaaaatcttggagtgagctatgtgaaaggaactgaacaataccagagtaagttggagagtgagcttcggaagctcaagttttcctacagagaaaacttagaagatgaatatgaaccacgaagaagagatcatatttctcattttattttgcggcttgcttattgccagtctgaagaacttagacgctggttcattcaacaagaaatggatctccttcgatttagatttagtattttacccaaggataaaattcaggatttcttaaaggatagccaattgcagtttgaggctataagtgatgaagagaagactcttcgagaacaggagattgttgcctcatcaccaagtttaagtggacttaagttggggttcgagtccatttataagatcccttttgctgatgctctggatttgtttcgaggaaggaaagtctatttggaagatggctttgcttacgtaccacttaaggacattgtggcaatcatcctgaatgaatttagagccaaactgtccaaggctttggcattaacagccaggtccttgcctgctgtgcagtctgatgaaagacttcagcctctgctcaatcacctcagtcattcctacactagccaagattacagtacccagggaaatgttgggaagatttctttagatcagattgatttgctttctaccaaatccttcccactttacatgcatcagttacataaagccttgcgggaaaatcaccatctttgtcatggaggccgaatgcagtatgtcctatttctgaagggcattggtttaactttggaacagacattgcagttctggaagcaagaatttatcaaaggaaagatggatccagacaagtttgataaaggttactcttagaacatccgtcacagctttggaaaggaaggcaagaggacagactatacacctttcagttgcctgaagattattctatccaatccaccaagccaaggggattatcatgggtgcccattccgtcacagtgatccagagctgctgaagcaaaagttgcagtcatacaagatctctcctggagggataagccagattttggatttagtaaaggggacacattaccaggtagcctgtcaaaaatactttgagatgatacacaatgtgggtgattgtggcttttctttgaatcatcctaatcatttcttttgtgagagccaacgtattctaaatggtggtaaagacataaagaaggaatctatccaaccagaaactcctcaacccaaaccaagtgtccagaaaaccaaggatgcatcatctgctctggcctctttaaattcctctctggaaatggatatggaaggactagaggattactttagtgaagattcttaggcagttttgtaaccctttttcctcaatagcctgtttcctgtttttaagattttgcctttgttgttgaaaaagtgttgcactctgttgtgtaattgtgacacaattacagctgattgcagcctcaaccttcccagctcaagtgatcctcctacctcagcctcccaagtagttgggaccacaggtgtgcaccccatatccagctattttttttcaattttttttgtagagggggggtctccctatgttgcccaggcagatctcagactgctgggctcaagcgatcctcacacctcagcctcccagagtgctgggattacagttgtgagccactgtgcctggcctttctttttttaacctttttgtttaacttctctcttcactgcatcccaatccatctacaggcatgcacacttattaggaaagcaggtttgaggtaacgagactttcactatattttgctttgacagaaggaaagaggaagagtttctattaaaatctgtcacttgagtgatgtcattcaagtcctattttaggagataaaaacacctttggggactggttaaagtcccccagaaactacaataaagaacaacttttgttttaactcttaatcattttgtaattttgactcaatccttttctggaccatttttgttaataaatatcaaagtgtacatga

SEQ ID NO: 15931 - protein, 346 aa, Homo sapiens
MEFSGRKWRKLRLAGDQRNASYPHCLQFYLQPPSENISLIEFENLAIDRVKLLKSVENLGVSYVKGTEQYQSKLESELRKLKFSYRENLEDEYEPRRRDHISHFILRLAYCQSEELRRWFIQQEMDLLRFRFSILPKDKIQDFLKDSQLQFEAISDEEKTLREQEIVASSPSLSGLKLGFESIYKIPFADALDLFRGRKVYLEDGFAYVPLKDIVAIILNEFRAKLSKALALTARSLPAVQSDERLQPLLNHLSHSYTSQDYSTQGNVGKISLDQIDLLSTKSFPLYMHQLHKALRENHHLCHGGRMQYVLFLKGIGLTLEQTLQFWKQEFIKGKMDPDKFDKGYS

SEQ ID NO: 15932 - DNA, 2180 bp, Homo sapiens
atatgaactctcccgccacccgggaacagtggctgccaccgtttgtgttttcccgagtttgaattcttgcaggtgaccaagatggagttttctggaagaaagtggaggaagctgaggttggcaggtgaccagaggaatgcttcctaccctcattgccttcagttttacttgcagccaccttctgaaaacatatctttaatagaatttgaaaacttggctattgatagagttaaattgttaaaatcagttgaaaatcttggagtgagctatgtgaaaggaactgaacaataccagagtaagttggagagtgagcttcggaagctcaagttttcctacagagaaaacttagaagatgaatatgaaccacgaagaagagatcatatttctcattttattttgcggcttgcttattgccagtctgaagaacttagacgctggttcattcaacaagaaatggatctccttcgatttagatttagtattttacccaaggataaaattcaggatttcttaaaggatagccaattgcagtttgaggctataagtgatgaagagaagactcttcgagaacaggagattgttgcctcatcaccaagtttaagtggacttaagttggggttcgagtccatttataagatcccttttgctgatgctctggatttgtttcgaggaaggaaagtctatttggaagatggctttgcttacgtaccacttaaggacattgtggcaatcatcctgaatgaatttagagccaaactgtccaaggctttggcagtgagtattttacttgatttctgtatctgacatgttcacactttcagttatatacccctggtagttttattctgtgtttctctaggaaataagttaattcagttttcataatgatattcagattacatatgatgttgtactgttaatcccaaaattcctaggtttttatttgttactatccatagttggtttttaagttttttttcttgatcctactaataccaatgctgagtgattaattttgtgagtaacctctgtgggtttcttcatggtcatgtcttttttccttagaaatagacttcgtatatggctcttaacaattagtgtggcctgtggtagatataactcctagatttctgttctgaattagtatttggtatcagtagaagacaatatagaagaaaatcttaagtactaacactgtgatatgctagtgctgcaatgagtagctccatactgggtgaatttggaggtagctgtgttgaacaaatgacatgatcagtgatttttaagtagtttgttggaagtgtgactcttaagtggtgatatcttaaaactatacacatttttatatgtaaaacacatattttacagttgttgtctcttaatctgagtcagtttttaatactttttttgtacctaatgcagaagaagacttcaaaggtttgtgacatggctgttttaaactgtactgattatagtgtaagcatatgccaagctttccttctcagttaaaaattgtagtattttctgatataaataaatttttattgactctctggggttacctaaatatgtataatttagctatgtcagcacttgggaagactaaaatactaactctgtgtttattaaatgaaggaatttatgagaacacctagcataacaggtatttagtaactgttaatattctttctccattcctaatcctgttatttctttatcctcatgaaagttgatgcttttaaattttttctttacttgtctgtcactaccctagattatattctagttacagctaagaatagtgtctttcaccactgtggaagacactgatacttgtctactgtttggccattgctcttttattattcttagttttattcacccatattctctctgttgacattttagaccacacttctttgtgtgaaatagacaaatattttccagcatattggatagttttagctgtcatctattaaatgctggtggtggaccccagtctccatgacaaccaaaaatatcaccgtgcatttcagaaaacttctggcatgttaatgctactattaatctgatcatagtcatttccttcttaccaaatttttaatttatgcctgtgacaatgtcattgtggctaaaaagtatgagttctttgggggctcctgaaaaaagtttttcttgct

SEQ ID NO: 15933 - protein, 240 aa, Homo sapiens
MEFSGRKWRKLRLAGDQRNASYPHCLQFYLQPPSENISLIEFENLAIDRVKLLKSVENLGVSYVKGTEQYQSKLESELRKLKFSYRENLEDEYEPRRRDHISHFILRLAYCQSEELRRWFIQQEMDLLRFRFSILPKDKIQDFLKDSQLQFEAISDEEKTLREQEIVASSPSLSGLKLGFESIYKIPFADALDLFRGRKVYLEDGFAYVPLKDIVAIILNEFRAKLSKALAVSILLDFCI

SEQ ID NO: 15934 - DNA, 487 bp, Homo sapiens
tagagtagtactcactgtgattaagggtacattgtttcagtaactgatcccttgaggcagtgaattgcccagtcagtgcaggagttttaagggtccaggtctaaaggtggaattgcatcttttggctctgtttgaagctccttcttgtgtgcctgcacaggagtgcagtgggtacatacctgtgagcacatgtaccctatttcttggaatgacattcttgcttttaattttgggctgactagaaatttttgtctgtgatgccagtggtgggtagataggtaaggatgggcacagtttagccacatggtgaaaccctgtctctactacaaataccaaaatcagctgggcatgttggcaggcacctgtaatccctgctactcaggaggctgaagaaggagaatcgcatgaacctgggaggcagaggttatagtgagccgagatggcactgctgcactccagcctgggcaacagagtgagattccgtctc

SEQ ID NO: 15935 - protein, 39 aa, Homo sapiens
NPVSTTNTKISWACWQAPVIPATQEAEEGESHEPGRQRL

SEQ ID NO: 15936 - DNA, 742 bp, Homo sapiens
atgtgtaatgaaacatgaagacgtcaaatataaaggatggcaattgctcagacttgtcctttgcttgtctagttatccatcaaacactatcagtgtgattgtgccagaaagtttcatgatcaaaaattagcactgggatgtctgcttgcactattcccaggtttgcttcctcggttcttcatatcatccagacccctgaactggaaatatcttgttaactctgcactgtttaatattctttggaaattaaactacttgggcatgtttagagctcaaatggaatctatgcgttttgcttgacaaggtcgttggttgctttttagagcttacatattgaaaatcatgtttgcagccagctgatagagaaatttccgtgtatcaaagcattgttgtgatgaaaccacctctgttgtgaagatcacctgaaataatgtgtgtgagagccctgtggaaaccaaaaagtgctgtgggcatttgaacactagactgttatgattagtgatgaacagcatctcagcctgccaagggagaacatgaaactggagaacaaatttggttccaggagcaaggggaaatgtaatgtggaatctcacagtttggggtttgtaattgggatccgttgctattataagaaaatgtagttcaaaagacacaggattttctgttaaaatcaatgaagttaaaagagcagctgcttgtaaaagttaattttatttgacttggtcccagtaataaaagtgat

SEQ ID NO: 15937 - protein, 40 aa, Homo sapiens [sequence omitted]

SEQ ID NO: 15938 - DNA, 436 bp, Homo sapiens
ccagtgttacagcttcaaataaaaggaacacatattgaaggaagaagacaatgtcataaagcttatctagtgtttgtggtatggcccatccaatgaacagaaaaatcatgtgaatcccggagcttctacctagcagtaaactcactgatcttcagggtgtttctttgcaaaatccaggcttttggattcagactagaactacaacattggctctcccgggtcttcaacttgccaactgcggatcttgagacttgtcaacttccataacctccaactctctctctctctctcgctctgtgtgtgtgtgtgagagagtgtgtgtatgtccgtgtgcatgtgtgtgtaagtgacagaaagacagacacacacacagttccatttctgtggagaaccctaatacatctacctacttaagacatcgaattcctaataaaaa

SEQ ID NO: 15939 - protein, 56 aa, Homo sapiens
TEKSCESRSFYLAVNSLIFRVFLCKIQAFGFRLELQHWLSRVFNLPTADLETCQLP

SEQ ID NO: 15940 - DNA, 334 bp, Homo sapiens
cctgcctcagcctcccagattgctgggattacaagtgtgagccaccatgcccagcctaaattgtctgatttagtctgtgctcagcttgtttttcccaactgttgttttaggcatgttcatgataatataccattgatattttaatttttaagttaaattcctataaataaatatgagaaatttgttaggatatttaaagcatcttctaacctttaaaaatatgtgcttttaaaaattattaggttgtagaattgggaaaaaatgcaatttgtcttatctttttctattagcatgtttccagtgtacagttcattcaaagggtggttagtgtggc

SEQ ID NO: 15941 - protein, 47 aa, Homo sapiens
PASASQIAGITSVSHHAQPKLSDLVCAQLVFPNCCFRHVHDNIPLIF

SEQ ID NO: 15942 - DNA, 548 bp, Homo sapiens
gcgggagaacacagaacacgcaccctttcttttagtcaccctggaggcctcggagaaggcggtttcagtgatccgtgaagagaccccgagtcttttacatcccggagaatgacaagagagcgagtacctgggcgacgtttacgttctgggatttcgggagatgcggttttctgcacgccaggggccaagcctgagacgtagatggacggcagggataggagctctctccgcgccacaaacgcccctgctcatacctgggttccttgattttcctgcctatataacccagcctcccatggccgggctctgagctctcattctgcggactgggacaaaggggttaactgtgatgcgctttgtataaccccaggattctgcacttgcccaagggcgaggtgcaaatcaaaaactacgcacaactgaacaccgagatcagaaattgacaagcttattctgaaggacctagagtaacctaaataattaggaaaagaaaaacaaagttagaggacttacaccaagtaatttcaagacttattataaagctaagg

SEQ ID NO: 15943 - protein, 49 aa, Homo sapiens
MRFSARQGPSLRRRWTAGIGALSAPQTPLLIPGFLDFPAYITQPPMAGL

SEQ ID NO: 15944 - DNA, 608 bp, Homo sapiens
gtggtttctaacgctgaacttaaaaagtgttgagatgaataatgaagaggaccttctgcaggaggactcaacaagagatgaaggcaatgagactgaagccaacagcatgaacacattaagaaggacaaggaagaaagtcactaaaccatatgtttgttcaactgaagtgggagaaacggatatgtccaattcaaatgattgcatgagggacagcagtcaaattttgaccccacctcaactctcttctagaatgaaacacattagacaagccatggccaaaaatcgcctccagtttgtacgatttgaagcaacagacctccacggcgtgtccaggtctaagactatccctgcacacttttttcaagagaaagtgagccatggtgtttgcatgccccgaggttatcttgaagtgataccaaatccaaaggacaatgaaatgaataacataagagccacatgttttaatagcgacatagtcctaatgccagagttatcaacctttagagttttgccatgggctgacagaactgcaagagtgatatgtgataccttcactgtgactgctcctgaaaagcttatgaacttcaaggttataatgtcctcaagaa

SEQ ID NO: 15945 - protein, 190 aa, Homo sapiens
MNNEEDLLQEDSTRDEGNETEANSMNTLRRTRKKVTKPYVCSTEVGETDMSNSNDCMRDSSQILTPPQLSSRMKHIRQAMAKNRLQFVRFEATDLHGVSRSKTIPAHFFQEKVSHGVCMPRGYLEVIPNPKDNEMNNIRATCFNSDIVLMPELSTFRVLPWADRTARVICDTFTVTAPEKLMNFKVIMSS

SEQ ID NO: 15946 - DNA, 1931 bp, Homo sapiens
gtggtttctaacgctgaacttaaaaagtgttgagatgaataatgaagaggaccttctgcaggaggactcaacaagagatgaaggcaatgagactgaagccaacagcatgaacacattaagaaggacaaggaagaaagtcactaaaccatatgtttgttcaactgaagtgggagaaacggatatgtccaattcaaatgattgcatgagggacagcagtcaaattttgaccccacctcaactctcttctagaatgaaacacattagacaagccatggccaaaaatcgcctccagtttgtacgatttgaagcaacagacctccacggcgtgtccaggtctaagactatccctgcacacttttttcaagagaaagtgagccatggtgtttgcatgccccgaggttatcttgaagtgataccaaatccaaaggacaatgaaatgaataacataagagccacatgttttaatagcgacatagtcctaatgccagagttatcaacctttagagttttgccatgggctgacagaactgcaagagtgatatgtgataccttcactgtgactggtgagcctcttttgacttccccaaggtacattgcaaagaggcagctgagccatctgcaggcctctggcttttccctgctttctgctttcatctatgatttttgcatttttggtgtgcccgaaattttaaattcaaagattatatcttttcctgctttaacatttttaaataaccatgatcagcccttcatgcaggaacttgttgatggcttgtatcacactggagccaatgtcgagagtttttcctcctctaccaggcctggtcagatggaaatctctttcctgcctgaatttggcattagctcagctgataatgcatttaccctcagaacaggtgtcaaagaagtggcaaggaaatataattacattgccagcttcttcattgagactggattttgtgattcagggattttgtctcatagtctctgggatgtcgataggaagaaaaacatgttctgcagcacttctggaactgagcagctcacgatcactgggaaaaaatggttggcaggactcttgaagcactctgctgcgctcagctgcctgatggcgccttctgttagctgccgaaagcgttattccaaggacaggaaagacctgaagaagagtgtgcctacaacatggggatacaatgacaacagctgtatatttaatatcaaatgtcatggagagaaaggcacccggatagaaaataaactaggctcagcaacagcaaacccttacttggtgctggctgcaactgttgctgccggcttagatggacttcatagcagtaatgaggtcttggctggtccagatgagagcacagacttttaccaagtggaaccttctgagatccctttaaaactagaagatgcccttgtggcactggaagaagatcaatgcctgagacaggctctaggagaaacctttattcgatattttgttgccatgaagaaatatgagttggagaatgaagaaatagctgcagagagaaataaattcttagagtattttatttagaatagagctcacaactactcctttagacatgtaattgttacttaaagctaatctaccaaaacaaaaagactgaacttttgtaattaacaacagcaacaataacaagattacgaatgcttttgacttttttttttgtccatggaatatttgacagatgaagtaggactgctgagaagattctgataacagaaacaaacaacaaagttgtggtgaagctataatatgcaaacttaccagatcttgtcagtcatttcctatgtgtatgttgacctggataagaatatccaattttgggtggcaataaatatattcgcacattaagaaaaaaaagacttaagcattagaaagcaaaatttaaatgactaaa

SEQ ID NO: 15947 - protein, 509 aa, Homo sapiens
MNNEEDLLQEDSTRDEGNETEANSMNTLRRTRKKVTKPYVCSTEVGETDMSNSNDCMRDSSQILTPPQLSSRMKHIRQAMAKNRLQFVRFEATDLHGVSRSKTIPAHFFQEKVSHGVCMPRGYLEVIPNPKDNEMNNIRATCFNSDIVLMPELSTFRVLPWADRTARVICDTFTVTGEPLLTSPRYIAKRQLSHLQASGFSLLSAFIYDFCIFGVPEILNSKIISFPALTFLNNHDQPFMQELVDGLYHTGANVESFSSSTRPGQMEISFLPEFGISSADNAFTLRTGVKEVARKYNYIASFFIETGFCDSGILSHSLWDVDRKKNMFCSTSGTEQLTITGKKWLAGLLKHSAALSCLMAPSVSCRKRYSKDRKDLKKSVPTTWGYNDNSCIFNIKCHGEKGTRIENKLGSATANPYLVLAATVAAGLDGLHSSNEVLAGPDESTDFYQVEPSEIPLKLEDALVALEEDQCLRQALGETFIRYFVAMKKYELENEEIAAERNKFLEYFI

SEQ ID NO: 15948 - DNA, 871 bp, Homo sapiens
atggtggtgcagaccctggaccacattgtcacagatggtgttcacgctggtgcaaagcagcagcagcagcagtttcagcacagcccagaaacgagtgtgcttccgggggagtggcttgcaggggcaggattcggacttagatttgggggcctaatttgtttccttgcttccttagctcgctgctttgcctcatacttctctgcctctcgttctacttccaaccctgctgcctctcccacttgtggtctgtctgtacagccttcatgtgttgtgatgccttgtttgcatgctgtttccatggcttctcacccaagcaatcacctgccaccttggccaggccgggatccagaggttattcttcaggtccagccacttcaggttcttcagctgagcaaagctgacgacaaggtgaccagcctgttgttgaggagagccaggtgctggaggttgaccaaacggcccaagtctgctgttccagggagaagatgtccatctataagaaagtggtccctcagcagacactgaatctgctggtgtcctgatcttgaatataccagcctccagaactgtaacacatgcatgggtgcaaaacatgcttctgtgtcatctcacatagtgtggtcaacagagaacacctgggcagaagatgagaggctcctggggactggtctgagacaaggtgctgtaaaagaaaacctatattaaagtggttggaagtgcacagactggttgcttcacctgcagccagaatgcaagacaggtgcaagtcatccctgaggaagtagtgaccagctgtggatgctacgctgaggcccttctttaagagtgatctgatggcactggatgtctgctgaggcttgtgtctagaagg

SEQ ID NO: 15949 - protein, 174 aa, Homo sapiens
MVVQTLDHIVTDGVHAGAKQQQQQFQHSPETSVLPGEWLAGAGFGLRFGGLICFLASLARCFASYFSASRSTSNPAASPTCGLSVQPSCVVMPCLHAVSMASHPSNHLPPWPGRDPEVILQVQPLQVLQLSKADDKVTSLLLRRARCWRLTKRPKSAVPGRRCPSIRKWSLSRH

SEQ ID NO: 15950 - DNA, 445 bp, Homo sapiens
cagacactgaatctgctggtgtcctgatcttgaatataccagcctccagaactagtcttgctcttgtcatccaggctggagtgcaatggtgccatttcagctcgctgcaacctccacctcctgggttcaagtgattctcctgcatcagcctcccgagtagctgggattacaggcgcccaccaccatgcccagctaatttttgtatttttagcagagacagggtttcaccatgttgtccaggctggtctcaaactcctgacctgaggtgatccacccgcttcagtctcccaaagtactgggattacaggcgtaagccaccacgcccggccgaaatttatgttttattgtacataatatttattttttggatgattggagaacaatgatgccagtttgatggactcttcatatgaaatgccccaaaacacagtatcattaccttaaa

SEQ ID NO: 15951 - protein, 76 aa, Homo sapiens [sequence omitted]

SEQ ID NO: 15952 - DNA, 444 bp, Homo sapiens
ttaagctcctgcactttctgaccctcccaggacttgagttgccttgtctggtatccttatgcagaatgaactgaaataatcatcaatctgaaaagctactcttaaacagagtctcactctgtcaaccaggctggagtgcagcagcacgatctcagctaactgcaacctctgcctcccaggttcaagcgattctcctgccacagcctccggagtagctgggactacaggcatgtgccaccacgctgatctaatttttgtatttttagcagacatggggtttcaccttttttggccaggctggtctcaaactcctgacctcaagtgacctgcccacctcagcctcctaaagtgttgaaattacaggcacgagccatagtacccagccgaatcactcttttatttttttttacatcactcttacgagtcatcaaaaacaactataaa

SEQ ID NO: 15953 - protein, 31 aa, Homo sapiens
MCHHADLIFVFLADMGFHLFWPGWSQTPDLK

SEQ ID NO: 15954 - DNA, 695 bp, Homo sapiens
gacttgagttgccttgtctggtatccttatgcagaatgaactgaaataatcatcaatctgaaaagctactcttaaacagagacttgcttcaacaccaggaagaacatgaaagggtgactcataattcccagcagcagtgccagttcatgtgctgggattctgaccacaagcctaacaatcaggtcagggagtcagatttctgttggatttagaaaagcatctatgtgtttatgaaagaaacccactggatttttaatagttctgcagctcttggaggctctacatctaccctttctccccagccaagagcatggctatgggagaaggaaggcaggcagcaggcagggcagtgtgcccgccctctctttctggagtataaaaggagttgtgagaggcttgggtcaccatttggtgagctgagggtgaagctacaaaggttgaagcgttcttcagacgactctacctgagggtgaagctacaaaaattgaagcgttcttcagacgactctacctgaagaaagaaccctgctacagagaggggtgagtaggccacaccaactttcatgataaagggcctgtaagagctcctcgagccttggttcgggtgcatatgtgattaggaggtttgttttttaacatttctatagtgatatttgtttttggttggttggttggttggtttttgaattgagacag

SEQ ID NO: 15955 - protein, 78 aa, Homo sapiens
MKETHWIFNSSAALGGSTSTLSPQPRAWLWEKEGRQQAGQCARPLFLEYKRSCERLGSPFGELRVKLQRLKRSSDDST

SEQ ID NO: 15956 - DNA, 1356 bp, Homo sapiens
cgggtcccggccgtcgagcacaagagtgtagctgcacccagtggctgtcccgcgcccaccccggagctccgagaagctctggaaccagatcgttaccacccgtgcctggctgtccggcctaccccacgcccgcccggatggcggtggcggcgatgcaggcggcggcgggggcaccagactctaccatgcagtgagcggctcggagcagagcgcgtagccgagccggcccgcagccgaaggagccaatacacgcgccgaggcgcccttgcgtcacaagccctcccctttatagccggcgcgacgtgcaaccctccagccaccaatcgcggcctggaaccgcgggccaggagccgacaggcgggggcggaggcccgccccctccggacgtcactccgcggcggccgccgccggtgtgaaccggttgatgaatggctaagcgccgagtcggagcatccccggggcgggggagggaaggggctgccgggagtgctccgggatgcaggaagcctgaagttaagaaggggtgggagcgagagagattccgatttatcgactggaaggaatcatgctgcaaaccacgtttctcataattaaaacggtccaggagtgcacacatgtcacatgaggagactcgaagtttgcctgaatcgtaaaatgcaatccttctagggctggaaccgcgtctcagtgtcgagcctgctttctactgccttaaccacggtcatctttgccagtggtttaccttggcacctgggccccgagtaccttcgtcatcaaataatatttatgtcgcaagaccgctgtacccggtgactcaacaccttgcatgccacggccttaggcttggtcaagatgaattcttgtccctgggggcgctttcaagcggggagaaacttaccttcgcaaaacttaaggctatagaagatggggagagtatcttttgatgcagacgaagccctatgctccctatattctttttttgatcacacctctctatactacgtacgcgtgcaactgcagttggctcaattgtggcatttcgaaatcacatgcatcctttgtactgctgctcacttgatatgttgtctcagataatgaaaggttaggaagtgcttaaagaaagcgtttttagaaattaagaatcctcggttttgtcaagcactgatgtaattctttgcgtcaaagctaaagctcttctttatgttcgttttcagtcctcttttactgacttcattatttaagcccctaagaagtaaagtcttatcgcaattctgtgccatacaagggcacctctgttatttataatctgaaaaccctttctcctcagctctggagaaggaccaaacaggaccttta

SEQ ID NO: 15957 - protein, 56 aa, Homo sapiens [sequence omitted]

SEQ ID NO: 15958 - DNA, 1483 bp, Homo sapiens
gatgaccgtggttaaggcagtagaaagcaggctcgacactgagacgcggttccagccctagaaggattgcattttacgattcaggcaaacttcgagtctcctcatgtgacatgtgtgcactcctggaccgttttaattatgagaaacgtggtttgcagcatgattccttccagtcgataaatcggaatctctctcgctcccaccccttcttaacttcaggcttcctgcatcccggagcactcccggcagccccttccctcccccgccccggggatgctccgactcggcgcttagccattcatcaaccggttcacaccggcggcggccgccgcggagtgacgtccggagggggcgggcctccgcccccgcctgtcggctcctggcccgcggttccaggccgcgattggtggctggagggttgcacgtcgcgccggctataaaggggagggcttgtgacgcaagggcgcctcggcgcgtgtattggctccttcggctgcgggccggctcggctacgcgctctgctccgagccgctcactgcatggtagagtctggtgcccccgccgccgcctgcatcgccgccaccgccgctccgccacgaccaccgccgcctcctgccctgcagccaccgccaccgcctgtgtcgccgccgcctcgggaccggctgtatgattaggccacaatcttcaatgagtaaacatattcctcaattctgtggtgttcttggtcacacatttatggagtttctgaagggcagtggagattactgccaggcacagcacgacctctatgcagacaagtgaactgtagaaactgattactgctccaccaagaagcccccataagagtggttatcctggacacagaagtgttgaattgaaatccacagagcattttacaagagttctgacctggatggggtaaacctcagtgcacttcttttctgttggcctcagtattactggattgaagaattgctgcttcttgttaggaggttcatttcacttatcattacttacaacttcatactcaaagcactgagaatttcaagtggagtatattgaagtagacttcagtttctttgcatcatttctgtattcaatttttttaattatttcataaccctattgagtgttttttaactaaattaacatggctcgaatgaaccgcccagctcctgtggaagtcacatacaagaacatgagatttcttattacacacaatccaaccaatgcgaccttaaacaaatttatagaggaacttaagaagtatggagttaccacaatagtaagagtatgtgaagcaacttatgacactactcttgtggagaaagaaggtatccatgttcttgattggccttttgatgatggtgcaccaccatccaaccagattgttgatgactggttaagtcttgtgaaaattaagtttcgtgaagaacctggttgttgtattgctgttcattgcgttgcaggccttgggaggtaa

SEQ ID NO: 15959 - protein, 110 aa, Homo sapiens
MARMNRPAPVEVTYKNMRFLITHNPTNATLNKFIEELKKYGVTTIVRVCEATYDTTLVEKEGIHVLDWPFDDGAPPSNQIVDDWLSLVKIKFREEPGCCIAVHCVAGLGR

SEQ ID NO: 15960 - DNA, 3924 bp, Homo sapiens
gatgaccgtggttaaggcagtagaaagcaggctcgacactgagacgcggttccagccctagaaggattgcattttacgattcaggcaaacttcgagtctcctcatgtgacatgtgtgcactcctggaccgttttaattatgagaaacgtggtttgcagcatgattccttccagtcgataaatcggaatctctctcgctcccaccccttcttaacttcaggcttcctgcatcccggagcactcccggcagccccttccctcccccgccccggggatgctccgactcggcgcttagccattcatcaaccggttcacaccggcggcggccgccgcggagtgacgtccggagggggcgggcctccgcccccgcctgtcggctcctggcccgcggttccaggccgcgattggtggctggagggttgcacgtcgcgccggctataaaggggagggcttgtgacgcaagggcgcctcggcgcgtgtattggctccttcggctgcgggccggctcggctacgcgctctgctccgagccgctcactgcatggtagagtctggtgcccccgccgccgcctgcatcgccgccaccgccgctccgccacgaccaccgccgcctcctgccctgcagccaccgccaccgcctgtgtcgccgccgcctcgggaccggctgtatgattaggccacaatcttcaatgagtaaacatattcctcaattctgtggtgttcttggtcacacatttatggagtttctgaagggcagtggagattactgccaggcacagcacgacctctatgcagacaagtgaactgtagaaactgattactgctccaccaagaagcccccataagagtggttatcctggacacagaagtgttgaattgaaatccacagagcattttacaagagttctgacctggatggggtaaacctcagtgcacttcttttctgttggcctcagtattactggattgaagaattgctgcttcttgttaggaggttcatttcacttatcattacttacaacttcatactcaaagcactgagaatttcaagtggagtatattgaagtagacttcagtttctttgcatcatttctgtattcaatttttttaattatttcataaccctattgagtgttttttaactaaattaacatggctcgaatgaaccgcccagctcctgtggaagtcacatacaagaacatgagatttcttattacacacaatccaaccaatgcgaccttaaacaaatttatagaggaacttaagaagtatggagttaccacaatagtaagagtatgtgaagcaacttatgacactactcttgtggagaaagaaggtatccatgttcttgattggccttttgatgatggtgcaccaccatccaaccagattgttgatgactggttaagtcttgtgaaaattaagtttcgtgaagaacctggttgttgtattgctgttcattgcgttgcaggccttgggagagctccagtacttgttgccctagcattaattgaaggtggaatgaaatacgaagatgcagtacaattcataagacaaaagcggcgtggagcttttaacagcaagcaacttctgtatttggagaagtatcgtcctaaaatgcggctgcgtttcaaagattccaacggtcatagaaacaactgttgcattcaataaaattggggtgcctaatgctactggaagtggaacttgagatagggcctaatttgttatacatattagccaacatgttggcttagtaagtctaatgaagcttccataggagtattgaaaggcagttttaccaggcctcaagctagacagatttggcaacctctgtatttgggttacagtcaacctatttggatacttggcaaaagattcttgctgtcagcatataaaatgtgcttgtcatttgtatcaattgacctttccccaaatcatgcagtattgagttatgacttgttaaatctattcccatgccagaatcttatcaatacataagaaatttaggaagattaggtgccaaaatacccagcacaatacttgtatatttttagtaccatacagaagtaaaatcccaggaactatgaacactagaccttatgtggtttattccttcaatcatttcaaacattgaaagtagggcctacatggttatttgcctgctcactttatgtttacatctcccacattcataccaatatacgtcaggtttgcttaaccattgatttttttttttttttaccaagtcttacagtgattattttacgtgtttccatgtatctcactttgtgctgtattaaaaaaacctccattttgaaaatctacgttgtacagaagcacatgtctttaatgtcttcagacaaaaaagccttacattaatttaatgtttgcactctgaggtgcaacttaacagggagggcctgagaaaagaatgggagggggctattaattatttttagcaaaatgttgcctttgtcttgtgcaaacatgtagaatatgctctttaatttagtaaaatatttttttaaaaggtagagatgctttgttattgtaatcataaacttcctgaaattcttgtaatttttttcccatacttatcagaagtgtgtttaccaacttatttttgtttgaaagtgtgattttttttttccttcccaacctctcttgcaaaaaaagaaatgggtttctgctaatgaattgagcagacatctaatattttatatgccttttgagctgtgtaacttaatatttggatacttgacaatttgttttattatgtaattgataaaatggtgatgtgtattaatgttagttcaaccatatatttatactgtctggggatgtgtggttatagttctgtgggagaaataattttgtcagtgttcaccagcttgtaaaaacttagtgcgagagctgaaacatctaaataaataatgacatgcatttatcatcattgagattggtttgcttaaaattaacttattttgtagaagacaaaatgaattgcacttcacttaatgtgtgtcctcatctttttacaaataaatgaaggattataaatgatgtcagcattttagtaaacttttagacaaaatttgttagggtcattcatgaaaactttaatactaaaagcactttccattatatactttttaaaggtctagataattttgaaccaatttattattgtgtactgaggagaaataatgtatagtagaggacagccttggtttgtaaagctcagttccactagttcatggttttgtgcaacttctgagcctcagttttctcctttgcaaattaataattacatacctttatagattttgaaattaatttaaatattagtatttggtacatgaaggcttaatgttaagtttcctttaatgatccacaataatccctttgatcacgttaatctaaatctagatgtctttgtctaattttttttgaatagcagttataaatgtaaaggactcaaagtttaagtaaaaagtgatactccaccttgtgtttcaaagaatttagttccacctcttcataccagtttaacacttaatatatttcattggattttagacagggcaaaaggaagaacaggggcctctggaggcccttggttatttaaatcttggattatttgtgatagtaatcacaaatttttggctaatttttaacctgaggttttgttttttttttaaaggaaatgcagcctagtcttgagaacataattttatataatcaattactaaatgttaaactattaccacacagcccataaaacagcatttgcgtttattgagagagaggatgtgccatcatgattaatgaaaactatcttttgagtttgaaaagaaattaatttgcagtgtttggattgtatatatggtgctaaaaataaattaatttactttataaacctt

SEQ ID NO: 15961 - protein, 173 aa, Homo sapiens; identical to SEQ ID NO: 1826

SEQ ID NO: 15962 - DNA, 4886 bp, Homo sapiens
gatgaccgtggttaaggcagtagaaagcaggctcgacactgagacgcggttccagccctagaaggattgcattttacgattcaggcaaacttcgagtctcctcatgtgacatgtgtgcactcctggaccgttttaattatgagaaacgtggtttgcagcatgattccttccagtcgataaatcggaatctctctcgctcccaccccttcttaacttcaggcttcctgcatcccggagcactcccggcagccccttccctcccccgccccggggatgctccgactcggcgcttagccattcatcaaccggttcacaccggcggcggccgccgcggagtgacgtccggagggggcgggcctccgcccccgcctgtcggctcctggcccgcggttccaggccgcgattggtggctggagggttgcacgtcgcgccggctataaaggggagggcttgtgacgcaagggcgcctcggcgcgtgtattggctccttcggctgcgggccggctcggctacgcgctctgctccgagccgctcactgcatggtagagtctggtgcccccgccgccgcctgcatcgccgccaccgccgctccgccacgaccaccgccgcctcctgccctgcagccaccgccaccgcctgtgtcgccgccgcctcgggaccggctgtatgattaggccacaatcttcaatgagtaaacatattcctcaattctgtggtgttcttggtcacacatttatggagtttctgaagggcagtggagattactgccaggcacagcacgacctctatgcagacaagtgaactgtagaaactgattactgctccaccaagaagcccccataagagtggttatcctggacacagaagtgttgaattgaaatccacagagcattttacaagagttctgacctggatggggtaaacctcagtgcacttcttttctgttggcctcagtattactggattgaagaattgctgcttcttgttaggaggttcatttcacttatcattacttacaacttcatactcaaagcactgagaatttcaagtggagtatattgaagtagacttcagtttctttgcatcatttctgtattcaatttttttaattatttcataaccctattgagtgttttttaactaaattaacatggctcgaatgaaccgcccagctcctgtggaagtcacatacaagaacatgagatttcttattacacacaatccaaccaatgcgaccttaaacaaatttatagaggaacttaagaagtatggagttaccacaatagtaagagtatgtgaagcaacttatgacactactcttgtggagaaagaaggtatccatgttcttgattggccttttgatgatggtgcaccaccatccaaccagattgttgatgactggttaagtcttgtgaaaattaagtttcgtgaagaacctggttgttgtattgctgttcattgcgttgcaggccttgggagagctccagtacttgttgccctagcattaattgaaggtggaatgaaatacgaagatgcagtacaattcataagacaaaagcggcgtggagcttttaacagcaagcaacttctgtatttggagaagtatcgtcctaaaatgcggctgcgtttcaaagattccaacggtcatagaaacaactgttgcattcaataaaattggggtgcctaatgctactggaagtggaacttgagatagggcctaatttgttatacatattagccaacatgttggcttagtaagtctaatgaagcttccataggagtattgaaaggcagttttaccaggcctcaagctagacagatttggcaacctctgtatttgggttacagtcaacctatttggatacttggcaaaagattcttgctgtcagcatataaaatgtgcttgtcatttgtatcaattgacctttccccaaatcatgcagtattgagttatgacttgttaaatctattcccatgccagaatcttatcaatacataagaaatttaggaagattaggtgccaaaatacccagcacaatacttgtatatttttagtaccatacagaagtaaaatcccaggaactatgaacactagaccttatgtggtttattccttcaatcatttcaaacattgaaagtagggcctacatggttatttgcctgctcactttatgtttacatctcccacattcataccaatatacgtcaggtttgcttaaccattgatttttttttttttttaccaagtcttacagtgattattttacgtgtttccatgtatctcactttgtgctgtattaaaaaaacctccattttgaaaatctacgttgtacagaagcacatgtctttaatgtcttcagacaaaaaagccttacattaatttaatgtttgcactctgaggtgcaacttaacagggagggcctgagaaaagaatgggagggggctattaattatttttagcaaaatgttgcctttgtcttgtgcaaacatgtagaatatgctctttaatttagtaaaatatttttttaaaaggtagagatgctttgttattgtaatcataaacttcctgaaattcttgtaatttttttcccatacttatcagaagtgtgtttaccaacttatttttgtttgaaagtgtgattttttttttccttcccaacctctcttgcaaaaaaagaaatgggtttctgctaatgaattgagcagacatctaatattttatatgccttttgagctgtgtaacttaatatttggatacttgacaatttgttttattatgtaattgataaaatggtgatgtgtattaatgttagttcaaccatatatttatactgtctggggatgtgtggttatagttctgtgggagaaataattttgtcagtgttcaccagcttgtaaaaacttagtgcgagagctgaaacatctaaataaataatgacatgcatttatcatcattgagattggtttgcttaaaattaacttattttgtagaagacaaaatgaattgcacttcacttaatgtgtgtcctcatctttttacaaataaatgaaggattataaatgatgtcagcattttagtaaacttttagacaaaatttgttagggtcattcatgaaaactttaatactaaaagcactttccattatatactttttaaaggtctagataattttgaaccaatttattattgtgtactgaggagaaataatgtatagtagaggacagccttggtttgtaaagctcagttccactagttcatggttttgtgcaacttctgagcctcagttttctcctttgcaaattaataattacatacctttatagattttgaaattaatttaaatattagtatttggtacatgaaggcttaatgttaagtttcctttaatgatccacaataatccctttgatcacgttaatctaaatctagatgtctttgtctaattttttttgaatagcagttataaatgtaaaggactcaaagtttaagtaaaaagtgatactccaccttgtgtttcaaagaatttagttccacctcttcataccagtttaacacttaatatatttcattggattttagacagggcaaaaggaagaacaggggcctctggaggcccttggttatttaaatcttggattatttgtgatagtaatcacaaatttttggctaatttttaacctgaggttttgttttttttttaaaggaaatgcagcctagtcttgagaacataattttatataatcaattactaaatgttaaactattaccacacagcccataaaacagcatttgcgtttattgagagagaggatgtgccatcatgattaatgaaaactatcttttgagtttgaaaagaaattaatttgcagtgtttggattgtatatatggtgctaaaaataaattaatttactttataaaccttatctgtacattatacgatgtgatgaaatttgctttttatccaaatattttgtatcttgtaaatatggctaattataggaatgcctataatacatcttagattccttatatctaataagagttcaaagagttatgagttgaagtcttgaatgcaggaaactatctgatagtgttctaaaatttggttacttgggtttggatacccttagtgggatgatgtaaatagaggctagctacctaggcttgtctatagcaaccataatgttgatgtaagtaatgcggttactgaatcataagaaaatgccatctctttttagttgaaggaaaactctggaagtaggtgccattggtcattctgcagtgcactgcaaccattgtttcccctagtgccctcttttccctagggcattgctctcctattcccacgccttaacacagctctatacctagaagcagccagcccaggcatgcagtcacatttaatcacatcccccttctagagtgcttcaaaatgatgtagtccctcaacttggctaaagaatctcaatctcttgaaatttatttttttaatgtcatattcatctggtaaatatctactgtttgccaggcatttaagaatatggcaaagaacataaaagatggtgtcaccagattttggtcaccaatgagtacccgacccgttgccatgattaagagagaatgctttctattggagtttcaggaaatataatttgagaatactttaaagggaagtggaagtataagtgaatgatatttttcttttacatgtaaacaatgaagttatttcaaagttaagttttaaacaaaatacatgaagtagtgtctgccatacatgttaatattctacattcttgcttccttaaattaatatgtttgtgtgtatatatgtgcctcacacctgaattgaaaattaaagactggtttaaaagtggtttaaaagtg

SEQ ID NO: 15963 - protein, 173 aa, Homo sapiens; identical to SEQ ID NO: 1826

SEQ ID NO: 15964 - DNA, 1992 bp, Homo sapiens
tataaaatgttgagttatagtgatgtggttaaacattaagatttttttaatgtacgttttatccaggaacttaagaagtatggagttaccacaatagtaagagtatgtgaagcaacttatgacactactcttgtggagaaagaaggtatccatgttcttgattggccttttgatgatggtgcaccaccatccaaccagattgttgatgactggttaagtcttgtgaaaattaagtttcgtgaagaacctggttgttgtattgctgttcattgcgttgcaggccttgggaggtaaatgaatttatcaatttgattctaggtaaaaatctattgataatgaaaatacagaaacttgaaaaattcttataattttttaatataaagtcaacatttgtcataggtattacttaaataggaagggtggtagataatacttctgagttggggaatgtttggagaaataaatttacaaagatctgattttgaaaaaactatttatcaaaattcttacctcaccagagctccagtacttgttgccctagcattaattgaaggtggaatgaaatacgaagatgcagtacaattcataagacaaaagcggcgtggagcttttaacagcaagcaacttctgtatttggagaagtatcgtcctaaaatgcggctgcgtttcaaagattccaacggtcatagaaacaactgttgcattcaataaaattggggtgcctaatgctactggaagtggaacttgagatagggcctaatttgttatacatattagccaacatgttggcttagtaagtctaatgaagcttccataggagtattgaaaggcagttttaccaggcctcaagctagacagatttggcaacctctgtatttgggttacagtcaacctatttggatacttggcaaaagattcttgctgtcagcatataaaatgtgcttgtcatttgtatcaattgacctttccccaaatcatgcagtattgagttatgacttgttaaatctattcccatgccagaatcttatcaatacataagaaatttaggaagattaggtgccaaaatacccagcacaatacttgtatatttttagtaccatacagaagtaaaatcccaggaactatgaacactagaccttatgtggtttattccttcaatcatttcaaacattgaaagtagggcctacatggttatttgcctgctcactttatgtttacatctcccacattcataccaatatacgtcaggtttgcttaaccattgatttttttttttttttaccaagtcttacagtgattattttacgtgtttccatgtatctcactttgtgctgtattaaaaaaacctccattttgaaaatctacgttgtacagaagcacatgtctttaatgtcttcagacaaaaaagccttacattaatttaatgtttgcactctgaggtgcaacttaacagggagggcctgagaaaagaatgggagggggctattaattatttttagcaaaatgttgcctttgtcttgtgcaaacatgtagaatatgctctttaatttagtaaaatatttttttaaaaggtagagatgctttgttattgtaatcataaacttcctgaaattcttgtaatttttttcccatacttatcagaagtgtgtttaccaacttatttttgtttgaaagtgtgattttttttttccttcccaacctctcttgcaaaaaaagaaatgggtttctgctaatgaattgagcagacatctaatattttatatgccttttgagctgtgtaacttaatatttggatacttgacaatttgttttattatgtaattgataaaatggtgatgtgtattaatgttagttcaaccatatatttatactgtctggggatgtgtggttatagttctgtgggagaaataattttgtcagtgttcaccagcttgtaaaaacttagtgcgagagctgaaacatctaaataaataatgacatgcatttatcatc

SEQ ID NO: 15965 - protein, 87 aa, Homo sapiens [sequence omitted]

SEQ ID NO: 15966 - DNA, 2963 bp, Homo sapiens
tataaaatgttgagttatagtgatgtggttaaacattaagatttttttaatgtacgttttatccaggaacttaagaagtatggagttaccacaatagtaagagtatgtgaagcaacttatgacactactcttgtggagaaagaaggtatccatgttcttgattggccttttgatgatggtgcaccaccatccaaccagattgttgatgactggttaagtcttgtgaaaattaagtttcgtgaagaacctggttgttgtattgctgttcattgcgttgcaggccttgggaggtaaatgaatttatcaatttgattctaggtaaaaatctattgataatgaaaatacagaaacttgaaaaattcttataattttttaatataaagtcaacatttgtcataggtattacttaaataggaagggtggtagataatacttctgagttggggaatgtttggagaaataaatttacaaagatctgattttgaaaaaactatttatcaaaattcttacctcaccagagctccagtacttgttgccctagcattaattgaaggtggaatgaaatacgaagatgcagtacaattcataagacaaaagcggcgtggagcttttaacagcaagcaacttctgtatttggagaagtatcgtcctaaaatgcggctgcgtttcaaagattccaacggtcatagaaacaactgttgcattcaataaaattggggtgcctaatgctactggaagtggaacttgagatagggcctaatttgttatacatattagccaacatgttggcttagtaagtctaatgaagcttccataggagtattgaaaggcagttttaccaggcctcaagctagacagatttggcaacctctgtatttgggttacagtcaacctatttggatacttggcaaaagattcttgctgtcagcatataaaatgtgcttgtcatttgtatcaattgacctttccccaaatcatgcagtattgagttatgacttgttaaatctattcccatgccagaatcttatcaatacataagaaatttaggaagattaggtgccaaaatacccagcacaatacttgtatatttttagtaccatacagaagtaaaatcccaggaactatgaacactagaccttatgtggtttattccttcaatcatttcaaacattgaaagtagggcctacatggttatttgcctgctcactttatgtttacatctcccacattcataccaatatacgtcaggtttgcttaaccattgatttttttttttttttaccaagtcttacagtgattattttacgtgtttccatgtatctcactttgtgctgtattaaaaaaacctccattttgaaaatctacgttgtacagaagcacatgtctttaatgtcttcagacaaaaaagccttacattaatttaatgtttgcactctgaggtgcaacttaacagggagggcctgagaaaagaatgggagggggctattaattatttttagcaaaatgttgcctttgtcttgtgcaaacatgtagaatatgctctttaatttagtaaaatatttttttaaaaggtagagatgctttgttattgtaatcataaacttcctgaaattcttgtaatttttttcccatacttatcagaagtgtgtttaccaacttatttttgtttgaaagtgtgattttttttttccttcccaacctctcttgcaaaaaaagaaatgggtttctgctaatgaattgagcagacatctaatattttatatgccttttgagctgtgtaacttaatatttggatacttgacaatttgttttattatgtaattgataaaatggtgatgtgtattaatgttagttcaaccatatatttatactgtctggggatgtgtggttatagttctgtgggagaaataattttgtcagtgttcaccagcttgtaaaaacttagtgcgagagctgaaacatctaaataaataatgacatgcatttatcatcattgagattggtttgcttaaaattaacttattttgtagaagacaaaatgaattgcacttcacttaatgtgtgtcctcatctttttacaaataaatgaaggattataaatgatgtcagcattttagtaaacttttagacaaaatttgttagggtcattcatgaaaactttaatactaaaagcactttccattatatactttttaaaggtctagataattttgaaccaatttattattgtgtactgaggagaaataatgtatagtagaggacagccttggtttgtaaagctcagttccactagttcatggttttgtgcaacttctgagcctcagttttctcctttgcaaattaataattacatacctttatagattttgaaattaatttaaatattagtatttggtacatgaaggcttaatgttaagtttcctttaatgatccacaataatccctttgatcacgttaatctaaatctagatgtctttgtctaattttttttgaatagcagttataaatgtaaaggactcaaagtttaagtaaaaagtgatactccaccttgtgtttcaaagaatttagttccacctcttcataccagtttaacacttaatatatttcattggattttagacagggcaaaaggaagaacaggggcctctggaggcccttggttatttaaatcttggattatttgtgatagtaatcacaaatttttggctaatttttaacctgaggttttgttttttttttaaaggaaatgcagcctagtcttgagaacataattttatataatcaattactaaatgttaaactattaccacacagcccataaaacagcatttgcgtttattgagagagaggatgtgccatcatgattaatgaaaactatcttttgagtttgaaaagaaattaatttgcagtgtttggattgtatatatggtgctaaaaataaattaatttactttataaacctt

SEQ ID NO: 15967 - protein, 87 aa, Homo sapiens [sequence omitted]

SEQ ID NO: 15968 - DNA, 3925 bp, Homo sapiens
tataaaatgttgagttatagtgatgtggttaaacattaagatttttttaatgtacgttttatccaggaacttaagaagtatggagttaccacaatagtaagagtatgtgaagcaacttatgacactactcttgtggagaaagaaggtatccatgttcttgattggccttttgatgatggtgcaccaccatccaaccagattgttgatgactggttaagtcttgtgaaaattaagtttcgtgaagaacctggttgttgtattgctgttcattgcgttgcaggccttgggaggtaaatgaatttatcaatttgattctaggtaaaaatctattgataatgaaaatacagaaacttgaaaaattcttataattttttaatataaagtcaacatttgtcataggtattacttaaataggaagggtggtagataatacttctgagttggggaatgtttggagaaataaatttacaaagatctgattttgaaaaaactatttatcaaaattcttacctcaccagagctccagtacttgttgccctagcattaattgaaggtggaatgaaatacgaagatgcagtacaattcataagacaaaagcggcgtggagcttttaacagcaagcaacttctgtatttggagaagtatcgtcctaaaatgcggctgcgtttcaaagattccaacggtcatagaaacaactgttgcattcaataaaattggggtgcctaatgctactggaagtggaacttgagatagggcctaatttgttatacatattagccaacatgttggcttagtaagtctaatgaagcttccataggagtattgaaaggcagttttaccaggcctcaagctagacagatttggcaacctctgtatttgggttacagtcaacctatttggatacttggcaaaagattcttgctgtcagcatataaaatgtgcttgtcatttgtatcaattgacctttccccaaatcatgcagtattgagttatgacttgttaaatctattcccatgccagaatcttatcaatacataagaaatttaggaagattaggtgccaaaatacccagcacaatacttgtatatttttagtaccatacagaagtaaaatcccaggaactatgaacactagaccttatgtggtttattccttcaatcatttcaaacattgaaagtagggcctacatggttatttgcctgctcactttatgtttacatctcccacattcataccaatatacgtcaggtttgcttaaccattgatttttttttttttttaccaagtcttacagtgattattttacgtgtttccatgtatctcactttgtgctgtattaaaaaaacctccattttgaaaatctacgttgtacagaagcacatgtctttaatgtcttcagacaaaaaagccttacattaatttaatgtttgcactctgaggtgcaacttaacagggagggcctgagaaaagaatgggagggggctattaattatttttagcaaaatgttgcctttgtcttgtgcaaacatgtagaatatgctctttaatttagtaaaatatttttttaaaaggtagagatgctttgttattgtaatcataaacttcctgaaattcttgtaatttttttcccatacttatcagaagtgtgtttaccaacttatttttgtttgaaagtgtgattttttttttccttcccaacctctcttgcaaaaaaagaaatgggtttctgctaatgaattgagcagacatctaatattttatatgccttttgagctgtgtaacttaatatttggatacttgacaatttgttttattatgtaattgataaaatggtgatgtgtattaatgttagttcaaccatatatttatactgtctggggatgtgtggttatagttctgtgggagaaataattttgtcagtgttcaccagcttgtaaaaacttagtgcgagagctgaaacatctaaataaataatgacatgcatttatcatcattgagattggtttgcttaaaattaacttattttgtagaagacaaaatgaattgcacttcacttaatgtgtgtcctcatctttttacaaataaatgaaggattataaatgatgtcagcattttagtaaacttttagacaaaatttgttagggtcattcatgaaaactttaatactaaaagcactttccattatatactttttaaaggtctagataattttgaaccaatttattattgtgtactgaggagaaataatgtatagtagaggacagccttggtttgtaaagctcagttccactagttcatggttttgtgcaacttctgagcctcagttttctcctttgcaaattaataattacatacctttatagattttgaaattaatttaaatattagtatttggtacatgaaggcttaatgttaagtttcctttaatgatccacaataatccctttgatcacgttaatctaaatctagatgtctttgtctaattttttttgaatagcagttataaatgtaaaggactcaaagtttaagtaaaaagtgatactccaccttgtgtttcaaagaatttagttccacctcttcataccagtttaacacttaatatatttcattggattttagacagggcaaaaggaagaacaggggcctctggaggcccttggttatttaaatcttggattatttgtgatagtaatcacaaatttttggctaatttttaacctgaggttttgttttttttttaaaggaaatgcagcctagtcttgagaacataattttatataatcaattactaaatgttaaactattaccacacagcccataaaacagcatttgcgtttattgagagagaggatgtgccatcatgattaatgaaaactatcttttgagtttgaaaagaaattaatttgcagtgtttggattgtatatatggtgctaaaaataaattaatttactttataaaccttatctgtacattatacgatgtgatgaaatttgctttttatccaaatattttgtatcttgtaaatatggctaattataggaatgcctataatacatcttagattccttatatctaataagagttcaaagagttatgagttgaagtcttgaatgcaggaaactatctgatagtgttctaaaatttggttacttgggtttggatacccttagtgggatgatgtaaatagaggctagctacctaggcttgtctatagcaaccataatgttgatgtaagtaatgcggttactgaatcataagaaaatgccatctctttttagttgaaggaaaactctggaagtaggtgccattggtcattctgcagtgcactgcaaccattgtttcccctagtgccctcttttccctagggcattgctctcctattcccacgccttaacacagctctatacctagaagcagccagcccaggcatgcagtcacatttaatcacatcccccttctagagtgcttcaaaatgatgtagtccctcaacttggctaaagaatctcaatctcttgaaatttatttttttaatgtcatattcatctggtaaatatctactgtttgccaggcatttaagaatatggcaaagaacataaaagatggtgtcaccagattttggtcaccaatgagtacccgacccgttgccatgattaagagagaatgctttctattggagtttcaggaaatataatttgagaatactttaaagggaagtggaagtataagtgaatgatatttttcttttacatgtaaacaatgaagttatttcaaagttaagttttaaacaaaatacatgaagtagtgtctgccatacatgttaatattctacattcttgcttccttaaattaatatgtttgtgtgtatatatgtgcctcacacctgaattgaaaattaaagactggtttaaaagtggtttaaaagtg

SEQ ID NO: 15969 - protein, 87 aa, Homo sapiens [sequence omitted]

SEQ ID NO: 15970 - DNA, 4125 bp, Homo sapiens
tataaaatgttgagttatagtgatgtggttaaacattaagatttttttaatgtacgttttatccaggaacttaagaagtatggagttaccacaatagtaagagtatgtgaagcaacttatgacactactcttgtggagaaagaaggtatccatgttcttgattggccttttgatgatggtgcaccaccatccaaccagattgttgatgactggttaagtcttgtgaaaattaagtttcgtgaagaacctggttgttgtattgctgttcattgcgttgcaggccttgggaggtaaatgaatttatcaatttgattctaggtaaaaatctattgataatgaaaatacagaaacttgaaaaattcttataattttttaatataaagtcaacatttgtcataggtattacttaaataggaagggtggtagataatacttctgagttggggaatgtttggagaaataaatttacaaagatctgattttgaaaaaactatttatcaaaattcttacctcaccagagctccagtacttgttgccctagcattaattgaaggtggaatgaaatacgaagatgcagtacaattcataagacaaaagcggcgtggagcttttaacagcaagcaacttctgtatttggagaagtatcgtcctaaaatgcggctgcgtttcaaagattccaacggtcatagaaacaactgttgcattcaataaaattggggtgcctaatgctactggaagtggaacttgagatagggcctaatttgttatacatattagccaacatgttggcttagtaagtctaatgaagcttccataggagtattgaaaggcagttttaccaggcctcaagctagacagatttggcaacctctgtatttgggttacagtcaacctatttggatacttggcaaaagattcttgctgtcagcatataaaatgtgcttgtcatttgtatcaattgacctttccccaaatcatgcagtattgagttatgacttgttaaatctattcccatgccagaatcttatcaatacataagaaatttaggaagattaggtgccaaaatacccagcacaatacttgtatatttttagtaccatacagaagtaaaatcccaggaactatgaacactagaccttatgtggtttattccttcaatcatttcaaacattgaaagtagggcctacatggttatttgcctgctcactttatgtttacatctcccacattcataccaatatacgtcaggtttgcttaaccattgatttttttttttttttaccaagtcttacagtgattattttacgtgtttccatgtatctcactttgtgctgtattaaaaaaacctccattttgaaaatctacgttgtacagaagcacatgtctttaatgtcttcagacaaaaaagccttacattaatttaatgtttgcactctgaggtgcaacttaacagggagggcctgagaaaagaatgggagggggctattaattatttttagcaaaatgttgcctttgtcttgtgcaaacatgtagaatatgctctttaatttagtaaaatatttttttaaaaggtagagatgctttgttattgtaatcataaacttcctgaaattcttgtaatttttttcccatacttatcagaagtgtgtttaccaacttatttttgtttgaaagtgtgattttttttttccttcccaacctctcttgcaaaaaaagaaatgggtttctgctaatgaattgagcagacatctaatattttatatgccttttgagctgtgtaacttaatatttggatacttgacaatttgttttattatgtaattgataaaatggtgatgtgtattaatgttagttcaaccatatatttatactgtctggggatgtgtggttatagttctgtgggagaaataattttgtcagtgttcaccagcttgtaaaaacttagtgcgagagctgaaacatctaaataaataatgacatgcatttatcatcattgagattggtttgcttaaaattaacttattttgtagaagacaaaatgaattgcacttcacttaatgtgtgtcctcatctttttacaaataaatgaaggattataaatgatgtcagcattttagtaaacttttagacaaaatttgttagggtcattcatgaaaactttaatactaaaagcactttccattatatactttttaaaggtctagataattttgaaccaatttattattgtgtactgaggagaaataatgtatagtagaggacagccttggtttgtaaagctcagttccactagttcatggttttgtgcaacttctgagcctcagttttctcctttgcaaattaataattacatacctttatagattttgaaattaatttaaatattagtatttggtacatgaaggcttaatgttaagtttcctttaatgatccacaataatccctttgatcacgttaatctaaatctagatgtctttgtctaattttttttgaatagcagttataaatgtaaaggactcaaagtttaagtaaaaagtgatactccaccttgtgtttcaaagaatttagttccacctcttcataccagtttaacacttaatatatttcattggattttagacagggcaaaaggaagaacaggggcctctggaggcccttggttatttaaatcttggattatttgtgatagtaatcacaaatttttggctaatttttaacctgaggttttgttttttttttaaaggaaatgcagcctagtcttgagaacataattttatataatcaattactaaatgttaaactattaccacacagcccataaaacagcatttgcgtttattgagagagaggatgtgccatcatgattaatgaaaactatcttttgagtttgaaaagaaattaatttgcagtgtttggattgtatatatggtgctaaaaataaattaatttactttataaaccttatctgtacattatacgatgtgatgaaatttgctttttatccaaatattttgtatcttgtaaatatggctaattataggaatgcctataatacatcttagattccttatatctaataagagttcaaagagttatgagttgaagtcttgaatgcaggaaactatctgatagtgttctaaaatttggttacttgggtttggatacccttagtgggatgatgtaaatagaggctagctacctaggcttgtctatagcaaccataatgttgatgtaagtaatgcggttactgaatcataagaaaatgccatctctttttagttgaaggaaaactctggaagtaggtgccattggtcattctgcagtgcactgcaaccattgtttcccctagtgccctcttttccctagggcattgctctcctattcccacgccttaacacagctctatacctagaagcagccagcccaggcatgcagtcacatttaatcacatcccccttctagagtgcttcaaaatgatgtagtccctcaacttggctaaagaatctcaatctcttgaaatttatttttttaatgtcatattcatctggtaaatatctactgtttgccaggcatttaagaatatggcaaagaacataaaagatggtgtcaccagattttggtcaccaatgagtacccgacccgttgccatgattaagagagaatgctttctattggagtttcaggaaatataatttgagaatactttaaagggaagtggaagtataagtgaatgatatttttcttttacatgtaaacaatgaagttatttcaaagttaagttttaaacaaaatacatgaagtagtgtctgccatacatgttaatattctacattcttgcttccttaaattaatatgtttgtgtgtatatatgtgcctcacacctgaattgaaaattaaagactggtttaaaagtggtttaaaagtgacatttaatgtttctccattacgtttggggtaaccagcctaagtggaatcttggaaggaaagtaagggaaaaacttgtatttgccttcaatgaattaaaccagtgatatgtgttaacgtatgaatgaaaggattgatggtgattttataattatatatattgccgcagtaaccagttaataaattgatagctaccattta

SEQ ID NO: 15971 - protein, 87 aa, Homo sapiens [sequence omitted]

SEQ ID NO: 15972 - DNA, 8192 bp, Homo sapiens
ccgcgccgccgccgcacgccgatggctgcggggtctcgcgccgtcgcaccgtccccacgcggcaagcgaccttcgggctcagggcggcggcggctgcaacgaggattaggagggcggcgcggaagccaagaatagtgtcgtcagcagcagccatttggtcccaggaggaaaagaggctgtggcagcgacgccgacgtcctgcgcgtaccccctctccgcggcacccaccgggccccctcctcctcctcttcggcggcggcagcgtccaccatcttcctcttgctgccagtggtagcgctcgtctggcggagctggggctgaaagacacacagaagtcttcatggatatagttgatacatttaatcatttaattcctactgaacacttagatgatgccctatttctaggatccaacctggagaatgaagtctgtgaggattttagtgcaagtcaaaatgtcttagaggactcgctgaagaacatgctcagcgataaggatcctatgctaggatctgcaagtaaccagttctgtttgcctgttttggatagcaatgatcccaatttccagatgccttgttcaacagttgttggtcttgacgatattatggatgaaggagttgttaaagaaagtggcaatgataccattgatgaagaagaactgattttacctaacaggaacttaagggacaaggtagaagaaaattcagtgagatctccaagaaaatcacctcgtttaatggcacaagaacaagtaagaagtttgcgacagagcactattgccaagcgttcaaatgcagcaccattaagtaacacaaaaaaagcatctgggaagactgtatctactgctaaagcaggagtgaaacaaccagaaaggagtcaggttaaagaagaagtatgtatgtcactgaaacctgagtaccataaggagaatagaaggtgcagccgaaatagcggacaaattgaagtggtacctgaagtatcagtgtcttcaagtcattcttcagtgtcatcttgtcttgaaatgaaggatgaagatggattagattctaagcataagtgtaataatccgggagaaatagatgtgccatctcatgaattaaattgttcacttctttcagagacttgtgttactattggagaaaagaaaaatgaagctttgatggaatgtaaagccaagcctgttggtagtccattgtttaagttttcagataaagaagaacatgaacaaaatgattccatttcaggtaaaacgggtgagactgttgttgaagaaatgatagcaacaagaaaagttgaacaagattcaaaggagacagtaaaattatcccatgaagatgaccatattcttgaggacgctggatcttctgatatttctagtgatgctgcttgtacaaatccaaataagacagaaaacagccttgtaggtttgcctagttgtgtagatgaagtgactgaatgtaatttggaattgaaggataccatgggtattgctgataaaactgagaacacccttgaaagaaataaaattgaaccgttgggttattgtgaagatgcggagtctaataggcagttggagagcactgagtttaataaatcaaacttagaggtggttgatactagtacttttggaccggaaagtaatatcttggaaaatgctatttgtgatgtgcctgaccaaaattcaaaacagttgaatgctatagaaagtactaaaatagagtcccatgaaacagcaaaccttcaggatgacagaaacagccagtcaagtagcgtttcttacttagagtcaaaaagtgtaaaatccaaacatacaaaacctgtaattcattctaagcaaaacatgaccacagatgctccgaagaaaattgttgcagcaaagtatgaagtaatacatagcaaaactaaagttaatgtcaaaagtgtgaaacgaaatactgatgtaccagaatctcagcaaaattttcataggccagtcaaagtcagaaaaaaacaaattgataaggagccaaagattcagagttgcaattctggggttaaatctgtgaaaaaccaagctcattctgtactgaaaaaaacattacaggatcaaactttagtacaaattttcaagcccttaactcattctttgagtgataagtcacacgctcatcctggttgcttgaaagaacctcatcatcctgcacaaactggacatgtatcacattctagccagaaacagtgtcataagcctcagcaacaggccccagcaatgaaaaccaatagtcacgtgaaggaagagcttgaacacccaggcgttgagcattttaaggaagaggataaactgaaactgaaaaaacctgagaagaacctacaaccccgccaaagaagaagcagcaaaagtttttctttagatgagccaccattgttcattccagataacatagctaccataagaagagaaggctctgatcatagctcctcatttgaaagcaaatatatgtggactcccagcaagcagtgtgggttttgcaaaaaaccacatggcaacaggtttatggttggctgtgggagatgtgatgactggtttcatggtgattgtgttgggttaagtctttctcaagcacagcagatgggcgaggaagacaaagaatatgtctgtgtaaaatgttgtgctgaagaagacaaaaagactgaaatactagatccagatactttggaaaaccaagctacagttgaattccatagtggagataaaacaatggagtgtgaaaagcttggattatcaaaacacacaacaaatgatagaaccaaatatatagatgatacagtgaagcacaaggtcaaaattttaaaacgggagtctggtgaaggcagaaattcatcagactgtagagataatgaaattaaaaaatggcagctagctcctcttcgtaagatgggacaaccagttttacctcggagatcctcagaagaaaaaagtgaaaaaataccgaaagagtctacaactgttacttgcacaggagaaaaagcttcaaaaccaggtactcatgagaagcaagagatgaaaaagaagaaagttgaaaaaggagtgcttaatgtacatcctgctgcttctgcttccaagccttctgcagatcagatcaggcaaagtgtcagacattctctcaaagacattcttatgaagagacttacagactcaaatttgaaggtaccagaggaaaaggcagcaaaagttgccacaaaaattgagaaagagcttttctctttttttcgggacacagatgctaaatataagaacaaatatagaagtttgatgtttaatttgaaagatcctaaaaacaatatattatttaaaaaagtactgaaaggagaagtaactcctgatcatcttatcagaatgagtccagaagaactagcttctaaagagttagctgcttggagacgaagagaaaacagacataccatagaaatgattgagaaagagcagagagaagtggaacgacggccaatcaccaaaataactcataaaggtgaaatagaaattgagagtgatgccccaatgaaagaacaggaagcagccatggagattcaggaaccagccgccaataagtcattggagaagccagaaggatctgaaaaacaaaaagaggaggttgactctatgtctaaagataccactagtcaacacagacagcatctttttgatctcaactgcaaaatctgcataggtcgaatggcaccacctgtagatgatctttctccaaaaaaagtaaaagttgttgtaggagtagctcgcaaacattcagacaatgaagcagaaagtatagcagatgcattatcttcaacctcaaatattttggcttctgaattctttgaggaggagaaacaggagtctccaaagtcaacgttctctcctgctccacgtccagagatgcctggaactgttgaagttgagtctacctttctggctcgattgaacttcatctggaaaggttttatcaacatgccttctgtggcaaaatttgttaccaaagcctatccagtatctggctccccagaatacctgacagaggacctaccagatagtattcaagtaggtggcaggatatcacctcagacagtttgggattatgtggaaaaaataaaagcatcaggaaccaaggaaatttgtgtggttcgcttcacaccagtaactgaagaagatcaaatttcttatactttgctctttgcatacttcagtagcagaaagcgctatggagtagctgctaacaacatgaagcaggttaaagatatgtaccttattcctttgggtgccacagataaaattccacaccctcttgtgccttttgatggacctgggcttgaactgcatagacctaatctattgttgggcttaattattcgtcagaaactgaagcgacagcacagtgcctgtgctagtactagtcatatagctgagactcctgaaagtgcaccaccaatagcattgccacctgataaaaaaagtaaaatagaagtttctacagaagaagcaccagaggaagaaaatgacttttttaattcttttacaactgtattacacaagcagagaaataaacctcagcagaatcttcaggaagaccttccaacagcagttgaacctttaatggaagtcaccaaacaggagccaccaaaacctttaagatttcttcctggcgtgttgattggctgggagaatcaacctactactctggaattagcaaataaacctcttcctgtggatgatatacttcaaagccttttgggcaccactggtcaagtatatgaccaggcccagtcagtgatggaacaaaacactgttaaagaaattccatttttaaatgagcagaccaactcaaaaatagagaaaacagataatgtggaagtaactgatggtgaaaacaaggagataaaagttaaagtagataatatttcagaatctacagataagtcagcagaaatagaaacatcagtagtagggtcctcttccatttctgcagggtctttgacgagtcttagtctcagaggtaagccaccagatgtttctacagaagcatttttaacaaatttatcaattcagtcaaaacaagaggaaactgtggagagtaaagagaaaacattaaaaagacagcttcaggaagatcaagagaataatttgcaagataaccagacttcaaatagttctccatgcagatctaatgtaggaaaaggaaacatagatggtaatgtgagctgtagtgaaaaccttgttgctaatacagcgaggtctccacagtttatcaacctgaaaagggatcctaggcaagcagcaggacgaagtcagcctgtaactacttcagaaagcaaagatggagatagttgccggaatggagaaaaacacatgctgcctggcctgtcacacaacaaggagcacttaacagaacaaatcaatgtagaggaaaagttgtgttctgcagagaaaaactcgtgtgttcagcagagtgacaatttaaaagttgcacaaaactcaccatcagtagaaaacatacagacttctcaagcagaacaagcaaaacccttacaggaggatattttaatgcaaaatattgaaactgtgcacccatttcgaagaggatcagcagtagcgacatctcattttgaagttggaaacacatgtccatcagaatttccttctaaaagcatcacctttacttccagaagcaccagccccagaacaagtacaaacttttcacccatgaggccacagcagcccaaccttcagcatctcaagtctagcccacctggatttccatttccagggcctcctaattttcccccacaaagcatgtttggatttccaccacatttgccacctccattacttccccctccaggctttggctttgctcaaaatcccatggttccctggccacctgttgttcatctcccaggtcagccacagcgtatgatgggtcctctctcacaagcatcaaggtatataggcccgcagaatttttaccaggttaaagacattcggaggccagaaaggcgccatagtgacccttggggtaggcaagaccaacagcaactggataggccatttaataggggtaaaggggaccgccagagattttatagtgattcacaccatttgaaaagagagcgacatgaaaaggaatgggagcaagaatctgaaaggcatagacgcagagacagaagccaagacaaggacagagacagaaaaagcagggaggaagggcacaaagataaagagagggcacggttatcacatggtgatcgaggaacagatggaaaagcaagcagagatagtaggaatgtagacaagaagccagataaacctaaaagtgaagactatgagaaggacaaagaacgagagaaaagtaaacacagagaaggagaaaaggacagggataggtaccacaaagatagggaccacactgacagaactaaaagcaaaaggtaaaatttgcaggctgcttcaggattacatttaaataactgttaaaatgttgtatcttgtaaacaaaagaaagattgcctgctaggattgtgccatctttaaaatttttactattggtcatttgcagaacagtaaattctgtgtgttggtacagagtgctctgtaccagtgctcatcatcccttcttcataccaacggtccctagttataggaatttaatatttttaaaagttttacattgctgtatattcaaagatttgttttattaatatgcaataaaggcttagaaattttagttttattccttaattggtaaatatggttaactatggaatatatttacttcctctagtgaatgtcctttatataatgactaatttgggagtaatgtgtgctctgtaagtttgttttaaattgcactgtttttaaagaaactgtagaggagcaacaaaaatccaagcaacttcataatcagattatgctaatcatttagttgagcagtttttgaccaagaatcagaagcccaaggggtacatttattgctttaatctgcactcattgaagtcatttattaccatatactacagctttgtggtaggccattattttcattttcatttttggctcttcagaaacttgaatacttaagcttgtacatgatcttgtgttttgctatcctttttactgtaaaatgtaaatattttaagggatattttgattctaaatatgataaaataatttctcacctattttgtgtgtgtgacttgaaattcagtagtaaaagaatttcttctttaaagctttaattaccttcagacattgattttttgttactcagccaagaacatatagaaatagctatctatgtcaggcattagatgaggggaaaaacaatttttttaaaatcttaaattgtaggctgagatgaattgtgtagttctaaagaggctagaatttagaactacctgtgaaacactgtgcagctatagcccactttataggtaagtttctgaaaacttttacaccatcgcaatttggtactctgactcactaatcattaaaattaaagaccgcagaacttgaagagaaatatgttttgaatccttttataaaatgtgcgatttagcctaattcgtaaagtaactgtacagtttcatatgccagttttacttgaaaaaaaaatatgaaaactattgttaattcaaatctaaatttatttaaaccctaaaacacatggttttgatggctgtaatttaaagtaagagctatcaaatgatgctgacaaaagaaaaaccttccaaaatacaaaagaaagagaactctattatttacttacctgtattaatgaagaaaaatataaataattccacaaaattgattgttttcctaaagagcttaaagattagagttaaaaattggttttgaaacagaattatccttgttatttttgctggagagaagggaggaaattcagaaccaaacattctatttaatttgcaatgacttgcagtacttttttccctatccttatcctgtgaaacttactatcataaggttctaaaacagagaacttgtgtttaaataaagcccgtttaactttggtccacttttcttttggaaattaacttgttagaaaacaaagttagttcccaaacaaaacaaaatctaagttataatttgcaccattacaaagaaattgctgtcagggttttacacattttaaaaacatttcaat

SEQ ID NO: 15973 - protein, 2039 aa, Homo sapiens; identical to SEQ ID NO: 1828

SEQ ID NO: 15974 - DNA, 8192 bp, Homo sapiens
ccgcgccgccgccgcacgccgatggctgcggggtctcgcgccgtcgcaccgtccccacgcggcaagcgaccttcgggctcagggcggcggcggctgcaacgaggattaggagggcggcgcggaagccaagaatagtgtcgtcagcagcagccatttggtcccaggaggaaaagaggctgtggcagcgacgccgacgtcctgcgcgtaccccctctccgcggcacccaccgggccccctcctcctcctcttcggcggcggcagcgtccaccatcttcctcttgctgccagtggtagcgctcgtctggcggagctggggctgaaagacacacagaagtcttcatggatatagttgatacatttaatcatttaattcctactgaacacttagatgatgccctatttctaggatccaacctggagaatgaagtctgtgaggattttagtgcaagtcaaaatgtcttagaggactcgctgaagaacatgctcagcgataaggatcctatgctaggatctgcaagtaaccagttctgtttgcctgttttggatagcaatgatcccaatttccagatgccttgttcaacaggatagaccactatcttgttgagctcttttaaatgaagttctacttggacacaaagatgaggactagataactccttgaggttccttctaacccctaggatgaagataataactaacatttgtatagtgctctaaagtttacagagtgagttctcatacatcatctcacttgatcctcacaacagccctgtgagttgttggtcttgacgatattatggatgaaggagttgttaaagaaagtggcaatgataccattgatgaagaagaactgattttacctaacaggaacttaagggacaaggtagaagaaaattcagtgagatctccaagaaaatcacctcgtttaatggcacaagaacaagtaagaagtttgcgacagagcactattgccaagcgttcaaatgcagcaccattaagtaacacaaaaaaagcatctgggaagactgtatctactgctaaagcaggagtgaaacaaccagaaaggagtcaggttaaagaagaagtatgtatgtcactgaaacctgagtaccataaggagaatagaaggtgcagccgaaatagcggacaaattgaagtggtacctgaagtatcagtgtcttcaagtcattcttcagtgtcatcttgtcttgaaatgaaggatgaagatggattagattctaagcataagtgtaataatccgggagaaatagatgtgccatctcatgaattaaattgttcacttctttcagagacttgtgttactattggagaaaagaaaaatgaagctttgatggaatgtaaagccaagcctgttggtagtccattgtttaagttttcagataaagaagaacatgaacaaaatgattccatttcaggtaaaacgggtgagactgttgttgaagaaatgatagcaacaagaaaagttgaacaagattcaaaggagacagtaaaattatcccatgaagatgaccatattcttgaggacgctggatcttctgatatttctagtgatgctgcttgtacaaatccaaataagacagaaaacagccttgtaggtttgcctagttgtgtagatgaagtgactgaatgtaatttggaattgaaggataccatgggtattgctgataaaactgagaacacccttgaaagaaataaaattgaaccgttgggttattgtgaagatgcggagtctaataggcagttggagagcactgagtttaataaatcaaacttagaggtggttgatactagtacttttggaccggaaagtaatatcttggaaaatgctatttgtgatgtgcctgaccaaaattcaaaacagttgaatgctatagaaagtactaaaatagagtcccatgaaacagcaaaccttcaggatgacagaaacagccagtcaagtagcgtttcttacttagagtcaaaaagtgtaaaatccaaacatacaaaacctgtaattcattctaagcaaaacatgaccacagatgctccgaagaaaattgttgcagcaaagtatgaagtaatacatagcaaaactaaagttaatgtcaaaagtgtgaaacgaaatactgatgtaccagaatctcagcaaaattttcataggccagtcaaagtcagaaaaaaacaaattgataaggagccaaagattcagagttgcaattctggggttaaatctgtgaaaaaccaagctcattctgtactgaaaaaaacattacaggatcaaactttagtacaaattttcaagcccttaactcattctttgagtgataagtcacacgctcatcctggttgcttgaaagaacctcatcatcctgcacaaactggacatgtatcacattctagccagaaacagtgtcataagcctcagcaacaggccccagcaatgaaaaccaatagtcacgtgaaggaagagcttgaacacccaggcgttgagcattttaaggaagaggataaactgaaactgaaaaaacctgagaagaacctacaaccccgccaaagaagaagcagcaaaagtttttctttagatgagccaccattgttcattccagataacatagctaccataagaagagaaggctctgatcatagctcctcatttgaaagcaaatatatgtggactcccagcaagcagtgtgggttttgcaaaaaaccacatggcaacaggtttatggttggctgtgggagatgtgatgactggtttcatggtgattgtgttgggttaagtctttctcaagcacagcagatgggcgaggaagacaaagaatatgtctgtgtaaaatgttgtgctgaagaagacaaaaagactgaaatactagatccagatactttggaaaaccaagctacagttgaattccatagtggagataaaacaatggagtgtgaaaagcttggattatcaaaacacacaacaaatgatagaaccaaatatatagatgatacagtgaagcacaaggtcaaaattttaaaacgggagtctggtgaaggcagaaattcatcagactgtagagataatgaaattaaaaaatggcagctagctcctcttcgtaagatgggacaaccagttttacctcggagatcctcagaagaaaaaagtgaaaaaataccgaaagagtctacaactgttacttgcacaggagaaaaagcttcaaaaccaggtactcatgagaagcaagagatgaaaaagaagaaagttgaaaaaggagtgcttaatgtacatcctgctgcttctgcttccaagccttctgcagatcagatcaggcaaagtgtcagacattctctcaaagacattcttatgaagagacttacagactcaaatttgaaggtaccagaggaaaaggcagcaaaagttgccacaaaaattgagaaagagcttttctctttttttcgggacacagatgctaaatataagaacaaatatagaagtttgatgtttaatttgaaagatcctaaaaacaatatattatttaaaaaagtactgaaaggagaagtaactcctgatcatcttatcagaatgagtccagaagaactagcttctaaagagttagctgcttggagacgaagagaaaacagacataccatagaaatgattgagaaagagcagagagaagtggaacgacggccaatcaccaaaataactcataaaggtgaaatagaaattgagagtgatgccccaatgaaagaacaggaagcagccatggagattcaggaaccagccgccaataagtcattggagaagccagaaggatctgaaaaacaaaaagaggaggttgactctatgtctaaagataccactagtcaacacagacagcatctttttgatctcaactgcaaaatctgcataggtcgaatggcaccacctgtagatgatctttctccaaaaaaagtaaaagttgttgtaggagtagctcgcaaacattcagacaatgaagcagaaagtatagcagatgcattatcttcaacctcaaatattttggcttctgaattctttgaggaggagaaacaggagtctccaaagtcaacgttctctcctgctccacgtccagagatgcctggaactgttgaagttgagtctacctttctggctcgattgaacttcatctggaaaggttttatcaacatgccttctgtggcaaaatttgttaccaaagcctatccagtatctggctccccagaatacctgacagaggacctaccagatagtattcaagtaggtggcaggatatcacctcagacagtttgggattatgtggaaaaaataaaagcatcaggaaccaaggaaatttgtgtggttcgcttcacaccagtaactgaagaagatcaaatttcttatactttgctctttgcatacttcagtagcagaaagcgctatggagtagctgctaacaacatgaagcaggttaaagatatgtaccttattcctttgggtgccacagataaaattccacaccctcttgtgccttttgatggacctgggcttgaactgcatagacctaatctattgttgggcttaattattcgtcagaaactgaagcgacagcacagtgcctgtgctagtactagtcatatagctgagactcctgaaagtgcaccaccaatagcattgccacctgataaaaaaagtaaaatagaagtttctacagaagaagcaccagaggaagaaaatgacttttttaattcttttacaactgtattacacaagcagagaaataaacctcagcagaatcttcaggaagaccttccaacagcagttgaacctttaatggaagtcaccaaacaggagccaccaaaacctttaagatttcttcctggcgtgttgattggctgggagaatcaacctactactctggaattagcaaataaacctcttcctgtggatgatatacttcaaagccttttgggcaccactggtcaagtatatgaccaggcccagtcagtgatggaacaaaacactgttaaagaaattccatttttaaatgagcagaccaactcaaaaatagagaaaacagataatgtggaagtaactgatggtgaaaacaaggagataaaagttaaagtagataatatttcagaatctacagataagtcagcagaaatagaaacatcagtagtagggtcctcttccatttctgcagggtctttgacgagtcttagtctcagaggtaagccaccagatgtttctacagaagcatttttaacaaatttatcaattcagtcaaaacaagaggaaactgtggagagtaaagagaaaacattaaaaagacagcttcaggaagatcaagagaataatttgcaagataaccagacttcaaatagttctccatgcagatctaatgtaggaaaaggaaacatagatggtaatgtgagctgtagtgaaaaccttgttgctaatacagcgaggtctccacagtttatcaacctgaaaagggatcctaggcaagcagcaggacgaagtcagcctgtaactacttcagaaagcaaagatggagatagttgccggaatggagaaaaacacatgctgcctggcctgtcacacaacaaggagcacttaacagaacaaatcaatgtagaggaaaagttgtgttctgcagagaaaaactcgtgtgttcagcagagtgacaatttaaaagttgcacaaaactcaccatcagtagaaaacatacagacttctcaagcagaacaagcaaaacccttacaggaggatattttaatgcaaaatattgaaactgtgcacccatttcgaagaggatcagcagtagcgacatctcattttgaagttggaaacacatgtccatcagaatttccttctaaaagcatcacctttacttccagaagcaccagccccagaacaagtacaaacttttcacccatgaggccacagcagcccaaccttcagcatctcaagtctagcccacctggatttccatttccagggcctcctaattttcccccacaaagcatgtttggatttccaccacatttgccacctccattacttccccctccaggctttggctttgctcaaaatcccatggttccctggccacctgttgttcatctcccaggtcagccacagcgtatgatgggtcctctctcacaagcatcaaggtatataggcccgcagaatttttaccaggttaaagacattcggaggccagaaaggcgccatagtgacccttggggtaggcaagaccaacagcaactggataggccatttaataggggtaaaggggaccgccagagattttatagtgattcacaccatttgaaaagagagcgacatgaaaaggaatgggagcaagaatctgaaaggcatagacgcagagacagaagccaagacaaggacagagacagaaaaagcagggaggaagggcacaaagataaagagagggcacggttatcacatggtgatcgaggaacagatggaaaagcaagcagagatagtaggaatgtagacaagaagccagataaacctaaaagtgaagactatgagaaggacaaagaacgagagaaaagtaaacacagagaaggagaaaaggacagggataggtaccacaaagatagggaccacactgacagaactaaaagcaaaaggtaaaatttgcaggctgcttcaggattacatttaaataactgttaaaatgttgtatcttgtaaacaaaagaaagattgcctgctaggattgtgccatctttaaaatttttactattggtcatttgcagaacagtaaattctgtgtgttggtacagagtgctctgtaccagtgctcatcatcccttcttcataccaacggtccctagttataggaatttaatatttttaaaagttttacattgctgtatattcaaagatttgttttattaatatgcaataaaggcttagaaattttagttttattccttaattggtaaatatggttaactatggaatatatttacttcctctagtgaatgtcctttatataatgactaatttgggagtaatgtgtgctctgtaagtttgttttaaattgcactgtttttaaagaaactgtagaggagcaacaaaaatccaagcaacttcataatcagattatgctaatcatttagttgagcagtttttgaccaagaatcagaagcccaaggggtacatttattgctttaatctgcactcattgaagtcatttattaccatatactacagctttgtggtaggccattattttcattttcatttttggctcttcagaaacttgaatacttaagcttgtacatgatcttgtgttttgctatcctttttactgtaaaatgtaaatattttaagggatattttgattctaaatatgataaaataatttctcacctattttgtgtgtgtgacttgaaattcagtagtaaaagaatttcttctttaaagctttaattaccttcagacattgattttttgttactcagccaagaacatatagaaatagctatctatgtcaggcattagatgaggggaaaaacaatttttttaaaatcttaaattgtaggctgagatgaattgtgtagttctaaagaggctagaatttagaactacctgtgaaacactgtgcagctatagcccactttataggtaagtttctgaaaacttttacaccatcgcaatttggtactctgactcactaatcattaaaattaaagaccgcagaacttgaagagaaatatgttttgaatccttttataaaatgtgcgatttagcctaattcgtaaagtaactgtacagtttcatatgccagttttacttgaaaaaaaaatatgaaaactattgttaattcaaatctaaatttatttaaaccctaaaacacatggttttgatggctgtaatttaaagtaagagctatcaaatgatgctgacaaaagaaaaaccttccaaaatacaaaagaaagagaactctattatttacttacctgtattaatgaagaaaaatataaataattccacaaaattgattgttttcctaaagagcttaaagattagagttaaaaattggttttgaaacagaattatccttgttatttttgctggagagaagggaggaaattcagaaccaaacattctatttaatttgcaatgacttgcagtacttttttccctatccttatcctgtgaaact

SEQ ID NO: 15975 - protein, 1951 aa, Homo sapiens
MDEGVVKESGNDTIDEEELILPNRNLRDKVEENSVRSPRKSPRLMAQEQVRSLRQSTIAKRSNAAPLSNTKKASGKTVSTAKAGVKQPERSQVKEEVCMSLKPEYHKENRRCSRNSGQIEVVPEVSVSSSHSSVSSCLEMKDEDGLDSKHKCNNPGEIDVPSHELNCSLLSETCVTIGEKKNEALMECKAKPVGSPLFKFSDKEEHEQNDSISGKTGETVVEEMIATRKVEQDSKETVKLSHEDDHILEDAGSSDISSDAACTNPNKTENSLVGLPSCVDEVTECNLELKDTMGIADKTENTLERNKIEPLGYCEDAESNRQLESTEFNKSNLEVVDTSTFGPESNILENAICDVPDQNSKQLNAIESTKIESHETANLQDDRNSQSSSVSYLESKSVKSKHTKPVIHSKQNMTTDAPKKIVAAKYEVIHSKTKVNVKSVKRNTDVPESQQNFHRPVKVRKKQIDKEPKIQSCNSGVKSVKNQAHSVLKKTLQDQTLVQIFKPLTHSLSDKSHAHPGCLKEPHHPAQTGHVSHSSQKQCHKPQQQAPAMKTNSHVKEELEHPGVEHFKEEDKLKLKKPEKNLQPRQRRSSKSFSLDEPPLFIPDNIATIRREGSDHSSSFESKYMWTPSKQCGFCKKPHGNRFMVGCGRCDDWFHGDCVGLSLSQAQQMGEEDKEYVCVKCCAEEDKKTEILDPDTLENQATVEFHSGDKTMECEKLGLSKHTTNDRTKYIDDTVKHKVKILKRESGEGRNSSDCRDNEIKKWQLAPLRKMGQPVLPRRSSEEKSEKIPKESTTVTCTGEKASKPGTHEKQEMKKKKVEKGVLNVHPAASASKPSADQIRQSVRHSLKDILMKRLTDSNLKVPEEKAAKVATKIEKELFSFFRDTDAKYKNKYRSLMFNLKDPKNNILFKKVLKGEVTPDHLIRMSPEELASKELAAWRRRENRHTIEMIEKEQREVERRPITKITHKGEIEIESDAPMKEQEAAMEIQEPAANKSLEKPEGSEKQKEEVDSMSKDTTSQHRQHLFDLNCKICIGRMAPPVDDLSPKKVKVVVGVARKHSDNEAESIADALSSTSNILASEFFEEEKQESPKSTFSPAPRPEMPGTVEVESTFLARLNFIWKGFINMPSVAKFVTKAYPVSGSPEYLTEDLPDSIQVGGRISPQTVWDYVEKIKASGTKEICVVRFTPVTEEDQISYTLLFAYFSSRKRYGVAANNMKQVKDMYLIPLGATDKIPHPLVPFDGPGLELHRPNLLLGLIIRQKLKRQHSACASTSHIAETPESAPPIALPPDKKSKIEVSTEEAPEEENDFFNSFTTVLHKQRNKPQQNLQEDLPTAVEPLMEVTKQEPPKPLRFLPGVLIGWENQPTTLELANKPLPVDDILQSLLGTTGQVYDQAQSVMEQNTVKEIPFLNEQTNSKIEKTDNVEVTDGENKEIKVKVDNISESTDKSAEIETSVVGSSSISAGSLTSLSLRGKPPDVSTEAFLTNLSIQSKQEETVESKEKTLKRQLQEDQENNLQDNQTSNSSPCRSNVGKGNIDGNVSCSENLVANTARSPQFINLKRDPRQAAGRSQPVTTSESKDGDSCRNGEKHMLPGLSHNKEHLTEQINVEEKLCSAEKNSCVQQSDNLKVAQNSPSVENIQTSQAEQAKPLQEDILMQNIETVHPFRRGSAVATSHFEVGNTCPSEFPSKSITFTSRSTSPRTSTNFSPMRPQQPNLQHLKSSPPGFPFPGPPNFPPQSMFGFPPHLPPPLLPPPGFGFAQNPMVPWPPVVHLPGQPQRMMGPLSQASRYIGPQNFYQVKDIRRPERRHSDPWGRQDQQQLDRPFNRGKGDRQRFYSDSHHLKRERHEKEWEQESERHRRRDRSQDKDRDRKSREEGHKDKERARLSHGDRGTDGKASRDSRNVDKKPDKPKSEDYEKDKEREKSKHREGEKDRDRYHKDRDHTDRTKSKR

SEQ ID NO: 15976 - DNA, 2400 bp, Homo sapiens
atcttcctcttgctgccagtggtagcgctcgtctggcggagctggttgttggtcttgacgatattatggatgaaggagttgttaaagaaagtggcaatgataccattgatgaagaagaactgattttacctaacaggaacttaagggacaaggtagaagaaaattcagtgagatctccaagaaaatcacctcgtttaatggcacaagaacaagtaagaagtttgcgacagagcactattgccaagcgttcaaatgcagcaccattaagtaacacaaaaaaagcatctgggaagactgtatctactgctaaagcaggagtgaaacaaccagaaaggagtcaggttaaagaagaagtatgtatgtcactgaaacctgagtaccataaggagaatagaaggtgcagccgaaatagcggacaaattgaagtggtacctgaagtatcagtgtcttcaagtcattcttcagtgtcatcttgtcttgaaatgaaggatgaagatggattagattctaagcataagtgtaataatccgggagaaatagatgtgccatctcatgaattaaattgttcacttctttcagagacttgtgttactattggagaaaagaaaaatgaagctttgatggaatgtaaagccaagcctgttggtagtccattgtttaagttttcagataaagaagaacatgaacaaaatgattccatttcaggtaaaacgggtgagactgttgttgaagaaatgatagcaacaagaaaagttgaacaagattcaaaggagacagtaaaattatcccatgaagatgaccatattcttgaggacgctggatcttctgatatttctagtgatgctgcttgtacaaatccaaataagacagaaaacagccttgtaggtttgcctagttgtgtagatgaagtgactgaatgtaatttggaattgaaggataccatgggtattgctgataaaactgagaacacccttgaaagaaataaaattgaaccgttgggttattgtgaagatgcggagtctaataggcagttggagagcactgagtttaataaatcaaacttagaggtggttgatactagtacttttggaccggaaagtaatatcttggaaaatgctatttgtgatgtgcctgaccaaaattcaaaacagttgaatgctatagaaagtactaaaatagagtcccatgaaacagcaaaccttcaggatgacagaaacagccagtcaagtagcgtttcttacttagagtcaaaaagtgtaaaatccaaacatacaaaacctgtaattcattctaagcaaaacatgaccacagatgctccgaagaaaattgttgcagcaaagtatgaagtaatacatagcaaaactaaagttaatgtcaaaagtgtgaaacgaaatactgatgtaccagaatctcagcaaaattttcataggccagtcaaagtcagaaaaaaacaaattgataaggagccaaagattcagagttgcaattctggggttaaatctgtgaaaaaccaagctcattctgtactgaaaaaaacattacaggatcaaactttagtacaaattttcaagcccttaactcattctttgagtgataagtcacacgctcatcctggttgcttgaaagaacctcatcatcctgcacaaactggacatgtatcacattctagccagaaacagtgtcataagcctcagcaacaggccccagcaatgaaaaccaatagtcacgtgaaggaagagcttgaacacccaggcgttgagcattttaaggaagaggataaactgaaactgaaaaaacctgagaagaacctacaaccccgccaaagaagaagcagcaaaagtttttctttagatgagccaccattgttcattccagataacatagctaccataagaagagaaggctctgatcatagctcctcatttgaaagcaaatatatgtggactcccagcaagcagtgtgggttttgcaaaaaaccacatggcaacaggtgtgtgtgtatgtgtgtatgagtgatgtgtacattgaaaataaattgcttttttgggggtgggattaatgtgagaattgttttaaagacattatttgatacacagagacctgtgcaaaaacaaaaagcttcatcagtcttggataaatgatagaaagatggatctactgaatttacaaatatatcatcctagaacatttaaaaaagcatagtctggccaacagctgacatacatggaaatattttgtcattgtcacaggttagacagtgtaatttagccactgcatctgcaaaaaagccaaacacttcctggtaattggaaaattgttatactgctttgggtctgtaagttatatattaattcatttggtgtgagaagaactagtaataaagtatgaaggtcataatgg

SEQ ID NO: 15977 - protein, 648 aa, Homo sapiens
MDEGVVKESGNDTIDEEELILPNRNLRDKVEENSVRSPRKSPRLMAQEQVRSLRQSTIAKRSNAAPLSNTKKASGKTVSTAKAGVKQPERSQVKEEVCMSLKPEYHKENRRCSRNSGQIEVVPEVSVSSSHSSVSSCLEMKDEDGLDSKHKCNNPGEIDVPSHELNCSLLSETCVTIGEKKNEALMECKAKPVGSPLFKFSDKEEHEQNDSISGKTGETVVEEMIATRKVEQDSKETVKLSHEDDHILEDAGSSDISSDAACTNPNKTENSLVGLPSCVDEVTECNLELKDTMGIADKTENTLERNKIEPLGYCEDAESNRQLESTEFNKSNLEVVDTSTFGPESNILENAICDVPDQNSKQLNAIESTKIESHETANLQDDRNSQSSSVSYLESKSVKSKHTKPVIHSKQNMTTDAPKKIVAAKYEVIHSKTKVNVKSVKRNTDVPESQQNFHRPVKVRKKQIDKEPKIQSCNSGVKSVKNQAHSVLKKTLQDQTLVQIFKPLTHSLSDKSHAHPGCLKEPHHPAQTGHVSHSSQKQCHKPQQQAPAMKTNSHVKEELEHPGVEHFKEEDKLKLKKPEKNLQPRQRRSSKSFSLDEPPLFIPDNIATIRREGSDHSSSFESKYMWTPSKQCGFCKKPHGNRCVCMCV

SEQ ID NO: 15978 - DNA, 2966 bp, Homo sapiens
gctgaggcgcgggcgcgcaggcccgaggcacggcgggcgctgcctggaaggcccgtctcgcaggcccccggatccggccgttggggcctcttccttctcagggagccccagcatggagctttgggccttggtttcgggaaactgggactggccctggctgctaggctgctccctgctgctgctttttggagatgagagttgctcttccatttatcctccagttaccgcgcgcttttgtgcccgggactcaaactgtggactccttttgcttagtttgaaatgagaagcctagactcttgccttccgataatacatgtaatttaatgaaccacttgtcgatacggctgaaagacacacagaagtcttcatggatatagttgatacatttaatcatttaattcctactgaacacttagatgatgccctatttctaggatccaacctggagaatgaagtctgtgaggattttagtgcaagtcaaaatgtcttagaggactcgctgaagaacatgctcagcgataaggatcctatgctaggatctgcaagtaaccagttctgtttgcctgttttggatagcaatgatcccaatttccagatgccttgttcaacagttgttggtcttgacgatattatggatgaaggagttgttaaagaaagtggcaatgataccattgatgaagaagaactgattttacctaacaggaacttaagggacaaggtagaagaaaattcagtgagatctccaagaaaatcacctcgtttaatggcacaagaacaagtaagaagtttgcgacagagcactattgccaagcgttcaaatgcagcaccattaagtaacacaaaaaaagcatctgggaagactgtatctactgctaaagcaggagtgaaacaaccagaaaggagtcaggttaaagaagaagtatgtatgtcactgaaacctgagtaccataaggagaatagaaggtgcagccgaaatagcggacaaattgaagtggtacctgaagtatcagtgtcttcaagtcattcttcagtgtcatcttgtcttgaaatgaaggatgaagatggattagattctaagcataagtgtaataatccgggagaaatagatgtgccatctcatgaattaaattgttcacttctttcagagacttgtgttactattggagaaaagaaaaatgaagctttgatggaatgtaaagccaagcctgttggtagtccattgtttaagttttcagataaagaagaacatgaacaaaatgattccatttcaggtaaaacgggtgagactgttgttgaagaaatgatagcaacaagaaaagttgaacaagattcaaaggagacagtaaaattatcccatgaagatgaccatattcttgaggacgctggatcttctgatatttctagtgatgctgcttgtacaaatccaaataagacagaaaacagccttgtaggtttgcctagttgtgtagatgaagtgactgaatgtaatttggaattgaaggataccatgggtattgctgataaaactgagaacacccttgaaagaaataaaattgaaccgttgggttattgtgaagatgcggagtctaataggcagttggagagcactgagtttaataaatcaaacttagaggtggttgatactagtacttttggaccggaaagtaatatcttggaaaatgctatttgtgatgtgcctgaccaaaattcaaaacagttgaatgctatagaaagtactaaaatagagtcccatgaaacagcaaaccttcaggatgacagaaacagccagtcaagtagcgtttcttacttagagtcaaaaagtgtaaaatccaaacatacaaaacctgtaattcattctaagcaaaacatgaccacagatgctccgaagaaaattgttgcagcaaagtatgaagtaatacatagcaaaactaaagttaatgtcaaaagtgtgaaacgaaatactgatgtaccagaatctcagcaaaattttcataggccagtcaaagtcagaaaaaaacaaattgataaggagccaaagattcagagttgcaattctggggttaaatctgtgaaaaaccaagctcattctgtactgaaaaaaacattacaggatcaaactttagtacaaattttcaagcccttaactcattctttgagtgataagtcacacgctcatcctggttgcttgaaagaacctcatcatcctgcacaaactggacatgtatcacattctagccagaaacagtgtcataagcctcagcaacaggccccagcaatgaaaaccaatagtcacgtgaaggaagagcttgaacacccaggcgttgagcattttaaggaagaggataaactgaaactgaaaaaacctgagaagaacctacaaccccgccaaagaagaagcagcaaaagtttttctttagatgagccaccattgttcattccagataacatagctaccataagaagagaaggctctgatcatagctcctcatttgaaagcaaatatatgtggactcccagcaagcagtgtgggttttgcaaaaaaccacatggcaacaggtgtgtgtgtatgtgtgtatgagtgatgtgtacattgaaaataaattgcttttttgggggtgggattaatgtgagaattgttttaaagacattatttgatacacagagacctgtgcaaaaacaaaaagcttcatcagtcttggataaatgatagaaagatggatctactgaatttacaaatatatcatcctagaacatttaaaaaagcatagtctggccaacagctgacatacatggaaatattttgtcattgtcacaggttagacagtgtaatttagccactgcatctgcaaaaaagccaaacacttcctggtaattggaaaattgttatactgctttgggtctgtaagttatatattaattcatttggtgtgagaagaactagtaataaagtatgaaggtcataatgg

SEQ ID NO: 15979 - protein, 736 aa, Homo sapiens
MDIVDTFNHLIPTEHLDDALFLGSNLENEVCEDFSASQNVLEDSLKNMLSDKDPMLGSASNQFCLPVLDSNDPNFQMPCSTVVGLDDIMDEGVVKESGNDTIDEEELILPNRNLRDKVEENSVRSPRKSPRLMAQEQVRSLRQSTIAKRSNAAPLSNTKKASGKTVSTAKAGVKQPERSQVKEEVCMSLKPEYHKENRRCSRNSGQIEVVPEVSVSSSHSSVSSCLEMKDEDGLDSKHKCNNPGEIDVPSHELNCSLLSETCVTIGEKKNEALMECKAKPVGSPLFKFSDKEEHEQNDSISGKTGETVVEEMIATRKVEQDSKETVKLSHEDDHILEDAGSSDISSDAACTNPNKTENSLVGLPSCVDEVTECNLELKDTMGIADKTENTLERNKIEPLGYCEDAESNRQLESTEFNKSNLEVVDTSTFGPESNILENAICDVPDQNSKQLNAIESTKIESHETANLQDDRNSQSSSVSYLESKSVKSKHTKPVIHSKQNMTTDAPKKIVAAKYEVIHSKTKVNVKSVKRNTDVPESQQNFHRPVKVRKKQIDKEPKIQSCNSGVKSVKNQAHSVLKKTLQDQTLVQIFKPLTHSLSDKSHAHPGCLKEPHHPAQTGHVSHSSQKQCHKPQQQAPAMKTNSHVKEELEHPGVEHFKEEDKLKLKKPEKNLQPRQRRSSKSFSLDEPPLFIPDNIATIRREGSDHSSSFESKYMWTPSKQCGFCKKPHGNRCVCMCV

SEQ ID NO: 15980 - DNA, 8192 bp, Homo sapiens
cgcaggcccccggatccggccgttggggcctcttccttctcagggagccccagcatggagctttgggccttggtttcgggaaactgggactggccctggctgctaggctgctccctgctgctgctttttggagatgagagttgctcttccatttatcctccagttaccgcgcgcttttgtgcccgggactcaaactgtggactccttttgcttagtttgaaatgagaagcctagactcttgccttccgataatacatgtaatttaatgaaccacttgtcgatacggctgaaagacacacagaagtcttcatggatatagttgatacatttaatcatttaattcctactgaacacttagatgatgccctatttctaggatccaacctggagaatgaagtctgtgaggattttagtgcaagtcaaaatgtcttagaggactcgctgaagaacatgctcagcgataaggatcctatgctaggatctgcaagtaaccagttctgtttgcctgttttggatagcaatgatcccaatttccagatgccttgttcaacagttgttggtcttgacgatattatggatgaaggagttgttaaagaaagtggcaatgataccattgatgaagaagaactgattttacctaacaggaacttaagggacaaggtagaagaaaattcagtgagatctccaagaaaatcacctcgtttaatggcacaagaacaagtaagaagtttgcgacagagcactattgccaagcgttcaaatgcagcaccattaagtaacacaaaaaaagcatctgggaagactgtatctactgctaaagcaggagtgaaacaaccagaaaggagtcaggttaaagaagaagtatgtatgtcactgaaacctgagtaccataaggagaatagaaggtgcagccgaaatagcggacaaattgaagtggtacctgaagtatcagtgtcttcaagtcattcttcagtgtcatcttgtcttgaaatgaaggatgaagatggattagattctaagcataagtgtaataatccgggagaaatagatgtgccatctcatgaattaaattgttcacttctttcagagacttgtgttactattggagaaaagaaaaatgaagctttgatggaatgtaaagccaagcctgttggtagtccattgtttaagttttcagataaagaagaacatgaacaaaatgattccatttcaggtaaaacgggtgagactgttgttgaagaaatgatagcaacaagaaaagttgaacaagattcaaaggagacagtaaaattatcccatgaagatgaccatattcttgaggacgctggatcttctgatatttctagtgatgctgcttgtacaaatccaaataagacagaaaacagccttgtaggtttgcctagttgtgtagatgaagtgactgaatgtaatttggaattgaaggataccatgggtattgctgataaaactgagaacacccttgaaagaaataaaattgaaccgttgggttattgtgaagatgcggagtctaataggcagttggagagcactgagtttaataaatcaaacttagaggtggttgatactagtacttttggaccggaaagtaatatcttggaaaatgctatttgtgatgtgcctgaccaaaattcaaaacagttgaatgctatagaaagtactaaaatagagtcccatgaaacagcaaaccttcaggatgacagaaacagccagtcaagtagcgtttcttacttagagtcaaaaagtgtaaaatccaaacatacaaaacctgtaattcattctaagcaaaacatgaccacagatgctccgaagaaaattgttgcagcaaagtatgaagtaatacatagcaaaactaaagttaatgtcaaaagtgtgaaacgaaatactgatgtaccagaatctcagcaaaattttcataggccagtcaaagtcagaaaaaaacaaattgataaggagccaaagattcagagttgcaattctggggttaaatctgtgaaaaaccaagctcattctgtactgaaaaaaacattacaggatcaaactttagtacaaattttcaagcccttaactcattctttgagtgataagtcacacgctcatcctggttgcttgaaagaacctcatcatcctgcacaaactggacatgtatcacattctagccagaaacagtgtcataagcctcagcaacaggccccagcaatgaaaaccaatagtcacgtgaaggaagagcttgaacacccaggcgttgagcattttaaggaagaggataaactgaaactgaaaaaacctgagaagaacctacaaccccgccaaagaagaagcagcaaaagtttttctttagatgagccaccattgttcattccagataacatagctaccataagaagagaaggctctgatcatagctcctcatttgaaagcaaatatatgtggactcccagcaagcagtgtgggttttgcaaaaaaccacatggcaacaggtttatggttggctgtgggagatgtgatgactggtttcatggtgattgtgttgggttaagtctttctcaagcacagcagatgggcgaggaagacaaagaatatgtctgtgtaaaatgttgtgctgaagaagacaaaaagactgaaatactagatccagatactttggaaaaccaagctacagttgaattccatagtggagataaaacaatggagtgtgaaaagcttggattatcaaaacacacaacaaatgatagaaccaaatatatagatgatacagtgaagcacaaggtcaaaattttaaaacgggagtctggtgaaggcagaaattcatcagactgtagagataatgaaattaaaaaatggcagctagctcctcttcgtaagatgggacaaccagttttacctcggagatcctcagaagaaaaaagtgaaaaaataccgaaagagtctacaactgttacttgcacaggagaaaaagcttcaaaaccaggtactcatgagaagcaagagatgaaaaagaagaaagttgaaaaaggagtgcttaatgtacatcctgctgcttctgcttccaagccttctgcagatcagatcaggcaaagtgtcagacattctctcaaagacattcttatgaagagacttacagactcaaatttgaaggtaccagaggaaaaggcagcaaaagttgccacaaaaattgagaaagagcttttctctttttttcgggacacagatgctaaatataagaacaaatatagaagtttgatgtttaatttgaaagatcctaaaaacaatatattatttaaaaaagtactgaaaggagaagtaactcctgatcatcttatcagaatgagtccagaagaactagcttctaaagagttagctgcttggagacgaagagaaaacagacataccatagaaatgattgagaaagagcagagagaagtggaacgacggccaatcaccaaaataactcataaaggtgaaatagaaattgagagtgatgccccaatgaaagaacaggaagcagccatggagattcaggaaccagccgccaataagtcattggagaagccagaaggatctgaaaaacaaaaagaggaggttgactctatgtctaaagataccactagtcaacacagacagcatctttttgatctcaactgcaaaatctgcataggtcgaatggcaccacctgtagatgatctttctccaaaaaaagtaaaagttgttgtaggagtagctcgcaaacattcagacaatgaagcagaaagtatagcagatgcattatcttcaacctcaaatattttggcttctgaattctttgaggaggagaaacaggagtctccaaagtcaacgttctctcctgctccacgtccagagatgcctggaactgttgaagttgagtctacctttctggctcgattgaacttcatctggaaaggttttatcaacatgccttctgtggcaaaatttgttaccaaagcctatccagtatctggctccccagaatacctgacagaggacctaccagatagtattcaagtaggtggcaggatatcacctcagacagtttgggattatgtggaaaaaataaaagcatcaggaaccaaggaaatttgtgtggttcgcttcacaccagtaactgaagaagatcaaatttcttatactttgctctttgcatacttcagtagcagaaagcgctatggagtagctgctaacaacatgaagcaggttaaagatatgtaccttattcctttgggtgccacagataaaattccacaccctcttgtgccttttgatggacctgggcttgaactgcatagacctaatctattgttgggcttaattattcgtcagaaactgaagcgacagcacagtgcctgtgctagtactagtcatatagctgagactcctgaaagtgcaccaccaatagcattgccacctgataaaaaaagtaaaatagaagtttctacagaagaagcaccagaggaagaaaatgacttttttaattcttttacaactgtattacacaagcagagaaataaacctcagcagaatcttcaggaagaccttccaacagcagttgaacctttaatggaagtcaccaaacaggagccaccaaaacctttaagatttcttcctggcgtgttgattggctgggagaatcaacctactactctggaattagcaaataaacctcttcctgtggatgatatacttcaaagccttttgggcaccactggtcaagtatatgaccaggcccagtcagtgatggaacaaaacactgttaaagaaattccatttttaaatgagcagaccaactcaaaaatagagaaaacagataatgtggaagtaactgatggtgaaaacaaggagataaaagttaaagtagataatatttcagaatctacagataagtcagcagaaatagaaacatcagtagtagggtcctcttccatttctgcagggtctttgacgagtcttagtctcagaggtaagccaccagatgtttctacagaagcatttttaacaaatttatcaattcagtcaaaacaagaggaaactgtggagagtaaagagaaaacattaaaaagacagcttcaggaagatcaagagaataatttgcaagataaccagacttcaaatagttctccatgcagatctaatgtaggaaaaggaaacatagatggtaatgtgagctgtagtgaaaaccttgttgctaatacagcgaggtctccacagtttatcaacctgaaaagggatcctaggcaagcagcaggacgaagtcagcctgtaactacttcagaaagcaaagatggagatagttgccggaatggagaaaaacacatgctgcctggcctgtcacacaacaaggagcacttaacagaacaaatcaatgtagaggaaaagttgtgttctgcagagaaaaactcgtgtgttcagcagagtgacaatttaaaagttgcacaaaactcaccatcagtagaaaacatacagacttctcaagcagaacaagcaaaacccttacaggaggatattttaatgcaaaatattgaaactgtgcacccatttcgaagaggatcagcagtagcgacatctcattttgaagttggaaacacatgtccatcagaatttccttctaaaagcatcacctttacttccagaagcaccagccccagaacaagtacaaacttttcacccatgaggccacagcagcccaaccttcagcatctcaagtctagcccacctggatttccatttccagggcctcctaattttcccccacaaagcatgtttggatttccaccacatttgccacctccattacttccccctccaggctttggctttgctcaaaatcccatggttccctggccacctgttgttcatctcccaggtcagccacagcgtatgatgggtcctctctcacaagcatcaaggtatataggcccgcagaatttttaccaggttaaagacattcggaggccagaaaggcgccatagtgacccttggggtaggcaagaccaacagcaactggataggccatttaataggggtaaaggggaccgccagagattttatagtgattcacaccatttgaaaagagagcgacatgaaaaggaatgggagcaagaatctgaaaggcatagacgcagagacagaagccaagacaaggacagagacagaaaaagcagggaggaagggcacaaagataaagagagggcacggttatcacatggtgatcgaggaacagatggaaaagcaagcagagatagtaggaatgtagacaagaagccagataaacctaaaagtgaagactatgagaaggacaaagaacgagagaaaagtaaacacagagaaggagaaaaggacagggataggtaccacaaagatagggaccacactgacagaactaaaagcaaaaggtaaaatttgcaggctgcttcaggattacatttaaataactgttaaaatgttgtatcttgtaaacaaaagaaagattgcctgctaggattgtgccatctttaaaatttttactattggtcatttgcagaacagtaaattctgtgtgttggtacagagtgctctgtaccagtgctcatcatcccttcttcataccaacggtccctagttataggaatttaatatttttaaaagttttacattgctgtatattcaaagatttgttttattaatatgcaataaaggcttagaaattttagttttattccttaattggtaaatatggttaactatggaatatatttacttcctctagtgaatgtcctttatataatgactaatttgggagtaatgtgtgctctgtaagtttgttttaaattgcactgtttttaaagaaactgtagaggagcaacaaaaatccaagcaacttcataatcagattatgctaatcatttagttgagcagtttttgaccaagaatcagaagcccaaggggtacatttattgctttaatctgcactcattgaagtcatttattaccatatactacagctttgtggtaggccattattttcattttcatttttggctcttcagaaacttgaatacttaagcttgtacatgatcttgtgttttgctatcctttttactgtaaaatgtaaatattttaagggatattttgattctaaatatgataaaataatttctcacctattttgtgtgtgtgacttgaaattcagtagtaaaagaatttcttctttaaagctttaattaccttcagacattgattttttgttactcagccaagaacatatagaaatagctatctatgtcaggcattagatgaggggaaaaacaatttttttaaaatcttaaattgtaggctgagatgaattgtgtagttctaaagaggctagaatttagaactacctgtgaaacactgtgcagctatagcccactttataggtaagtttctgaaaacttttacaccatcgcaatttggtactctgactcactaatcattaaaattaaagaccgcagaacttgaagagaaatatgttttgaatccttttataaaatgtgcgatttagcctaattcgtaaagtaactgtacagtttcatatgccagttttacttgaaaaaaaaatatgaaaactattgttaattcaaatctaaatttatttaaaccctaaaacacatggttttgatggctgtaatttaaagtaagagctatcaaatgatgctgacaaaagaaaaaccttccaaaatacaaaagaaagagaactctattatttacttacctgtattaatgaagaaaaatataaataattccacaaaattgattgttttcctaaagagcttaaagattagagttaaaaattggttttgaaacagaattatccttgttatttttgctggagagaagggaggaaattcagaaccaaacattctatttaatttgcaatgacttgcagtacttttttccctatccttatcctgtgaaacttactatcataaggttctaaaacagagaacttgtgtttaaataaagcccgtttaactttggtccacttttcttttggaaattaacttgttagaaaacaaagttagttcccaaacaaaacaaaatctaagttataatttgcaccattacaaagaaattgctgtcagggttttacacattttaaaaacatttcaatttcaaatgtgtatatcgtcaataaatctacc

SEQ ID NO: 15981 - protein, 2039 aa, Homo sapiens; identical to SEQ ID NO: 1828

SEQ ID NO: 15982 - DNA, 2361 bp, Homo sapiens
tggagaatgaagtctgtgaggattttagtgcaagtcaaaatgtcttagaggactcgctgaagaacatgctcagcgataaggatcctatgctaggatctgcaagtaaccagttctgtttgcctgttttggatagcaatgatcccaatttccagatgccttgttcaacagaacaagtaagaagtttgcgacagagcactattgccaagcgttcaaatgcagcaccattaagtaacacaaaaaaagcatctgggaagactgtatctactgctaaagcaggagtgaaacaaccagaaaggagtcaggttaaagaagaagtatgtatgtcactgaaacctgagtaccataaggagaatagaaggtgcagccgaaatagcggacaaattgaagtggtacctgaagtatcagtgtcttcaagtcattcttcagtgtcatcttgtcttgaaatgaaggatgaagatggattagattctaagcataagtgtaataatccgggagaaatagatgtgccatctcatgaattaaattgttcacttctttcagagacttgtgttactattggagaaaagaaaaatgaagctttgatggaatgtaaagccaagcctgttggtagtccattgtttaagttttcagataaagaagaacatgaacaaaatgattccatttcaggtaaaacgggtgagactgttgttgaagaaatgatagcaacaagaaaagttgaacaagattcaaaggagacagtaaaattatcccatgaagatgaccatattcttgaggacgctggatcttctgatatttctagtgatgctgcttgtacaaatccaaataagacagaaaacagccttgtaggtttgcctagttgtgtagatgaagtgactgaatgtaatttggaattgaaggataccatgggtattgctgataaaactgagaacacccttgaaagaaataaaattgaaccgttgggttattgtgaagatgcggagtctaataggcagttggagagcactgagtttaataaatcaaacttagaggtggttgatactagtacttttggaccggaaagtaatatcttggaaaatgctatttgtgatgtgcctgaccaaaattcaaaacagttgaatgctatagaaagtactaaaatagagtcccatgaaacagcaaaccttcaggatgacagaaacagccagtcaagtagcgtttcttacttagagtcaaaaagtgtaaaatccaaacatacaaaacctgtaattcattctaagcaaaacatgaccacagatgctccgaagaaaattgttgcagcaaagtatgaagtaatacatagcaaaactaaagttaatgtcaaaagtgtgaaacgaaatactgatgtaccagaatctcagcaaaattttcataggccagtcaaagtcagaaaaaaacaaattgataaggagccaaagattcagagttgcaattctggggttaaatctgtgaaaaaccaagctcattctgtactgaaaaaaacattacaggatcaaactttagtacaaattttcaagcccttaactcattctttgagtgataagtcacacgctcatcctggttgcttgaaagaacctcatcatcctgcacaaactggacatgtatcacattctagccagaaacagtgtcataagcctcagcaacaggccccagcaatgaaaaccaatagtcacgtgaaggaagagcttgaacacccaggcgttgagcattttaaggaagaggataaactgaaactgaaaaaacctgagaagaacctacaaccccgccaaagaagaagcagcaaaagtttttctttagatgagccaccattgttcattccagataacatagctaccataagaagagaaggctctgatcatagctcctcatttgaaagcaaatatatgtggactcccagcaagcagtgtgggttttgcaaaaaaccacatggcaacaggtgtgtgtgtatgtgtgtatgagtgatgtgtacattgaaaataaattgcttttttgggggtgggattaatgtgagaattgttttaaagacattatttgatacacagagacctgtgcaaaaacaaaaagcttcatcagtcttggataaatgatagaaagatggatctactgaatttacaaatatatcatcctagaacatttaaaaaagcatagtctggccaacagctgacatacatggaaatattttgtcattgtcacaggttagacagtgtaatttagccactgcatctgcaaaaaagccaaacacttcctggtaattggaaaattgttatactgctttgggtctgtaagttatatattaattcatttggtgtgagaagaactagtaataaagtatgaaggtcataatgg

SEQ ID NO: 15983 - protein, 635 aa, Homo sapiens
MLSDKDPMLGSASNQFCLPVLDSNDPNFQMPCSTEQVRSLRQSTIAKRSNAAPLSNTKKASGKTVSTAKAGVKQPERSQVKEEVCMSLKPEYHKENRRCSRNSGQIEVVPEVSVSSSHSSVSSCLEMKDEDGLDSKHKCNNPGEIDVPSHELNCSLLSETCVTIGEKKNEALMECKAKPVGSPLFKFSDKEEHEQNDSISGKTGETVVEEMIATRKVEQDSKETVKLSHEDDHILEDAGSSDISSDAACTNPNKTENSLVGLPSCVDEVTECNLELKDTMGIADKTENTLERNKIEPLGYCEDAESNRQLESTEFNKSNLEVVDTSTFGPESNILENAICDVPDQNSKQLNAIESTKIESHETANLQDDRNSQSSSVSYLESKSVKSKHTKPVIHSKQNMTTDAPKKIVAAKYEVIHSKTKVNVKSVKRNTDVPESQQNFHRPVKVRKKQIDKEPKIQSCNSGVKSVKNQAHSVLKKTLQDQTLVQIFKPLTHSLSDKSHAHPGCLKEPHHPAQTGHVSHSSQKQCHKPQQQAPAMKTNSHVKEELEHPGVEHFKEEDKLKLKKPEKNLQPRQRRSSKSFSLDEPPLFIPDNIATIRREGSDHSSSFESKYMWTPSKQCGFCKKPHGNRCVCMCV

SEQ ID NO: 15984 - DNA, 3104 bp, Homo sapiens
gagacagtaaaattatcccatgaagatgaccatattcttgaggacgctggatcttctgatatttctagtgatgctgcttgtacaaatccaaataagacagaaaacagccttgtaggtttgcctagttgtgtagatgaagtgactgaatgtaatttggaattgaaggataccatgggtattgctgataaaactgagaacacccttgaaagaaataaaattgaaccgttgggttattgtgaagatgcggagtctaataggcagttggagagcactgagtttaataaatcaaacttagaggtggttgatactagtacttttggaccggaaagtaatatcttggaaaatgctatttgtgatgtgcctgaccaaaattcaaaacagttgaatgctatagaaagtactaaaatagagtcccatgaaacagcaaaccttcaggatgacagaaacagccagtcaagtagcgtttcttacttagagtcaaaaagtgtaaaatccaaacatacaaaacctgtaattcattctaagcaaaacatgaccacagatgctccgaagaaaattgttgcagcaaagtatgaagtaatacatagcaaaactaaagttaatgtcaaaagtgtgaaacgaaatactgatgtaccagaatctcagcaaaattttcataggccagtcaaagtcagaaaaaaacaaattgataaggagccaaagattcagagttgcaattctggggttaaatctgtgaaaaaccaagctcattctgtactgaaaaaaacattacaggatcaaactttagtacaaattttcaagcccttaactcattctttgagtgataagtcacacgctcatcctggttgcttgaaagaacctcatcatcctgcacaaactggacatgtatcacattctagccagaaacagtgtcataagcctcagcaacaggccccagcaatgaaaaccaatagtcacgtgaaggaagagcttgaacacccaggcgttgagcattttaaggaagaggataaactgaaactgaaaaaactgggagaatcaacctactactctggaattagcaaataaacctcttcctgtggatgatatacttcaaagccttttgggcaccactggtcaagtatatgaccaggcccagtcagtgatggaacaaaacactgttaaagaaattccatttttaaatgagcagaccaactcaaaaatagagaaaacagataatgtggaagtaactgatggtgaaaacaaggagataaaagttaaagtagataatatttcagaatctacagataagtcagcagaaatagaaacatcagtagtagggtcctcttccatttctgcagggtctttgacgagtcttagtctcagaggtaagccaccagatgtttctacagaagcatttttaacaaatttatcaattcagtcaaaacaagaggaaactgtggagagtaaagagaaaacattaaaaagacagcttcaggaagatcaagagaataatttgcaagataaccagacttcaaatagttctccatgcagatctaatgtaggaaaaggaaacatagatggtaatgtgagctgtagtgaaaaccttgttgctaatacagcgaggtctccacagtttatcaacctgaaaagggatcctaggcaagcagcaggacgaagtcagcctgtaactacttcagaaagcaaagatggagatagttgccggaatggagaaaaacacatgctgcctggcctgtcacacaacaaggagcacttaacagaacaaatcaatgtagaggaaaagttgtgttctgcagagaaaaactcgtgtgttcagcagagtgacaatttaaaagttgcacaaaactcaccatcagtagaaaacatacagacttctcaagcagaacaagcaaaacccttacaggaggatattttaatgcaaaatattgaaactgtgcacccatttcgaagaggatcagcagtagcgacatctcattttgaagttggaaacacatgtccatcagaatttccttctaaaagcatcacctttacttccagaagcaccagccccagaacaagtacaaacttttcacccatgaggccacagcagcccaaccttcagcatctcaagtctagcccacctggatttccatttccagggcctcctaattttcccccacaaagcatgtttggatttccaccacatttgccacctccattacttccccctccaggctttggctttgctcaaaatcccatggttccctggccacctgttgttcatctcccaggtcagccacagcgtatgatgggtcctctctcacaagcatcaaggtatataggcccgcagaatttttaccaggttaaagacattcggaggccagaaaggcgccatagtgacccttggggtaggcaagaccaacagcaactggataggccatttaataggggtaaaggggaccgccagagattttatagtgattcacaccatttgaaaagagagcgacatgaaaaggaatgggagcaagaatctgaaaggcatagacgcagagacagaagccaagacaaggacagagacagaaaaagcagggaggaagggcacaaagataaagagagggcacggttatcacatggtgatcgaggaacagatggaaaagcaagcagagatagtaggaatgtagacaagaagccagataaacctaaaagtgaagactatgagaaggacaaagaacgagagaaaagtaaacacagagaaggagaaaaggacagggataggtaccacaaagatagggaccacactgacagaactaaaagcaaaaggtaaaatttgcaggctgcttcaggattacatttaaataactgttaaaatgttgtatcttgtaaacaaaagaaagattgcctgctaggattgtgccatctttaaaatttttactattggtcatttgcagaacagtaaattctgtgtgttggtacagagtgctctgtaccagtgctcatcatcccttcttcataccaacggtccctagttataggaatttaatatttttaaaagttttacattgctgtatattcaaagatttgttttattaatatgcaataaaggcttagaaattttagttttattcctt

SEQ ID NO: 15985 - protein, 297 aa, Homo sapiens
MGIADKTENTLERNKIEPLGYCEDAESNRQLESTEFNKSNLEVVDTSTFGPESNILENAICDVPDQNSKQLNAIESTKIESHETANLQDDRNSQSSSVSYLESKSVKSKHTKPVIHSKQNMTTDAPKKIVAAKYEVIHSKTKVNVKSVKRNTDVPESQQNFHRPVKVRKKQIDKEPKIQSCNSGVKSVKNQAHSVLKKTLQDQTLVQIFKPLTHSLSDKSHAHPGCLKEPHHPAQTGHVSHSSQKQCHKPQQQAPAMKTNSHVKEELEHPGVEHFKEEDKLKLKKLGESTYYSGISK

SEQ ID NO: 15986 - DNA, 1277 bp, Homo sapiens
ggtgaagaactatagagctgccaaacattccaaccagtctagaatggcttggtatagaccacaatggagaatagaaggaaagaacaccatttgcaggagggaggtgtggaaataggcactctggagggaggaagaagtagtgtagcataatgccgaatatccctggatgagaaaagaaaaaggttgggaaatttcagagggagaagaaaatgtttcgtggagacttctgcgtggttcattattaataagtcattttgctatcctcttcaagcaatcttacagtgaagaacatgctttttccaagcttgcagaattgcctttacttttcttctgaatgcctcattgcaacttcagatgctggatggtatttgttcctatttcttcacacgactatataattataaaatgagatatactgtaatggagggaaacctagtgatattaaggcactgacagaaaaaaattcctgaccagctctgggaaatcaaggaaaacttctctgaggaagtgacacttgatctgaaacctgaaggacaggtaggagtgattttttatgcatctctttagtaaatagttccgttcaacttcgctacaaccttggcgacagaactatcattctagaaactctccaaaaagtaactataaacggaagtacttggcatataataaaagcaggaagagttggtgcagaaggctacctggatctagatgggataaatgtaacagaaaaggcctccactaaaatgagttctctggacacaaatacagacttctatattggaggagtatcttctttaaatcttgtaaatcccatggcaatagaaaatgaacctgtaggttttcaaggctgtatccgacaagttatcataaataatcaagaattacaattaactgaatttggagcaaaaggtggctcaaatgtaggtgactgtgatgggacagcctgtgggtacaacacatgcagaaatggaggtgaatgtacagtaaatggcacaactttttcttgcagatgtttgccagattgggctggaaatacatgtaaccagtctgtgtcctgtttgaataatctttgcctccaccaatctttatgtatacctgaccaatcattttcttacagttgcctgtgtactttgggttgggtgggaaggtattgtgaaaacaaaacttcattttcaactgcaaaatttatgggtaattcttacattaaatacattgatccaaattatagaatgagaaacctccagttcactactatatccttaaatttcagtaccact

SEQ ID NO: 15987 - protein, 177 aa, Homo sapiens
MSSLDTNTDFYIGGVSSLNLVNPMAIENEPVGFQGCIRQVIINNQELQLTEFGAKGGSNVGDCDGTACGYNTCRNGGECTVNGTTFSCRCLPDWAGNTCNQSVSCLNNLCLHQSLCIPDQSFSYSCLCTLGWVGRYCENKTSFSTAKFMGNSYIKYIDPNYRMRNLQFTTISLNFST

SEQ ID NO: 15988 - DNA, 601 bp, Homo sapiens
actttcagattaggaaagaaaaaatatacattgggttataccaccaaaaactggaacaagtaaacataattgataattaagttcaaaaaatttatagcaacctaaatatactttgtggcctgcaagtgaacacaaaccagttatcttttgcaagattatggaggaagcttttcttgctccttgtgttgtagagtgttcctgtagtaaacaattttatagtgaagagctacattagaataaaaaatatctaagaaatgattaggaaagctgaagctgtgatctatactatcactggtcatgttgccaaccagaagaaagagcaaggatagcttctgcgaagaaaggattattttaactcagctagtatgttcttacgaaaaattgacaaaaagttttctttctgtggctatggaagctaaaagctgtattagcttaaaaaatcatagacttttaaatttcattgcgttaggatatgatgctctagttatgggtcataagtacacattggcattattattattattattattattattattattattattattattttgagaccagagtctccagcttgggcgacggagtgggaccctgtcgt

SEQ ID NO: 15989 - protein, 86 aa, Homo sapiens [sequence omitted]

SEQ ID NO: 15990 - DNA, 807 bp, Homo sapiens
gtagttcagaagtcaaattgtgtagctttactattgccctttctaaaggggctcaaacctacatatgaaagcaaatcccaatatgtaagcctttgtgtggttaacatttctgtctactctctcaatagtatggatttaagtgatatttttcatggtgcctggaatgagatgtagtgattcactgtcattgtttcacagaactaagatggcataaatgctgtgctgatcctatttttagttgccttcacctgtcctcccatcatgtaacaagtctacataagaacattttaaatatgtgcatctgtttgtgttcctagtttgtacaagtggaatgacagagtggagtaccagttagagtgcaaacaacctgctactttcattcctaataacgtcatacttactaaacactagttccactctctatgcatgtcccaccattgccacatttcattaaactgcagggagaagcatgacactggccaacactgcgtccagcatttgggtggccctcaggatttcccagtcctctgaaatggccatccttctcagtgcgaacttgaagagtgaaaatacagccttgaagaaatgcaaaaacacttcgtgttaacaaacagaagaaatagaaaaaacaagaagaagagattttgcctttctatacatctttagaaagaacttctcggccgggaacggtggctcatgcctgtaatcccagcactttgggaggccgaggcgggtggatcacgaggtcaggagattgagaccatcctggctaacatggtgaaaccccatctctattaaaaatacaat

SEQ ID NO: 15991 - protein, 45 aa, Homo sapiens [sequence omitted]

SEQ ID NO: 15992 - DNA, 1707 bp, Homo sapiens
atgaaatctagagaatatgctgcgagtcccattgcacgtgaattggatagcgtagtcggaaagaaaatcacagttcttggaaaatctccagtatctcgtgatggctggttgtatgttcccttgacgactgctctgtttaatcaagggagtagggttgggcacagcagaagaacacaggacatgaagaatgggagtacacaaaaagagagaaaaagaaacatacctcccattcaaaatgggcctgcacagtacaatatcagaacccataaagatactggaaaaggaaccaagaaaaccaacaatggaacaggaatcattctagataagacaatttttatgaaagggcctgaaaaaactctaaactacacaacgcctgttggcagccctggagttgtttgtatgattgaaatgactgcagatggaaaacctccagtacagaagaaagacacagagatttcccatgcctctcaggcatattttgaatcaatgttccttggccatattcctgcaaatgttcaaattcataagaaagcaggtcctgtttatgggttcaggggctgcattctagaccttcaagtaaacaacaaagaattcttcatcatcgatgaagcacgacatggaaagaatattgagaactgccacgtcccttggtgtgctcatcatctgtgccgcaacaatggcacctgcatcagtgataatgaaaatctgttttgtgagtgtccaaggctgtattcaggcaagctgtgccagtttgcaagttgtgaaaacaacccatgtggaaatggtgccacctgtgttccaaaatccggaacagatattgtctgcctctgcccatatgggaggtctggacccctctgcactgatgctattaatattactcagccaaggttcagtggcacagatgcctttggatacacctcattcctggcttattcacggatctcagacatcagcttccattatgaattccacctgaagtttcagctggcaaacaaccactcagcactgcaaaataacttgatattttttactggacagaaaggccatgggttgaatggcgatgacttcctggctgtgggcctgctcaatggcagtgtggtttatagttataacctggggtctggcatagcaagcatcaggagcgagcccctcaatctgagccttggagtccacactgttcatctgggcaagttcttccaagagggctggctgaaggtagatgatcataaaaataaatccattatcgccccaggaagactggttggtctcaatgtcttcagtcagttttatgtaggtggctacagtgaatacactccagatctcttaccaaatggagcagattttaaaaatggttttcaagttcaaaaggcaagagacagactgcagtcaacccatccataccaccaaggggtagcccacagaggccagagcaagccaagaggattaaggacaacattgtgcttggaaacattaagattgcacactcctggaagtatgtcaactgccacagtctttatctcgctgtgtcatcaaggctggagtacagtggtgccatctcagctcactgcaaccttcatctccagggctcaatcaatcctcccaccttagcctctcatgtagctgagccactaaacccagctaacatatccttacaaagctgatttatattgtagtagagttataaaataaagacatgctttaaattgt

SEQ ID NO: 15993 - protein, 535 aa, Homo sapiens
MKSREYAASPIARELDSVVGKKITVLGKSPVSRDGWLYVPLTTALFNQGSRVGHSRRTQDMKNGSTQKERKRNIPPIQNGPAQYNIRTHKDTGKGTKKTNNGTGIILDKTIFMKGPEKTLNYTTPVGSPGVVCMIEMTADGKPPVQKKDTEISHASQAYFESMFLGHIPANVQIHKKAGPVYGFRGCILDLQVNNKEFFIIDEARHGKNIENCHVPWCAHHLCRNNGTCISDNENLFCECPRLYSGKLCQFASCENNPCGNGATCVPKSGTDIVCLCPYGRSGPLCTDAINITQPRFSGTDAFGYTSFLAYSRISDISFHYEFHLKFQLANNHSALQNNLIFFTGQKGHGLNGDDFLAVGLLNGSVVYSYNLGSGIASIRSEPLNLSLGVHTVHLGKFFQEGWLKVDDHKNKSIIAPGRLVGLNVFSQFYVGGYSEYTPDLLPNGADFKNGFQVQKARDRLQSTHPYHQGVAHRGQSKPRGLRTTLCLETLRLHTPGSMSTATVFISLCHQGWSTVVPSQLTATFISRAQSILPP

SEQ ID NO: 15994 - DNA, 2165 bp, Homo sapiens
tgctgccttgtgaagaaagtactctgcttcctcttccccttccaccatgcttgtaaatttccggaggcctccccagccatgctgaacagtgtaaggaaagggtccagtttcagttttctgcatttgggtggccatgaactgtaatgacttccaaggaaggagacacaaaatacagctgcatttaaaatgattaaacaaaggaaggcgtgtggaacactcaacattgtgggaaaacatgtagattttggatacactggataatcttaatgcaatgtgacttcgtagtccgagatgacttctggaattcaagacatctcatggacattctagacttcagaaagaaggaagatttggaggtcatgctactcttcaagagattttccagaggtcaatataatactctaacacttctgcttacatctgattttccagaatttagtcccatggccacattttaagctctaagggaggataggaaacttagctgggtacattagtgacccacgtacaatcaagagtgcactaatacagtatttgtatctgtatgagatgagtatctctgggccagtgtccagaggattccctgaagtgcccggcttactcttcaaagccataagtactatttctctgacatgcacgcaattgctagctctgtcaagtggtagaactttaagtgtatgtttcctagggtgctccatgaccaccgtgtgatggggtccacgtgtgctcagtgtgcattttctggagctggagacttgaactggatgctactcaagcactacttgtttgccaataagtttgatgtggatgttgacctttttgccatccaatgctttgatgagcatctgagacataaaactttgaagacattacaacactgacaattacaggcaattttatgaataataaggaggatacacaaaaaatatccttatctggttcctcttccttgtcagcaagcatcgggaaaatggtatgaagtcctctttggggtggggactcttagttttcttgtcagagaagctgcatgttttctgcagaacaccattggctagatatgtgatagcattaaatgttcacctaaatttaacgtgagggggagtaaaagtagccttgaggccagagcaggtagcattctggaaagaggggaccagggtgcctggggaagaggccgatgcataaggtcagcctgttcaaagagctcagggacttagcaaaacgagaagatttcacctgtgccaaaactattaagaattttaaatgtgacaattttcctggtatcaataaatttatagcaacaaacaaccataaagatacaattgatctgatatgttgtattgaaatagaaatttgattttactgtaaattatttggctaggctggtcttgaactcctgacctcaggtgatccacccaccgcggcttcccaaagtactaggattacaggcgtgagccaccatgcctggcccatcaaagctattttttaagaactgaaatgtgtacactgaaatacacatttataagtgctgcttttaaatatgtgccaacctaactttttctctctacagatgctgaagtagagggaaaaagtgaaaggcaggaggtgctcactttttccctgagcaagaggaaaggcaacttccctcagttcttatggaataaaaagtgcaggccattcaaagtctgccttcaacagagagaaagaggaatcactttcttgagcactttttttctcattcctgtctccttgctcctgtctgggattaggcttgaccttttagtatttctttgtaacaaggaactggaaaataaagattaaaacatggtgggaaatgagggatactaagatgtgttgaacggtggggcaatcaaacagctgttgagttggagagagaaagctggatcatatcagagtggatgctatcaaaagagttatgagcttaacatgacagaaaattgcatgttcttgaaatatgccattacaaaatgtcagcctgacattaagctgctttatagaggtatcatgtccctaaatagcctggtgattattcgtgtccctggagctctactttcctccctgattttgtaataccttggcttgtctttaatcactgcagagtgtcaccatcttagaaaaattcttaaaagaaaattaattttgatttc

SEQ ID NO: 15995 - protein, 63 aa, Homo sapiens [sequence omitted]

SEQ ID NO: 15996 - DNA, 1641 bp, Homo sapiens
ctcaggtgcctcgtaaacatgatttggcatccaaaacctggatatgacttagagaggagctcacacctttgaacaaactgtgcttttctaatcctgcacctttatctgagccaaagccccaggtcagggctaggaaagtcaagaaataggaaggaaatcggtcagttttctatcatcattggttgggcttgaaagtgtaacaagaggttaaaatagaagttctagctgaagcacaaagaaagtagaaacaacacatcaaagtgagggatttataaagcaggagactgaaaaccagctggtgactcttgaattcctcacccttattgagagtataaaaggcttatagccctcaccctttcacctcaaatcaagagggaagggttttagaaacacaacttggagagcttaatatgtatccctgaagtttgaggaaaggggacgtagtgtactgacttctgcctggaaagtctaacaggtgggagattaattgactgcaatgaaggagaaagccaatgacaggttgcttcttgactggaattgttcagcactccagaggctgtcagggaaaggatgtgagcatgctgcctggaatctgatgtggctcagctgtaggacaaagatagtgtgttttcttaagttctgaccaaatgaaccaccttaagagacaaagatcactcagcaaggaaagctgaagatgctatgagatgccagaggttggggaaggagcaaacaaccagctggaatggatatgccttttctcaaagaaaattgcaagtggaagaattccagccatggggtctccaaagcatccgtgaaactgttccacaagacaaggatggatgactgaatgccaaacccagagagcagtgaagctaaatcaactcaatcatttcagtgaagaaagaaatctcctgtcctttcctgtccctgaactccatgatgaagggccatgtgctgtaggtagcaaaacaggggagaaagaatttcagttttccttttcccttgaaattttctagctaaatcagtccgaaatgtggaaggaaaaagcatgaagttttttatttttattttttgagactgagtcttgctctgttgcccaggctggagtgcagtggtgtggtcttggctcactgcaacctcctcttctcgagttcaaatgattctcctgcctctgcctcccgagtagctggaattacagccgtgcaccaccatgcccagctaatttttatatttttagtagaaacaggtttcaccatgttggccaggctggtaatgaactcctgacttcaggtgtctgccagccttggcctcccaaagtgctggaattacaggcatgagccaccacacctggccacatgaaagcatgaaatttaatgcagatagatttacctatcatataaaaatggaaaaccgaattactaagtggaactgatattttgtgatccaggaatgaccatgtctgaactttcatttgaggggaaaaaggataattaacaccattgaacaaatttaaagggagaatggaagacaaagtaaagttgttttatgtttacatacagctgtgctattaagaaaagctaccgatttttattttttgtctcgtacaaatttttctcattaaagttatacaaccaacaaaaa

SEQ ID NO: 15997 - protein, 58 aa, Homo sapiens
MTECQTQRAVKLNQLNHFSEERNLLSFPVPELHDEGPCAVGSKTGEKEFQFSFSLEIF

SEQ ID NO: 15998 - DNA, 1528 bp, Homo sapiens
ctgaaagaacaaagggaagacacagtgctacaaaagcccaagagctgcaacctcctgacaggagctgggttgggcttgaaagtgtaacaagaggttaaaatagaagttctagctgaagcacaaagaaagtagaaacaacacatcaaagtgagggatttataaagcaggagactgaaaaccagctggtgactcttgaattcctcacccttattgagagtataaaaggcttatagccctcaccctttcacctcaaatcaagagggaagggttttagaaacacaacttggagagcttaatatgtatccctgaagtttgaggaaaggggacgtagtgtactgacttctgcctggaaagtctaacaggtgggagattaattgactgcaatgaaggagaaagccaatgacaggttgcttcttgactggaattgttcagcactccagaggctgtcagggaaaggatgtgagcatgctgcctggaatctgatgtggctcagctgtaggacaaagatagtgtgttttcttaagttctgaccaaatgaaccaccttaagagacaaagatcactcagcaaggaaagctgaagatgctatgagatgccagaggttggggaaggagcaaacaaccagctggaatggatatgccttttctcaaagaaaattgcaagtggaagaattccagccatggggtctccaaagcatccgtgaaactgttccacaagacaaggatggatgactgaatgccaaacccagagagcagtgaagctaaatcaactcaatcatttcagtgaagaaagaaatctcctgtcctttcctgtccctgaactccatgatgaagggccatgtgctgtaggtagcaaaacaggggagaaagaatttcagttttccttttcccttgaaattttctagctaaatcagtccgaaatgtggaaggaaaaagcatgaagttttttatttttattttttgagactgagtcttgctctgttgcccaggctggagtgcagtggtgtggtcttggctcactgcaacctcctcttctcgagttcaaatgattctcctgcctctgcctcccgagtagctggaattacagccgtgcaccaccatgcccagctaatttttatatttttagtagaaacaggtttcaccatgttggccaggctggtaatgaactcctgacttcaggtgtctgccagccttggcctcccaaagtgctggaattacaggcatgagccaccacacctggccacatgaaagcatgaaatttaatgcagatagatttacctatcatataaaaatggaaaaccgaattactaagtggaactgatattttgtgatccaggaatgaccatgtctgaactttcatttgaggggaaaaaggataattaacaccattgaacaaatttaaagggagaatggaagacaaagtaaagttgttttatgtttacatacagctgtgctattaagaaaagctaccgatttttattttttgtctcgtacaaatttttctcattaaagttatacaaccaacaaaaa

SEQ ID NO: 15999 - protein, 58 aa, Homo sapiens; identical to SEQ ID NO: 15997

SEQ ID NO: 16000 - DNA, 525 bp, Homo sapiens
agcgagatttacaataaagtagatgttggagctatgctgactgggttcaaatcctcataccatcactgcctagttgtataagcttgaacaaattacttgttattgctgtgcttcaatttcctcagctgtaaaatatggttttaaaatgaaaagcctttgagatcttttagaattaagtgaaaatttaagcagaacagaaggaacaccagatgggagtctctcaagaagtgtcctcagggatatcacatgaaagtgaggtgatcttagatattatcttatctgaaataaattacccattgtaaatgaatacaaggatggcacatcatcttttctcatacatatattcagagagctggcagctatgttgcaggaagatgaaaggaacctcaagtgtgtcagctgtgaagcatgtactgtattcttctggtggaaattagcatggccactatatcacaaatggatattatcgcaaaagttaattgtattactagttctgtttaaagataaagaatcagacatgtgcaa

SEQ ID NO: 16001 - protein, 53 aa, Homo sapiens
MLQEDERNLKCVSCEACTVFFWWKLAWPLYHKWILSQKLIVLLVLFKDKESDM

SEQ ID NO: 16002 - DNA, 441 bp, Homo sapiens
ctaggatgccttgggtctcatgtcccactgcattgtcatcttgaagatttgtcacactttgagagaaaaacttgttgccatgacaatgggctcagaggctgaaaagaagacttcaaccactgtcagcagcatcattgtggtggccaagtggatcatccccagagtagatgatgttgtgaaatcagtgtaccatctgttaagcaccaagctcctggatgctccatcagcagagagcagagaagagaagcaactggatatccaagagaagcagcttgacttcaaagagacaacttgacaacgtggcttcagagaggagtctggccaaggactgctgaactccaggggaggattgccctcccactccatctgctttccagctcccctccccacagagagccattttcatcagcaataaaatcctccacattcaccaccctccaa

SEQ ID NO: 16003 - protein, 91 aa, Homo sapiens
MSHCIVILKICHTLREKLVAMTMGSEAEKKTSTTVSSIIVVAKWIIPRVDDVVKSVYHLLSTKLLDAPSAESREEKQLDIQEKQLDFKETT

SEQ ID NO: 16004 - DNA, 352 bp, Homo sapiens
agatttgtcacactttgagagaaaaacttgttgccatgacaatgggctcagaggctgaaaagaagacttcaaccactgtcagcagcatcattgtggtggccaagtggatcatccccagagtagatgatgttgtgaaatcagtgtaccatctgttaagcaccaagctcctggatatgaaactgtagttgccctatgttaaaaacaggaaagcagaagtaaatggatcctagacattgaattgcctgccccaaatgaatcctcgaatttacgttaagatcacattttggaattaatcttaacaagactaagagtttgtagtattactaatataaataacatcgaattttcagac

SEQ ID NO: 16005 - protein, 49 aa, Homo sapiens
MTMGSEAEKKTSTTVSSIIVVAKWIIPRVDDVVKSVYHLLSTKLLDMKL

SEQ ID NO: 16006 - DNA, 723 bp, Homo sapiens
ggcgcgggtactcacacgaaagcgtggtagatgaacgcccagccgcggggtctctccagcacgttgtacagaaattaatcagagaacccaggacaacgtcagagatcatatgagcctcaccagactgcatgagagtcataacacagtaggagtcccaggcctacctcacatggcaaatgggacagtgttcttcagaacaacctctgccccagggatgcagaaaggagggtttcactatgttggccagtctggtgttgaactcctcacctcaaatgatctgcccaccttggcctcccaaagcgttggagttacagacgtgagccaccgcgcccagctggagaagatgtgaaattttgagagctgaccatactttgagaataataagtagttggattctactgaagcccagtggcttttggaggtgtagcaataagcaggaggcagcagaagtaagacaagggctgtatgacaaagtcttggcaagaactttgaattttatcctgatgtgagtggggagagccactgaagaacgtgaagccagaaacactacatgttactacttctactttcagaaaaggcttaatatggattatacacctacaagtggcacacactgttccaagtggagactcaaagatgataacgatacagtgtttatgctataggtttgtgaagctaccaatccatggacagatgttaaacctaacttccaatttcaggtac

SEQ ID NO: 16007 - protein, 79 aa, Homo sapiens
MSLTRLHESHNTVGVPGLPHMANGTVFFRTTSAPGMQKGGFHYVGQSGVELLTSNDLPTLASQSVGVTDVSHRAQLEKM

SEQ ID NO: 16008 - DNA, 3351 bp, Homo sapiens
gggcgccccgtcggccgccggcttcctccttgaaacccgccggcgcacatgaggccgctgcccccgccgcaggcgctggcggccccctcgcggtgcccgtggtgatgccatgccccgccaccacgcgggaggagaggagggcggcgccgccgggctctgggtgaagagcggcgcagcggcggcggcggcgggcggggggcgcttgggcagcggcatgaaggatgtggagtccggccggggcagggtgctgctgaactcggcagccgccaggggcgacggcctgctactgctgggcacccgcgcggccacgctcggtggcggcggcggtggcctgagggagagccgccggggcaagcagggggcccggatgagcctgctggggaagccgctctcttacacgagtagccagagctgccggcgcaacgtcaagtaccggcgggtgcagaactacctgtacaacgtgctggagagaccccgcggctgggcgttcatctaccacgctttcgtttttctccttgtctttggttgcttgattttgtcagtgttttctaccatccctgagcacacaaaattggcctcaagttgcctcttgatcctggagttcgtgatgattgtcgtctttggtttggagttcatcattcgaatctggtctgcgggttgctgttgtcgatatagaggatggcaaggaagactgaggtttgctcgaaagcccttctgtgttatagataccattgttcttatcgcttcaatagcagttgtttctgcaaaaactcagggtaatatttttgccacgtctgcactcagaagtctccgtttcctacagatcctccgcatggtgcgcatggaccgaaggggaggcacttggaaattactgggttcagtggtttatgctcacagcaaggaattaatcacagcttggtacataggatttttggttcttattttttcgtctttccttgtctatctggtggaaaaggatgccaataaagagttttctacatatgcagatgctctctggtggggcacaattacattgacaactattggctatggagacaaaactcccctaacttggctgggaagattgctttctgcaggctttgcactccttggcatttctttctttgcacttcctgccggcattcttggctcaggttttgcattaaaagtacaagaacaacaccgccagaaacactttgagaaaagaaggaacccagctgccaacctcattcagtgtgtttggcgtagttacgcagctgatgagaaatctgtttccattgcaacctggaagccacacttgaaggccttgcacacctgcagccctaccaagaaagaacaaggggaagcatcaagcagtcagaagctaagttttaaggagcgagtgcgcatggctagccccaggggccagagtattaagagccgacaagcctcagtaggtgacaggaggtccccaagcaccgacatcacagccgagggcagtcccaccaaagtgcagaagagctggagcttcaacgaccgaacccgcttccggccctcgctgcgcctcaaaagttctcagccaaaaccagtgatagatgctgacacagcccttggcactgatgatgtatatgatgaaaaaggatgccagtgtgatgtatcagtggaagacctcaccccaccacttaaaactgtcattcgagctatcagaattatgaaatttcatgttgcaaaacggaagtttaaggaaacattacgtccatatgatgtaaaagatgtcattgaacaatattctgctggtcatctggacatgttgtgtagaattaaaagccttcaaacacgtgttgatcaaattcttggaaaagggcaaatcacatcagataagaagagccgagagaaaataacagcagaacatgagaccacagacgatctcagtatgctcggtcgggtggtcaaggttgaaaaacaggtacagtccatagaatccaagctggactgcctactagacatctatcaacaggtccttcggaaaggctctgcctcagccctcgctttggcttcattccagatcccaccttttgaatgtgaacagacatctgactatcaaagccctgtggatagcaaagatctttcgggttccgcacaaaacagtggctgcttatccagatcaactagtgccaacatctcgagaggcctgcagttcattctgacgccaaatgagttcagtgcccagactttctacgcgcttagccctactatgcacagtcaagcaacacaggtgccaattagtcaaagcgatggctcagcagtggcagccaccaacaccattgcaaaccaaataaatacggcacccaagccagcagccccaacaactttacagatcccacctcctctcccagccatcaagcatctgcccaggccagaaactctgcaccctaaccctgcaggcttacaggaaagcatttctgacgtcaccacctgccttgttgcctccaaggaaaatgttcaggttgcacagtcaaatctcaccaaggaccgttctatgaggaaaagctttgacatgggaggagaaactctgttgtctgtctgtcccatggtgccgaaggacttgggcaaatctttgtctgtgcaaaacctgatcaggtcgaccgaggaactgaatatacaactttcagggagtgagtcaagtggctccagaggcagccaagatttttaccccaaatggagggaatccaaattgtttataactgatgaagaggtgggtcccgaagagacagagacagacacttttgatgccgcaccgcagcctgccagggaagctgcctttgcatcagactctctaaggactggaaggtcacgatcatctcagagcatttgtaaggcaggagaaagtacagatgccctcagcttgcctcatgtcaaactgaaataagttcttcattttctttccaggcatagcagttctttagccatacatatcattgcatgaactatttcgaaagcccttctaaaaagttgaaattgcaagaatcgggaagaacatgaaaggcagtttataagcccgttaccttttaattgcatgaaaatgcatgtttagggatggctaaaattccaaggtgcatcgacattaacccactcatttagtaatgtaccttgagttaaaaagcctgagaaaccaaacacagctaatgctatggggtgtatgaatatgtcaagtttaggtcatttagaagatttgacactgtattttgaaattatgggagtaaacaccttcaaatttcaggcatttctgctttgtgactaaatacaaactacattttcaagattaggccataatgtatatttaaacacaatggctatcaacagctgctaata

SEQ ID NO: 16009 - protein, 932 aa, Homo sapiens; identical to SEQ ID NO: 1832

SEQ ID NO: 16010 - DNA, 1466 bp, Homo sapiens
ctccttgaaacccgccggcgcacatgaggccgctgcccccgccgcaggcgctggcggccccctcgcggtgcccgtggtgatgccatgccccgccaccacgcgggaggagaggagggcggcgccgccgggctctgggtgaagagcggcgcagcggcggcggcggcgggcggggggcgcttgggcagcggcatgaaggatgtggagtccggccggggcagggtgctgctgaactcggcagccgccaggggcgacggcctgctactgctgggcacccgcgcggccacgctcggtggcggcggcggtggcctgagggagagccgccggggcaagcagggggcccggatgagcctgctggggaagccgctctcttacacgagtagccagagctgccggcgcaacgtcaagtaccggcgggtgcagaactacctgtacaacgtgctggagagaccccgcggctgggcgttcatctaccacgctttcgtttttctccttgtctttggttgcttgattttgtcagtgttttctaccatccctgagcacacaaaattggcctcaagttgcctcttgatcctggagttcgtgatgattgtcgtctttggtttggagttcatcattcgaatctggtctgcgggttgctgttgtcgatatagaggatggcaaggaagactgaggtttgctcgaaagcccttctgtgttatagataccattgttcttatcgcttcaatagcagttgtttctgcaaaaactcagggtaatatttttgccacgtctgcactcagaagtctccgtttcctacagatcctccgcatggtgcgcatggaccgaaggggaggcacttggaaattactgggttcagtggtttatgctcacagcaaggaattaatcacagcttggtacataggatttttggttcttattttttcgtctttccttgtctatctggtggaaaaggatgccaataaagagttttctacatatgcagatgctctctggtggggcacaattacattgacaactattggctatggagacaaaactcccctaacttggctgggaagattgctttctgcaggctttgcactccttggcatttctttctttgcacttcctgccggcattcttggctcaggttttgcattaaaagtacaagaacaacaccgccagaaacactttgagaaaagaaggaacccagctgccaacctcattcagtgtgtttggcgtagttacgcagctgatgagaaatctgtttccattgcaacctggaagccacacttgaaggccttgcacacctgcagccctaccaagaaagaacaaggggaagcatcaagcaggtttgtgatttctctcttgctacatgtttgtttataaatctgatacctaccaggtgttttaaatgtgtctcatgtgagtaaaatcgatcaacaaatacaagatgattaaaagtgacctttcacaagattgcctgc

SEQ ID NO: 16011 - protein, 427 aa, Homo sapiens
MPRHHAGGEEGGAAGLWVKSGAAAAAAGGGRLGSGMKDVESGRGRVLLNSAAARGDGLLLLGTRAATLGGGGGGLRESRRGKQGARMSLLGKPLSYTSSQSCRRNVKYRRVQNYLYNVLERPRGWAFIYHAFVFLLVFGCLILSVFSTIPEHTKLASSCLLILEFVMIVVFGLEFIIRIWSAGCCCRYRGWQGRLRFARKPFCVIDTIVLIASIAVVSAKTQGNIFATSALRSLRFLQILRMVRMDRRGGTWKLLGSVVYAHSKELITAWYIGFLVLIFSSFLVYLVEKDANKEFSTYADALWWGTITLTTIGYGDKTPLTWLGRLLSAGFALLGISFFALPAGILGSGFALKVQEQHRQKHFEKRRNPAANLIQCVWRSYAADEKSVSIATWKPHLKALHTCSPTKKEQGEASSRFVISLLLHVCL

SEQ ID NO: 16012 - DNA, 562 bp, Homo sapiens
ttcaaagaaaggaacgatgtggacctgacctcaaagaaatccattggagaatatgacagatttagatttaatgatcaactttacttttcctatacagatgggaaaacagcctgcaaaaatgttaagtagcttcctcaggatcaagtactattggagccagcattggtggtcaatcctgtatagaaatgacttcagttgtagatctgtgaccttccttacttaccttcctctaccaaagtgggtcaaccaaaaccgcatggcgtactactctctgaagcctctactaccctgctcctccgtgttgacatgtggtcaggcaagccaggacttactcacatcagctacatcagttactgggatggagaaaattgaagcctagaaagatcaagaaactttctccaggccataaatagaggaatcaggattcaaatcagatagaccccagggcttgttctcttcaacaccacattaccctacattattattcaattattaaataaaaccttgcattagtggcatttccaaatgcataacaaaaaaataaaaaaaagtaacactggtc

SEQ ID NO: 16013 - protein, 108 aa, Homo sapiens; identical to SEQ ID NO: 4783

SEQ ID NO: 16014 - DNA, 296 bp, Homo sapiens
tataagcattgtgtctcaaactgtagaatgatgtttcatttatttggctttttctaggaaaaagaaatgaaatatttttcctaagaagtgaaaagaacccataagagctccagtttgcaaaatgctagtctttttattgatccctttttttttttttttttgacatggagtgagtctctctctgtcgcccaggctggagtgcagtggcgtgatgtcggctcattgcaacctccgcctcccaggcaagagaatcgcctgaacccagaagccagaggttgcagtgagccgtgatcccg

SEQ ID NO: 16015 - protein, 68 aa, Homo sapiens
EVKRTHKSSSLQNASLFIDPFFFFFLTWSESLSVAQAGVQWRDVGSLQPPPPRQENRLNPEARGCSEP

SEQ ID NO: 16016 - DNA, 476 bp, Homo sapiens
aacttccagtttcccaagacgcaacattgaattcaatcagaggtaaagattctggactattggattaaatgaggaggcaggagctactatctcttgcagtgtgaaaccagggccggggatgaagatatggacacatctcagctttccagggatgctgtgatgtggtgaaattatgccattcattagaaggtgatactgtcatcaatgtgagaggcccaggactctgcagggcctgaagaaatcctgggcaatgagtctgagggaagtctctcagagcagctactctgagagagtaaagccgcagcctttgtggggtatgaaagcagcgttctcatggataaggcttatttgagacgaagtggaggccttgttttgtccacttaccgcaatgtccactgtccccaactgcagcatgccaacagcaaatgtgtttagtggatatgtgctttgtagctaacaagaaacagtaacattta

SEQ ID NO: 16017 - protein, 33 aa, Homo sapiens
MDKAYLRRSGGLVLSTYRNVHCPQLQHANSKCV

SEQ ID NO: 16018 - DNA, 876 bp, Homo sapiens
gtgaaagtggaaaagaaacagtgggaggaatgagaggcaagaagcagcgggtagcacttttctcggtatcaaagagacgtgaaactaggctacttaattttttttcttgtaaaaaaagaacttccagtttcccaagacgcaacattgaattcaatcagaggtaaagattctggactattggattaaatgaggaggcaggagctactatctcttgcagtgtgaaaccagggccggggatgaagatatggacacatctcagctttccagggatgctgtgatgtgggtgagcatgagctttgtctatgggctgaattgcatccctccaaaattcatatgttatggtcctaacccctagtacctccgaatgcgactgtttggagatagggtctttagagatgttattaaattaaaatgaggttattagagtggctcctaatccaatatgattggtatccttataagtagaggaaatttgcacatggctgggtacagagaaaagtctatgtaaagactcagggagaagaccatctaaagccaagaagaaagccttcagaaggaaccaaccctgctgacaccttaaacttggccttctagcctctagactgtgagaaaataaatttttgttgtttaaggcatctagtactttgttatagcagcttgagcaaactaatacaagttccatttgtagtagaagctattaaacatcattacatagtctatgtctgcactcaacaaagactggttcccaccattaagacaagctgctccttctaccacttgggaggaaatcagcttaaggaaaggtgttagaaatattaggaaatacagattaaaaaatgaagaaacaaaatataactgtgatctcaccactcaaag

SEQ ID NO: 16019 - protein, 51 aa, Homo sapiens
MSALNKDWFPPLRQAAPSTTWEEISLRKGVRNIRKYRLKNEETKYNCDLTT

SEQ ID NO: 16020 - DNA, 2416 bp, Homo sapiens
caggcaacattcctggggagtctggacctcccttggtggaccgacacccgagggtctctagggtttttcaccccatatcggggtgaactgaaggcatgggaagaggcagccccacagcctgggtccccaaaaccccctccgggctgagagcaagagatgccgcctggaggccactcaccaagcagctccgctggctcagcaatgggggtcgtccgggtctgggtcattgccactggctcgtccctcctcccacccttgcttcctggactcaagagctgctgggctctctgcgcgccggcagtgggctccgcaggctgtctcctacacagagcaggcgggaggagggctctgggttgcttcccgcgccgcagccgcgcgcttccggcggggtcgccgccacttccgctcgagcgcgcctcgcgcggccgcggcgcgagccgggacccctggaagggtcgggtgcgcggcccaggaggtaccgctgtctcctcacaatcggccaggcctgcagccgctgccgccgctgccgccgccgccgccgccgccgccgccgccctactcagggagtggcccaggcctgcggcgcgccaccctcacctccttcattcctaccgtcaaagcccagccttggctacctgacccccctgtggtctcgaactcggttagtccggtgaagggacagagaagcctgggttcccggcggcatcactgagatgctcagtcctgaattctgccctccattaggattatctgctttgtgggataatttcctcattggttgagtcagtgagttgcgtgtctgcaagagagcatcctatctggtcggagcagagcatggacatgggaacgagtgctctcagcaagaagccgtggtggaccctgcctcaaaactttcatgcaccaatggtgtttcacatggaagaggaccaggaggagctcatcttcgggcatggtgacacataccttcgctgcattgaggtgcacagccacacccttattcagctggagagttggttcacagctacaggccagactcgtgtgactgtagtcggaccacacagggcaaggcagtggctgctgcacatgttttgttgtgtggggagccaggactcctatcatcatgctcgaggtgggagcacagcatggccgtgggaacgagtgctctcagcaaggagccgtggtggaccctgcccgaaaactttcattctccaatggtgttccacatggaagaggaccaggaggagctcatcttcggacttgatgacacgtaccttcgctgcattgagctgcacagccacacccttattcagctggagaggtgtttcacagctacaggccagacacgtgtgactgtagtcggaccaccaatggcaaagcagtggctgctgctcatgttccattgcgtggggagccaggactccaagtgtcacgctcgaggtctgaagatgctagagcgtgtccgaagccagcccctgaccaatgatgacctggtcacctccgttagcctgccaccgtacaccggagactgatctcccctgggaagaggggatgagaggagaagtcttggcttcgcttttgatggagtcttactctgtcgcccaggctggagtacaatggtgcgaactcagccacctgctacctctgccttctgggttcaagcaattctctgcctcagcctcctgagtaactggaattgcaggtcagagcagagcatggccatgggaacaagtgccctcagcaagaagccgtggtagaccctgcctgaaaactttcatgatccaatggtgtttcacatggaagaggaccaggaggagctcatctttggtgagtggcctttgcccacatcccctccttcatccttgtcttctccattttcaatttttcccttctttcctaccttcatcagtcacacatcggttcccccaaggctacctccccactccccaagggctggtgcttgatagaccctcctctcgcctcttatgctcacagggcatggtgacacataccttcactgcattgaggtgcacaccagcccctgaccaaccatgatctggtcgcctccattagtgtgccaccgtacaccagagacctgtctttggcctccaggataagtggaaccgtctgtcttagcgtacctcagcctttcccttaccaagtgattggtcgttaggtattctatttgagttcactctattcgtaattaaggacagatctcccctgggaagtggggatgagaggagaagtcttggcttcacttttggtgagaaagacatgaaagacactgaagaaagtttgaacttgtggcggggacctgtccctctcaggccttctaggcacgtgcctgagggaagtctcctgagtgtaagaagtgttattggcaaagcaatccaataaaataagctacctgtgatgc

SEQ ID NO: 16021 - protein, 171 aa, Homo sapiens
MDMGTSALSKKPWWTLPQNFHAPMVFHMEEDQEELIFGHGDTYLRCIEVHSHTLIQLESWFTATGQTRVTVVGPHRARQWLLHMFCCVGSQDSYHHARGGSTAWPWERVLSARSRGGPCPKTFILQWCSTWKRTRRSSSSDLMTRTFAALSCTATPLFSWRGVSQLQARHV

SEQ ID NO: 16022 - DNA, 634 bp, Homo sapiens
gtttgttagactttcccctattctgaatcaggtgggagcacagcatggccgtgggaacgagtgctctcagcaaggagccgtggtggaccctgcccgaaaactttcattctccaatggtgttccacatggaagaggaccaggaggagctcatcttcggacttgatgacacgtaccttcgctgcattgagctgcacagccacacccttattcagctggagaggtgtttcacagctacaggccagacacgtgtgactgtagtcggaccaccaatggcaaagcagtggctgctgctcatgttccattgcgtggggagccaggactccaagtgtcacgctcgaggtctgaagatgctagagcgtgtccgaagccagcccctgaccaatgatgacctggtcacctccgttagcctgccaccgtacaccggagactgatctcccctgggaagaggggatgagaggagaagtcttggcttcgcttttggtgagaaagacatgaaaaacactgaagaaagtttgaatttgtggccagacctgcccctctcaggccttctaggcatgtgtctgagggaagtctcctgagtgttagaagtgttattggcaaagcaatccaataaaataagctacctatgatgcaa

SEQ ID NO: 16023 - protein, 128 aa, Homo sapiens
MAVGTSALSKEPWWTLPENFHSPMVFHMEEDQEELIFGLDDTYLRCIELHSHTLIQLERCFTATGQTRVTVVGPPMAKQWLLLMFHCVGSQDSKCHARGLKMLERVRSQPLTNDDLVTSVSLPPYTGD

SEQ ID NO: 16024 - DNA, 1134 bp, Homo sapiens
gcgcgcctcgcgcggccgcggcgcgagccgggacccctggaagggtcgggtgcgcggcccaggaggtaccgctgtctcctcacaatcggccaggcctgcagccgctgccgccgctgccgccgccgccgccgccgccgccgccgccctactcagggagtggcccaggcctgcggcgcgccaccctcacctccttcattcctaccgtcaaagcccagccttggctacctgacccccctgtggtctcgaactcggttagtccggtgaagggacagagaagcctgggttcccggcggcatcactgagatgctcagtcctgaattctgccctccattaggattatctgctttgtgggataatttcctcattggttgagtcagtgagttgcgtgtctgcaagagagcatcctatctggtcggagcagagcatggacatgggaacgagtgctctcagcaagaagccgtggtggaccctgcctcaaaactttcatgcaccaatggtgtttcacatggaagaggaccaggaggagctcatcttcgggcatggtgacacataccttcgctgcattgaggtgcacagccacacccttattcagctggagagttggttcacagctacaggccagactcgtgtgactgtagtcggaccacacagggcaaggcagtggctgctgcacatgttttgttgtgtggggagccaggactcctatcatcatgctcgaggcctggagatgctggaacgtgtccgaagccagcctctgaccaacgatgacctggtcacctccattagtgtgccaccatacactggagacctgtctttggctcccaggataagtggaaccgtgtgtcttagcgttcctcagccttccccttaccaagtgattggttgttcgggtttccatttgagttcactgtatccgtaattaaggactgatctcccctgggaagtggggatgagaggagaaatcttggcttcacttttggtgagaaagacatgatagacactgaggaaagtttgaacttgtggccgggacctgtccctctcaggtcttctagacatgtctgagggaagtctcttgaatgtaagaaagtgttattggcaaagcaatccaataaaataagctacctatgatgcaaa

SEQ ID NO: 16025 - protein, 164 aa, Homo sapiens
MDMGTSALSKKPWWTLPQNFHAPMVFHMEEDQEELIFGHGDTYLRCIEVHSHTLIQLESWFTATGQTRVTVVGPHRARQWLLHMFCCVGSQDSYHHARGLEMLERVRSQPLTNDDLVTSISVPPYTGDLSLAPRISGTVCLSVPQPSPYQVIGCSGFHLSSLYP

SEQ ID NO: 16026 - DNA, 1056 bp, Homo sapiens
cggcgcgggaagcaacccagagccctcctcccgcctgctctgtgtaggagacagcctgcggagcccactgccggcgcgcagagagcccagcagctcttgagtccaggaagcaagggtgggaggagggacgagccagtggcaatgacccagacccggacgacccccattgctgagccagcggagctgcttggaggcagaggttgcagtgagctgagattttgcgactacactccaacctgggcaacagagcgggactccattccaaaaaaataagaaaaacagaaaaataataattacatctgcaaagaccttatttccaggctcaagcagagtcttcctcctggtgttccagaaggagttcaaggtcctgctccatatgggacagctagattctgagggcaatgttgagatcctcatctccagaaggtgctggtgccagaaatatgacaaaaggctgattgacgggccaggcgcggtggctcacgcctgtattcccagcactttgggaggccaaggcgggtggatcatgaggtcaagagttcgagaccatcctggccaatatggtgaaaccctgtctctactaaaaatacaaaaaattagctgggcgtggtggcacgcatctgtagtcccaactacttgggaggctgaggcaggagaattgcttgaaccgggaggaggaggttgcagtgagcagagatcgtgccactgctctccagcctgggcggcagactgagtgagattctgtctaaaaaaaaagaggcctggtgtggcggctcaggcctgtaatcctagcactttgggaggctgaggcaggtggattgcctgaggtcaagaggtcaggaccagcctgtccaacatggtgaaaccccatctctactaaaaatgcaaaaattagccagatgtggtggcacatgcttgtaatcccagctacttcggaggctgaggcaggagaatcgcttgaacccagagtgtggaagttgcagtgaaccaagatcatgccacttcactccaacctgggcgaaagagcaaaacttcatctcaaaaaaagaaaagtat

SEQ ID NO: 16027 - protein, 43 aa, Homo sapiens
MTQTRTTPIAEPAELLGGRGCSELRFCDYTPTWATERDSIPKK

SEQ ID NO: 16028 - DNA, 898 bp, Homo sapiens
ctgctctgtgtaggagacagcctgcggagcccactgccggcgcgcagagagcccagcagctcttgagtccaggaagcaagggtgggaggagggacgagccagtggcaatgacccagacccggacgacccccattgctgagccagcggagctgcttgggtccacgaggctggtgtcagacctattgggagaccctctgcgttagtgagaaaaacggcaagaaatgggagcacgcggaaacctccaagactagagccaccagatgccaccgacagcacgcagctggaccagcacgggggagggccttcgtgggtcgagagctcgctcgggagatagttggtgcttttctttcaggagaagaatccctggcggagtctgaccgttctctggcgcacagccccgggggtgggcacagcagccgcccctgctgaagggactgacgcctccgacgaccagcagccaagttaaacgcactgttccgtgagcagctttgttggagacagcgcggttcacattctcttccaacggagccgctgactgcggagctgggaggggacgtgacagaacccagccatccaacgtccccccacccctccccagctgggacctccggctgcttccgggctgcgctgggtggcgtcaaggagccgcccctctgggccgcgtccctccctcacgccctgcacactggccctgtgtggccggcggggcgcctaaaagggcggaaggatgcaggggcggagggggctcgggattgcacgcctagctcagaccccccagccaggacccctcgcgctgttggacacgccagcctcccgaccctgcggctcctacgggaggtgacaaggaccctgccaacctggcctgaatggcccagtttgatacagatcaggttttcaa

SEQ ID NO: 16029 - protein, 31 aa, Homo sapiens
MTQTRTTPIAEPAELLGSTRLVSDLLGDPLR

SEQ ID NO: 16030 - DNA, 471 bp, Homo sapiens
aggagacagcctgcggagcccactgccggcgcgcagagagcccagcagctcttgagtccaggaagcaagggtgggaggagggacgagccagtggcaatgacccagacccggacgacccccattgctgagccagcggagctgcttggaggcagaggttgcagtgagctgagattttgcgactacactccaacctgggcaacagagcgggactccattccaaaaaaataagaaaaacagaaaaataataattacatctgcaaagaccttatttccagagacagagttttgctgtgttgccaggctgatcaactcctgagcttatgcaatccactcacctcggcctcccaaagtgccaggattacaggcgtgagccaccttgcccggccaagatgagcaggcaagaagaatctgttggatgattacaacattgctggattgatagcagcctcacctgccaggctcaaactccag

SEQ ID NO: 16031 - protein, 43 aa, Homo sapiens; identical to SEQ ID NO: 16027

SEQ ID NO: 16032 - DNA, 3358 bp, Homo sapiens
gtccggaattgatgggttcttggtctcactgacttcgagaatgaagcgcggaccctcacggtgagtgttacagctcttaaggtggcacatctggagtttgttccttcttatgtttggatgtgttcggagtttcttccttctggtgggttcgtagtctccctggctcaggactgaagctgcagaccttcacggtgagtgtgttacagctcttaaggcggcgcatctggagtttttcgttcctcccagtgggctcgtggtctcgctggcttcaggagtgaagctgcagactttcgcggtgagtgttacagctcataaaagcagtgtggccccaaagagtaagcagcagcaagatttattgcaaagagcaaagaacaaagcttccacggtgtggaaggggaccccaacgggttgccgctgctggctccggaagcctgcttttattctcttatctggccccacccacgtcctgctgattggtagggccaagtggtctgttttggacagggcgctgaatggtgcgtttacaatccctgagctagacataaaggttctccgggtccccactagattaaccagatacagagtgtggatacaaaggttctccaaggccccaccagagcagctagatacagagtgttgactggtgcactcacaaaccctgagctagacacagggtgctgattggtgtatttacaatccctgagctagatataaagactctccacgtccccactagactcaggagcccagctggcttcgcctagtggatcctgcaccagggctgcaggtggaggtgcctgccagtcccgcgccctgcggtcgcactcctcagcccttgggtagtcgatgggactgggcgccatggagcagggggtggtgctcgtcggggagctcaggcagcacaggagcccgtggagtgggtgggcggctcaggcatggcgggctgcagttcccgagcccttgccccgtgggaaggcagctaaggctcggtgagaaatcgagcccagcgccggtggactggcactgctgggggacccagtacaccctccgcagccgctggcccgggtgctaagcccctcattgcccggggccagcagggccggccggctgctccgagtatggggccaccaagcccatgcccacccggaactccagctggcctgcaagcaccgcgcacagccccggttcccgctcgcgcctctccctccacacctccctgcaagctgagggagccggctctggccttggccagcccagaaaggggctcccacagtgcagcggtgggccgaagggctcctcaagtgccgccaaagtgggagcccaggcagaggaggcgcggacagcgagcgagggctgtgaggactgccagcacgctgtcacctctcagtcaggcgggtctcaaactcccaacctcacgtgatctgcccgcctgggcctcccaaagtgctgggattacaggcatgagtcactgtgcccagcctgaatctttttatgcttattgtttgtggattttgtttcattcttacgaatgccctccttattccatgactataaaatatttgctaatggtttcctgtggtatggtttgagttttcttttttacatttaaatgtttgatgttcctgaggtgtgattcgatttaggttgttaggtatagttcaaatgaatttttattatttttattattttacctatttaagtctaattttactgtttgttgttgttgttgttgttggagacagagcctcactctgccacccaggctggagtgcagtggtgtgatcatagctcactgcagcctcaaattcctggactccagttatcttcccacctcagtctcctgagcagctgggactacaggcatggaccactatgcctggccaattttttaattgtttttatttttgtggagacaaggtctcaccatcttgcccaggctgatctcaagctccttggctcaagtgatcctccctccttggcctcccaaagtgctgggattacaggtgtgacctattgcacctggcctcaaatgggtttttaataggttataacctgtttattccaatggtaattcaatccttgattgagtaatccgccttttccacagtaatctgaattgtaccctttattaaatattaaatttctatgcatatatgtgggtgtatttttggttttctgttctatttcattgattggtcttttcatgcattaataaaactgcagccttttatttattgaagtattgtactatttagtacgcagataggactaagcctttttcatgcctgttttttgtagagtttgtagtttaggaatcattttaaaatttttacatggtttaacccaggaggcagaggttgcagtgagctgagattttgcgactacactccaacctgggcaacagagcgggactccattccaaaaaaataagaaaaacagaaaaataataattacatctgcaaagaccttatttccagcaggcaagaagaatctgttggatgattacaacattgctggattgatagcagcctcacctgccaggctcaaactccagatccaaagtccacaaatatatcataaatctgaagaggaactgggagaagcttctgctggcagctcatgccattgttgccattgaaaaccctgctgatgtgtcatatcctgcaggaatactagctagtgggctgtgctgaagtttgctgctgctgctggagccacatgtattgctggtcacttcacttctggaacctttgctaaccagatccaatcatcttctgccacccacatcttctggtggttactgattctagggctaactatcagcctctctcaggggcttcttatggtaacctacctacctaccactgctgtatgtaacagattctcctctgagctatgtggatattgtcatcccatgcaacaacaaggaagctcaatcactgagtctaatgtagtggatgctggcccaggaagctctgtgcatgtgttgcaccatctcccatgatcatgcctgatctctacttctatagagatcctgaagagattgaaaaggaagagtaggctgcagctgaaaaaggaggaatttcaaagtgaatggactgctgtagtgcaagtttactgctactcaatctgaggttgcagactggtttaaagacatgcaggtgccctctgtgcctattcagcagttccctactgaagattggagcacttagcctaccatgaatgactggtctgcaacttccactgctcagaccactgaatgggtaagaataaccactgagtggccttaagctgttcttccacaagctcttaaacaagatggaaataacgctgatggaaataaacaacagtttccaag

SEQ ID NO: 16033 - protein, 156 aa, Homo sapiens
MGPPSPCPPGTPAGLQAPRTAPVPARASPSTPPCKLREPALALASPERGSHSAAVGRRAPQVPPKWEPRQRRRGQRARAVRTASTLSPLSQAGLKLPTSRDLPAWASQSAGITGMSHCAQPESFYAYCLWILFHSYECPPYSMTIKYLLMVSCGMV

SEQ ID NO: 16034 - DNA, 2069 bp, Homo sapiens
acagtgcctcgggctttcctggaggcgggcggcgggatgctgctccgttctccgggtcctctcctccggttcttgtcgtttggtcacgccctcagttcagtcggttattggaaaacgatcaaggcccaaagatggtttacgtggcgttgtggatgttatcaccgttgtttggtgaccgagcctggagcttgagccctgggacgtcttgccagccgcatgtggtcccgtgcccacttctcgcggtggcgcgttaatccacctagactgtgcattggtccagtctgggttgaccccgacccgaagtggccctttccttcgcgtcctgaacttcgcttctccgtcggtgtctggtctcttcccgccggcgggctctgcggtggcgggaggagctgtactactcgtgccttagcgcacccttactttcccaggccagaaacgcgaaatgctgtcggccttccagaggctgttccgagtcttatttgtgattgaaacagtctcagaatacggagtcctgatcttcatttatggatggccctttctccagacccttgcgatgctcctgatcgggacagtgtctttccacctttggatccgcagaaatcgagagagaaactcaaggagcggaaagactagatgccgatccaaaaggtgaccagccaccaagtaaagcactgatggtttcagaatgtgcctaaacctgcaccagtgaggcaagtatgcaaaaggagtccctttccgggatggacacacttcccatagagccgtgtcaccccgcacagggttgcaaccaggctgggtgccactgcctgcaaacagactgggatctgtttttgtttttttgttgttttgtttttaagacagagtttcgctcttgttgcccaggctggagtgcagtggtgcgatcttggctgaccacaaccttcacctcctgggttcaagtgattctcctgcctcagcctcccgagtagctgggattataggtatgcgccaccatgcccagctttttgtatttttagtagggacggggtttctccatgttggtcaggctggtctcaaattcccaacctcaggtgatctgcccgcctgggcctcccaaagtgttgggattacaggcatgagccactgcacccggcctcagactgggatctgaaattagagagaatcccttgtggactggggacaggacaagactgctctagattggcccatggtgccaggttagttccttctgtaagctccacctcctccaggggcacccgctaattggctccctcagatcctggctagccagtacaaggcctcagcagtgcacagatcccatctccagccagtccaggtggcgctcgcatggtagggtgcatgaacctgtgttggagtacaggccttctttgctccagttgtttcccaataataaatgttataaaattatcaaaggcactgtattagtctgttatgctgctacacgagactgggtaccttacaaagaaaagaggtttaattgactcacagttccacattgctgcggagacctcaggaaacttacaatcatggcggaaggcaccttttcacaaggtggtaggagaatgaatgagcgccagtaggggaaatgccagacgcttataaaaccatcagatgtcgtgagagtcactcatcacgagaacagcatgggggaaactgcccccatgatccgattacttccacctggtcttgccctttacatgtggggattattacaattcaaggtgagatctgggtggggacacagagccaaaccatataaggcacactgctcaccaacattaggtagagttcatacatttctttctctcagcaatggacaatggatacattagaatgaggatgattgctgcaatgctaaccagctaataaatagaagtggactgggatgagagtccaggcaattgcctaatgagccccgctatacatatttgcaaaaatgtagaatgatgccattcttttttgttttggcaaatagttatttttcattaaaaatgtaatgttatgttaatattggataaaaattgatttaataaaaatgttataacatg

SEQ ID NO: 16035 - protein, 69 aa, Homo sapiens
MLSAFQRLFRVLFVIETVSEYGVLIFIYGWPFLQTLAMLLIGTVSFHLWIRRNRERNSRSGKTRCRSKR

SEQ ID NO: 16036 - DNA, 375 bp, Homo sapiens
cttggaccgcagggagggcaaccaaatggcagaggcggtaacggagagcatccctgaacggccagaaacgcgaaatgctgtcggccttccagaggctgttccgagtcttatttgtgattgaaacagtctcagaatacggagtcctgatcttcatttatggatggccctttctccagacccttgcgatgctcctgatcgggacagtgtctttccacctttggatccgcagaaatcgagagagaaactcaaggagcggaaagactagatgccgatccaaaaggtgaccagccaccaagtaaagcactgatggtttcagaatgtgcctaaacctgcaccagtgaggcaagtatgcaaaaggagtccctttccgggatg

SEQ ID NO: 16037 - protein, 69 aa, Homo sapiens; identical to SEQ ID NO: 16035

SEQ ID NO: 16038 - DNA, 664 bp, Homo sapiens; identical to SEQ ID NO: 1835

SEQ ID NO: 16039 - protein, 128 aa, Homo sapiens; identical to SEQ ID NO: 1836

SEQ ID NO: 16040 - DNA, 519 bp, Homo sapiens
ctctccatcccccactgcccggtgccagcgctcggcttcggtggattctcccgggtctgggctcacgtctcctctgcgcgccttgtgctcccctatcccgcagatacgcaggcttctggagaccctgggtggacgccggaggcaagaaagaagaggagacgccgaaccacgccgcggaggcgatgcccgatggccctggaatgaccgcagcctcaggaaagctttaccaattcaggcacccagtcagactattttggccaaaatcaaaatgttatgattacttatatcaagaagcagaagctcttctgaaaaattttccaattcaagccacaatttcattttatgaagattctgatagcgaagatgaaattgaggatctgacctgtgaaaattaatctgattagctacttttgattatatccaaagcttgtggggtttaaatttagtgtacaaatgtatcataattattttaaactaatttatttgtatataaattattaataaaatgaaatattttgt

SEQ ID NO: 16041 - protein, 70 aa, Homo sapiens
MPDGPGMTAASGKLYQFRHPVRLFWPKSKCYDYLYQEAEALLKNFPIQATISFYEDSDSEDEIEDLTCEN

SEQ ID NO: 16042 - DNA, 2242 bp, Homo sapiens
gcctcacccctggcgaccccggaagtgggtcgggggcttggcctctgcccggccacagagccggagctggaggtgctgtcccgtctggcggcgatccccgggcagggcccggggccggggtttgaagatgctgaacgtcccttcccagtctttcccggcccccaggtcgcagcagcgtgtcgcctccggggggcgtagcaaggtacctttaaaacagggcagaagccttatggattggattcgactgaccaaaagtggaaaggatctaacgggattaaaaggcaggttaattgaagtaactgaagaagaacttaagaaacacaacaaaaaagatgattgttggatatgcataagaggtttcgtttataatgtcagcccttatatggagtatcatcctggtggagaagatgaactaatgagagcagcaggatcagatggtactgaactttttgatcaggttcatcgttgggtcaattatgaatccatgctgaaagaatgcctggttggcagaatggccattaaacctgctgttctgaaagactatcgtgaggaggaaaagaaagtcttaaatggcatgcttcccaagagccaagtgacagatacacttgccaaagaaggtcctagttatccaagctatgattggttccaaacagactctttagtcaccattgccatatatactaaacagaaggatatcaatttagactcaataatagttgatcatcagaatgattcctttagagcagaaacaattattaaggattgtttatatcttatacatattgggctaagccatgaggttcaggaagatttttctgtgcgggttgttgagagtgtgggaaaaatagagattgttctacaaaaaaaagagaatacttcttgggactttcttggccatcccctgaagaatcataattcacttattccaaggaaagatacaggtttgtactacagaaagtgccagttaatttccaaggaagatgttactcatgatacgaggcttttctgtttgatgctgccaccaagcactcatcttcaagtgcccattgggcaacatgtttacctcaagctacctattacaggtacagaaatagtaaagccatatacacctgtatctggttccttactctcagagttcaaggaaccagttcttcccaacaataaatacatctactttttgataaaaatctatcccactggactcttcacaccagagcttgatcgtcttcagattggagattttgtttctgtaagcagtcctgagggcaattttaaaatatccaagttccaagaattagaagatctctttttgttggcagctggaacaggcttcacaccaatggttaaaatactgaattatgctttgactgatatacccagtctcaggaaagtgaagctgatgttcttcaataaaacagaagatgatataatttggagaagccaattggagaaattagcatttaaagataaaagactggatgttgaatttgttctctcagcacctatttctgaatggaatggcaaacagggacatatttcaccagctcttctttctgaatttttgaaaagaaatttggacaaatccaaagttctcgtctgcatttgtggaccagtgccatttacagaacaaggagtaaggttgctgcatgatctcaacttttccaaaaatgagatccatagttttacagcataatgaagagctgtcattgtcctttattcaactagtttatctaaatttgtgattgcttagggttttttaagagaacatttttgtacataacaaaaggttaactagaatccagccttcagtttcttaaatgaaatcaaatgttccttcagtacaggtaacttcttggctttcttttgtaccacaacttattttactactgatatttgacctggaaagttaatcatggcaacaaatacatacaggattctttgttatgaatcacaaatttccttgccatttaaattatatcactgttctacaataagcacttgtgttttatgacatgataaagtaaatgatcacttcgatcatgtttctatgctgtaaaatgtcttattagcaatacagattaaattttaccttgcactgttaactcaggaaatgatcatttatgtccttgttattaatgttaaaacatagaatgttataacttattaagtgatccaaacatttttttgtgtgtgtatggcattgatgcagaatagaataaaattatacttaagttctttttaa

SEQ ID NO: 16043 - protein, 521 aa, Homo sapiens; identical to SEQ ID NO: 1838

SEQ ID NO: 16044 - DNA, 748 bp, Homo sapiens
ggaagtgggtcgggggcttggcctctgcccggccacagagccggagctggaggtgctgtcccgtctggcggcgatccccgggcagggcccggggccggggtttgaagatgctgaacgtcccttcccagtctttcccggcccccaggtcgcagcagcgtgtcgcctccggggggcgtagcaaggtacctttaaaacagggcagaagccttatggattggattcgactgaccaaaagtggaaaggatctaacgggattaaaaggcaggttaattgaagtaactgaagaagaacttaagaaacacaacaaaaaagatgattgttggatatgcataagaggtttcgtttataatgtcagcccttatatggagtatcatcctggtggagaagatgaactaatgagagcagcaggatcagatggtactgaactttttgatcaggttcatcgttgggtcaattatgaatccatgctgaaagaatgcctggttggcagaatggccattaaacctgctgttctgaaaggcaaactctggcacctgtagagctgaggatggagatagacaccaggacctatagtgggctgagacattactttcaaagatttcttttactgtcacagcactgtgagcaaggacaagacatctattgaatgggctgcctgccagttggaagttcaacttttgtaaagtcagtcaaagttctttcttctagaagcctcagtttcctcattggtaaaatggagacaatttag

SEQ ID NO: 16045 - protein, 143 aa, Homo sapiens
MLNVPSQSFPAPRSQQRVASGGRSKVPLKQGRSLMDWIRLTKSGKDLTGLKGRLIEVTEEELKKHNKKDDCWICIRGFVYNVSPYMEYHPGGEDELMRAAGSDGTELFDQVHRWVNYESMLKECLVGRMAIKPAVLKGKLWHL

SEQ ID NO: 16046 - DNA, 657 bp, Homo sapiens
aataatagtagtccttgaagacaaaaatcaaaggaaaagaatactaaaaactctacttaatgaaaaatcatcctgaaattaacaagaaaaattgaaattaatgttgaaagagcaccagagagtatacatccaaaaagaccaacattaatataaattttagtaaaattactgaaccatgaaaagtaaatgcctttagttatctaaacaaaaactaattacttaaaagggaaagaaaattagatcatcaccagacttttcaacagcattgccttatgctttaagaaagtgttgtaccacatttgatatcctgatggaaaaaaatgtgagccaaggattttacacccaacaaaacttaatggtgaatataaaggcataaaccaatatagaatgcaaaaacttgggaaatattgttttccaaagcctttcctaagtaatctacaaaagaacaagctttaaacaaccagaaagactagaaagtcatcaataaaaggattggagaacattaaacttgtagaactaaaacaaaatgagagttaaaaaagaaagagtataggtatatgctaaactatttcagtagttttggcagtggttgtattagtattgttattctgaagatgtgaaataatgcaaacgcataataaaaaatgtcataagatc

SEQ ID NO: 16047 - DNA, 700 bp, Homo sapiens
agactgcccttgtcatccacactgcagcaaaacttcaggaccttgaaccttgggctaataatttcacaactgagacggcttcatctacacccttggaactatacccattagaacccttaaggattttgaagccagccttatacatggataagcttataccttgatagatggaagatgaggcgcaatgaaggtgagaaaacaaaggtttggcaaggatgagtacttgctgcaggtccaacagttatgactggattggaacttcatcccagcttggcctaacttcagaggagtttcattcaacttatatagattcgatatgaaatgggaatgcaagaaggcatagatatttctggttgattcaatttcctgataattcccaattacaataaaagaaatggtttcataaggactcacatgtttgaaaaagtctttggatataaaatataaacctgagattaaatttgataatagaaaatttttgatgaagcataaattaaaaaatatttttctggcatttttttcctaaaaaaaagaagatcctgttccaaaaccaagccttcgtaaagaggtcctattcctatgtattttatgattggagatgtggaagtcactgtgatgtggtcaaagtagaaacatttgtgggttttttcttcttgaggaaataaaccaaaatgctaaaataaatgagtagcaaattaag

SEQ ID NO: 16048 - protein, 34 aa, Homo sapiens
MSTCCRSNSYDWIGTSSQLGLTSEEFHSTYIDSI

SEQ ID NO: 16049 - DNA, 836 bp, Homo sapiens
tgatagatggaagatgaggcgcaatgaagctctgcaatgaattgaatatgtgagtgcctatgctgtgaagatgtagggatgctccctgtcctcaagatgctcacatccagaagaatgcattttaaaaggtctagatatggtgctagaaataaagctacaaaaataacacagatcaagacccaagctctctttacaagaaacttacaccaaagtaggggagacagatacgtaaataaccatcttgatgcagtgtaagaggggcaatgacagcagtaaccccagaatgttaagggaaacatgcaagggtgactacctggcctggaaaggtgagaaaacaaaggtttggcaaggatgagtacttgctgcaggtccaacagttatgactggattggaacttcatcccagcttggcctaacttcagaggagtttcattcaacttatatagattcgatatgaaatgggaatgcaagaaggcatagatatttctggttgattcaatttcctgataattcccaattacaataaaagaaatggtttcataaggactcacatgtttgaaaaagtctttggatataaaatataaacctgagattaaatttgataatagaaaatttttgatgaagcataaattaaaaaatatttttctggcatttttttcctaaaaaaaagaagatcctgttccaaaaccaagccttcgtaaagaggtcctattcctatgtattttatgattggagatgtggaagtcactgtgatgtggtcaaagtagaaacatttgtgggttttttcttcttgaggaaataaaccaaaatgctaaaataaatgagtagcaaattaag

SEQ ID NO: 16050 - protein, 58 aa, Homo sapiens
MLPVLKMLTSRRMHFKRSRYGARNKATKITQIKTQALFTRNLHQSRGDRYVNNHLDAV

SEQ ID NO: 16051 - DNA, 658 bp, Homo sapiens
catgagttattgatttaaaccttgcatctggtatagaattaaacatctcctgcctgatgagacaactgaaaggcgggcacggggattctctgccttcttaaaggggagcgtgtgctgtagacctgctgcttaatcgtgtccttcccggagataaagcagttgctcacctgaaaagccttggaagataaaaaaaccaaggcacagaacaagttagtggcagaacagagattccaatgaagacctctttgactctgatcctgtgttctcactgcctcttgtactgcctctccgaaactcaggatatgttgtccactccagaagtatgaggtgggactgcaggaatatgagctcctctccacatgcagggaccccaggtgcttatccagcctgttcgagatcatagccaccaagggggaactctctggacaacctggcagaagttcccctcactcagctgaaacctgcctccacctgaggccacagagcaagtctccctgggcttctgggtcttcagacatttggagacagttattatctctccctgccctcagatttaccatgtccaggctaaatggatgatttctcacttataaatgtaaggcatttaataattacatttcttgataataaaataaggaaaaatttagggtttttaaac

SEQ ID NO: 16052 - protein, 32 aa, Homo sapiens
MQGPQVLIQPVRDHSHQGGTLWTTWQKFPSLS

SEQ ID NO: 16053 - DNA, 2214 bp, Homo sapiens
tccggcgccccgcgccgcctccgctgcgggtcgggagcgcgcgtctccgccgcacctcggatctaggagctactcgcccggccctgggcggtgggaggcggcggcggcggcggcgctcgcgcacctcggaggagccaggagccggaaccagggccgagcccgcgggccggggctagccagccggtcggagatgtccgcccagaggttaatttctaacagaacctcccagcaatcggcatctaattctgattacacctgggaatatgaatattatgagattggaccagtttcctttgaaggactgaaggctcataaatattccattgtgattggattttgggttggtcttgcagtcttcgtgatttttatgttttttgtgctgaccttgctgaccaagacaggagccccacaccaagacaatgcagagtcctcagagaagagattcagaatgaacagctttgtgtcagactttggaagacctctggagccagataaagtattttctcgccaaggcaacgaggagtccaggtctctctttcactgctacatcaatgaggtggaacgcttggacagagccaaagcttgtcaccagaccacagcccttgacagtgacgtccaactccaggaagccatcagaagcagtgggcagccagaggaggagctgaacaggctcatgaagtttgacatccccaactttgtgaacacagaccagaactactttggggaggatgatcttctgatttctgaaccacctattgttctggaaactaagccactttcccagacctcacacaaagacctggattgagaaacatgctctgtaaagggtcttcctgaagatgtggattctatctttatgtagcaagaaatctacatccaccaaaattgtgtgtgtttgggggagagagagacatagagatagagacagagaggcagagaagagacccctttagaagagagctgagctgattaagctgagtggttttttgttttgttttgtttttgctttttaatacatttggagctttgggagtattaaagtatttacaccaagcttgtccaacccgtggcatgtgtcccaggacagctttgaatgtggcccaatacaaattttaaactttattaaaacatgagttttgtttttttttttgctattttttttaaagctcgtcagctatcgttagtgttagtgtactttatgtgtggcccaagacaactcttcttccagtgtggcacagggaagctaaaagattggacacctctgatttatactagctcgttttgcttgttgaaaaatttggccaaatacctattgtcagcattcttgggtgaggattagcctaccatgttctaatctggccctgccactactatgctctacctttggtgagttgctttacctctctgggctgccccatttttaactgtaggttgacaggtctagagtgatccatcccacctctaatattttgtgaatttatgactttgccttcagatgaggctgagctatacataaaacagtataaactagggtactgcctcgtatctcttgtaggctctctcaaatctctgtaccttccacttaaccctaattgagccaagctttagtcaggggatctggttgtctaccagaatgtcaggagactcatcttacacagtcatggtggccaatgtttctggtgggttgtgctgaaacagctcttctgagaacttccaaccacccatgctctaacctggagacagccatcccctgcctcagaataagtaccaattcgtagtacatgtatggtactcttgtccccaagaaatgttaggaagcttgtcagctgaatgagaggaggtgccttctgggtatctctgtgttggtgtatctgtgccattggctacagaacaagaaaaatactatttgccatgctattaccttggcagatgtgtaggtgatagtcatctggctttgagctgagatggtcagtgggttgtaaattccccactagcagatattcagggtggcctgagttatgtaaacaagtgagcaacacagctttaatttcatggaggaatcaaagctgcacactggtattaaaacaacttgattttgcgcacacagttgcatgcatggcaagctgttaacctctgggtggcattttcattatgaatttgttcaccacctgtcttgcttaagctacaaaataaatgcatttgactgcacagaaa

SEQ ID NO: 16054 - protein, 205 aa, Homo sapiens
MSAQRLISNRTSQQSASNSDYTWEYEYYEIGPVSFEGLKAHKYSIVIGFWVGLAVFVIFMFFVLTLLTKTGAPHQDNAESSEKRFRMNSFVSDFGRPLEPDKVFSRQGNEESRSLFHCYINEVERLDRAKACHQTTALDSDVQLQEAIRSSGQPEEELNRLMKFDIPNFVNTDQNYFGEDDLLISEPPIVLETKPLSQTSHKDLD

SEQ ID NO: 16055 - DNA, 579 bp, Homo sapiens
ggcggcggcgctcgcgcacctcggaggagccaggagccggaaccagggccgagcccgcgggccggggctagccagccggtcggagatgtccgcccagaggttaatttctaacagaacctcccagcaatcggcatctaattctgattacacctgggaatatgaatattatgagattggaccagtttcctttgaaggactgaaggctcataaatattccattgtgattggattttgggttggtcttgcagtcttcgtgatttttatgttttttgtgctgaccttgctgaccaagacaggagccccacaccaagatggcctgtcccaacaggaactcacatgggttgagaaaaaaaatttttccttcctgacagtttttggcaatgcagatgggactttctgggataccccatccactctggaacctgcagatgaaatcctagcaaaactggcagaagctggtaaaagaaagattcatggaaagcactctgacaaatacaggcttctgataacttcaagatcataccatttggccagaaatgcctcttattagatcaccatatagaggcctaactttgatga

SEQ ID NO: 16056 - protein, 154 aa, Homo sapiens
MSAQRLISNRTSQQSASNSDYTWEYEYYEIGPVSFEGLKAHKYSIVIGFWVGLAVFVIFMFFVLTLLTKTGAPHQDGLSQQELTWVEKKNFSFLTVFGNADGTFWDTPSTLEPADEILAKLAEAGKRKIHGKHSDKYRLLITSRSYHLARNASY

SEQ ID NO: 16057 - DNA, 1260 bp, Homo sapiens
cttagaatgtgaggtcaactcagagttaggaggaacctttactttctggatatagagaatgaaagctattaattactctaacaatccaagattacaaaactcttagaagaattgagagaagccaaagaaaaccatacaccagagatgaaacatttcgtgggcttagaaaagaaaattaagcagatggaaatgagacatgcacaaagagaacaggaacttcaacagataatacagcaaacacaccaagtagtagaaactgagcaaaacaaagaagttgaaaaatggaaaagactggcacagttaaagaatcgtgagctggagaagttccgcacagaactagactcaatattagatgttctccgagagctgcaccggcaaggagtggttgtgccagttgcttttgcagatgaaatgaatgcaccagagtattaatagaaattcagatttcataatgaccttattaaaaggcctgaagatggatgggattgtgccactgtcaggacagcttatgaaaaacaagtgttccaatatgtttccagaaagcaaacaaccaaagcaacatttcaaaataaattgcctttaaccaataagaaaaaaaacatataatggtgtattttactaaaaatcattaaccagtctcattttaagtgatttatggacagtttcctttatagcagagaagggctcacttgtatgctagaaatagaaagaaaagaaaattgaacatactccgccacatttttattgataatgtgaggtttttaaaatttttattttagatccagggggtacatgtgcttgttgtaacatgggtgtattgaataatggtgggaattgggcttctagtgtacccatcatccaaatattaaacactgtacccaacaggtaatttttcaacgcttactgccgctcacactctttcccctattggagtccccagtgtctgttatctccatctttatgtctctgtgtacccattgtttagctcctacttttaagtgagaatatatgcaatattttattttttatgtctgatttagttcacataggataatggcctccagctctatccatgttgctgcaaatgacatgatttcattcttttttatagttgcataatactccatttatatatctctctctatatatatctcacgttttctttatccagtcaattgttggtagatacttaggttggttccatgaatttgctattgtaaatattgctgcaataaacatacatgtacagatatctttttt

SEQ ID NO: 16058 - protein, 95 aa, Homo sapiens
MKHFVGLEKKIKQMEMRHAQREQELQQIIQQTHQVVETEQNKEVEKWKRLAQLKNRELEKFRTELDSILDVLRELHRQGVVVPVAFADEMNAPEY

SEQ ID NO: 16059 - DNA, 5217 bp, Homo sapiens
gacaactggtggacccgcacagaccttccgggaaagcgcggaattcagaggcagagtgtttccaatgtttgaggtactttagaatgtttactttgggaggtcaaaattgttgactatggctaactgttcccaagaagagctagatgaagagtttgaacagtttatgaaagagctttcagatgattcttttgaaaattcagacaaaacagctagacaatctaaaaaagagatgaagaagaaagatacagtgccttggtggataactgaagatgattttaaagatgatgttatctactgaactccgggttattcctcctcattcctcaaagattttagctgctgtttcactgacttcttggaacaaatgtgagctatttgaaaacaaagaagacttctcagcctgttatggaaatagaagaggagtctgctgaaaagattcaatttcttaagagcagtggaacctctctcttaagtactgatagcttagaaacaaatgaactagtagtttctgagctcaaccatagtagtctcggagtgggattggacacattagaagaacaagaggagaaagaacaattttttgccaggcttgagaaaggcttgacatcttccattgattattcgagattaaataaggaattggattctaatgactctacacattttaaagctttacatagtaatcaagccaacgcagaactaactgatgacgaacatgagaatgaatcgaaacatgaagaactggcagaaaattacagtgatgattttgaagatgagtatgttggtgcaccgttgactactaaagatgaagagatgccttccaaagagaattccaaatcagaaaaaataagtgtgcccaaacaggaagaagaaaaaactggcatgcttgctaatgttgtgctgcttgattcattagactctgttgcagaggtcaatcttgatgaacaagataaaataacacctaagccaaggtgcctaccagaaatgactgagaatgaaatgacaggaacaggtgtttcttatggacaaagcagtagtgacgttgaagccctacatcaagcttattgtcatatagcccattcattgggagatgaagacaaacaaaaaattgagagtaacacagtggaagatatcaagagctcagtgaaaggtcatcctcaagaaaatgaagagaattcaaaaaacatctctactatggaatctgatctgcccacagtagaggagctgatgaaacctatcagaatagattcctttgggatcagtggttttgatttacaacctgtcagctctgagaaagtggccgaaagaaaagaaactgaattttttagctctttacccctgaagatgaacccaaatattttgtctcaagactcacaacatgtgaaccttttttttgacaaaaatgatgagaatgtgattttacaaaagaccacaaatgagagtatggaaaacagctgtccacaagtaactgaagtaactgccacagaagaacatgttgataaaatgtaccttaatattttgaggaaaaaaataactgttaattcttcatcattatctcaggatgacaaaattaataaaacttacagatctcaacttagttctgaagaagaaggggctgtaatgggtaaacaggtaccatacaagaaggccagaagtgcacctcctttacttaaaaggaaaccccagagtggattatatgcgtcagttaggagctcaggctatggcaaacccagttcaccactcaagatgttttctactcttgaaaagaaaacttcagaggacattataaaaagcaaaaacttgagatcgatttctacctccaatcaacctaggaaaaaagaaatcttatctggaacaaaactcatcaagcctgcagctttggataaaccagctcacaaaactgaaagttgcctgtctactcgtaagaagtctgaaaatcccacagaaactgattcctgtattcagtttcagactgattccttaggatactgtggtgagaacaaggagaagaaattacttatgtttaaaagagttcaggaagcagaggataaatggaggggtgcgcaagccctaattgagcaaattaaagccacattctcagaaaaggagaaagaactagaaaataagttggaagaactaaagaaacaacaggaaaaagaactcttcaaattgaatcaagataattatattcttcaagccaagttaagcagctttgaagaaacaaacaaaaaacaaaggtggttacattttggagaagcagctgatcctgtcactggagaaaagttgaagcaaatccaaaaagaaatacaagaacaagagacacttcttcaaggatatcaacaggaaaatgaacgattatataatcaagtaaaagatctccaagaacaaaacaagaaaaatgaggagcgaatgtttaaggaaaaccaaagtttattcagtgaggtagcttccttaaaagaacagatgcacaaaagtcgttttctgtctcaagtagttgaagattcagagcccacaagaaatcagaattttacagatctgttagcagaactacggatggcacagaaagaaaaagacagtttattggaagacatcaaaagactgaaacaagacaaacaagctcttgaagtagacttcgaaaaaatgaagaaagagagggaccaagccaaagatcagattgcttatgtcacaggtgagaaattatatgaaataaaaattttagaagaaacacataaacaagaaatcagtcgtctgcaaaaaagattacagtggtatgctgaaaatcaggaacttctggataaagatgcacttcggcttagagaagcaaatgaggaaattgagaagctcaaacttgagattgagaaactgaaagctgaatctgggaatccatctattcggcagaagatacgcttaaaagataaagcagcagatgccaaaaaaattcaggatctggagcgacaagttaaggaaatggaagggattctgaagagaagatatcccaattctttacctgctttaatattggctgcatcagcagctggtgatacagtggataaaaatacagtggaatttatggagaaaaggataaaaaagctagaagctgatctggagggcaaagatgaagatgcaaagaaaagccttcgtaccatggaacaacagtttcagaaaatgaagattcagtatgaacaaagactagagcagcaggagcagctacttgcctgcaaattgaatcaacatgactctcccagaattaaagccctagagaaggaacttgatgacatcaaggaagcccatcagatcactgtaagaaaccttgaagccgaaatagacgttcttaaacatcagaatgctgaattagacgtcaagaaaaatgataaagatgatgaagattttcagtctatagaattccaggtggaacaggctcatgctaaagctaaattagtaagactcaatgaagaactggctgcaaaaaagagagaaatacaagacctctcaaaaactgtggagaggcttcagaaagacagaagaatgatgctatcaaatcagaactcaaagggcagagaggaaatgtctgccaaaagggcaaagaaagatgttttgcactcaagtaaaggaaatgctaactccttccctggaaccctggacagcaagctgtaccaaccacatactttcactgattcccatgtttcagaagttttacaagaaaactacagattaaaaaatgagctagaaggattaatttcagagaagaatgaactgaagatgaaatctgaagcagtgatgaatcaatttgaaaactccatgagaagggtcaaggaagatactgcagcacacattgcatccctcaaagcatctcatcagagagaaatagagaaactcctttgccaaaatgcagtagaaaattcttcttccaaagtagctgaactaaatcgtaaaatagcaactcaagaggtacttataagacatttccaaagtcaagttaatgagctgcagagtaaacaagagtctctcgtagtttctgaagttcgagaagaaattctacagaaagagattacaaaactcttagaagaattgagagaagccaaagaaaaccatacaccagagatgaaacatttcgtgggcttagaaaagaaaattaagcagatggaaatgagacatgcacaaagagaacaggaacttcaacagataatacagcaaacacaccaagtagtagaaactgagcaaaacaaagaagttgaaaaatggaaaagactggcacagttaaagaatcgtgagctggagaagttccgcacagaactagactcaatattagatgttctccgagagctgcaccggcaaggagtggttgtgccagttgcttttgcagatgaaatgaatgcaccagagtattaatagaaattcagatttcataatgaccttattaaaaggcctgaagatggatgggattgtgccactgtcaggacagcttatgaaaaacaagtgttccaatatgtttccagaaagcaaacaaccaaagcaacatttcaaaataaattgcctttaaccaataagaaaaaaaacatataatggtgtattttactaaaaatcattaaccagtctcattttaagtgatttatggacagtttcctttatagcagagaagggctcacttgtatgctagaaatagaaagaaaagaaaattgaacatactccgccacatttttattgataatgtgaggtttttaaaatttttattttagatccagggggtacatgtgcttgttgtaacatgggtgtattgaataatggtgggaattgggcttctagtgtacccatcatccaaatattaaacactgtacccaacaggtaatttttcaacgcttactgccgctcacactctttcccctattggagtccccagtgtctgttatctccatctttatgtctctgtgtacccattgtttagctcctacttttaagtgagaatatatgcaatattttattttttatgtctgatttagttcacataggataatggcctccagctctatccatgttgctgcaaatgacatgatttcattcttttttatagttgcataatactccatttatatatctctctctatatatatctcacgttttctttatccagtcaattgttggtagatacttaggttggttccatgaatttgctattgtaaatattgctgcaataaacatacatgtacagatatctttttt

SEQ ID NO: 16060 - protein, 1327 aa, Homo sapiens
MEIEEESAEKIQFLKSSGTSLLSTDSLETNELVVSELNHSSLGVGLDTLEEQEEKEQFFARLEKGLTSSIDYSRLNKELDSNDSTHFKALHSNQANAELTDDEHENESKHEELAENYSDDFEDEYVGAPLTTKDEEMPSKENSKSEKISVPKQEEEKTGMLANVVLLDSLDSVAEVNLDEQDKITPKPRCLPEMTENEMTGTGVSYGQSSSDVEALHQAYCHIAHSLGDEDKQKIESNTVEDIKSSVKGHPQENEENSKNISTMESDLPTVEELMKPIRIDSFGISGFDLQPVSSEKVAERKETEFFSSLPLKMNPNILSQDSQHVNLFFDKNDENVILQKTTNESMENSCPQVTEVTATEEHVDKMYLNILRKKITVNSSSLSQDDKINKTYRSQLSSEEEGAVMGKQVPYKKARSAPPLLKRKPQSGLYASVRSSGYGKPSSPLKMFSTLEKKTSEDIIKSKNLRSISTSNQPRKKEILSGTKLIKPAALDKPAHKTESCLSTRKKSENPTETDSCIQFQTDSLGYCGENKEKKLLMFKRVQEAEDKWRGAQALIEQIKATFSEKEKELENKLEELKKQQEKELFKLNQDNYILQAKLSSFEETNKKQRWLHFGEAADPVTGEKLKQIQKEIQEQETLLQGYQQENERLYNQVKDLQEQNKKNEERMFKENQSLFSEVASLKEQMHKSRFLSQVVEDSEPTRNQNFTDLLAELRMAQKEKDSLLEDIKRLKQDKQALEVDFEKMKKERDQAKDQIAYVTGEKLYEIKILEETHKQEISRLQKRLQWYAENQELLDKDALRLREANEEIEKLKLEIEKLKAESGNPSIRQKIRLKDKAADAKKIQDLERQVKEMEGILKRRYPNSLPALILAASAAGDTVDKNTVEFMEKRIKKLEADLEGKDEDAKKSLRTMEQQFQKMKIQYEQRLEQQEQLLACKLNQHDSPRIKALEKELDDIKEAHQITVRNLEAEIDVLKHQNAELDVKKNDKDDEDFQSIEFQVEQAHAKAKLVRLNEELAAKKREIQDLSKTVERLQKDRRMMLSNQNSKGREEMSAKRAKKDVLHSSKGNANSFPGTLDSKLYQPHTFTDSHVSEVLQENYRLKNELEGLISEKNELKMKSEAVMNQFENSMRRVKEDTAAHIASLKASHQREIEKLLCQNAVENSSSKVAELNRKIATQEVLIRHFQSQVNELQSKQESLVVSEVREEILQKEITKLLEELREAKENHTPEMKHFVGLEKKIKQMEMRHAQREQELQQIIQQTHQVVETEQNKEVEKWKRLAQLKNRELEKFRTELDSILDVLRELHRQGVVVPVAFADEMNAPEY

SEQ ID NO: 16061 - DNA, 747 bp, Homo sapiens
agtaatcaagccaacgcagaactaactgatgacgaacatgagaatgaatcgaaacatgaagaactggcagaaaattacagtgatgattttgaagatgagtatgttggtgcaccgttgactactaaagatgaagagatgccttccaaagagaattccaaatcagaaaaaataagtgtgcccaaacaggaagaagaaaaaactggcatgcttgctaatgttgtgctgcttgattcattagactctgttgcagaggtcaatcttgatgaacaagataaaataacacctaagccaaggtgcctaccagaaatgactgagaatgaaatgacaggaacaggtgtttcttatggacaaagcagtagtgacgttgaagccctacatcaagcttattgtcatatagcccattcattgggagatgaagacaaacaaaaaattgagagtaacacagtggaagatatcaagagctcagtgaaaggtcatcctcaagaaaatgaagagaattcaaaaaacatctctactatggaatctgatctgcccacagtagaggagctgatgaaacctatcagaatagattcctttgggatcagtggttttgatttacaacctgtcagacatgttttcagcctccttcctatactgtatcctcatgatgtaaatccacatgtggtgatctcctggccttgtttctacatttgtgtgagttgagaaaaaaatgatgcagtgaaccttccactaaaattcattcacttc

SEQ ID NO: 16062 - protein, 188 aa, Homo sapiens
MPSKENSKSEKISVPKQEEEKTGMLANVVLLDSLDSVAEVNLDEQDKITPKPRCLPEMTENEMTGTGVSYGQSSSDVEALHQAYCHIAHSLGDEDKQKIESNTVEDIKSSVKGHPQENEENSKNISTMESDLPTVEELMKPIRIDSFGISGFDLQPVRHVFSLLPILYPHDVNPHVVISWPCFYICVS

SEQ ID NO: 16063 - DNA, 4875 bp, Homo sapiens
ataccttaaatgccgcgagactgaagagcaaacgtcagggattattatgtcgattttccgaggaccagggttcgcagctggcagtagaagaaaaggctggctcctcaggggtcccactggcatttgataccctgaacgaccctcaggattgcccaaattcggtggatcgcccaaattcggtggatcagcaactttcctatactgcatcccgaattttcaaagaacatattttccgttcacccccgctggtcttttactgccatcaatacactgttcttggtgcaaatacttcagcctctttattcaaagtatgttttatgtttttgccaaatatgatctctaattgaaagtttatttttggttttggatgaatctgcggagcttaagttgtgagaagaaagggggaacaagacacaatgaaagaaaagtccaaaaatgctgcgcggactaggagggagaaggaaaacagtgaattttatgaactggctaaattactgcctttgccctcggctatcacctcgcagctggacaaagcatccataatcagactcacgaccagctatctcaaaatgagagtggtgttcccagaagggctcggcgaggcgtggggccactcaagtcggaccagccccctggacaacgttggccgagaactgggctcccatctgctccagaccctggatggcttcatcttcgtggtagccccagatgggaagatcatgtacatctcagagacagcctcagtccacttgggtctttctcaggtagagctgaccggaaacagcatttatgaatacattcacccggcagaccacgacgagatgacggcggtgctcaccgcccatcaaccctaccactctcacttcgtgcaggagtatgagatcgagcgctccttcttcctgaggatgaagtgcgtcttggccaagcgtaacgccggcctcacctgtggcggctacaaggtcatccactgcagcggctacttgaagatccgccagtacagcctggacatgtcccccttcgacggctgctaccaaaacgtgggcctggtggccgtgggccactcgctgcctcccagcgccgtcacggagatcaagctacacagcaatatgtttatgttccgcgccagcctggacatgaagctcatctttctggactccagggtggcggagctgacggggtacgaacctcaggacctgattgagaagactctgtaccaccatgtgcacggctgcgacaccttccacctgcgctgcgcgcaccatttgctgctggtgaagggacaggtgaccaccaagtactacaggttcctggcgaaacacggcggctgggtatgggtgcagagctacgcgaccatcgtgcacaacagtcgctcctccaggccacactgtatcgtcagcgtcaactatgtcctcacagacacagaatacaaagggctgcagctctccctggatcagatctcagcctccaaaccagccttctcctataccagcagctccacccccaccatgactgacaacagaaagggggccaaatcccggctctccagctcaaagtcaaaatccaggacttccccataccctcagtattcgggatttcacacagaaagatcggaatctgatcatgacagccagtggggcggaagtcccttgaccgacacggcctctccgcagcttctggaccccgccgataggcctggctcccagcacgacgcatcgtgcgcctacagacagttttcggaccgcagctctctctgctatggctttgcgcttgaccactcgaggctggtggaagagaggcatttccatacccaggcctgtgaaggaggccgatgtgaggcaggcaggtacttcctgggaacgccgcaggccgggagggagccctggtggggctctcgcgcagccttgcccctgacaaaggcctccccagaaagcagagaagcctatgaaaacagcatgcctcacatcgcttcagtccacaggatccatgggcgaggtcattgggatgaagatagtgtggtcagttctccagaccctgggtcggccagtgaatcaggtgaccgatatcgtactgagcagtatcaaagtagcccacatgaacccagcaaaattgaaactcttataagagccactcagcaaatgattaaagaagaagagaacagattacagctaaggaaagccccctcagaccaactggcttccattaatggggctgggaaaaaacactccctgtgttttgcaaactaccaacagcccccaccaacaggtgaagtctgccatggctctgctcttgccaacacttcaccatgtgaccatatccagcagagagagggaaaaatgttgagcccccatgaaaatgactatgacaacagtcccaccgcactatctcggataagtagtcccaattcggatcgcatttcaaaatccagtttgatcctagctaaagactatctgcattcggatatatctcctcatcagacagcaggagaccaccctactgtctctccaaactgctttggctctcaccggcagtattttgacaagcatgcttacacattaactggatatgccctggagcacttatatgacagcgaaaccattagaaactattccttgggctgtaatggctcacactttgatgtaacttcccatctgaggatgcaaccagacccagcacaaggacacaagggaacatctgttataataaccaacggaagctgatgttttgctgaaatattttgttctttaaggatctctgaaacatatttatagtttaataccccattaccagcatttactatgccacagattgttagagagtataacttaagttactgggtatttgatacgtgttcctataaaatcaaagaaaacatagcactagcattcagggttatacacagaaaagggagctaaattgaatacacaaatttcccctctaattatatgggaaccagaatagataaattttgacttgaaaaatattcatgtagatcaagtgtgcatatatactacatgagaggactgatgaatgacaacattgcattgtgactatccagtgatcctcaaacacacaaactattacttacaaactgcggtatacattttacatatggaaatataggctatgtaatgtaaatacatcaaaaatgggtaattttctttgactctgtcacactaaacttcttaacgaaatttccattcccaaaataactgagaaagagagagatacatcttataaactgacttctttgtggtttcaaatcagccagctcatttggttcaggcataaattagagaaatggttctggatatggtgcaaaaatgagttttcacctggtatccattataaacaatcaggaagaggtaatttttcaccttgcttttcagttagacaaggaccaggattgcactgacatggcgctgagggtttttctaagtaagaacactgagatattgggacacacatcaaaaacctggagtgctcaattggaagtagttctatgaatatggaaaggccagaggcagagtgaaataaaatgctatctcaaagtttaacacaatttaagggctcagcataagtaaacaacatatttggggtttgcttgtaaaaccaactaaataaaaaattcaaaccaattcacccagaaaaaagaccaataggtgcaaaaataaaaggaaaaccagtgaagtgccacatgacagcagtgttaagtgtttgaaaacgtttcaaagcacatatgtgccaatgtgacaacatgtggaaagcctcaggagagagtctaagataaaagcttaggctgatagacaagtagttaagagctaagagcagtactctgaaggaataggcaaaatgtttattttccttattgtttgtaaacaacaaacttggtcttacatctgtgtggtatagtagaaaggccagctgactagatctctggattctaattttggccctacctgtaacttaattttgtgaccacagttgtaccattcaccgtgcctgggctctagtttcctggtttgtaaggcagccccagcgttcatgttctgtgatagagcagaactgaacttattacctaattaactctctgctatgagttgtcaagactgatcattctgttttttctgtacacagaagtttagatgctttgtgacttaagcaggtgtgtgggctcctttaggcaggttacagttaactttctagatttagccaaaatgtagttggtagaaatttatgacagagaagaaaaatagcaagatttatttaatgctctattctctagtaattaaagcaaaatgatataagtgattagagagatttcatagataatatttcctaggagtcccgtgcccaaaactcttgccatatttaaggaagggaatgtactggcagaacttgacttacaattttggaaacagaacatgaaattgaatactcagggattagtagtatattttcatcatttaacacagttatttcacagtccataggtaggtgacaatctgaacgataatatgaaagatgagtactgggttgtttgtatatgaaaggagaggctacataaaattaaataatgttaacatttgtgctgtaaatgcaaaaaagtgcaagtaagtgagaaagttagtggttatatatattttcaaaaaattcaaagtgcagttgacccttgaataacatgggtttgaactgtgcagattcacttatgtgtggttttttttccaatcaaatgcagataaaaaacccagtatttggagaaatgtgaaacctgagtatacagagggcgatgttttgtataagtgagcgccacagggccaacaggcaggacttgagtatgtgagaatttgattatatgggggtaatcctggaaccaac

SEQ ID NO: 16064 - protein, 766 aa, Homo sapiens; identical to SEQ ID NO: 1844

SEQ ID NO: 16065 - DNA, 456 bp, Homo sapiens
gttagcaggtgacacaaccaagattcagacccaggttcttcgtctaccctaacagtattgccaaagagagattccaaagttaccgcctggccactgggtaaacctccgcagcagagagacctactttatgtttcattttcaagctcctatggagcccagcagagagagctgacaaggaggaatactgcgaggggctcacagactaagacaatctgctgggaaattaggagtttgaaacatccaactaagaagcctaaggtttagactgcatcatattctaataacaacaggattataatatcaaatgagactctctgaccctgcaaatctggaaccagctgtatagggactttgaacctcccttttctccaatctgctggtgtttgtcatcctaatatatacctcatattttctttctgaaaataatttttaaaatatacccatcatacatacggc

SEQ ID NO: 16066 - protein, 83 aa, Homo sapiens
HNQDSDPGSSSTLTVLPKRDSKVTAWPLGKPPQQRDLLYVSFSSSYGAQQRELTRRNTARGSQTKTICWEIRSLKHPTKKPKV

SEQ ID NO: 16067 - DNA, 2003 bp, Homo sapiens
tgtttgatatagtactcatcatcttggggtccagagtctagtcttgattggctttgtgtttttgtttgtttgtttgttttcttaagcattcgtttttggtgaataaggttttggaagatttgattaacatggttatgtctcaatttgttcatctaccaatgtggtattaaagttaattgtaggaatagcatgagaatttgctaatttgatgtcaagatccagagttttttattctaactggccatatattctgatagttacaactacgaactagtgtctataatatgctctgagaatcttgaagtaagttaaataattgcatatcaaagacaccaaaccagaatggaagaaaatttaaaacatctcagatagatatgctgaactatgtagatgtatggccttcaagtaagacaacgtagccttaaccacaaccaagtggtataggaagtctagatatttttaatgttgtatctttttttctggtttacagggaaagccagagagctgtgcagttactcctcgatttcccaaatcaaaagacgaaggatggtttttgatattaggagaagtggataagagagaacttattgctttgaaaagagtaggatatattcgaaatcatcatgttgcttccctttctttttatacccctgaaatacctggaaggtatatctacacattatatttcatgagtgactgctaccttggcctggaccagcagtatgacatctatctcaacgttacacaagcgagtctttctgcacaggtcaacaccaaggtctctgattccctgactgacctggcattaaagtaacttgacctgaacaatccatttgaaaggagtggctaagaattctctctgttcagtcatctagacaaatcgaattacttgatgtttgccttgaaagaatcaacttctaacctcaaccatccaggaaattgacagtggctgcagtattgactccagtgacataaagttaaccacagtggccttttaacaaatgttgccttttataatgttatctttatgagtttcttgatatgtaagatgaaaaagcatttagaataatcttttaatttgtgtatatttgggatgatatttaggagctatcaatcaaattttacatctcacaatgtactgtttacatggatattggctgctttttttaaggaaaaccacattgagatgtgacaagtgttaggacttgtcacagatttctaactctgccgcataaactataaatctgtaaggtggtacacagcgtgtcttgttagcaaaatttatactttgatatgatcacatgtagaagtagcttcaagaatttcttgtagtcataaatgtttaataatatatgatgtaaaattatattatggagcctaatgatgataacaaagaaaacaatatactgatcttagaaaatgtagacatggttaactgggaaataaaatatagagtggcacttcaagacaagctgactcaatgttttcttctgcttcctttaaataatatccccttactcatctgttcttcttttctttcccttctacttcaaggctttatttctattatctttctgacatatttatttacagaagtagagaagtataatctaattcatgttgtagcacttacagatcatatagtacaattatttgtctttatgctctccaggaaaaatctgagacagaaaatttttcacccctatggataggttttcacctgtaataaagaaaatttctctatgtccaaacaaattccttcttgaaaaatactttttcaaactaaaaacttgttaaaattcaatgttcatataatatgcattctagtggaatgaaattctacctttgtgaaataatttcagttttcttagccctaaaatgaattattttaaaacattttccaatgtcattgttacaaatactagaatttaagtgtttctgaaattggaatgtattgcttgtatatatccttttccatgcttaaataaaaaagaagaagaaat

SEQ ID NO: 16068 - protein, 113 aa, Homo sapiens [sequence omitted]

SEQ ID NO: 16069 - DNA, 1469 bp, Homo sapiens
tgtttgatatagtactcatcatcttggggtccagagtctagtcttgattggctttgtgtttttgtttgtttgtttgttttcttaagcattcgtttttggtgaataaggttttggaagatttgattaacatggttatgtctcaatttgttcatctaccaatgtggtattaaagttaattgtaggaatagcatgagaatttgctaatttgatgtcaagatccagagttttttattctaactggccatatattctgatagttacaactacgaactagtgtctataatatgctctgagaatcttgaagtaagttaaataattgcatatcaaagacaccaaaccagaatggaagaaaatttaaaacatctcagatagatatgctgaactatgtagatgtatggccttcaagtaagacaacgtagccttaaccacaaccaagtggtataggaagtctagatatttttaatgttgtatctttttttctggtttacagggaaagccagagagctgtgcagttactcctcgatttcccaaatcaaaagacgaaggatggtttttgatattaggagaagtggataagagagaacttattgctttgaaaagagtaggatatattcgaaatcatcatgttgcttccctttctttttatacccctgaaatacctggaaggtatatctacacattatatttcatgagtgactgctaccttggcctggaccagcagtatgacatctatctcaacgttacacaagcgagtctttctgcacaggtcaacaccaaggtctctgattccctgactgacctggcattaaagtaacttgacctgaacaatccatttgaaaggagtggctaagaattctctctgttcagtcatctagacaaatcgaattacttgatgtttgccttgaaagaatcaacttctaacctcaaccatccaggaaattgacagtggctgcagtattgactccagtgacataaagttaaccacagtggccttttaacaaatgttgccttttataatgttatctttatgagtttcttgatatgtaagatgaaaaagcatttagaataatcttttaatttgtgtatatttgggatgatatttaggagctatcaatcaaattttacatctcacaatgtactgtttacatggatattggctgctttttttaaggaaaaccacattgagatgtgacaagtgttaggacttgtcacagatttctaactctgccgcataaactataaatctgtaaggtggtacacagcgtgtcttgttagcaaaatttatactttgatatgatcacatgtagaagtagcttcaagaatttcttgtagtcataaatgtttaataatatatgatgtaaaattatattatggagcctaatgatgataacaaagaaaacaatatactgatcttagaaaatgtagacatggttaactgggaaataaaatatagagtggcacttcaagac

SEQ ID NO: 16070 - protein, 41 aa, Homo sapiens [sequence omitted]

SEQ ID NO: 16071 - DNA, 7611 bp, Homo sapiens
gcagcggggcggtgacgtgtaggccggcgccagctccactctgtccctcctcgccgggtctgtgcgtctttgcgtctgtctgtctgactgatggtcctcacacgcggttccctgtgactgggcgcgaccccggcaagcgcggcttggagggcggacggggcgcggcgatacagctgcccgctcgcatctttggccctgcgctcagctcctcacccggcgtgggaagttaaagtaaaaccgaaagggaagaaggcgcggtggcaggagctgacagagtgatgggaaacgcgtgagccaggccgagagtttcaggtttcttgctgtatggatcactgattgaataatagatggctttacctcgtctcacaggagccttgcgttccttttcaaatgtcaccaagcaagataattataatgaagaagtggctgacttaaagataaagcgatctaaacttcatgaacaagttttagatttgggcctgacatggaagaagataataaaatttttgaatgaaaaactggagaagagtaaaatgcaaagtataaatgaagacttaaaagatatattacatgctgcaaagcagatagttggaactgataatgggagagaagcaattgaaagtggggctgcatttctcttcatgacatttcacttgaaggactctgttggtcacaaggaaacaaaggctatcaaacagatgtttggcccctttccttcatcatctgccactgcagcttgtaatgctactaatcgaattatttctcattttagtcaagatgatcttactgctcttgtgcagatgacagaaaaagaacatggcgatagggttttttttggtaaaaatttagcattttcatttgacatgcatgatttggaccactttgacgaactgccaataaatggtgaaactcagaaaactataagcctagattataagaagtttctgaatgaacatctccaggaggcttgcaccccagaactcaagcctgtggaaaaaacaaatggctcctttttgtggtgtgaagttgaaaagtacctaaattcaactttgaaggaaatgactgaagtgccaagagtagaagatctttgctgtactttatatgatatgcttgcttctattaaaagtggtgatgaacttcaggatgagctatttgaactgctgggacctgaaggacttgaacttattgagaaactcctccagaacagaattacaattgtggatagatttcttaattcttcaaatgatcataggtttcaggctcttcaagacaattgtaaaaaaattttaggagaaaatgctaaacccaattatggttgtcaagtcactattcagtctgaacaagaaaagcagttaatgaaacaatatcgacgtgaagaaaaaagaattgccagacgagaaaaaaaggctggagaagatttagaagtttcagaaggacttatgtgctttgatcctaaggaattgcggatacaaagagaacaggcacttctgaatgctagaagtgttccaattctgagcaggcagagagatgcagacgttgaaaaaatacattatccccatgtgtatgattcccaggctgaagccatgaaaacatcagcatttattgctggtgcaaagatgattttgccagaaggaatccaaagagagaataacaagctttatgaagaagtaaggattccctacagcgaaccaatgccactcagctttgaggaaaagccagtttatatccaagacttagatgagatcggacagctggcttttaaaggaatgaagagactcaatagaatccagtcaatagtgtttgagactgcctacaacaccaatgagaacatgctgatttgtgcccctacaggagctggaaaaaccaacattgcaatgctgacagtcttgcatgaaattcgccaacattttcaacaaggtgttatcaaaaagaatgaatttaagattgtatatgttgctccaatgaaagccttggcagctgaaatgacagattacttcagcagacgtctagagccactaggcatcattgtgaaagaattgactggtgacatgcagttgtccaaaagtgaaattttacgaactcagatgcttgtgaccacaccagaaaaatgggatgtagtgacaagaaagagtgttggggatgtagctctttcccagattgtaaggctccttattcttgatgaagttcatttgctgcatgaagatagaggaccagtattagaaagcatagttgcccgtactttacggcaggtggaatccacacagagtatgataaggattctcggactgtctgcaactttacctaactacctcgatgttgccacatttttacatgttaatccatacattggacttttcttctttgatggccgttttcgaccagtacctcttggacagacatttttggggattaaatgtgcaaataagatgcagcagttgaataacatggatgaagtatgttatgaaaatgttttgaagcaagtaaaggctggacaccaggtgatggtgtttgtacatgctcgaaatgccactgtaagaacagctatgtctctaatagaaagagcaaaaaattgtggccatattcccttcttttttcctacccaaggacatgactatgtacttgcagaaaaacaggtacaaaggtcgagaaataagcaagtacgagaattattcccagatggttttagtattcatcatgcaggaatgcttcggcaggacagaaatttagttgaaaacttgttttctaatgggcatatcaaagtcctagtgtgtacagctacgttagcctggggtgtcaatcttcccgcccatgctgttattattaagggaacacaaatatatgctgcaaaaagaggctcctttgttgaccttggaattttagatgtcatgcagatatttggtcgagctggacgaccacaatttgacaaatttggggaaggaataattataacaacgcatgataaactcagccattacctcactttgctcactcaacgaaacccaattgagagtcagtttctggaaagccttgcagataacctaaatgcagagattgctctgggaacagttactaatgtggaagaagcagtgaagtggataagttacacttatctttatgtacggatgagagcaaatccattagcatatggcatcagtcacaaggcttatcagattgacccaacattaagaaagcatcgagaacagttggtcattgaagttggacgaaaactagacaaagctcagatgattcgttttgaggagcgaactggatatttttcctcaactgatttgggtagaactgccagccattactatattaaatacaacaccattgagacctttaatgaactctttgatgctcacaaaacagaaggtgatatctttgccatagtctccaaagctgaagaatttgatcaaattaaggtcagagaagaggaaatagaggagttagataccttattaagcaatttttgtgaactctccactcctggaggtgtagagaatagttatgggaaaataaacatcttacttcaaacttatatcagccgaggagaaatggacagtttctcccttatatcagattctgcatatgttgcacagaatgcagctagaattgtccgtgctctttttgaaattgctctgaggaaacgttggcctaccatgacctacaggctcctgaatcttagtaaagtcattgacaagaggctttggggttgggctagccctttgagacaattttcaatcctaccaccacacatcctaacaagattagaagaaaaaaagcttactgtggataagctgaaagacatgaggaaagatgaaataggtcacattttacatcatgtgaatattggactgaaggtcaaacaatgtgttcatcagattccttctgttatgatggaagcatccattcagcctatcacaaggactgtcctccgagtgacactcagcatctatgctgatttcacttggaatgatcaggtacatgggacagtaggagaaccttggtggatttgggtagaagatcctacaaatgatcatatttatcattcagagtattttctagctctaaaaaaacaagtcattagtaaagaagcccaactactggtatttacaatccctatttttgagcctttgccttcccaatactacatccgagcagtgtctgatagatggttgggtgctgaggcagtatgtattatcaactttcaacatctaattctaccagagagacatcctcctcatacagaattactggatcttcagcctttaccaatcacagctttgggatgtaaagcatatgaagccctgtacaacttcagccactttaaccctgtacagacacaaatatttcatacattgtatcacacggattgtaatgtcctacttggagcacctactggatcgggaaagactgttgcagctgaattagccattttcagagtcttcaacaaataccctacttcaaaggcggtatatattgcacccctaaaagccctagtacgtgaaagaatggatgattggaaagttagaatagaagaaaaacttggtaaaaaagttattgaactaacaggggatgtgactcctgatatgaaatccattgccaaggctgaccttatcgtcactacgccagagaagtgggatggagtcagcagaagctggcaaaataggaactatgttcagcaagtcactattctcatcatagatgagatccatctgcttggggaggaaagaggccctgttctagaggtcattgtatctcgaacaaattttatctcatcacacacagaaaagcctgttagaatagttggactatctactgcattagctaatgccagagaccttgctgattggctcaatattaagcagatgggcttgtttaacttccgaccatcagtacgcccagttccactggaagttcacattcaaggctttccaggtcaacattactgtcctcgtatggctagtatgaacaagcctgcatttcaggcaattagaagccattctccagccaaacctgttttgatatttgtctcatcaagacgtcaaactcgtcttactgctttggaattgatcgccttcctggctactgaagaagatccaaagcagtggttaaacatggatgaaagagagatggagaacatcattgcaacagtaagagattccaacctcaagctgacccttgctttcgggataggaatgcatcatgctggactacatgagagggaccgaaaaacagtagaggaactatttgtaaactgtaaagttcaggttcttattgctacaagcacattagcctggggtgtaaactttccagctcatttagtaattattaagggaacagaatactatgatggaaaaacaagacgttatgtggattttcccattacagatgtcctccagatgatggggcgtgctgggaggccgcagttcgatgaccaaggcaaagctgtaattctagttcatgacataaagaaagacttttataaaaaatttctttatgaacctttcccagtagaatcaagtttattaggagtgctctctgaccacttaaatgcagagattgctggtggtacaattacatctaagcaagatgcattggattatatcacctggacttactttttccgacgtcttatcatgaatcccagctattacaatttgggtgatgtgagccatgattctgtgaacaagtttctgtcccatctgattgagaagtccctgattgaattggaactttcctactgtattgaaattggagaggataatcgcagcattgaacctctaacttatggccgaattgcctcctattactatttgaagcatcaaacagttaaaatgttcaaggaccgcttgaagcctgaatgcagtactgaagaactgctttcaattctaagtgatgcagaagaatatacagatttgccagtgagacacaatgaagatcatatgaatagtgaactggcaaaatgtcttcccattgaatcaaatcctcattcatttgacagccctcacaccaaagcacatctcctgctacaggcacatctcagccgagccatgctaccctgcccagattatgacactgataccaaaacagtcttggaccaagctctcagagtatgtcaggcaatgctggacgtggctgcaaaccagggctggctggtgactgtcctgaatatcaccaacctgattcagatggtgatccagggtcggtggttaaaggactcttctcttcttacactaccaaacatagaaaaccatcatcttcaccttttcaagaaatggaagccgattatgaagggcccacatgctaggggtcggacctccatcgagtcccttcctgaactgatccatgcctgtggagggaaagaccatgtatttagctccatggtagaaagtgagctacatgctgcaaaaacgaaacaggcatggaatttcttatctcacttgccagtgataaatgttggcataagtgttaaaggctcgtgggatgacttagttgaaggacataatgaactctctgtctcaactctgactgcagacaaacgagatgacaacaaatggatcaaattgcatgctgaccaagagtatgtgcttcaagtgagcttgcagagagtccactttgggttccacaagggaaagccagagagctgtgcagttactcctcgatttcccaaatcaaaagacgaaggatggtttttgatattaggagaagtggataagagagaacttattgctttgaaaagagtaggatatattcgaaatcatcatgttgcttccctttctttttatacccctgaaatacctggaaggtatatctacacattatatttcatgagtgactgctaccttggcctggaccagcagtatgacatctatctcaacgttacacaagcgagtctttctgcacaggtcaacaccaaggtctctgattccctgactgacctggcattaaagtaacttgacctgaacaatccatttgaaaggagtggctaagaattctctctgttcagtcatctagacaaatcgaattacttgatgtttgccttgaaagaatcaacttctaacctcaaccatccaggaaattgacagtggctgcagtattgactccagtgacataaagttaaccacagtggccttttaacaaatgttgccttttataatgttatctttatgagtttcttgatatgtaagatgaaaaagcatttagaataatcttttaatttgtgtatatttgggatgatatttaggagctatcaatcaaattttacatctcacaatgtactgtttacatggatattggctgctttttttaaggaaaaccacattgagatgtgacaagtgttaggacttgtcacagatttctaactctgccgcataaactataaatctgtaaggtggtacacagcgtgtcttgttagcaaaatttatactttgatatgatcacatgtagaagtagcttcaagaatttcttgtagtcataaatgtttaataatatatgatgtaaaattatattatggagcctaatgatgataacaaagaaaacaatatactgatcttagaaaatgtagacatggttaactgggaaataaaatatagagtggcacttcaagac

SEQ ID NO: 16072 - protein, 2202 aa, Homo sapiens; identical to SEQ ID NO: 1846

SEQ ID NO: 16073 - DNA, 3763 bp, Homo sapiens
aaggctaaataatactcccttggctaaataataatccagccatctgttgatggacacttgggttgcttctaccatttggctattgtgaataatgctgctgtatgcgcagatacttctttgagtccgtgctttcagttcttttggatatatacccagaagtggaattgcctgatcatatgataattctgtattgtaattctgttaattttgttgaggaacttgcatactgttttccacagaggctgcatcattttacattcccagcagcaatttctccacatccttgccaatacttgtaattttctgtcttttgtttttttgattttttgccgatagtcatcttaatgagtgtgaagtggttttgattggcatttccctagtaaatggtgatgttgagcatcttttcatgtgcttattgggcatttgtttatcttttttttggagaaatgtctttttcaattgtttgcccatttttaatcgggatttttttttttttctatgggaattctttgtatgttctggatatcaatttggtgtcatattcaataaatcgttgccaaatccagtattatgaaacttttcccttatattttcttctaagagttttatagtattagctcttagatttaggtcttcaatccattttgagttagtttttaagtaacttagtgtaaagtaagggtccaacttcattttcgttgtagtgaatatccggttttcccaacacacttcgttgaaaagactgtcttttcccctttgaatgttgttggcactctagttgaaaatcatttcattatgtatgtgaggggttatttctggcctctattctgttctactggttcatatgtctcttttcttggcagtatcacactgttttgattaccacagctttgtaataagttttcaaatcaggatatgtgagtctgccacctttgttcttttttttctagactgtttaggctatttgaggttcaactttttttttcagtgacctaaactatgctttatgttataaatcatatttttaagaaagtattttaaattttattcagatgtttgcaagtatgtatttagtaacctatacattaaacgttcctttgtcatttttctaatttatccaaaaagcactacagcacctcattttaaaagcaatagaattttttttttgtatcagtttaatcatgatatgatacacgggcaaactttagaagaaatattaattttctttttgatgtgtatagaacttgagaagttgtaattacatcctctacagccatgtacccaagattaaattttctactgatgtgttatgcattatatgttagccttcctgtggcctcattatgttagatgatgtttgaaaaatatatttgatattctgaatatcaaatcaaagaggaacataaagaatttttcagtttttccactataaaaaacaaaacaaatctttagggcctagatatttttcacaaacaaggaaatcatttggattacatgtcagagcatttattgcttgaattagtcaatcgaatattaatctattcaacaaacatttaatgaatgtctactccaggcattttgctagccccagggatatagatgtaaatatgacttgtttgggccctcaaatcagccccacttcaatagagagccacatgaaagcaaataattgtaaatgtagcatactaaatgcaatattgaggtatgtgctgtggccagttgcaagcatagtatagcttatggaaatgtggaggggtgtctccatggaagcttgctaactaatcacaaagcaacttacagtaatgaattggagttttgtagactaaaaagtgtcgtgttgtcattgtcctagagttggatatattcctaccctaacttagaacttgaaatttatctgtcacaaatatctttctttcatgattacaatgtattaagatataaactcttagttccagggtcccacatggtgggtttgctaatatcatgggtggaagtggattgcaaaactttacaatcgctgctgtgccatatactccaaatcttttaccaacttcaagcacatgcatcaacatgctcaagttacctgaatacccaagtaaagaaatactcaaggacagacttcttgtggcactacattgtggcagctatggttacacaatggcataatgaagtctggaaaactcctctgactactgatgcacaattcagaatggcagaagtaatttgggaaaatgtcaacaaaaaagcagcctaaatgcaacccataggcagggctgatgcttccaatttataaaggatcatcaggttttctgtttctctcttttcccttttatgttttctctgtttgtgatacaattagaaaatataaaatcacagtagattttattttttaaaatgctaactgaaagtaatagagactgtcctttttcataattaattttatccaagattgtattaaggcaaaatctgattctacattccacctctgctatgtaactgtcttgttaaaagggtgttttctcctaatttctgatatattatatgaggtcatccagctggtgtgttcttttgcatgtaaactgccatttatattttagaaaactattgtatagaatggatttagattgtctataaagccacaaatacgtattttgccacagtgtattctatattgcaatgatttttttagcattttaatattttaatatatattgtaaaatttagactgatgatactaacagttgatgaaatgacatataatttatatatgaaagcttacgctatattgtatgaattatttgcatctttcagtggccagttttccatatgtatatattatggtctcaatgtttttcttacgcctcattttaatttataatgaaggtaaaattaaaatgtattttaccacgtttcttttcattacttttatctgtgagctctgacacatctgaaaaagtaatctgatgtgcaaattataatttaaatatgttaatttttttgcttcttaaatttgcttttcatcattaaaatgtcaagttcaagtgatatgtgcctaatatcacttggatgttggtgggtttttgaatttttgggtggttaatcagttttattttgaaaagacgtacttgaatagttacagcatatgtttgaacaggaagtaggaacatgcatacacgaagaaatgctaacggaaggatttgttatgtttaggatcttcccttggaaactaaaaatagaatattaatgacattactgtttgtagaatgacatatgcagattttctcataagcagtcattgtgtttgccagtaatgtttgagagacatgtaagttgaaagttttgctaaattataaagctcctttaattcgttggttttgattctcttattctcttgtcttttctaaatgttaacaaaatatatcttaacagattacatgaaatttaggaattatttaaaagttaccattagctctaaaattaagattcggatgctttatttatagtaactgaagctaataatgttttatgttttgattttttgaaatttaattgtagaagtcactgccttctgagttttcaaatagataaccacctttaatattacactgcttataatactaatgtttacagatatgtttctgtttataaccatataatacattggctttgtcatattagttttttttgcaagtagttatgtaaaagagatagataataaaatattaaataactgagtgtggtggcttatgtctgtaatctcagc

SEQ ID NO: 16074 - protein, 96 aa, Homo sapiens [sequence omitted]

SEQ ID NO: 16075 - DNA, 5348 bp, Homo sapiens
tagaattttcagtgaaggtatctgtcagtatttatggcagctgggtgcttcttgcccttctttaagcagttcagggactccaaatctgtcaaccgttgtgagtatggaagagccctcattacgggtgagagggatgcttactttaacttcgaaggagggtataatttctcttaaaaaaggaaacattgtacttaacccgactacctagtgcatagtactggttgagtgagtgaactaggtttttgttgattgtagtagtggtggttttgttggttttgttgtgtttttctgctttttggttgaacgtgtaaatgaaggcctgaggtgatttaattatttgcaaattcagtaagtaaaatattttcaaaaagagaatattacagaaatctgaagaaaggctgaaagtggcagtgaaggtatttgttagataataattgggaagaatttcctggcagaatagttcaaacattttctaaggttccaaatatggttgtataatctccttccatggcggtctttaaaagaaagattatttctttccttgaaatattttaaaggtgagtctttctgtagcacatggtgtagtttgtagcattctgtaatcatgtcagattcaaaaagtgagataaacttttatatttatttgcagaaggatagctaatcattctcaataagaatatttaaaatagtgtaggatgaagggattgtttaaccactgtaccacttataaactattaatctttatttgggattaaaaatatcctagcaggtttttttttttgtttgtttgtttgttttttttttttttttggagacagtatctcactctttcacccaggctggagtatagtgacatgatcacagctcactgtagccttgacttccgagactcaagcaatcctcccccttcaacctcctcagtaactgggactacaagtgcatgcctgtgtacccagctagaataataataggaaatagtttattctctcctcatcttttttttttttaatagaaaggtgttaatctttacttggaattaagaatttgctactcagtatttttttttttttttttgagatggagtctcgccctgtcacccaggctggagtgcagtggtgtgatcttagctcactgcaacctctgcctcctgggttcaagtgatcgtcctgcctcagcctcccgagtagctggaattataggtgtgtgccaccatgtctggctaattttttgtatttttagtagagatgggatttcaattcaccatgttggccaggctgatctcgaattcctgacctcaagtgatctacccacctcggcctcccaaagtgctgggattacaggcgtgagccaccatctccggcctgctagtcagtattttaatagaagtttggtaattgtatctcttgttttaaaaaaacactaattattagaaatggattgtgtctgtaagtatatgtatatacataaatatgccacattttgtaatttcttgtcaaaaattatccaaattctaggaattatatgtaatgaaaggagcacagtaaaaaagctgttcattaggttctttagggattctcattttttaattgaaaaaagacatttgtttaattgaaagttgttgacattgatcatattaatacagaaaatgttgagtgattatacttaggggttctcattttttaactgaaaaaatcttatttgtttaattgaaagtggttgacattgatcatattaatacagtaaatgttaagggtgattatatatagtagtaatgtgtgcttttaaaactaaacatttgaaaattaaaagaagaaagattgtgaattttttgttagatttagtttttcctttttattacaaggaatacatacatacaaattaaattattgccataaatgaagaaattgtcatttatgtagcatttgtataattttattacttacctttaggcattactatcacgttaacttgggaagatagaaatgactagagtaaattttctcttctataatatttgtctagttgtgttttgtttttttttttttaatcctgtagtttaagaatgatgtttaaaaaacacttttgtttctctcagcctctggaattgctttggcactcgttagatgaatggctagttttaatagccacagaattgatgaaaaacaaaagagactcaacagagatcacttctattttactgaaacaaaaaggccaagatcaagatgctgcttccattcctccatttgaacctccaggacctgggagctatgaaaatctgtccactggcacaagggaatctaaaccagatgctcttgcagggagacaggaagccagtgcagattgtcaggatgttatttctatgacagctaaccggctaagtgctgtcattcaagctttttacatgtgctgttcttgtcagatgcctccgggaatgacttcacctcgtttcattgaatttgtctgcaaacatgatgaagttttaaaatgctttgttaatagaaatcccaaaattatatttgaccactttcactttctccttgaatgtcctgagttgatgtcaagattcatgcatatcataaaagcacagccttttaaagatcgctgtgaatggttctatgaacatttgcattcaggacagccagattcagatatggtgcacaggccagtgaatgaaaatgatatcctgctggttcacagagattctatttttaggagtagctgtgaagttgtgtcaaaagcaaattgtgcaaagctaaagcaagggattgctgtacggttccatggagaagaaggcatgggtcaaggtgttgtgcgtgagtggtttgatattctgtccaatgagatagtcaatcctgattatgcattgtttacccagtcagctgatggaacaacttttcagcctaatagcaactcttatgtaaatcctgatcacttgaactattttcggtttgctgggcagatcttgggattagcgttgaaccacaggcagctggtcaatatttacttcacacgatccttctacaagcacattcttggtattcctgtaaattaccaagatgtggcatccattgatccagaatatgcgaaaaatttgcaatggattttagataatgatataagtgatctgggtctagaactaactttttctgttgagactgatgtgtttggagcaatggaagaggtgcctttgaaacctgggggtgggagtattcttgtgacacaaaataataaagcggagtacgtccagcttgttactgaacttcgaatgacaagagccattcagcctcagatcaatgcttttttacagggctttcatatgttcattccaccctccctcatacagctttttgatgaatatgaattggagctactgctttctggcatgccagaaattgatgtgagtgattggataaaaaatacagaatacacaagtggctatgaaagagaagatccagttattcagtggttctgggaagttgtagaagacattactcaagaggagagagttcttctcttacagtttgttacgggcagttccagggtcccacatggtgggtttgctaatatcatgggtggaagtggattgcaaaactttacaatcgctgctgtgccatatactccaaatcttttaccaacttcaagcacatgcatcaacatgctcaagttacctgaatacccaagtaaagaaatactcaaggacagacttcttgtggcactacattgtggcagctatggttacacaatggcataatgaagtctggaaaactcctctgactactgatgcacaattcagaatggcagaagtaatttgggaaaatgtcaacaaaaaagcagcctaaatgcaacccataggcagggctgatgcttccaatttataaaggatcatcaggttttctgtttctctcttttcccttttatgttttctctgtttgtgatacaattagaaaatataaaatcacagtagattttattttttaaaatgctaactgaaagtaatagagactgtcctttttcataattaattttatccaagattgtattaaggcaaaatctgattctacattccacctctgctatgtaactgtcttgttaaaagggtgttttctcctaatttctgatatattatatgaggtcatccagctggtgtgttcttttgcatgtaaactgccatttatattttagaaaactattgtatagaatggatttagattgtctataaagccacaaatacgtattttgccacagtgtattctatattgcaatgatttttttagcattttaatattttaatatatattgtaaaatttagactgatgatactaacagttgatgaaatgacatataatttatatatgaaagcttacgctatattgtatgaattatttgcatctttcagtggccagttttccatatgtatatattatggtctcaatgtttttcttacgcctcattttaatttataatgaaggtaaaattaaaatgtattttaccacgtttcttttcattacttttatctgtgagctctgacacatctgaaaaagtaatctgatgtgcaaattataatttaaatatgttaatttttttgcttcttaaatttgcttttcatcattaaaatgtcaagttcaagtgatatgtgcctaatatcacttggatgttggtgggtttttgaatttttgggtggttaatcagttttattttgaaaagacgtacttgaatagttacagcatatgtttgaacaggaagtaggaacatgcatacacgaagaaatgctaacggaaggatttgttatgtttaggatcttcccttggaaactaaaaatagaatattaatgacattactgtttgtagaatgacatatgcagattttctcataagcagtcattgtgtttgccagtaatgtttgagagacatgtaagttgaaagttttgctaaattataaagctcctttaattcgttggttttgattctcttattctcttgtcttttctaaatgttaacaaaatatatcttaacagattacatgaaatttaggaattatttaaaagttaccattagctctaaaattaagattcggatgctttatttatagtaactgaagctaataatgttttatgttttgattttttgaaatttaattgtagaagtcactgccttctgagttttcaaatagataaccacctttaatattacactgcttataatactaatgtttacagatatgtttctgtttataaccatataatacattggctttgtcatattagttttttttgcaagtagttatgtaaaagagatagataataaaatattaaataactgagtgtggtggcttatgtctgtaatctcagc

SEQ ID NO: 16076 - protein, 562 aa, Homo sapiens
MMFKKHFCFSQPLELLWHSLDEWLVLIATELMKNKRDSTEITSILLKQKGQDQDAASIPPFEPPGPGSYENLSTGTRESKPDALAGRQEASADCQDVISMTANRLSAVIQAFYMCCSCQMPPGMTSPRFIEFVCKHDEVLKCFVNRNPKIIFDHFHFLLECPELMSRFMHIIKAQPFKDRCEWFYEHLHSGQPDSDMVHRPVNENDILLVHRDSIFRSSCEVVSKANCAKLKQGIAVRFHGEEGMGQGVVREWFDILSNEIVNPDYALFTQSADGTTFQPNSNSYVNPDHLNYFRFAGQILGLALNHRQLVNIYFTRSFYKHILGIPVNYQDVASIDPEYAKNLQWILDNDISDLGLELTFSVETDVFGAMEEVPLKPGGGSILVTQNNKAEYVQLVTELRMTRAIQPQINAFLQGFHMFIPPSLIQLFDEYELELLLSGMPEIDVSDWIKNTEYTSGYEREDPVIQWFWEVVEDITQEERVLLLQFVTGSSRVPHGGFANIMGGSGLQNFTIAAVPYTPNLLPTSSTCINMLKLPEYPSKEILKDRLLVALHCGSYGYTMA

SEQ ID NO: 16077 - DNA, 3735 bp, Homo sapiens
aaggctaaataatactcccttggctaaataataatccagccatctgttgatggacacttgggttgcttctaccatttggctattgtgaataatgctgctgtatgcgcagatacttctttgagtccgtgctttcagttcttttggatatatacccagaagtggaattgcctgatcatatgataattctgtattgtaattctgttaattttgttgaggaacttgcatactgttttccacagaggctgcatcattttacattcccagcagcaatttctccacatccttgccaatacttgtaattttctgtcttttgtttttttgattttttgccgatagtcatcttaatgagtgtgaagtggttttgattggcatttccctagtaaatggtgatgttgagcatcttttcatgtgcttattgggcatttgtttatcttttttttggagaaatgtctttttcaattgtttgcccatttttaatcgggatttttttttttttctatgggaattctttgtatgttctggatatcaatttggtgtcatattcaataaatcgttgccaaatccagtattatgaaacttttcccttatattttcttctaagagttttatagtattagctcttagatttaggtcttcaatccattttgagttagtttttaagtaacttagtgtaaagtaagggtccaacttcattttcgttgtagtgaatatccggttttcccaacacacttcgttgaaaagactgtcttttcccctttgaatgttgttggcactctagttgaaaatcatttcattatgtatgtgaggggttatttctggcctctattctgttctactggttcatatgtctcttttcttggcagtatcacactgttttgattaccacagctttgtaataagttttcaaatcaggatatgtgagtctgccacctttgttcttttttttctagactgtttaggctatttgaggttcaactttttttttcagtgacctaaactatgctttatgttataaatcatatttttaagaaagtattttaaattttattcagatgtttgcaagtatgtatttagtaacctatacattaaacgttcctttgtcatttttctaatttatccaaaaagcactacagcacctcattttaaaagcaatagaattttttttttgtatcagtttaatcatgatatgatacacgggcaaactttagaagaaatattaattttctttttgatgtgtatagaacttgagaagttgtaattacatcctctacagccatgtacccaagattaaattttctactgatgtgttatgcattatatgttagccttcctgtggcctcattatgttagatgatgtttgaaaaatatatttgatattctgaatatcaaatcaaagaggaacataaagaatttttcagtttttccactataaaaaacaaaacaaatctttagggcctagatatttttcacaaacaaggaaatcatttggattacatgtcagagcatttattgcttgaattagtcaatcgaatattaatctattcaacaaacatttaatgaatgtctactccaggcattttgctagccccagggatatagatgtaaatatgacttgtttgggccctcaaatcagccccacttcaatagagagccacatgaaagcaaataattgtaaatgtagcatactaaatgcaatattgaggtatgtgctgtggccagttgcaagcatagtatagcttatggaaatgtggaggggtgtctccatggaagcttgctaactaatcacaaagcaacttacagtaatgaattggagttttgtagactaaaaagtgtcgtgttgtcattgtcctagagttggatatattcctaccctaacttagaacttgaaatttatctgtcacaaatatctttctttcatgattacaatgtattaagatataaactcttagttccagggtcccacatggtgggtttgctaatatcatgggtggaagtggattgcaaaactttacaatcgctgctgtgccatatactccaaatcttttaccaacttcaagcacatgcatcaacatgctcaagttacctgaatacccaagtaaagaaatactcaaggacagacttcttgtggcactacattgtggcagctatggttacacaatggcataatgaagtctggaaaactcctctgactactgatgcacaattcagaatggcagaagtaatttgggaaaatgtcaacaaaaaagcagcctaaatgcaacccataggcagggctgatgcttccaatttataaaggatcatcaggttttctgtttctctcttttcccttttatgttttctctgtttgtgatacaattagaaaatataaaatcacagtagattttattttttaaaatgctaactgaaagtaatagagactgtcctttttcataattaattttatccaagattgtattaaggcaaaatctgattctacattccacctctgctatgtaactgtcttgttaaaagggtgttttctcctaatttctgatatattatatgaggtcatccagctggtgtgttcttttgcatgtaaactgccatttatattttagaaaactattgtatagaatggatttagattgtctataaagccacaaatacgtattttgccacagtgtattctatattgcaatgatttttttagcattttaatattttaatatatattgtaaaatttagactgatgatactaacagttgatgaaatgacatataatttatatatgaaagcttacgctatattgtatgaattatttgcatctttcagtggccagttttccatatgtatatattatggtctcaatgtttttcttacgcctcattttaatttataatgaaggtaaaattaaaatgtattttaccacgtttcttttcattacttttatctgtgagctctgacacatctgaaaaagtaatctgatgtgcaaattataatttaaatatgttaatttttttgcttcttaaatttgcttttcatcattaaaatgtcaagttcaagtgatatgtgcctaatatcacttggatgttggtgggtttttgaatttttgggtggttaatcagttttattttgaaaagacgtacttgaatagttacagcatatgtttgaacaggaagtaggaacatgcatacacgaagaaatgctaacggaaggatttgttatgtttaggatcttcccttggaaactaaaaatagaatattaatgacattactgtttgtagaatgacatatgcagattttctcataagcagtcattgtgtttgccagtaatgtttgagagacatgtaagttgaaagttttgctaaattataaagctcctttaattcgttggttttgattctcttattctcttgtcttttctaaatgttaacaaaatatatcttaacagattacatgaaatttaggaattatttaaaagttaccattagctctaaaattaagattcggatgctttatttatagtaactgaagctaataatgttttatgttttgattttttgaaatttaattgtagaagtcactgccttctgagttttcaaatagataaccacctttaatattacactgcttataatactaatgtttacagatatgtttctgtttataaccatataatacattggctttgtcatattagttttttttgcaagtagttatgtaaaagagatagataataaaatattaaataactgag

SEQ ID NO: 16078 - protein, 96 aa, Homo sapiens [sequence omitted]

SEQ ID NO: 16079 - DNA, 2826 bp, Homo sapiens
ctggagtatagttgatctgagctcactgcaacgtctgcctcctgggctgaagcgatcctcccagctcagtctttcaagtagctgggactacagccttttaaagatcgctgtgaatggttctatgaacatttgcattcaggacagccagattcagatatggtgcacaggccagtgaatgaaaatgatatcctgctggttcacagagattctatttttaggagtagctgtgaagttgtgtcaaaagcaaattgtgcaaagctaaagcaagggattgctgtacggttccatggagaagaaggcatgggtcaaggtgttgtgcgtgagtggtttgatattctgtccaatgagatagtcaatcctgattatgcattgtttacccagtcagctgatggaacaacttttcagcctaatagcaactcttatgtaaatcctgatcacttgaactattttcggtttgctgggcagatcttgggattagcgttgaaccacaggcagctggtcaatatttacttcacacgatccttctacaagcacattcttggtattcctgtaaattaccaagatgtggcatccattgatccagaatatgcgaaaaatttgcaatggattttagataatgatataagtgatctgggtctagaactaactttttctgttgagactgatgtgtttggagcaatggaagaggtgcctttgaaacctgggggtgggagtattcttgtgacacaaaataataaagcggagtacgtccagcttgttactgaacttcgaatgacaagagccattcagcctcagatcaatgcttttttacagggctttcatatgttcattccaccctccctcatacagctttttgatgaatatgaattggagctactgctttctggcatgccagaaattgatgtgagtgattggataaaaaatacagaatacacaagtggctatgaaagagaagatccagttattcagtggttctgggaagttgtagaagacattactcaagaggagagagttcttctcttacagtttgttacgggcagttccagggtcccacatggtgggtttgctaatatcatgggtggaagtggattgcaaaactttacaatcgctgctgtgccatatactccaaatcttttaccaacttcaagcacatgcatcaacatgctcaagttacctgaatacccaagtaaagaaatactcaaggacagacttcttgtggcactacattgtggcagctatggttacacaatggcataatgaagtctggaaaactcctctgactactgatgcacaattcagaatggcagaagtaatttgggaaaatgtcaacaaaaaagcagcctaaatgcaacccataggcagggctgatgcttccaatttataaaggatcatcaggttttctgtttctctcttttcccttttatgttttctctgtttgtgatacaattagaaaatataaaatcacagtagattttattttttaaaatgctaactgaaagtaatagagactgtcctttttcataattaattttatccaagattgtattaaggcaaaatctgattctacattccacctctgctatgtaactgtcttgttaaaagggtgttttctcctaatttctgatatattatatgaggtcatccagctggtgtgttcttttgcatgtaaactgccatttatattttagaaaactattgtatagaatggatttagattgtctataaagccacaaatacgtattttgccacagtgtattctatattgcaatgatttttttagcattttaatattttaatatatattgtaaaatttagactgatgatactaacagttgatgaaatgacatataatttatatatgaaagcttacgctatattgtatgaattatttgcatctttcagtggccagttttccatatgtatatattatggtctcaatgtttttcttacgcctcattttaatttataatgaaggtaaaattaaaatgtattttaccacgtttcttttcattacttttatctgtgagctctgacacatctgaaaaagtaatctgatgtgcaaattataatttaaatatgttaatttttttgcttcttaaatttgcttttcatcattaaaatgtcaagttcaagtgatatgtgcctaatatcacttggatgttggtgggtttttgaatttttgggtggttaatcagttttattttgaaaagacgtacttgaatagttacagcatatgtttgaacaggaagtaggaacatgcatacacgaagaaatgctaacggaaggatttgttatgtttaggatcttcccttggaaactaaaaatagaatattaatgacattactgtttgtagaatgacatatgcagattttctcataagcagtcattgtgtttgccagtaatgtttgagagacatgtaagttgaaagttttgctaaattataaagctcctttaattcgttggttttgattctcttattctcttgtcttttctaaatgttaacaaaatatatcttaacagattacatgaaatttaggaattatttaaaagttaccattagctctaaaattaagattcggatgctttatttatagtaactgaagctaataatgttttatgttttgattttttgaaatttaattgtagaagtcactgccttctgagttttcaaatagataaccacctttaatattacactgcttataatactaatgtttacagatatgtttctgtttataaccatataatacattggctttgtcatattagttttttttgcaagtagttatgtaaaagagatagataataaaatattaaataactgag

SEQ ID NO: 16080 - protein, 366 aa, Homo sapiens [sequence omitted]

SEQ ID NO: 16081 - DNA, 5320 bp, Homo sapiens
tagaattttcagtgaaggtatctgtcagtatttatggcagctgggtgcttcttgcccttctttaagcagttcagggactccaaatctgtcaaccgttgtgagtatggaagagccctcattacgggtgagagggatgcttactttaacttcgaaggagggtataatttctcttaaaaaaggaaacattgtacttaacccgactacctagtgcatagtactggttgagtgagtgaactaggtttttgttgattgtagtagtggtggttttgttggttttgttgtgtttttctgctttttggttgaacgtgtaaatgaaggcctgaggtgatttaattatttgcaaattcagtaagtaaaatattttcaaaaagagaatattacagaaatctgaagaaaggctgaaagtggcagtgaaggtatttgttagataataattgggaagaatttcctggcagaatagttcaaacattttctaaggttccaaatatggttgtataatctccttccatggcggtctttaaaagaaagattatttctttccttgaaatattttaaaggtgagtctttctgtagcacatggtgtagtttgtagcattctgtaatcatgtcagattcaaaaagtgagataaacttttatatttatttgcagaaggatagctaatcattctcaataagaatatttaaaatagtgtaggatgaagggattgtttaaccactgtaccacttataaactattaatctttatttgggattaaaaatatcctagcaggtttttttttttgtttgtttgtttgttttttttttttttttggagacagtatctcactctttcacccaggctggagtatagtgacatgatcacagctcactgtagccttgacttccgagactcaagcaatcctcccccttcaacctcctcagtaactgggactacaagtgcatgcctgtgtacccagctagaataataataggaaatagtttattctctcctcatcttttttttttttaatagaaaggtgttaatctttacttggaattaagaatttgctactcagtatttttttttttttttttgagatggagtctcgccctgtcacccaggctggagtgcagtggtgtgatcttagctcactgcaacctctgcctcctgggttcaagtgatcgtcctgcctcagcctcccgagtagctggaattataggtgtgtgccaccatgtctggctaattttttgtatttttagtagagatgggatttcaattcaccatgttggccaggctgatctcgaattcctgacctcaagtgatctacccacctcggcctcccaaagtgctgggattacaggcgtgagccaccatctccggcctgctagtcagtattttaatagaagtttggtaattgtatctcttgttttaaaaaaacactaattattagaaatggattgtgtctgtaagtatatgtatatacataaatatgccacattttgtaatttcttgtcaaaaattatccaaattctaggaattatatgtaatgaaaggagcacagtaaaaaagctgttcattaggttctttagggattctcattttttaattgaaaaaagacatttgtttaattgaaagttgttgacattgatcatattaatacagaaaatgttgagtgattatacttaggggttctcattttttaactgaaaaaatcttatttgtttaattgaaagtggttgacattgatcatattaatacagtaaatgttaagggtgattatatatagtagtaatgtgtgcttttaaaactaaacatttgaaaattaaaagaagaaagattgtgaattttttgttagatttagtttttcctttttattacaaggaatacatacatacaaattaaattattgccataaatgaagaaattgtcatttatgtagcatttgtataattttattacttacctttaggcattactatcacgttaacttgggaagatagaaatgactagagtaaattttctcttctataatatttgtctagttgtgttttgtttttttttttttaatcctgtagtttaagaatgatgtttaaaaaacacttttgtttctctcagcctctggaattgctttggcactcgttagatgaatggctagttttaatagccacagaattgatgaaaaacaaaagagactcaacagagatcacttctattttactgaaacaaaaaggccaagatcaagatgctgcttccattcctccatttgaacctccaggacctgggagctatgaaaatctgtccactggcacaagggaatctaaaccagatgctcttgcagggagacaggaagccagtgcagattgtcaggatgttatttctatgacagctaaccggctaagtgctgtcattcaagctttttacatgtgctgttcttgtcagatgcctccgggaatgacttcacctcgtttcattgaatttgtctgcaaacatgatgaagttttaaaatgctttgttaatagaaatcccaaaattatatttgaccactttcactttctccttgaatgtcctgagttgatgtcaagattcatgcatatcataaaagcacagccttttaaagatcgctgtgaatggttctatgaacatttgcattcaggacagccagattcagatatggtgcacaggccagtgaatgaaaatgatatcctgctggttcacagagattctatttttaggagtagctgtgaagttgtgtcaaaagcaaattgtgcaaagctaaagcaagggattgctgtacggttccatggagaagaaggcatgggtcaaggtgttgtgcgtgagtggtttgatattctgtccaatgagatagtcaatcctgattatgcattgtttacccagtcagctgatggaacaacttttcagcctaatagcaactcttatgtaaatcctgatcacttgaactattttcggtttgctgggcagatcttgggattagcgttgaaccacaggcagctggtcaatatttacttcacacgatccttctacaagcacattcttggtattcctgtaaattaccaagatgtggcatccattgatccagaatatgcgaaaaatttgcaatggattttagataatgatataagtgatctgggtctagaactaactttttctgttgagactgatgtgtttggagcaatggaagaggtgcctttgaaacctgggggtgggagtattcttgtgacacaaaataataaagcggagtacgtccagcttgttactgaacttcgaatgacaagagccattcagcctcagatcaatgcttttttacagggctttcatatgttcattccaccctccctcatacagctttttgatgaatatgaattggagctactgctttctggcatgccagaaattgatgtgagtgattggataaaaaatacagaatacacaagtggctatgaaagagaagatccagttattcagtggttctgggaagttgtagaagacattactcaagaggagagagttcttctcttacagtttgttacgggcagttccagggtcccacatggtgggtttgctaatatcatgggtggaagtggattgcaaaactttacaatcgctgctgtgccatatactccaaatcttttaccaacttcaagcacatgcatcaacatgctcaagttacctgaatacccaagtaaagaaatactcaaggacagacttcttgtggcactacattgtggcagctatggttacacaatggcataatgaagtctggaaaactcctctgactactgatgcacaattcagaatggcagaagtaatttgggaaaatgtcaacaaaaaagcagcctaaatgcaacccataggcagggctgatgcttccaatttataaaggatcatcaggttttctgtttctctcttttcccttttatgttttctctgtttgtgatacaattagaaaatataaaatcacagtagattttattttttaaaatgctaactgaaagtaatagagactgtcctttttcataattaattttatccaagattgtattaaggcaaaatctgattctacattccacctctgctatgtaactgtcttgttaaaagggtgttttctcctaatttctgatatattatatgaggtcatccagctggtgtgttcttttgcatgtaaactgccatttatattttagaaaactattgtatagaatggatttagattgtctataaagccacaaatacgtattttgccacagtgtattctatattgcaatgatttttttagcattttaatattttaatatatattgtaaaatttagactgatgatactaacagttgatgaaatgacatataatttatatatgaaagcttacgctatattgtatgaattatttgcatctttcagtggccagttttccatatgtatatattatggtctcaatgtttttcttacgcctcattttaatttataatgaaggtaaaattaaaatgtattttaccacgtttcttttcattacttttatctgtgagctctgacacatctgaaaaagtaatctgatgtgcaaattataatttaaatatgttaatttttttgcttcttaaatttgcttttcatcattaaaatgtcaagttcaagtgatatgtgcctaatatcacttggatgttggtgggtttttgaatttttgggtggttaatcagttttattttgaaaagacgtacttgaatagttacagcatatgtttgaacaggaagtaggaacatgcatacacgaagaaatgctaacggaaggatttgttatgtttaggatcttcccttggaaactaaaaatagaatattaatgacattactgtttgtagaatgacatatgcagattttctcataagcagtcattgtgtttgccagtaatgtttgagagacatgtaagttgaaagttttgctaaattataaagctcctttaattcgttggttttgattctcttattctcttgtcttttctaaatgttaacaaaatatatcttaacagattacatgaaatttaggaattatttaaaagttaccattagctctaaaattaagattcggatgctttatttatagtaactgaagctaataatgttttatgttttgattttttgaaatttaattgtagaagtcactgccttctgagttttcaaatagataaccacctttaatattacactgcttataatactaatgtttacagatatgtttctgtttataaccatataatacattggctttgtcatattagttttttttgcaagtagttatgtaaaagagatagataataaaatattaaataactgag

SEQ ID NO: 16082 - protein, 562 aa, Homo sapiens; identical to SEQ ID NO: 16076

SEQ ID NO: 16083 - DNA, 4575 bp, Homo sapiens
gaaggccacgcgagcccgggagggacgcggcggcgggggctgcaggaaaggcgcgagcagaggcggcggcgggtgtactgtaggtggtcggtccggcagcagcccggcccccggacgcaggacgtggccccaggcagccctcgcagctcagtgctctagccggggcaagcccgcgtctccgcctgctggacgggcccaggcgagatgtagggctctgggcgcggaggccgccggtggggcggctgatcgcggaggatcgcggagggcgcgccgaggatggagagagcgatggagcaactcaaccgcctgacgcgctcgctgcgccgcgcgcgcaccgtggagttgcccgaggataatgaaactgctgtttatacattaatgccaatggttatggctgatcaacacaggtctgtttctgaactactatcaaattcaaaatttgatgtcaattatgcattcggacgtgtgaaaagaagcttgcttcacattgcagcaaattgtggatcggtggaatgcttggttttgctgttaaagaaaggagcaaatcctaactatcaagatatttcaggctgtacaccccttcatttggcagcaagaaatgggcagaagaaatgtatgagtaaattattagaatatagcgctgatgtcaacatttgtaataatgaaggccttacagcaatacattggctggctgtgaatgggcggacagaactactccatgaccttgtgcagcatgtcagtgatgttgatgttgaggatgccatggggcagacagcactgcatgttgcctgccagaacggtcacaagacgacagtgcagtgcttgctagacagtggtgctgatattaacaggccaaatgtatcaggagcaactccattgtactttgcttgcagtcatggtcagagagatacagcacagatcctactattacgaggagccaaatatctgccagataaaaatggagtaactcctctggatttatgtgtacagggtggatatggagagacttgtgaagtattaattcaatatcacccgaggctttttcagactattattcaaatgacacagaatgaagacctccgagaaaacatgttacggcaagttctggagcatttgtctcagcaaagtgaaagccagtacctaaagattctaacaagccttgctgaagttgctacaacaaatggtcataaactgcttagcctctctagcaattatgatgctcaaatgaagagccttttaaggattgtgagaatgttttgtcacgtctttcgaattggtccatcctcccccagtaatggaattgatatgggctacaatgggaataaaactccaagaagccaggtgttcaagcctctggaattgctttggcactcgttagatgaatggctagttttaatagccacagaattgatgaaaaacaaaagagactcaacagagatcacttctattttactgaaacaaaaaggccaagatcaagatgctgcttccattcctccatttgaacctccaggacctgggagctatgaaaatctgtccactggcacaagggaatctaaaccagatgctcttgcagggagacaggaagccagtgcagattgtcaggatgttatttctatgacagctaaccggctaagtgctgtcattcaagctttttacatgtgctgttcttgtcagatgcctccgggaatgacttcacctcgtttcattgaatttgtctgcaaacatgatgaagttttaaaatgctttgttaatagaaatcccaaaattatatttgaccactttcactttctccttgaatgtcctgagttgatgtcaagattcatgcatatcataaaagcacagccttttaaagatcgctgtgaatggttctatgaacatttgcattcaggacagccagattcagatatggtgcacaggccagtgaatgaaaatgatatcctgctggttcacagagattctatttttaggagtagctgtgaagttgtgtcaaaagcaaattgtgcaaagctaaagcaagggattgctgtacggttccatggagaagaaggcatgggtcaaggtgttgtgcgtgagtggtttgatattctgtccaatgagatagtcaatcctgattatgcattgtttacccagtcagctgatggaacaacttttcagcctaatagcaactcttatgtaaatcctgatcacttgaactattttcggtttgctgggcagatcttgggattagcgttgaaccacaggcagctggtcaatatttacttcacacgatccttctacaagcacattcttggtattcctgtaaattaccaagatgtggcatccattgatccagaatatgcgaaaaatttgcaatggattttagataatgatataagtgatctgggtctagaactaactttttctgttgagactgatgtgtttggagcaatggaagaggtgcctttgaaacctgggggtgggagtattcttgtgacacaaaataataaagcggagtacgtccagcttgttactgaacttcgaatgacaagagccattcagcctcagatcaatgcttttttacagggctttcatatgttcattccaccctccctcatacagctttttgatgaatatgaattggagctactgctttctggcatgccagaaattgatgtgagtgattggataaaaaatacagaatacacaagtggctatgaaagagaagatccagttattcagtggttctgggaagttgtagaagacattactcaagaggagagagttcttctcttacagtttgttacgggcagttccagggtcccacatggtgggtttgctaatatcatgggtggaagtggattgcaaaactttacaatcgctgctgtgccatatactccaaatcttttaccaacttcaagcacatgcatcaacatgctcaagttacctgaatacccaagtaaagaaatactcaaggacagacttcttgtggcactacattgtggcagctatggttacacaatggcataatgaagtctggaaaactcctctgactactgatgcacaattcagaatggcagaagtaatttgggaaaatgtcaacaaaaaagcagcctaaatgcaacccataggcagggctgatgcttccaatttataaaggatcatcaggttttctgtttctctcttttcccttttatgttttctctgtttgtgatacaattagaaaatataaaatcacagtagattttattttttaaaatgctaactgaaagtaatagagactgtcctttttcataattaattttatccaagattgtattaaggcaaaatctgattctacattccacctctgctatgtaactgtcttgttaaaagggtgttttctcctaatttctgatatattatatgaggtcatccagctggtgtgttcttttgcatgtaaactgccatttatattttagaaaactattgtatagaatggatttagattgtctataaagccacaaatacgtattttgccacagtgtattctatattgcaatgatttttttagcattttaatattttaatatatattgtaaaatttagactgatgatactaacagttgatgaaatgacatataatttatatatgaaagcttacgctatattgtatgaattatttgcatctttcagtggccagttttccatatgtatatattatggtctcaatgtttttcttacgcctcattttaatttataatgaaggtaaaattaaaatgtattttaccacgtttcttttcattacttttatctgtgagctctgacacatctgaaaaagtaatctgatgtgcaaattataatttaaatatgttaatttttttgcttcttaaatttgcttttcatcattaaaatgtcaagttcaagtgatatgtgcctaatatcacttggatgttggtgggtttttgaatttttgggtggttaatcagttttattttgaaaagacgtacttgaatagttacagcatatgtttgaacaggaagtaggaacatgcatacacgaagaaatgctaacggaaggatttgttatgtttaggatcttcccttggaaactaaaaatagaatattaatgacattactgtttgtagaatgacatatgcagattttctcataagcagtcattgtgtttgccagtaatgtttgagagacatgtaagttgaaagttttgctaaattataaagctcctttaattcgttggttttgattctcttattctcttgtcttttctaaatgttaacaaaatatatcttaacagattacatgaaatttaggaattatttaaaagttaccattagctctaaaattaagattcggatgctttatttatagtaactgaagctaataatgttttatgttttgattttttgaaatttaattgtagaagtcactgccttctgagttttcaaatagataaccacctttaatattacactgcttataatactaatgtttacagatatgtttctgtttataaccatataatacattggctttgtcatattagttttttttgcaagtagttatgtaaaagagatagataataaaatattaaataactgag

SEQ ID NO: 16084 - protein, 909 aa, Homo sapiens
MERAMEQLNRLTRSLRRARTVELPEDNETAVYTLMPMVMADQHRSVSELLSNSKFDVNYAFGRVKRSLLHIAANCGSVECLVLLLKKGANPNYQDISGCTPLHLAARNGQKKCMSKLLEYSADVNICNNEGLTAIHWLAVNGRTELLHDLVQHVSDVDVEDAMGQTALHVACQNGHKTTVQCLLDSGADINRPNVSGATPLYFACSHGQRDTAQILLLRGAKYLPDKNGVTPLDLCVQGGYGETCEVLIQYHPRLFQTIIQMTQNEDLRENMLRQVLEHLSQQSESQYLKILTSLAEVATTNGHKLLSLSSNYDAQMKSLLRIVRMFCHVFRIGPSSPSNGIDMGYNGNKTPRSQVFKPLELLWHSLDEWLVLIATELMKNKRDSTEITSILLKQKGQDQDAASIPPFEPPGPGSYENLSTGTRESKPDALAGRQEASADCQDVISMTANRLSAVIQAFYMCCSCQMPPGMTSPRFIEFVCKHDEVLKCFVNRNPKIIFDHFHFLLECPELMSRFMHIIKAQPFKDRCEWFYEHLHSGQPDSDMVHRPVNENDILLVHRDSIFRSSCEVVSKANCAKLKQGIAVRFHGEEGMGQGVVREWFDILSNEIVNPDYALFTQSADGTTFQPNSNSYVNPDHLNYFRFAGQILGLALNHRQLVNIYFTRSFYKHILGIPVNYQDVASIDPEYAKNLQWILDNDISDLGLELTFSVETDVFGAMEEVPLKPGGGSILVTQNNKAEYVQLVTELRMTRAIQPQINAFLQGFHMFIPPSLIQLFDEYELELLLSGMPEIDVSDWIKNTEYTSGYEREDPVIQWFWEVVEDITQEERVLLLQFVTGSSRVPHGGFANIMGGSGLQNFTIAAVPYTPNLLPTSSTCINMLKLPEYPSKEILKDRLLVALHCGSYGYTMA

SEQ ID NO: 16085 - DNA, 4774 bp, Homo sapiens
gaaggccacgcgagcccgggagggacgcggcggcgggggctgcaggaaaggcgcgagcagaggcggcggcgggtgtactgtaggtggtcggtccggcagcagcccggcccccggacgcaggacgtggccccaggcagccctcgcagctcagtgctctagccggggcaagcccgcgtctccgcctgctggacgggcccaggcgagatgtagggctctgggcgcggaggccgccggtggggcggctgatcgcggaggatcgcggagggcgcgccgaggatggagagagcgatggagcaactcaaccgcctgacgcgctcgctgcgccgcgcgcgcaccgtggagttgcccgaggataatgaaactgctgtttatacattaatgccaatggttatggctgatcaacacaggtctgtttctgaactactatcaaattcaaaatttgatgtcaattatgcattcggacgtgtgaaaagaagcttgcttcacattgcagcaaattgtggatcggtggaatgcttggttttgctgttaaagaaaggagcaaatcctaactatcaagatatttcaggctgtacaccccttcatttggcagcaagaaatgggcagaagaaatgtatgagtaaattattagaatatagcgctgatgtcaacatttgtaataatgaaggccttacagcaatacattggctggctgtgaatgggcggacagaactactccatgaccttgtgcagcatgtcagtgatgttgatgttgaggatgccatggggcagacagcactgcatgttgcctgccagaacggtcacaagacgtagagacggggtttcaccgtgttagccaggatggtctcaatctcctgacgtcgtgatctgcccgcctcggcctccctaagtgttgggattacagacagtgcagtgcttgctagacagtggtgctgatattaacaggccaaatgtatcaggagcaactccattgtactttgcttgcagtcatggtcagagagatacagcacagatcctactattacgaggagccaaatatctgccagataaaaatggagtaactcctctggatttatgtgtacagggtggatatggagagacttgtgaagtattaattcaatatcacccgaggctttttcagactattattcaaatgacacagaatgaagacctccgagaaaacatgttacggcaagttctggagcatttgtctcagcaaagtgaaagccagtacctaaagattctaacaagccttgctgaagttgctacaacaaatggtcataaactgcttagcctctctagcaattatgatgctcaaatgaagagccttttaaggattgtgagaatgttttgtcacgtctttcgaattggtccatcctcccccagtaatggaattgatatgggctacaatgggaataaaactccaagaagccaggtgttcaagcctctggaattgctttggcactcgttagatgaatggctagttttaatagccacagaattgatgaaaaacaaaagagactcaacagagatcacttctattttactgaaacaaaaaggccaagatcaagatgctgcttccattcctccatttgaacctccaggacctgggagctatgaaaatctgtccactggcacaagggaatctaaaccagatgctcttgcagggagacaggaagccagtgcagattgtcaggatgttatttctatgacagctaaccggctaagtgctgtcattcaagctttttacatgtgctgttcttgtcagatgcctccgggaatgacttcacctcgtttcattgaatttgtctgcaaacatgatgaagttttaaaatgctttgttaatagaaatcccaaaattatatttgaccactttcactttctccttgaatgtcctgagttgatgtcaagattcatgcatatcataaaagcacaggtggccagtagttaaagggagaaacattttgtattgctgtacaaatgctattaagaggagcctctataatcagtcctgttttgtgaattatttatggaaatgcagccttttaaagatcgctgtgaatggttctatgaacatttgcattcaggacagccagattcagatatggtgcacaggccagtgaatgaaaatgatatcctgctggttcacagagattctatttttaggagtagctgtgaagttgtgtcaaaagcaaattgtgcaaagctaaagcaagggattgctgtacggttccatggagaagaaggcatgggtcaaggtgttgtgcgtgagtggtttgatattctgtccaatgagatagtcaatcctgattatgcattgtttacccagtcagctgatggaacaacttttcagcctaatagcaactcttatgtaaatcctgatcacttgaactattttcggtttgctgggcagatcttgggattagcgttgaaccacaggcagctggtcaatatttacttcacacgatccttctacaagcacattcttggtattcctgtaaattaccaagatgtggcatccattgatccagaatatgcgaaaaatttgcaatggattttagataatgatataagtgatctgggtctagaactaactttttctgttgagactgatgtgtttggagcaatggaagaggtgcctttgaaacctgggggtgggagtattcttgtgacacaaaataataaagcggagtacgtccagcttgttactgaacttcgaatgacaagagccattcagcctcagatcaatgcttttttacagggctttcatatgttcattccaccctccctcatacagctttttgatgaatatgaattggagctactgctttctggcatgccagaaattgatgtgagtgattggataaaaaatacagaatacacaagtggctatgaaagagaagatccagttattcagtggttctgggaagttgtagaagacattactcaagaggagagagttcttctcttacagtttgttacgggcagttccagggtcccacatggtgggtttgctaatatcatgggtggaagtggattgcaaaactttacaatcgctgctgtgccatatactccaaatcttttaccaacttcaagcacatgcatcaacatgctcaagttacctgaatacccaagtaaagaaatactcaaggacagacttcttgtggcactacattgtggcagctatggttacacaatggcataatgaagtctggaaaactcctctgactactgatgcacaattcagaatggcagaagtaatttgggaaaatgtcaacaaaaaagcagcctaaatgcaacccataggcagggctgatgcttccaatttataaaggatcatcaggttttctgtttctctcttttcccttttatgttttctctgtttgtgatacaattagaaaatataaaatcacagtagattttattttttaaaatgctaactgaaagtaatagagactgtcctttttcataattaattttatccaagattgtattaaggcaaaatctgattctacattccacctctgctatgtaactgtcttgttaaaagggtgttttctcctaatttctgatatattatatgaggtcatccagctggtgtgttcttttgcatgtaaactgccatttatattttagaaaactattgtatagaatggatttagattgtctataaagccacaaatacgtattttgccacagtgtattctatattgcaatgatttttttagcattttaatattttaatatatattgtaaaatttagactgatgatactaacagttgatgaaatgacatataatttatatatgaaagcttacgctatattgtatgaattatttgcatctttcagtggccagttttccatatgtatatattatggtctcaatgtttttcttacgcctcattttaatttataatgaaggtaaaattaaaatgtattttaccacgtttcttttcattacttttatctgtgagctctgacacatctgaaaaagtaatctgatgtgcaaattataatttaaatatgttaatttttttgcttcttaaatttgcttttcatcattaaaatgtcaagttcaagtgatatgtgcctaatatcacttggatgttggtgggtttttgaatttttgggtggttaatcagttttattttgaaaagacgtacttgaatagttacagcatatgtttgaacaggaagtaggaacatgcatacacgaagaaatgctaacggaaggatttgttatgtttaggatcttcccttggaaactaaaaatagaatattaatgacattactgtttgtagaatgacatatgcagattttctcataagcagtcattgtgtttgccagtaatgtttgagagacatgtaagttgaaagttttgctaaattataaagctcctttaattcgttggttttgattctcttattctcttgtcttttctaaatgttaacaaaatatatcttaacagattacatgaaatttaggaattatttaaaagttaccattagctctaaaattaagattcggatgctttatttatagtaactgaagctaataatgttttatgttttgattttttgaaatttaattgtagaagtcactgccttctgagttttcaaatagataaccacctttaatattacactgcttataatactaatgtttacagatatgtttctgtttataaccatataatacattggctttgtcatattagttttttttgcaagtagttatgtaaaagagatagataataaaatattaaataactgag

SEQ ID NO: 16086 - protein, 391 aa, Homo sapiens
MEMQPFKDRCEWFYEHLHSGQPDSDMVHRPVNENDILLVHRDSIFRSSCEVVSKANCAKLKQGIAVRFHGEEGMGQGVVREWFDILSNEIVNPDYALFTQSADGTTFQPNSNSYVNPDHLNYFRFAGQILGLALNHRQLVNIYFTRSFYKHILGIPVNYQDVASIDPEYAKNLQWILDNDISDLGLELTFSVETDVFGAMEEVPLKPGGGSILVTQNNKAEYVQLVTELRMTRAIQPQINAFLQGFHMFIPPSLIQLFDEYELELLLSGMPEIDVSDWIKNTEYTSGYEREDPVIQWFWEVVEDITQEERVLLLQFVTGSSRVPHGGFANIMGGSGLQNFTIAAVPYTPNLLPTSSTCINMLKLPEYPSKEILKDRLLVALHCGSYGYTMA

SEQ ID NO: 16087 - DNA, 283 bp, Homo sapiens
ggaactttgtaaatgttttatcttaaaagtttacccagagttggctgggattacaggtgtgagccaccgtgcctggctattttctttcttactctaggtttctaaaatcatgcatttgttttatgacaatgctttcctgttattcctgtgtccagacatttggcttttgaaattgctatttctctctcattaagagactttactgccttatataaagatggagggcttaagattttagattgaatttctgctttgctgtaattttctaccttgtttatgtttt

SEQ ID NO: 16088 - protein, 30 aa, Homo sapiens
MFYLKSLPRVGWDYRCEPPCLAIFFLTLGF

SEQ ID NO: 16089 - DNA, 622 bp, Homo sapiens
cgggtcgcggggccaggctggccgcggggctgggggcggccagtggggcaggagctccggccgcgtcaaggtcgggtggaaaaactaactgaaagctgagaaaacgcccacttttactttccagagctgagaggcggccccgggccccgaactcccctggcccgacgctcccaccccggcagataatgaaactgctgtttatacattaatgccaatggttatggctgatcaacacaggtctgtttctgaactactatcaaattcaaaatttgatgtcaattatgcattcggacgtgtgaaaagaagcttgcttcacattgcagcaaattgtggatcggtggaatgcttggttttgctgttaaagaaaggagcaaatcctaactatcaagatatttcaggctgtacaccccttcatttggcagcaagaaatgggcagaagaaatgtatgagtaaattattagaatatagcgctgatgtcaacatttgtaataatgaaggccttacagcaatacattggctggctgtgaatgggcggacagaactactccatgaccttgtgcagcatgtcagtgatgttgatgttgaggatgccatggggcagacagcactgcatgttgcctgc

SEQ ID NO: 16090 - protein, 137 aa, Homo sapiens
MPMVMADQHRSVSELLSNSKFDVNYAFGRVKRSLLHIAANCGSVECLVLLLKKGANPNYQDISGCTPLHLAARNGQKKCMSKLLEYSADVNICNNEGLTAIHWLAVNGRTELLHDLVQHVSDVDVEDAMGQTALHVA

SEQ ID NO: 16091 - DNA, 643 bp, Homo sapiens
tcagtgaagaagcaaaatcatttctaacaatgattcttgttatgggttgaactgcatccctccaaaaagatgttgaagtcctaccccccagtctctgtaaatgtgtacttaaaaatagggtccttgtagttaatcaagttaagatgagatcattagggtgggtcctaatctgactggtgtcctgaaaaggaaaaattggggcatggggacagataagtagaaagggaagacaatgtgatgacacaagcagcagccatttacaagctaaggaatgcccgagtctaccagaagccaggagagaggcttggcacagattctcatcacagtccagaatcgacccggaagccttcagatctgtaagacgttacatttttgttgtttcagccacccttgaattgtgctgttcggaatgatgtccagggcatgctgcgcgcggagagccgggagtcacaggcccaggcactcgcagcctccaccagaacaaacggcggcagcggccgtgcgcgcccacggcctgcgcggggacgcgcttcgggggttcgggggcgcccgcggtaaagctccaccgcggccgcgctcgcccgcccggccctggaatgaatggaaggttcaatctcgcgcgctcggcgccggcagccaatga

SEQ ID NO: 16092 - protein, 77 aa, Homo sapiens
MMSRACCARRAGSHRPRHSQPPPEQTAAAAVRAHGLRGDALRGFGGARGKAPPRPRSPARPWNEWKVQSRALGAGSQ

SEQ ID NO: 16093 - DNA, 816 bp, Homo sapiens
ttcctcctcgtgcccgccggagagaatagtttcgctgaaaatttctctttgtcaatgggatcagtattaaatcagcaatatacaagcggggctagcaaaggtggtggagaagagcccgggaagctgccggagccggcagaggaggaatcccaggttttgcgcggaactggccactgtaagtggttcaatgtgcgcatgggatttggattcatctccatgataaaccgagagggaagccccttggatattccagtcgatgtatttgtacaccaaagcaaactattcatggaaggatttagaagcctaaaagaaggagaaccagtggaattcacatttaaaaaatcttccaaaggccttgagtcaatacgggtaacaggacctggtgggagcccctgtttaggaagtgaaagaagacccaaagggaagacactacagaaaagaaaaccaaagggagatagatgctacaactgtggtggccttgatcatcatgctaaggaatgtagtctacctcctcagccaaagaagtgccattactgtcagagcatcatgcacatggtggcaaactgcccacataaaaatgttgcacagccacccgcgagttctcagggaagacaggaagcagaatcccagccatgcacttcaactctccctcgagaagtgggaggcgggcatggctgtacatcaccaccgtttcctcaggaggctagggcagagatctcagaacggtcaggcaggtcacctcaagaagcttcctccacgaagtcatctatagcaccagaagagcaaagcaaaaaggggccttcagttcaaaaaagg

SEQ ID NO: 16094 - protein, 253 aa, Homo sapiens
MGSVLNQQYTSGASKGGGEEPGKLPEPAEEESQVLRGTGHCKWFNVRMGFGFISMINREGSPLDIPVDVFVHQSKLFMEGFRSLKEGEPVEFTFKKSSKGLESIRVTGPGGSPCLGSERRPKGKTLQKRKPKGDRCYNCGGLDHHAKECSLPPQPKKCHYCQSIMHMVANCPHKNVAQPPASSQGRQEAESQPCTSTLPREVGGGHGCTSPPFPQEARAEISERSGRSPQEASSTKSSIAPEEQSKKGPSVQK

SEQ ID NO: 16095 - DNA, 788 bp, Homo sapiens
ccactgtaagtggttcaatgtgcgcatgggatttggattcatctccatgataaaccgagagggaagccccttggatattccagtcgatgtatttgtacaccaaagcaaactattcatggaaggatttagaagcctaaaagaaggagaaccagtggaattcacatttaaaaaatcttccaaaggccttgagtcaatacgggtaacaggacctggtgggagcccctgtttaggaagtgaaagaagacccaaagggaagacactacagaaaagaaaaccaaagggagatagagactgggttttgccacgttgcccaggctggtctcaaactcctgacctcaagtgatccgcctgcctcggcctcccaaagtgctgggattacagacgtgagctactgcgcccggccaagagttacaacttgaactgttctcataaagagatgtttcttttttttggaataataggattaccttatttatattaaatttattttgtatatatatggtcctgggaaaattgtctatctgtagagaaagagtaagattggacccctaccttataccatttttaaagacataaggcaaagctttacaacaatattagaaggaaatacaggataatattcctgtgatcttaggtttgggaaagatctttttaaaagaaggtacaaacagtacaaaccataagggataagattaataaaattgctctaaaatttaaacttctaccaggcaaaggtttcagtcagacagataaaaccactcaaagtatctatagaaattagggattta

SEQ ID NO: 16096 - protein, 105 aa, Homo sapiens
MGFGFISMINREGSPLDIPVDVFVHQSKLFMEGFRSLKEGEPVEFTFKKSSKGLESIRVTGPGGSPCLGSERRPKGKTLQKRKPKGDRDWVLPRCPGWSQTPDLK

SEQ ID NO: 16097 - DNA, 5564 bp, Homo sapiens
gtcgcgatgcctattttagtcaaagcggctgcgggcttggggacccggcccgggcagcggagcttccggacccgccgacccgccgaggagcgcgcgtcgggctcccgtcgagcagctgagcccgtgtgccccgcgtcccgcgccccgaagctgccgctccgaactttggtcggcgctgcccaggctccccgccagggaccagccgggaattttcaaaatgaattatacagagtccagcccattgagagaatcaactgccataggttttacacctgagttagaaagtatcatacctgtgccttccaataagaccacttgtgaaaactggagagagatacatcatctggtttttcatgtagcaaatatttgttttgcagttgggttggttattccaactactcttcaccttcatatgatatttcttaggggaatgttaactctaggatgtaccctttatatcgtctgggccactctctaccgatgtgccttggatataatgatctggaactctgtgttcttgggtgtcaacattttgcatctgtcgtatcttttatacaagaagagaccggtaaagattgaaaaggaactcagtggcatgtaccggcgattgtttgaaccactccgtgtgcctccagatttgttcagaagactaactggacagttttgcatgatccaaaccttgaaaaagggccaaacttatgctgcagaggataaaacctcagttgatgaccgtctgagtattctcttgaagggaaaaatgaaggtctcctatcgaggacattttctgcataacatttacccctgtgcctttatagattctcctgaatttagatcaactcagatgcacaaaggtgaaaaattccaggtcaccattattgcagatgataactgcagatttttatgctggtcaagagaaagattaacatactttctggaatcagaacctttcttgtatgaaatctttaggtatcttattggaaaagacatcacaaataagctctactcattgaatgatcccaccttaaatgataaaaaagccaaaaagctggaacatcagctcagcctctgcacacagatctccatgttggaaatgaggaacagtatagccagctccagtgacagtgacgacggcttgcaccagtttcttcggggtacctccagcatgtcctctcttcatgtgtcatccccacaccagcgagcctctgccaagatgaaaccgatagaagaaggagcagaagatgatgatgacgtttttgaaccggcatctccaaatacattgaaagtccatcagctgccttgatcagagagagaattcaggttaccaagacggaaggtgtcttgaagagatcctgaaaaataccagcactttttcatggcttttaggttattctgctttagtgcatccagactggtggagtcggagggaggaagtgaggaagggtcaaggatggaagagttctttcacttaccctttttattagtcagcttttaaagtaattgttttactgagccttctgactatgccttgttctcttttgagatatatattttcacagtcttttctagatatattattgttttaacttaacaaatcttagcaatctctcaatgccttttcacttatttttttccaagttatgattctttttcctcacagtcttttttgttccatagcaatgaggttgtccatttgataattttaacaaacaatgtaagtttaaaattgaggctaaggtaacatgaaaaagcagggaatctcaaactttattccatatatacacacacacacacacacacacacacacacatacatacatacatatatatatatatatacatatatatacatacacacatacatataattttttttttttttgagatggagtttcactctgtcgcccaggctggagtgtagtggcacattctcagctcactgcaaactccacctcctggattcacgccactctcctgcctcagcctcccgagtagctgggactacaggcacctgccaccgcgcccagctaatttttttgtatttttagtagagatggggtttcactgtgttagccaggatggtctcgatctcctgacctcgtgatccgcccaccttggcctcccagagtgctgggattacaggcgtgagccaccgcgcccggcctattccatatttttttaatgggacattttagagaaaggtgtgatttgactggttttatttttctcccaggccagaagtattactccactagatcaccttacttaattgggcactgtgtggataacttgataatgaacaaaactctcagattttactcacattacccttgtattatgccatttataaactgctctgaaacctgaagctggaaagataacagatgggtttctgagcacggggttaacctccagctaaactcaacttccttgggatttggagtcaccatgttgtgcacactctggtgtgggaaacactttatgtagggtgggaggacaggggagttaaatggctgggcaggtgccacaggatgaggccactgaaagatctgcttcattctttgatctgtattctgaagttccagattgttcatctagaggcagagacatctcttttaaaaaagtgccagatgccccagtgccagagctgcgaacgtgaacacagtggaaggcagagggtttactacaggccaggccatggacaccccacccaggtactgcagtgagggccttgattccagagctctttttcctactgaaatcatggtttagtaaacagtggcatttggctggtgggaaatgcgtaactggtcagtgtgtctggccagcgtggctgtggcacttggccaggacgctccgttgaatgaagctcattgattggccatgctggtcatgtctattttgcttcatccactagaaccaactttgagtcagtctcctgttacgttaaatggctaagaaaagttccaaatgaagttgttctcaggtgaactgagccaaaagaagcaactcttaccatgaggtgatttctgttagaggagacatataaataagctcatctagggtcacctcattttcctaaatatgtttttaaagcaattattgtagtaatttcatttgagttaaatttacatgctcggtcactcattgagaaaatttacacagactctgaatccagttcctgtcatcttcagatgttggtttattgacatcacagtaaaaaggctactgtcgactggacacagtggctcacacatgtaatcacagcactttggggggccaaggtgggtggattgcttaagcccaggagttcaagaccagcctgggcaacatggctaaaccccatctctacaaaaaaaattagctgggtgtggtggtacatacctgtagtcccagctactcagaaggctgaggtgggaggttcacttgaacctgggaggttgaggttgcagtgagcacagatcacaccactgcactccagcctgggcaacagagtgagaccctatttcaaaaaaaggctgctttcactgtactgctgcagcagtctcttcaggtagctaaattaggagcttgttttggagaaatgaagcaaaggtgaatgacagcctaggcttgaaattataaagctctctcaggttgaactctctcgtgcgctctcgctctcactttcgccctgtacctgagagcacaggtgtaactgtgatgtcatagtgccgagactactttcctttaaccattggggttaagttgggcagcccatttagtttacacgcgcataagactaatttacaaaatcactctatacagtcattagatgtaacatccttccctgagtagaaagtaatgcatgtgtttggagattattttctgtaatgctgggaacaaacctgttttaaaagcacactgctaaaagtaggtgatataagaccatttgctgtttttattaaagtatgtgtgtgtatcagtgtctcaatgtgaagattgtaacctcaagattaggaatcttaaaagagccacttagcctgaatgggaaacgtgagactatttttaaacacacacctctaaggaagaagcctcccatatagacttgatctcaaagaagcagataagaagacagaaaagtgttttaagtgtaagatctcctatggagtactttaaattcatttatacaaatgaataagtgtatctttgtataatgcataaatacatagataaaaacatgtttgctgccaaagttcccaataagatgcttcctgtgttttttggcctttacttagctgaatgatcaaagttcagaaaatggtctgcaaaagttactccatatacaaccccaaatctactactttaaatgtaacatcaactcagttgtatgaatctggagtgtaatatttatattagaatgtatatgtcatttaaaatattttgaaagccctcataaatatttatatttactaaactaatagcatagacactatataaatccgcagtgatgcttatatatcttaaattagtaataatgggtgctatataattattttcagttactatccctgacactctggaatcttctccatttctccctatcactcaatttcattttaatcattggacacctttgcgttttgctgctaacagtgtgtgtatgtcaccctctttatatctggttttcccacttgtctgaagctctcctgatcttagaacctggagctgcagattcctccatgtcagctcccatcacggccccaaagacagagtcacttggttgctgagtcacttggttgctggaaaaatctttggggaaagctggtataagctacacactgacctgtccccagtgtttccaggtaatgacttggcactccagagaaagtttcatgctgttgcgtgtggtggctccaagccaagcacctggcatgcaggtcagcccttcccagcgggcgtggcgtcgtcctcttcacagatgccacgttgcagccccaaggcctcaccattttgcgttttttagaaacccattttcttggtcatttataaagctgctttatagatatctttgatcctggcatgccttggtttcctctcccttccctctttccaatcctggtttcctaacctcctcttgtagtaattctcaactcaactcaaagtcccaagaatttggaatggtaggatgctgtgcggggagctcgaggctgaggcataatcactgcttcggttctgctcatcaggggacacgctcccttactcatggcagccatgtttgattgtcacagagccccccgaatactctgtctatagtgacacactgtaggtgtcataaattttaagaaacctgcttttaagtactatttataggtttttctgttatacttgcaacctagttttaaaatacatgaggattttatgaaagctttatacagacatttataggaaactcattctttgattttaggtgccatttaaattgataacacttactttataaaaagatgctttttgtctggatagagccttatagtttaaaatatcttcatatattgccatttgatcaaataaatttcttacttaga

SEQ ID NO: 16098 - protein, 360 aa, Homo sapiens; identical to SEQ ID NO: 1854

SEQ ID NO: 16099 - DNA, 2203 bp, Homo sapiens
gcggccgccgctcaggtcaggcagccccagcgtccccgggccctcggccccaccgagtgccggctcccgcgctctgcggcggcaagccccttggaattttcaaaatgaattatacagagtccagcccattgagagaatcaactgccataggttttacacctgagttagaaagtatcatacctgtgccttccaataagaccacttgtgaaaactggagagagatacatcatctggtttttcatgtagcaaatatttgttttgcagttgggttggttattccaactactcttcaccttcatatgatatttcttaggggaatgttaactctaggatgtaccctttatatcgtctgggccactctctaccgatgtgccttggatataatgatctggaactctgtgttcttgggtgtcaacattttgcatctgtcgtatcttttatacaagaagagaccggtaaagattgaaaaggaactcagtggcatgtaccggcgattgtttgaaccactccgtgtgcctccagatttgttcagaagactaactggacagttttgcatgatccaaaccttgaaaaagggccaaacttatgctgcagaggataaaacctcagttgatgaccgtctgagtattctcttgaagggaaaaatgaaggtctcctatcgaggacattttctgcataacatttacccctgtgcctttatagattctcctgaatttagatcaactcagatgcacaaaggtgaaaaattccaggtcaccattattgcagatgataactgcagatttttatgctggtcaagagaaagattaacatactttctggaatcagaacctttcttgtatgaaatctttaggtatcttattggaaaagacatcacaaataagctctactcattgaatgatcccaccttaaatgataaaaaagccaaaaagctggaacatcagctcagcctctgcacacagatctccatgttggaaatgaggaacagtatagccagctccagtgacagtgacgacggcttgcaccagtttcttcggggtacctccagcatgtcctctcttcatgtgtcatccccacaccagcgagcctctgccaagatgaaaccgatagaagaaggagcagaagatgatgatgacgtttttgaaccggcatctccaaatacattgaaagtccatcagctgccttgatcagagagagaattcaggttaccaagacggaaggtgtcttgaagagatcctgaaaaataccagcactttttcatggcttttaggttattctgctttagtgcatccagactggtggagtcggagggaggaagtgaggaagggtcaaggatggaagagttctttcacttaccctttttattagtcagcttttaaagtaattgttttactgagccttctgactatgccttgttctcttttgagatatatattttcacagtcttttctagatatattattgttttaacttaacaaatcttagcaatctctcaatgccttttcacttatttttttccaagttatgattctttttcctcacagtcttttttgttccatagcaatgaggttgtccatttgataattttaacaaacaatgtaagtttaaaattgaggctaaggtaacatgaaaaagcagggaatctcaaactttattccatatatacacacacacacacacacacacacacacacatacatacatacatatatatatatatatacatatatatacatacacacatacatataattttttttttttttgagatggagtttcactctgtcgcccaggctggagtgtagtggcacattctcagctcactgcaaactccacctcctggattcacgccactctcctgcctcagcctcccgagtagctgggactacaggcacctgccaccgcgcccagctaatttttttgtatttttagtagagatggggtttcactgtgttagccaggatggtctcgatctcctgacctcgtgatccgcccaccttggcctcccagagtgctgggattacaggcgtgagccaccgcgcccggcctattccatatttttttaatgggacattttagagaaaggtgtgatttgactggttttatttttctcccaggccagaagtattactccactagatcaccttacttaattgggcactgtgtggataacttgataatgaacaaaactctcagattttac

SEQ ID NO: 16100 - protein, 360 aa, Homo sapiens; identical to SEQ ID NO: 1854

SEQ ID NO: 16101 - DNA, 1500 bp, Homo sapiens
ggagagcgccgatggctggggacccgaggtccgcgccacccacccgcaacctccttccccgagcctttgggaacgggttgttggccagacaagtcccagaaactgcctgctttgaagcatgaataagtgcgaaaagactcttagcaatgaattttcaaaatgaattatacagagtccagcccattgagagaatcaactgccataggttttacacctgagttagaaagtatcatacctgtgccttccaataagaccacttgtgaaaactggagagagatacatcatctggtttttcatgtagcaaatatttgttttgcagttgggttggttattccaactactcttcaccttcatatgatatttcttaggggaatgttaactctaggatgtaccctttatatcgtctgggccactctctaccgatgtgccttggatataatgatctggaactctgtgttcttgggtgtcaacattttgcatctgtcgtatcttttatacaagaagagaccggtaaagattgaaaaggaactcagtggcatgtaccggcgattgtttgaaccactccgtgtgcctccagatttgttcagaagactaactggacagttttgcatgatccaaaccttgaaaaagggccaaacttatgctgcagaggataaaacctcagttgatgaccgtctgagtattctcttgaagggaaaaatgaaggtctcctatcgaggacattttctgcataacatttacccctgtgcctttatagattctcctgaatttagatcaactcagatgcacaaaggtgaaaaattccaggtcaccattattgcagatgataactgcagatttttatgctggtcaagagaaagattaacatactttctggaatcagaacctttcttgtatgaaatctttaggtatcttattggaaaagacatcacaaataagctctactcattgaatgatcccaccttaaatgataaaaaagccaaaaagctggaacatcagctcagcctctgcacacagatctccatgttggaaatgaggaacagtatagccagctccagtgacagtgacgacggcttgcaccagtttcttcggggtacctccagcatgtcctctcttcatgtgtcatccccacaccagcgagcctctgccaagatgaaaccgatagaagaaggagcagaagatgatgatgacgtttttgaaccggcatctccaaatacattgaaagtccatcagctgccttgatcagagagagaattcaggttaccaagacggaaggtgtcttgaagagatcctgaaaaataccagcactttttcatggcttttaggttattctgctttagtgcatccagactggtggagtcggagggaggaagtgaggaagggtcaaggatggaagagttctttcacttaccctttttattagtcagcttttaaagtaattgttttactgagccttctgactatgccttgttctcttttgagatatatattttcacagtc

SEQ ID NO: 16102 - protein, 360 aa, Homo sapiens; identical to SEQ ID NO: 1854

SEQ ID NO: 16103 - DNA, 422 bp, Homo sapiens
aaatgaggaacagtatagccagctccagtgacagtgacgacggcttgcaccagtttcttcggggtacctccagcatgtcctctcttcatgtgtcatccccacaccagcgagcctctgccaagatgaaaccgatagaagaaggagcagaagatgatgatgacgtttttgaaccggcatctccaaatacattgaaagtccatcagctgccttgatcagagagagaattcaggttaccaagacggaaggtgtcttgaagagatcctgaaaaataccagcactttttcatggcttttaggttattctgctttagtgcatccagactggtggagtcggagggaggaagtgaggaagggtcaaggatggaagagttctttcacttaccctttttattagtcagcttttaaagtaattgttttactgag

SEQ ID NO: 16104 - protein, 69 aa, Homo sapiens
MRNSIASSSDSDDGLHQFLRGTSSMSSLHVSSPHQRASAKMKPIEEGAEDDDDVFEPASPNTLKVHQLP

SEQ ID NO: 16105 - DNA, 717 bp, Homo sapiens
gctcccgcgactccgctgcgggtctgcacacccgaggactcggtttgaaacgcccgcttatttattttcttgtcgcctcgctacaagattctatccttgtttgggcatgagtggggggcggcagtctcgtgggaccggcggcattcgtcgttcctccttacggggataattcgagaagtgcggtccgggggtacttaaccgaaactagcaatcccaggcggtacaaggccctccatcgtaggcaaagcactacctgaatgtagatttgggccatacgttggaaaataagacatgagagtatgctccgatcaacttttactgttcactggacaactattttgggaatttgcagacctataaagcccatctataaatctcaagcatgtccactttcagagaagagaaatgctgacaaccatttagtctctgaggacaacacttttaaagtgtaacaatgtggcatccagagcttatccagatgagcggagagcaaatgaatttccttctgctcccctgttgaagaggagagaaaaattcttcaagctgactccatcataggactggagagagattggatgtcagagtgattgatgtgctcctactggaagaaggcaaacatccatatgtgaactgcctgtggggtttccaaggaaaggaacggcaggcagcctctatgagcttaaagaagataactgggactttagtcctataacctca

SEQ ID NO: 16106 - protein, 50 aa, Homo sapiens
MLRSTFTVHWTTILGICRPIKPIYKSQACPLSEKRNADNHLVSEDNTFKV

SEQ ID NO: 16107 - DNA, 1708 bp, Homo sapiens
ggcctcctgctgcggaggaagagggggaagaggccgcgcgggagggacttctgacacgcgccactgtttttgttttcaaacaggggtacttaaccgaaactagcaatcccaggcggtacaaggccctccatcgtaggcaaagcactacctgaatgtagatttgggccatacgttggaaaataagacatgagagtatgctccgatcaacttttactgttcactggacaactattttgggaatttgcagacctataaagcccatctataaatctcaagcatgtccactttcagagaagagaaatgctgacaaccatttagtctctgaggacaacacttttaaagagccagaaaggtacatttcctcttcatgtgttctcacttccatcctttacctcggtgaaaagacgttttccttccgtacactcatcagtccaagagggatgaagcttgtggaaattttgcagcagccttccctgaccatggtggcctgaagtgcaccttttatacaggactccatcataggactggagagagattggatgtcagagtgattgatgtgctcctactggaagaaggcaaacatccatatgtgaactgcctgtggggtttccaaggaaaggaacggcaggcagcctctatgagcttaaagaagataactgggactttagtcctataacctcaaggaacagtattctgtgaaccatctgagaagcttggaagaggaccccaaactccaaataagaagctcagtgtgtctgacaccttgactgcaggcttgggaggtcctgagcagaagatccagttcaacagtgcctggactcctgatccacaaaaactgataacaaatatttattgttttaagatgctaagtttgtagtcattttttatacagcaacagaaaactaaacacacacataaacagttataagtgctcactgtatatgaggcttttcattaataatctatattttataatagaattagaatatagatctgtgaagctgaagacactcaatccttgctagatttaaatcaggaaaatcagctgagaatcattccttgatagaacctggaaaacaagaccctatgagagaccctgggaattacattaaattcactgtggttcccagtgtcactgaagaggttttcctttcatagtcaggtagtcaccatactgttaagcatttgaacacatgggcaacttccagaatagttatgacattgatataccaatctccaaaattcctagaataccatgttttcatggttgaccttcaaatcagtcagttctttgtaacattgagccataaagatagggcaaatacttaatgttttacatatattcagagattgaccctcaaaatacagcccagagaaactcaaaagaattaactctatttcttcaaattgtgtgacgccaccaaggccagatgacttcagcattgggaaggcaatatccagctgtcatcttcttgatcctcatatgctactactagcatctagcatttactgagcagatagttttattgtccagtttttaaagataagaaaattgaggtattaggaaagttaagttggttgcctagggaaacacgaagatatagcccagattcactcccaggcaggcagatgccagtgtctgctctctttaccaccgaaatatcctgctacatgtacaatttcaataaatatctggacttactggaac

SEQ ID NO: 16108 - protein, 98 aa, Homo sapiens
MLRSTFTVHWTTILGICRPIKPIYKSQACPLSEKRNADNHLVSEDNTFKEPERYISSSCVLTSILYLGEKTFSFRTLISPRGMKLVEILQQPSLTMVA

SEQ ID NO: 16109 - DNA, 1258 bp, Homo sapiens
gttttattgaagtataatatgcacacataaatggacatatataaatgtacaacttgatgaattttctgatgaatttcactcaatattccagaatcctgactgtataaggaacatgataacatgaatcttacaggacattatgtcacttattataatgtatgaatttaatattttgcctttcaaaatcataaagggcaagagtcatcagggatctgaaatacacttcctctaccccccacccctccccaattatgtgctctctttctccttcccttataaatgttgttcttgtgttttgataggatcagagtgacagttgatggcgaatttctgcattacattttcccccttcagttcctggattctcctgagtgggattcactgagacccacagaggaaggcatttttcaggtaaccctcactgcagaaactgattgtcgatatgtgtcttggaggagaaagaaattatatctgctctttgctcagcatcgctacatctcccgccttttttcagtgctaattggcagtgacattgcagataaactctatgccttgaatgacagggtatatataggaaaaagatatcactatgatattcggctacccaacttctatcaaatgtcaactccagaaatacgcagatcacccctgacacaacattttcagaattccagacgatactgtgataaatgacatcaaagtctgaaatttataagtataaaaaaagactctctcttcatcattccccagtgaaatagcaaaatacaaaaaaagagctccctaatgtttttataaatcaaattcagaagcgagatgccattgccaactgttttattcctttcaacaactgcattgtgaataaactttacaaatttttcttgtatttctcattgttataattggggagggggtggataactatgggcagtttgcccttttctgcatcaaaactgggagaatgaaattccactttctcaattcttttctcacatttactcaaatgcattgtcttgccctatagactcaggagttgcttctcaagaaagagccagcaagtattctcagcctgagggtgggttgctactgtccacataggcatttccggaattcacttttttgctacaacctccagtgaaagcaattatttattttaaatgtgcagttacttgatgcgactaaaaagtagaataaatgcaagagataataatatgtgaatcttgaagcctattttattgctacaaataaaataacatttaaa

SEQ ID NO: 16110 - protein, 137 aa, Homo sapiens [sequence omitted]

SEQ ID NO: 16111 - DNA, 1420 bp, Homo sapiens
agtgttcttgaagtcattacttactgagaaaagaatcactatccaagatgaaaaatcaggaacttcaacaacagctcctttatttccatttctacttctgaaataccaaaatatttgcagactggatccaaatcaggagcccagatgaacttaaagaagcgagcatgggattcttagtttttcaagatccgtacacacgaagcctttaatcagcatcaactccagtgtccgttttctctggttttgtgaagactgcacaaaactctcatgatggagaaccaaaggacttagttacctgtttcagtgtcatctaaagtcaactgaaaagtgaagcaggcagtaatacagccatggaaagaaattcaagtttatggaagaacctaatagatgaacacccagtctgcacaacctggaagcaagaggccgaaggagccatttatcatcttgccagtattttatttgtagatcagagtgacagttgatggcgaatttctgcattacattttcccccttcagttcctggattctcctgagtgggattcactgagacccacagaggaaggcatttttcaggtaaccctcactgcagaaactgattgtcgatatgtgtcttggaggagaaagaaattatatctgctctttgctcagcatcgctacatctcccgccttttttcagtgctaattggcagtgacattgcagataaactctatgccttgaatgacagggtatatataggaaaaagatatcactatgatattcggctacccaacttctatcaaatgtcaactccagaaatacgcagatcacccctgacacaacattttcagaattccagacgatactgtgataaatgacatcaaagtctgaaatttataagtataaaaaaagactctctcttcatcattccccagtgaaatagcaaaatacaaaaaaagagctccctaatgtttttataaatcaaattcagaagcgagatgccattgccaactgttttattcctttcaacaactgcattgtgaataaactttacaaatttttcttgtatttctcattgttataattggggagggggtggataactatgggcagtttgcccttttctgcatcaaaactgggagaatgaaattccactttctcaattcttttctcacatttactcaaatgcattgtcttgccctatagactcaggagttgcttctcaagaaagagccagcaagtattctcagcctgagggtgggttgctactgtccacataggcatttccggaattcacttttttgctacaacctccagtgaaagcaattatttattttaaatgtgcagttacttgatgcgactaaaaagtagaataaatgcaagagataataatatgtgaatcttgaagcctattttattgctacaaataaaataacatttaaa

SEQ ID NO: 16112 - protein, 43 aa, Homo sapiens
MERNSSLWKNLIDEHPVCTTWKQEAEGAIYHLASILFVDQSDS

SEQ ID NO: 16113 - DNA, 1855 bp, Homo sapiens
gcccgctgcggtcacgctgcgcccggcgccgcagggtgggcggcgaggcactcacgagggggacgctgagggcttccgcgcgggccacccgggtcaagcgcgctccgccgggaaacttctgcgggcgccgggctgaagctccgggcagggctgggaaggaaaggaaataccaaaatatttgcagactggatccaaatcaggagcccagatgaacttaaagaagcgagcatgggattcttagtttttcaagatccgtacacacgaagcctttaatcagcatcaactccagtgtccgttttctctggttttgtgaagactgcacaaaactctcatgatggagaaccaaaggacttagttacctgtttcagtgtcatctaaagtcaactgaaaagtgaagcaggcagtaatacagccatggaaagaaattcaagtttatggaagaacctaatagatgaacacccagtctgcacaacctggaagcaagaggccgaaggagccatttatcatcttgccagtattttatttgtagtaggtttcatgggtggcagtggattcttcgggctcctttatgtcttcagtttgctggggttgggttttctctgttctgctgtctgggcttgggtagatgtctgtgcagctgacatattttcctggaattttgtactgtttgtcatctgcttcatgcaatttgttcatattgcatatcaagttcgcagcataacctttgcccgagaattccaagtgttgtacagctcccttttccagcccctggggatctctttgcctgtcttcagaacgattgctttgagctctgaagtggttactttggaaaaggaacactgttatgccatgcaggggaaaacttccattgataaactctccttgcttgtttcaggaaggatcagagtgacagttgatggcgaatttctgcattacattttcccccttcagttcctggattctcctgagtgggattcactgagacccacagaggaaggcatttttcaggtaaccctcactgcagaaactgattgtcgatatgtgtcttggaggagaaagaaattatatctgctctttgctcagcatcgctacatctcccgccttttttcagtgctaattggcagtgacattgcagataaactctatgccttgaatgacagggtatatataggaaaaagatatcactatgatattcggctacccaacttctatcaaatgtcaactccagaaatacgcagatcacccctgacacaacattttcagaattccagacgatactgtgataaatgacatcaaagtctgaaatttataagtataaaaaaagactctctcttcatcattccccagtgaaatagcaaaatacaaaaaaagagctccctaatgtttttataaatcaaattcagaagcgagatgccattgccaactgttttattcctttcaacaactgcattgtgaataaactttacaaatttttcttgtatttctcattgttataattggggagggggtggataactatgggcagtttgcccttttctgcatcaaaactgggagaatgaaattccactttctcaattcttttctcacatttactcaaatgcattgtcttgccctatagactcaggagttgcttctcaagaaagagccagcaagtattctcagcctgagggtgggttgctactgtccacataggcatttccggaattcacttttttgctacaacctccagtgaaagcaattatttattttaaatgtgcagttacttgatgcgactaaaaagtagaataaatgcaagagataataatatgtgaatcttgaagcctattttattgctacaaataaaataacatttaaa

SEQ ID NO: 16114 - protein, 291 aa, Homo sapiens; identical to SEQ ID NO: 1858

SEQ ID NO: 16115 - DNA, 1496 bp, Homo sapiens
cgccgctccggagcccgctgcggtcacgctgcgcccggcgccgcagggtgggcggcgaggcactcacgagggggacgctgagggcttccgcgcgggccacccgggtcaagcgcgctccgccgggaaacttctgcgggcgccgggctgaagctccgggcagggctgggaaggaaaggaaataccaaaatatttgcagactggatccaaatcaggagcccagatgaacttaaagaagcgagcatgggattcttagtttttcaagatccgtacacacgaagcctttaatcagcatcaactccagtgtccgttttctctggttttgtgaagactgcacaaaactctcatgatggagaaccaaaggacttagttacctgtttcagtgtcatctaaagtcaactgaaaagtgaagcaggcagtaatacagccatggaaagaaattcaagtttatggaagaacctaatagatgaacacccagtctgcacaacctggaagcaagaggccgaaggagccatttatcatcttgccagtattttatttgtagatcagagtgacagttgatggcgaatttctgcattacattttcccccttcagttcctggattctcctgagtgggattcactgagacccacagaggaaggcatttttcaggtaaccctcactgcagaaactgattgtcgatatgtgtcttggaggagaaagaaattatatctgctctttgctcagcatcgctacatctcccgccttttttcagtgctaattggcagtgacattgcagataaactctatgccttgaatgacagggtatatataggaaaaagatatcactatgatattcggctacccaacttctatcaaatgtcaactccagaaatacgcagatcacccctgacacaacattttcagaattccagacgatactgtgataaatgacatcaaagtctgaaatttataagtataaaaaaagactctctcttcatcattccccagtgaaatagcaaaatacaaaaaaagagctccctaatgtttttataaatcaaattcagaagcgagatgccattgccaactgttttattcctttcaacaactgcattgtgaataaactttacaaatttttcttgtatttctcattgttataattggggagggggtggataactatgggcagtttgcccttttctgcatcaaaactgggagaatgaaattccactttctcaattcttttctcacatttactcaaatgcattgtcttgccctatagactcaggagttgcttctcaagaaagagccagcaagtattctcagcctgagggtgggttgctactgtccacataggcatttccggaattcacttttttgctacaacctccagtgaaagcaattatttattttaaatgtgcagttacttgatgcgactaaaaagtagaataaatgcaagagataataatatgtgaatcttgaagcctattttattgctacaaataaaataacatttaaa

SEQ ID NO: 16116 - protein, 43 aa, Homo sapiens; identical to SEQ ID NO: 16112

SEQ ID NO: 16117 - DNA, 882 bp, Homo sapiens
gttttattgaagtataatatgcacacataaatggacatatataaatgtacaacttgatgaattttctgatgaatttcactcaatattccagaatcctgactgtataaggaacatgataacatgaatcttacaggacattatgtcacttattataatgtatgaatttaatattttgcctttcaaaatcataaagggcaagagtcatcagggatctgaaatacacttcctctaccccccacccctccccaattatgtgctctctttctccttcccttataaatgttgttcttgtgttttgataggatcagagtgacagttgatggcgaatttctgcattacattttcccccttcagttcctggattctcctgagtgggattcactgagacccacagaggaaggcatttttcaggtaaccctcactgcagaaactgattgtcgatatgtgtcttggaggagaaagaaattatatctgctctttgctcagcatcgctacatctcccgccttttttcagtgctaattggcagtgacattgcagataaactctatgccttgaatgacagggtatatataggaaaaagatatcactatgatattcggctacccaacttctatcaaatgtcaactccagaaatacgcagatcacccctgacacaacattttcagaattccagacgatactgtgataaatgacatcaaagtctgaaatttataagtataaaaaaagactctctcttcatcattccccagtgaaatagcaaaatacaaaaaaagagctccctaatgtttttataaatcaaattcagaagcgagatgccattgccaactgttttattcctttcaacaactgcattgtgaataaactttacaaatttttcttgt

SEQ ID NO: 16118 - protein, 137 aa, Homo sapiens [sequence omitted]

SEQ ID NO: 16119 - DNA, 1044 bp, Homo sapiens
agtgttcttgaagtcattacttactgagaaaagaatcactatccaagatgaaaaatcaggaacttcaacaacagctcctttatttccatttctacttctgaaataccaaaatatttgcagactggatccaaatcaggagcccagatgaacttaaagaagcgagcatgggattcttagtttttcaagatccgtacacacgaagcctttaatcagcatcaactccagtgtccgttttctctggttttgtgaagactgcacaaaactctcatgatggagaaccaaaggacttagttacctgtttcagtgtcatctaaagtcaactgaaaagtgaagcaggcagtaatacagccatggaaagaaattcaagtttatggaagaacctaatagatgaacacccagtctgcacaacctggaagcaagaggccgaaggagccatttatcatcttgccagtattttatttgtagatcagagtgacagttgatggcgaatttctgcattacattttcccccttcagttcctggattctcctgagtgggattcactgagacccacagaggaaggcatttttcaggtaaccctcactgcagaaactgattgtcgatatgtgtcttggaggagaaagaaattatatctgctctttgctcagcatcgctacatctcccgccttttttcagtgctaattggcagtgacattgcagataaactctatgccttgaatgacagggtatatataggaaaaagatatcactatgatattcggctacccaacttctatcaaatgtcaactccagaaatacgcagatcacccctgacacaacattttcagaattccagacgatactgtgataaatgacatcaaagtctgaaatttataagtataaaaaaagactctctcttcatcattccccagtgaaatagcaaaatacaaaaaaagagctccctaatgtttttataaatcaaattcagaagcgagatgccattgccaactgttttattcctttcaacaactgcattgtgaataaactttacaaatttttcttgt

SEQ ID NO: 16120 - protein, 43 aa, Homo sapiens; identical to SEQ ID NO: 16112

SEQ ID NO: 16121 - DNA, 1120 bp, Homo sapiens
cgccgctccggagcccgctgcggtcacgctgcgcccggcgccgcagggtgggcggcgaggcactcacgagggggacgctgagggcttccgcgcgggccacccgggtcaagcgcgctccgccgggaaacttctgcgggcgccgggctgaagctccgggcagggctgggaaggaaaggaaataccaaaatatttgcagactggatccaaatcaggagcccagatgaacttaaagaagcgagcatgggattcttagtttttcaagatccgtacacacgaagcctttaatcagcatcaactccagtgtccgttttctctggttttgtgaagactgcacaaaactctcatgatggagaaccaaaggacttagttacctgtttcagtgtcatctaaagtcaactgaaaagtgaagcaggcagtaatacagccatggaaagaaattcaagtttatggaagaacctaatagatgaacacccagtctgcacaacctggaagcaagaggccgaaggagccatttatcatcttgccagtattttatttgtagatcagagtgacagttgatggcgaatttctgcattacattttcccccttcagttcctggattctcctgagtgggattcactgagacccacagaggaaggcatttttcaggtaaccctcactgcagaaactgattgtcgatatgtgtcttggaggagaaagaaattatatctgctctttgctcagcatcgctacatctcccgccttttttcagtgctaattggcagtgacattgcagataaactctatgccttgaatgacagggtatatataggaaaaagatatcactatgatattcggctacccaacttctatcaaatgtcaactccagaaatacgcagatcacccctgacacaacattttcagaattccagacgatactgtgataaatgacatcaaagtctgaaatttataagtataaaaaaagactctctcttcatcattccccagtgaaatagcaaaatacaaaaaaagagctccctaatgtttttataaatcaaattcagaagcgagatgccattgccaactgttttattcctttcaacaactgcattgtgaataaactttacaaatttttcttgt

SEQ ID NO: 16122 - protein, 43 aa, Homo sapiens; identical to SEQ ID NO: 16112

SEQ ID NO: 16123 - DNA, 654 bp, Homo sapiens
caaaactcactcaataccactgactacccaagttgttgtttttaatcaaagcaataaactgttcttaaggagttcaaggttgtgaacagacaaaaggattcccttatgcatttggggttgtgccaggcattttgaaaaagtgatgccccagctcctctgtgtttttgcacttaaacatcttggacatttggagccccccaattctgtgcccatagatgacagaagatgttacaatatctgttacattggatagagagtgagaagggagaaggcagagtgcttgcacttctgtaccaatgtattaagccaaacttattgagtgctaaggctcagaaatacaaaagcatttgtctttgcccctgctgcccctgagaatttcagtctaggagaggaaaccagtcaatattgaataatacagcaaattattcatgagcggctctctgtgtctccagcagtattctaagagttacagactgaacagtacaagaacttataggtgttcttgaagtcattacttactgagaaaagaatcactatccaagatgaaaaatcaggaacttcaacaacagctcctttatttccatttctacttctgttggtgattacactgttccattttttactccagctaagtcattttcacctctgtatttt

SEQ ID NO: 16124 - protein, 48 aa, Homo sapiens
MLQYLLHWIESEKGEGRVLALLYQCIKPNLLSAKAQKYKSICLCPCCP

SEQ ID NO: 16125 - DNA, 282 bp, Homo sapiens
aaaatatttttgggaaggaagatgtttcaatctccctcaaatctatgttggggtttatttctgctgccaaggtctaaaacagctatgaagttgtgtcttactatttcttccagtggcctgcaatccactggaaaccatttcctctgttgtccagcaagcagtttaattgagtactgcagtactcttcttgaggcagtacaagttggggaataaactcaagtaaggggtcatgtcctgtttagaagaaacaatcattttaagagtaaagaatttgttttgact

SEQ ID NO: 16126 - protein, 63 aa, Homo sapiens
MFQSPSNLCWGLFLLPRSKTAMKLCLTISSSGLQSTGNHFLCCPASSLIEYCSTLLEAVQVGE

SEQ ID NO: 16127 - DNA, 2641 bp, Homo sapiens
acacaaagggcgaagagaggggcgtggggaggctggaaagcatggttgccccgcctggcccggcgacgcccgctcagcagcctgctgaggagtggggacgaagagcagcctaaacttagggctcgggatatttcgatgccacccaaattgccgtcctaccccaacgaggcagggaaaggagcggagcgcgcgcgcgagctgagtgagtgcttacgtcgcagcgagatctgtgctgggataattagagaggagttgggctgagccgagtcctctttcagcagcagcagccggagccgccgccgcagcccggtggggcaaccctgactcggaccgctcgggagagccccaggagaggccagcgccgcgcagcagccgccccgctgcgcccacctccccggctgctcccggagggctcacaaaggcggtggccgcccgagtggccttctccatccaggcgttcgcgtcctcctccccaccttctctcccgaaggcgaaaatggcagggccaggcgagaacctgggacagcggtggccctagccctgcgatcctcacccctcctgctaggagaggctgcgggctgcccgcggacgatgtggccgcggctgctcccgagcgcatcttcggcccgggtccccgccgccacccctcttctctgctccttccatcccgcccagaggagttgatgccgctgtcgccgccgccgccgctgctgaagccgcggctgatggatgccagggagtgccgcattgcttagcgaccccgcctctgggtttgctgatgatctctctccgccctggagctcagcgctgaagagctaccttattattaatcagaatttccatcgccacccctggcaggcgtatccttcagcagggaccgcaggaacattcacagtgcaggggctgagatgtgcgtgggggttgtttttgttacatcttggaagagaagagaagaggacagtaccaagatcagaaacacccgtgctaggtggaattaggggtgatttgttaggaaagagaaaggacaagaagaggagtgcggagcccttcaggggttcacatctctttaaaggaaaggaaagagggagccaaagtagggtgttgtattttagggggcagaggaagaagtttacaccccccggcccccccagctttgctgggggaaagcaggagcaacagggcacttgattggacaccaagattattaatttcctgtaggggagaggaagcaggcagcaggaggtctgggggctggagtctggtggtggcaaggaccaggtttgctttgggacagtcaacaaggtcttctgagggaaagctcagagataggcagaacaatgactcatttgcaagccggtctctcccctgagaccctggagaaagctcgcctggagctcaatgaaaacccagacacgctgcaccaggacatccaggaggtgagggatatggtcatcaccaggccggacattggctttctgcgcacggatgatgccttcatcttacgcttcttgcgggctaggaagtttcatcactttgaggccttccgcctcctggcgcagtactttgagtaccggcagcagaacctggacatgttcaaaagctttaaggccaccgaccctggcatcaagcaggcactgaaggatggcttccctgggggcctggccaatctggaccactatggcaggaagattctagtcctttttgctgccaattgggatcagagcaggtacacactggtggatattttgcgtgccatcttactttctttagaagccatgattgaagatcctgagcttcaagtgaatgggtttgttttgatcatagactggagtaacttcactttcaagcaagcctctaaactcacaccaagtatgctgcgattagctattgaaggcctgcaggatagtttcccagcgcgatttggaggaattcattttgtcaatcaaccatggtatatccatgccctgtacaccgtgatccggcctttcctgaaggagaaaactcggaaaaggatatttttgcatggtaacaacctgaacagtctacaccaactaattcatcctgagatcctgccctctgagtttggaggaatgctgcctccttatgacatggggacatgggcaagaacactgctagaccatgaatatgacgatgacagcgagtacaatgtagactcctacagcatgcctgtgaaggaagtagagaaggaactctccccaaagtccatgaagagatctcaatcagtagtggatcctacagtactaaaacgcatggataaaaatgaggaagaaaacatgcaaccattgctttctctggactaataacttctctacatccccttcatggattagaaatggaaagtattggttttcagcaacagggacaacactgtagaggaattaccagctggaaaccgacttattcatgttaatgtagcataatatataacaaggcatcaggctttccttggcctgaaccatgggggccctgggctggatttttaaaatgtcaataatttattctgtaagtgccaagttgtttgtaaatataatgtaatcttcatgtcaagtttgtaaatttcagtagtaactcagtttggaaaaaggttggctcaaaagtccatgccagtgttatgaactat

SEQ ID NO: 16128 - protein, 327 aa, Homo sapiens; identical to SEQ ID NO: 1860

SEQ ID NO: 16129 - DNA, 574 bp, Homo sapiens
gttaatataaatgctttctgttttgtaaaataggaacagtatttgattccattatcacagatctcttgtggacaagtcaaaattcttcaattaaggttatatctagttaaaggaatttttctctttggtctacatccccaccctgaatgtccttgcctgttagttccttgcaggtgaaaggtaaaaaacctttgcaacttcatgctataattgtgcctttgaattttcagaggaaaagacagtgagagagcaagagcagattgagaagcagaagagtgagtcgcaaaaagagaaaatgacagaaatggagcaccctggtccatctgaactgtttactgtttgttcatcgattagcagaagagtccaggacaaacgcttgtgcgagtaaatgtagagtcattaacaaggagcatgtactggccgcagcaaaggtaattctaaagaagagcagaggttagaagtcaaagaacatattcttgaaagttatgatgcattcttttgggtggtaacagatcataaagacattttttacacatcagttaatatgggattattaaatattggctataagtga

SEQ ID NO: 16130 - protein, 30 aa, Homo sapiens
MTEMEHPGPSELFTVCSSISRRVQDKRLCE

SEQ ID NO: 16131 - DNA, 1107 bp, Homo sapiens
gataatagagaaattaacagcttgaagaaataacaaaaagttcagtgagttagcatgaaactatacctgaaagttattgcaaggttaagtgagaggaaccttaaaattaaagggagcagcatttgtaaagaaaagctagaatcatgaaaagacctaagataagatcaaatgaaattacgtagaagtgtaaaattcttaactgttagtatctgaaaatcatgcattccttgctaggaaggcatggcattagtgctgtcggaatcctgataaaacatcacaaacttctgttcgttggtattagggacagtatagagtgagtgcttgaagaactgccttggcttaccaatctctctctccacaacttccaatcatctctagggaacctagcagaaacacttccacagagcaaaagttataatacagaaagtgatgaaaggaggacgcaggctctcaatgacgtcaggtattcccgggacccgcccaccgtgggcgttttccacctacaggcaggcgtctccgggggcggggcttgctcagggttaacgtcactactgagcgccgggcgcgttccgttggcggcggattcgaacgttcggactgaggtttttctgcctgaagaagcgtcatacggaccggattgttttcgctggcccagtgtccccggagcttgtgtgcgatacagagagcacctcggaagctgaggcagctggtacttgacagagaggatggcgctgtcgaccatagtctcccagaggaagcagataaagcggaaggctccccgtggctttctaaagcgagtcttcaagcgaaagaagcctcaacttcgtctggagaaaagtggtgacttattggtccatctgaactgtttactgtttgttcatcgattagcagaagagtccaggacaaacgcttgtgcgagtaaatgtagagtcattaacaaggagcatgtactggccgcagcaaaggtaattctaaagaagagcagaggttagaagtcaaagaacatattcttgaaagttatgatgcattcttttgggtggtaacagatcataaagacattttttacacatcagttaatatgggattattaaatattggctataagtg

SEQ ID NO: 16132 - protein, 88 aa, Homo sapiens; identical to SEQ ID NO: 4799

SEQ ID NO: 16133 - DNA, 1898 bp, Homo sapiens
gataatagagaaattaacagcttgaagaaataacaaaaagttcagtgagttagcatgaaactatacctgaaagttattgcaaggttaagtgagaggaaccttaaaattaaagggagcagcatttgtaaagaaaagctagaatcatgaaaagacctaagataagatcaaatgaaattacgtagaagtgtaaaattcttaactgttagtatctgaaaatcatgcattccttgctaggaaggcatggcattagtgctgtcggaatcctgataaaacatcacaaacttctgttcgttggtattagggacagtatagagtgagtgcttgaagaactgccttggcttaccaatctctctctccacaacttccaatcatctctagggaacctagcagaaacacttccacagagcaaaagttataatacagaaagtgatgaaaggaggacgcaggctctcaatgacgtcaggtattcccgggacccgcccaccgtgggcgttttccacctacaggcaggcgtctccgggggcggggcttgctcagggttaacgtcactactgagcgccgggcgcgttccgttggcggcggattcgaacgttcggactgaggtttttctgcctgaagaagcgtcatacggaccggattgttttcgctggcccagtgtccccggagcttgtgtgcgatacagagagcacctcggaagctgaggcagctggtacttgacagagaggatggcgctgtcgaccatagtctcccagaggaagcagataaagcggaaggctccccgtggctttctaaagcgagtcttcaagcgaaagaagcctcaacttcgtctggagaaaagtggtgacttattggtccatctgaactgtttactgtttgttcatcgattagcagaagagtccaggacaaacgcttgtgcgagtaaatgtagagtcattaacaaggagcatgtactggccgcagcaaaggtaattctaaagaagagcagaggttagaagtcaaagaacatattcttgaaagttatgatgcattcttttgggtggtaacagatcataaagacattttttacacatcagttaatatgggattattaaatattggctataagtgatgtgtgtgtttgtattttttttctggcatgaaatatctcaagtaaatgcataggactatttaacccttttatgggaattactattatttttattttaaatgtcctctagttcagtttgcttttgttttgttgctgctgcaaatattttatgtatcaaaaatgaaatcttactatattaaatactttgaaaatgtacttcttagaattaagtttatatatatttagatttagccacagttaactatggaatttaatctctgaagaaaggcaaatgcagtcaaatctaggtgcactttcaatattttaacttttaatgtctttgcaaagcaatgcaatctacttttatattatgccagtagtaatgttataatttctcagctggacaattataaacatcaggtaggtttttcaaaacctatctccctcccaaaaccaaaataatagaaatttggagcaaatgacttattttcttcaagtctcatggatttaatagataatttttccccctaaataagataatttagaagtttattatgtatcatcaaatagttgttacttttaactttttatttagaaataattatagatttcaacatgtagttgcaaagatagtacagagaagtcccatgtacagtacacccagttcccccaatggttacatcttacataactatagtataatatcaaaaccaggaatttcatataggtacagtgtacatgtagttctgttgccattttatggtgtagatttgtttaaccattactgtaattagaaatgtttcattaccaa

SEQ ID NO: 16134 - protein, 88 aa, Homo sapiens; identical to SEQ ID NO: 4799

SEQ ID NO: 16135 - DNA, 3782 bp, Homo sapiens
gataatagagaaattaacagcttgaagaaataacaaaaagttcagtgagttagcatgaaactatacctgaaagttattgcaaggttaagtgagaggaaccttaaaattaaagggagcagcatttgtaaagaaaagctagaatcatgaaaagacctaagataagatcaaatgaaattacgtagaagtgtaaaattcttaactgttagtatctgaaaatcatgcattccttgctaggaaggcatggcattagtgctgtcggaatcctgataaaacatcacaaacttctgttcgttggtattagggacagtatagagtgagtgcttgaagaactgccttggcttaccaatctctctctccacaacttccaatcatctctagggaacctagcagaaacacttccacagagcaaaagttataatacagaaagtgatgaaaggaggacgcaggctctcaatgacgtcaggtattcccgggacccgcccaccgtgggcgttttccacctacaggcaggcgtctccgggggcggggcttgctcagggttaacgtcactactgagcgccgggcgcgttccgttggcggcggattcgaacgttcggactgaggtttttctgcctgaagaagcgtcatacggaccggattgttttcgctggcccagtgtccccggagcttgtgtgcgatacagagagcacctcggaagctgaggcagctggtacttgacagagaggatggcgctgtcgaccatagtctcccagaggaagcagataaagcggaaggctccccgtggctttctaaagcgagtcttcaagcgaaagaagcctcaacttcgtctggagaaaagtggtgacttattggtccatctgaactgtttactgtttgttcatcgattagcagaagagtccaggacaaacgcttgtgcgagtaaatgtagagtcattaacaaggagcatgtactggccgcagcaaaggtatctgaaaactgaagagtggagaatatgttcagcagggaacaagaggattcttttagaaataagaggtagaaggtcacctcaaataccacaaaatgaatgggaagatgaacactatgcaagtactcattaaaaacatcccaaaatgctggaggaaatgccgtggaattaaggaatgactcttttgtggtagaaaatttttatttcagagtatagacactgcttgtgctgggtctcttaattttactggatattataattttcttggactgttagattttctcagtgcaacatttctgagagcaaatatgttctgctcaattaaatactttctaaagctagataaatgccttccagtaagcacattaacattcaatatgttatattttaccagaggtaaaacatttatattctaaaacattatattctaaatttttttaccccagggaaaataaaatgccaaaaatctcaactaccacacatagctttgtaataagatcaatgggcaaatggaatcagcttcagtttgcactaatcctacatatatgtattaaggatatgtgtaatgaactttggccataataaattataactaatttatttcatcagttcactactatatttctttcttgtttgcttctcctcttgtcgtctcttcatatttggtagaatatattttattgaatatctagtttcagattacctgagcttcagattacatggaattttggactgttgaatacttttgattgtgtagtggatataactaagcaattttttttttggggtgcatacttagaatgtaatttctggatcttttgataggcatattgttttagtttgttttctgcttctataacataatactgtagactgggtaatgtataaagaaaagagatttatttccctcagagttctggagattgtccaagatcaaggggctgcatctagtgaaatccttcttgctgtgtcctatatggtggaaagcatcacatggcaaggaagcatgcttgtgacagagagaatgagagctgaacttcatctttttatcagcaaccccctccagcaataattaacccaatcccacaataatggccttaatgtattcatgtgggcagagtccttataactcaatcacctcttgaaggtcccactcttaatgctgtcgcagtagcaattacatttcaacatgagttttggaagggatatttaaaccatagcatacatgtttgctataaaaacgccagttttccaagtgaatgtacccattttaaacacccaccagaatcatttgtgagatctaattgttcattcaatcttactatacttggtatagtcaattattttaattttagcaccataatgaatatgtagtgatattaaatttggtattactttgcattaatgactaaaaattagataacaaatgatattgaacttatttccacatgcttattgatcatttggatatattactttgtgaagttcatttttgaagccttttgcccatttttctttgtgttgtatttattttccatactcatcaaaaacatcccaaaatgctagaggaaatgctctagaattcaggaataacttcttttgtggtagagaatttttatttcagagtatagacactgtttgtgctgggtttcttaattttactggatatcatcattttcttgggctgtttgatcaagtttgattttcccagtgcaacatttctgagagtaaatatggtctgcttaataaaatatgttctaaagccagataagtgctttccagcaagtacaattttccttccagcaagtataatacctggtttataagcattacatatattaatattattattttgtcagatagatataataaaagtttaatatttcaatcttttatggtaagtgctatttatatactgtttaagaaagaggcacccatcatgacaataatgttctatattttcctatgaaagtcttgttttatatttcacatttaggttttgatggtccttaaatataagatttttatacatgatattatgtatggatttaggttaatttatttttatatggatagccaattgacccagaaccacttatcaaaaagacatcctttatacattgaattgcaatagtgttttatcaaaaccagctaagtatttttgagtgagtgtatttctgaactctctaatttgtttcatttgtttaccttttgttgtattatttcctcaccatcttaattatttttagccttataaaagctttgatatttggtagtataagttttcctgtttagtttttcttctgtaatattttcttgactatataaagtccttgcatttctatgtacattttagaataaaactgtcaatttgcacaaaataacaggctgggatttggatagagattatgttgatttgagggagattggcattttatcaatattgtgtctttcagtcaatatacagagtatatctatttagttattttgatattaatttttctcaccaatgttttatggtccttaaggaaaaagccttgcaatgtttctatatatgtgatcctaggtagtggacccttttagatgttattataaatgattttgctttttaattaaatttcatttttcagttatttctagtataaagaaatggaggtgactgattattggaaacatttatttgtaaattttcttatttttaatttttttgtagattcttgtaaattttctgcagaaaatttatatttttttctggctttattgaactgctttgaaactccagtgaaatgttgaataaaagtgctgataattgatatt

SEQ ID NO: 16136 - protein, 84 aa, Homo sapiens
MALSTIVSQRKQIKRKAPRGFLKRVFKRKKPQLRLEKSGDLLVHLNCLLFVHRLAEESRTNACASKCRVINKEHVLAAAKVSEN

SEQ ID NO: 16137 - DNA, 474 bp, Homo sapiens
cggactgaggtttttctgcctgaagaagcgtcatacggaccggattgttttcgctggcccagtgtccccggagcttgtgtgcgatacagagagcacctcggaagctgaggcagctggtacttgacagagaggatggcgctgtcgaccatagtctcccagaggaagcagataaagcggaaggctccccgtggctttctaaagcgagtcttcaagcgaaagaagcctcaacttcgtctggagaaaagtggtgacttattgaagagtccaggacaaacgcttgtgcgagtaaatgtagagtcattaacaaggagcatgtactggccgcagcaaaggtaattctaaagaagagcagaggttagaagtcaaagaacatattcttgaaagttatgatgcattcttttgggtggtaacagatcataaagacattttttacacatcagttaatatgggattattaaatattggctataagtg

SEQ ID NO: 16138 - protein, 67 aa, Homo sapiens
MALSTIVSQRKQIKRKAPRGFLKRVFKRKKPQLRLEKSGDLLKSPGQTLVRVNVESLTRSMYWPQQR

SEQ ID NO: 16139 - DNA, 560 bp, Homo sapiens
cggactgaggtttttctgcctgaagaagcgtcatacggaccggattgttttcgctggcccagtgtccccggagcttgtgtgcgatacagagagcacctcggaagctgaggcagctggtacttgacagagaggatggcgctgtcgaccatagtctcccagaggaagcagataaagcggaaggctccccgtggctttctaaagcgagtcttcaagcgaaagaagcctcaacttcgtctggagaaaagtggtgacttattggtgagattccatcccttctcgggctgggaatggggcacgggagaggtccatctgaactgtttactgtttgttcatcgattagcagaagagtccaggacaaacgcttgtgcgagtaaatgtagagtcattaacaaggagcatgtactggccgcagcaaaggtaattctaaagaagagcagaggttagaagtcaaagaacatattcttgaaagttatgatgcattcttttgggtggtaacagatcataaagacattttttacacatcagttaatatgggattattaaatattggctataagtga

SEQ ID NO: 16140 - protein, 103 aa, Homo sapiens
MALSTIVSQRKQIKRKAPRGFLKRVFKRKKPQLRLEKSGDLLVRFHPFSGWEWGTGEVHLNCLLFVHRLAEESRTNACASKCRVINKEHVLAAAKVILKKSRG

SEQ ID NO: 16141 - DNA, 3567 bp, Homo sapiens
ggtgcgtgtcggggatgcggccgcgcaggcgctcgctccctggcttcctggccgggtagcgggcgttcggctaccggagtccagcctaagggcccagccgaggtctccccgcgcgaggcggttgcgctaggtgagcgggtaccgcggccgcgcctcccttgtcatttactcagcggtcagaggcatcctgcgtctgggagtcccaagtgccttcggctgggtgcccctgtccgatcctcaaaaggaaagcacaaatcccgggtgcgagtctaacccaggaccgaactttcccgcgaacctgaagttaccatggggcgggagccaccttagcgccgcgtccgcccgcccctcgcaccggctaggatgctgcggaaggcaggggcgccgagaggcaagggtgaaagacgccgtccatacccccaaagcccgaacctgcatctcctctgcgaggcgcagggcgggaggaccgctgcagttgggagccggctccggacaggcaaagcgacccgacaggtaaccttccacaggcccacacatgtgttatcagccataccttaggacagaaggaatgagtttgcagaaaggatgacaactccaggaaggaaattggtagactcaacgtccagggaacctacgaatctgctatcccaagccttctgcccccaaacacttcaccctgaaatacagcccagagcatgcactcagtgagtcccactgaagaagagacggaaggcagaactgaacaagatgtgtccagaagaggtagccatagatcatggacatgaccaaaagaagcttactttattttcaaccctacaaccatactgagaatttagccctggggacatcttccgatataatctggcatagaagagtggttatcacacctttagcatgggacccttgagacacctttgctgtgaataatggagaagcaaaaggagttactaatgaagacaaactaaacctgagaacagagagagcctaactatgtgctccagaagtgccatgtgtgtctaagatgaagtttcgctcttcttgcccaggctggagtgcaatggcacaatctcagctcactgcaacctctgcctcctgggttcaagcgattctcctgcctcagccccctgagtagctgggattacagctgggatatctaccttctcctgccctcagacatcagaactcttgtttctcaggccttctggctcagactgaattacacaagctttcctggatctctggcttgcagatgacataccatgggacttcactggccttcatatctgcccaaactggaaacaatccagatgtccctcaacacatgaatggataagcagattttggcatttctatgcaatggaaagctacttattaattaaaaggaatgaactattgatacatgcaccagcatggttacaagtttggggaaggaaaatcacacagaataatcacacatactcggactccaggcccaggtaattatatgaacatgtcaactcatttaatgacagcatggagtttttaccagttatacgtaaatagtgtatttgtacaactggaagtgatttgcaacaactttgacttatcaagaatactaactttagcactgataaatattagtaaaatgttggatgggattcagaccacattggttggaataaaccagtgtaggtttcaggggaagcagagggttagcagcataataaaaattaagagcattaaattcacctaaagggccaggctgacagccctggaggccaatatctttcctttattcccaaagcatgtataacataggcttcacactcaagtattagtaagatttcctctagtgttcttccaataaatttagccattttccatgaaggaatgccttatatatattaaagaaaaaagctttcacctcataatttaaaatttaatcttaaaatttcttaataaaagaaacaattatttcctgggattacgaaaacctccactgtgagtttaaagcacttggagctccttaaaggcagaaactatgtctataagacacattcctcacagaaagggcttggtccaaggtgggtgttctacctatgcttattgagtaaatttattagttaatataatttactaatttttcagcattaagttaaaaaatttcaatcagaataagagttcacacattttgtaactagtacacaaaggccagacactgaagtgccaattatctacccaaaaatatgttgactgaaacaatacaatgtatattttacaatgtaatatttttcctatatgcaatagaaggttaaattctttaaatttctatatacaatatttccatttacaatgccagtggctaatctttcttgcttttttatttagacctatttctatgtgatttttttcttaaagaatatgaggtgtatttcctttttctctaaagagtgcagctattggaattagaaatattttcaaattgtcacataaacatgtctgacattctgcattctatgaatctcattgtatgcacacagctttcatcctcctgttctggactttaggttataccttccacataagattaattaccattccctgttttatgaacccaaagtgctctgggcaatatatcacagcaaaaatgagttctaaagcagtatgataaagtatcttaccatcacagctttacattatttggggatagagtgctcacgaccagtatattttttatttctgcctacattgattgaagttaatattagttaaaaaaaaaaaaaactcaagggacattttaactttaatggcccttatatgtgtggttatagcagagtgcaaaactactaaaatgagttgtcgtaccatggttttatggtactataacaattacctgggaattgcatccatgatagaaaactctacaagtgatcgattatcttgtgctcttcagcagaaaagcactaaatgaatatataaataattgtatcaatgtatgaaatcattggtagccagttgacaaatgctcgagctgcaaaaagcacaaaccaactagaaataacaccacttattacccattctagcaaggtcaacaattggaagtattttggtagaaaagttaagtttctgttttcttccaactaaagaagataatttgtagtactcagaccctgagggtgctaaagtcaagctgtagctaatttggagttttaaagatgcgagagcgtcccctgcttatttcataccatttccccactttgaaagagttcttaagcaaatgtttaccttgtcatcatgtgtaacttgggcaatatgttctgagtattatggggttatgtgctccccactgtgggtttttcacaaaacttcctctagttgctgtgcaaagcaagttactgtgaaggttctccaaggttctggttgatttgtgtttggaataagtcttttgttgttacttgctctctgacagagggactggaaattatctggactttggaagagactttgtgatatttggataatgttctcaaagtgagtagtatattagcatgtggtttacttatgcaaaacaagtcaaaagatgaattt

SEQ ID NO: 16142 - protein, 110 aa, Homo sapiens [sequence omitted]

SEQ ID NO: 16143 - DNA, 945 bp, Homo sapiens
ttaccgggccggacaactcatggcggcggcggcggcggcagctgcttgggcgcggtgcggtgttgactgagctacgagcctggcggagggtgcgcgccgagccccggtccggccaggcccctgcgtgcgtcccaggctccgcacccctgatgctgcgcgggtgctgagcctgctccggccgggacgatggtgaagtatttcctgggccagagcatgctccggagttcctgggaccaagtgttcgccgccttctggcagcggtacccgaatccctatagcaaacatgtcttgacggaagacatagtacaccgggaggtgacccctgaccagaaactgctgtcccggcgactcctgaccaagaccaacaggatgccccgctgagccgagcgactgtttcctgccaatgttgctcactcggtgtacatcctggaggactctgttgtggacccacagaatcagaccatgactaccttcacctggaacatcaaccacgcccggctgatggtggtggaggaacgatgtgtttactgtgtgaactctgacaagtggctggaccgaaatccgccgggaagcctgagtctcctctagcttatttggtgtcttcagagctgtccaggaatttggacttgccggttcaaaagcaacgtgaccaagactatgaagggttttgaatatatcttggcgaagctgcaaggcgaggccccttccaaaacacttgttgggacagccaaggaagccaaggagaaggcaaaggagacggcactggcagctacagagaaggccaaggacctcgccagcaaggcggccaccaagaagcagcagcagcagcagcaacagtttgtgtagccagcccaccaccaccacagcaccccagacagctaggcttagcccctcggccctccctccattgtactttatcattaaaaatcaacttccagccctgtc

SEQ ID NO: 16144 - protein, 64 aa, Homo sapiens [sequence omitted]

SEQ ID NO: 16145 - DNA, 794 bp, Homo sapiens
agactcagcccacctgcacccaggtgaaataaacagccatgttgctcacacaaagcctgtttggtggtctcttcacatggacgcgcatgaaatttggtgccgtgactcggatcgggggacctcccttgggagatcaatcccccgtcctcctgctctttgctccgtgagaaagatccacttacaacctcaggtcctcagaccaaccagcccaagaaacatctcaccaatttcaaatccagaccagaaaatctttctcttccagtcagtgtcattcatttatgaccagcggttgaatccagtcataaaatctgaagctcctgggtacctctacatcactgggcctatgatacactgtttcagaacgtacttacacatggggtgggacgattttcttaactaatacttgtgactactccacagcaaagctggaaacaaaagtattgggtgagctatcttccaaaatctggagatggtttcggagagagtttcattgccataaatttaaagggggattggatttactcaggaaaaattacaagtgagcgtaggagataaactagtaaatgccatatttggcccaccaggcacaaagaagggttataattggctcctttaagtcctatatgcagatatcaaatccctatacttgctctttattgcatagaataaatttacctcactccttactttgaaacatgaaatgaggatcaaattatagtttcaattattgcaaatagttgtacaaatgaaaagattgtcttattgtgggcattacacaaacccaccaaggaata

SEQ ID NO: 16146 - protein, 107 aa, Homo sapiens
MDAHEIWCRDSDRGTSLGRSIPRPPALCSVRKIHLQPQVLRPTSPRNISPISNPDQKIFLFQSVSFIYDQRLNPVIKSEAPGYLYITGPMIHCFRTYLHMGWDDFLN

SEQ ID NO: 16147 - DNA, 504 bp, Homo sapiens
ccaatctctcacctgtgccgatcacctcagtaatttgggaccagaaaatctttctcttccagtcagtgtcattcatttatgaccagcggttgaatccagtcataaaatctgaagctcctgggtacctctacatcactgggcctatgatacactgtttcagaacgtacttacacatggggtgggacgattttcttaactaatacttgtgactactccacagcaaagctggaaacaaaagtattgggtgagctatcttccaaaatctggagatggtttcggagagagtttcattgccataaatttaaagggggattggatttactcaggaaaaattacaagtgagcgtaggagataaactagtaaatgccatatttggcccaccaggcacaaagaagggttataattggctcctttaagtcctatatgcagatatcaaatccctatacttgctctttattgcatagaataaatttacctcactccttactttgaaacatgaaatga

SEQ ID NO: 16148 - protein, 42 aa, Homo sapiens
MPYLAHQAQRRVIIGSFKSYMQISNPYTCSLLHRINLPHSLL

SEQ ID NO: 16149 - DNA, 303 bp, Homo sapiens
cagtaatttggaaacgggctaaggaggtctctcttggcactgagctgtgacaccttgggggagaaaaagtgcaggaccagaaaatctttctcttccagtcagtgtcattcatttatgaccagcggttgaatccagtcataaaatctgaagctcctgggtacctctacatcactgggcctatgatacactgtttcagaacgtacttacacatggggtgggacgattttcttaactaatacttgtgactactccacagcaaagctggaaacaaaagtattgggtgagctatcttccaaaatctgg

SEQ ID NO: 16150 - protein, 39 aa, Homo sapiens
YTVSERTYTWGGTIFLTNTCDYSTAKLETKVLGELSSKI

SEQ ID NO: 16151 - DNA, 2248 bp, Homo sapiens
ggagcgtctcctgctcgcgcacgccagaagcagctcggggtctctccgccgccccgccgctcgcccgcccggatcccgcctgcggcagttgccgcacaacatgctacctgcggccgccccggcggctcctggaaccccggttcgcggcgatgccagccaccccagcgaagccgccgcagttcagtgcttggataatttgaaagtacaatagttggtttccctgtccacccgccccacttcgcttgccatcacagcacgcctatcggatgtgagaggagaagtcccgctgctcgggcactgtctatatacgcctaacacctacatatattttaaaaacattaaatataattaacaatcaaaagaaagaggagaaaggaagggaagcattactgggttactatgcacttgcgactgatttcttggctttttatcattttgaactttatggaatacatcggcagccaaaacgcctcccggggaaggcgccagcgaagaatgcatcctaacgttagtcaaggctgccaaggaggctgtgcaacatgctcagattacaatggatgtttgtcatgtaagcccagactattttttgctctggaaagaattggcatgaagcagattggagtatgtctctcttcatgtccaagtggatattatggaactcgatatccagatataaataagtgtacaaaatgcaaagctgactgtgatacctgtttcaacaaaaatttctgcacaaaatgtaaaagtggattttacttacaccttggaaagtgccttgacaattgcccagaagggttggaagccaacaaccatactatggagtgtgtcagtattgtgcactgtgaggtcagtgaatggaatccttggagtccatgcacgaagaagggaaaaacatgtggcttcaaaagagggactgaaacacgggtccgagaaataatacagcatccttcagcaaagggtaacctgtgtcccccaacaaatgagacaagaaagtgtacagtgcaaaggaagaagtgtcagaagggagaacgaggaaaaaaaggaagggagaggaaaagaaaaaaacctaataaaggagaaagtaaagaagcaatacctgacagcaaaagtctggaatccagcaaagaaatcccagagcaacgagaaaacaaacagcagcagaagaagcgaaaagtccaagataaacagaaatcggtatcagtcagcactgtacactagagggttccatgagattattgtagactcatgatgctgctatctcaaccagatgcccaggacaggtgctctagccattaggaccacaaatggacatgtcagttattgctctgtctaaacaacattcccagtagttgctatattcttcatacaagcatagttaacaacaaagagccaaaagatcaaagaagggatactttcagatggttgtcttgtgtgcttctctgcatttttaaaagacaagacattcttgtacatattatcaataggctataagatgtaacaacgaaatgatgacatctggagaagaaacatcttttccttataaaaatgtgttttcaagctgttgttttaagaagcaaaagatagttctgcaaattcaaagatacagtatcccttcaaaacaaataggagttcagggaagagaaacatccttcaaaggacagtgttgttttgaccgggagatctagagagtgctcagaattagggcctggcatttggaatcacaggatttatcatcacagaaacaactgttttaagattagttccatcactctcatcctgtatttttataagaaacacaagagtgcataccagaattgaatataccatatgggattggagaaagacaaatgtggaagaaatcatagagctggagactacttttgtgctttacaaaactgtgaaggattgtggtcacctggaacaggtctccaatctatgttagcactatgtggctcagcctctgttaccccttggattatatatcaacctgtaaacatgtgcctgtaacttacttccaaaaacaaaatcatacttattagaagaaaattctgattttatagaaaaaaaatagagcaaggagaatataacatgtttgcaaagtcatgtgttttctttctcaatgagggaaaaacaattttattacctgcttaatggtccacctggaactaaaagggatactattttctaacaaggtatatctagtaggggagaaagccaccacaataaatatatttgttaatagtttttc

SEQ ID NO: 16152 - protein, 272 aa, Homo sapiens; identical to SEQ ID NO: 1862

SEQ ID NO: 16153 - DNA, 3050 bp, Homo sapiens
ggagcgtctcctgctcgcgcacgccagaagcagctcggggtctctccgccgccccgccgctcgcccgcccggatcccgcctgcggcagttgccgcacaacatgctacctgcggccgccccggcggctcctggaaccccggttcgcggcgatgccagccaccccagcgaagccgccgcagttcagtgcttggataatttgaaagtacaatagttggtttccctgtccacccgccccacttcgcttgccatcacagcacgcctatcggatgtgagaggagaagtcccgctgctcgggcactgtctatatacgcctaacacctacatatattttaaaaacattaaatataattaacaatcaaaagaaagaggagaaaggaagggaagcattactgggttactatgcacttgcgactgatttcttggctttttatcattttgaactttatggaatacatcggcagccaaaacgcctcccggggaaggcgccagcgaagaatgcatcctaacgttagtcaaggctgccaaggaggctgtgcaacatgctcagattacaatggatgtttgtcatgtaagcccagactattttttgctctggaaagaattggcatgaagcagattggagtatgtctctcttcatgtccaagtggatattatggaactcgatatccagatataaataagtgtacaaaatgcaaagctgactgtgatacctgtttcaacaaaaatttctgcacaaaatgtaaaagtggattttacttacaccttggaaagtgccttgacaattgcccagaagggttggaagccaacaaccatactatggagtgtgtcagtattgtgcactgtgaggtcagtgaatggaatccttggagtccatgcacgaagaagggaaaaacatgtggcttcaaaagagggactgaaacacgggtccgagaaataatacagcatccttcagcaaagggtaacctgtgtcccccaacaaatgagacaagaaagtgtacagtgcaaaggaagaagtgtcagaagggagaacgaggaaaaaaaggaagggagaggaaaagaaaaaaacctaataaaggagaaagtaaagaagcaatacctgacagcaaaagtctggaatccagcaaagaaatcccagagcaacgagaaaacaaacagcagcagaagaagcgaaaagtccaagataaacagaaatcggtatcagtcagcactgtacactagagggttccatgagattattgtagactcatgatgctgctatctcaaccagatgcccaggacaggtgctctagccattaggaccacaaatggacatgtcagttattgctctgtctaaacaacattcccagtagttgctatattcttcatacaagcatagttaacaacaaagagccaaaagatcaaagaagggatactttcagatggttgtcttgtgtgcttctctgcatttttaaaagacaagacattcttgtacatattatcaataggctataagatgtaacaacgaaatgatgacatctggagaagaaacatcttttccttataaaaatgtgttttcaagctgttgttttaagaagcaaaagatagttctgcaaattcaaagatacagtatcccttcaaaacaaataggagttcagggaagagaaacatccttcaaaggacagtgttgttttgaccgggagatctagagagtgctcagaattagggcctggcatttggaatcacaggatttatcatcacagaaacaactgttttaagattagttccatcactctcatcctgtatttttataagaaacacaagagtgcataccagaattgaatataccatatgggattggagaaagacaaatgtggaagaaatcatagagctggagactacttttgtgctttacaaaactgtgaaggattgtggtcacctggaacaggtctccaatctatgttagcactatgtggctcagcctctgttaccccttggattatatatcaacctgtaaacatgtgcctgtaacttacttccaaaaacaaaatcatacttattagaagaaaattctgattttatagaaaaaaaatagagcaaggagaatataacatgtttgcaaagtcatgtgttttctttctcaatgagggaaaaacaattttattacctgcttaatggtccacctggaactaaaagggatactattttctaacaaggtatatctagtaggggagaaagccaccacaataaatatatttgttaatagtttttcaagttttgttcactctgttttattgtttgttttattgagaaattcttactcttagagactcatgaattaagaaagagaattctgctaactcagagaacctggttcctatgtaattcagaatatattacatttctcagtaatatttgttttttgaatccacctttatctgagccaatggagatttacttatagcgtattaggagatatttattccattttcttattttaatcaacattctaattatagacacatgggcctccctagctgatttcactgctcccccttcattgcttagaaatgggcatcatttcttgtatgtcagatccccctgcatcttcaacatttagtcttttcttctccatattttctatctgtggatctctttaggggattgaagtcaccctagctgaaggcctcaccagtgtttcacagaggacacagcccaccccttgcaggaggaggtatctctgagtgtgcagcacagaatcgcatgacccaccttaaccttcctgttgtcatggaaggatgcacggctgctctgtccactgtgattcctagccctctcaagatcactgctttctgaagaatttgcaatgactctggcttctggctgcttatctctggacacccgttctccaccagttgtacagttcatgtaatctacttggcttaattgattttccacttctctcttcctcttctaagatataaacattttaaatgatttattcctgtttcttattctggtgtttctttccttgtccctatgagataagtgtctcaactcactaaatctattcc

SEQ ID NO: 16154 - protein, 272 aa, Homo sapiens; identical to SEQ ID NO: 1862

SEQ ID NO: 16155 - DNA, 8192 bp, Homo sapiens
cagcgactcctctggctcccgagaagtggatccggtcgcggccactacgatgccgggagccgccggggtcctcctccttctgctgctctccggaggcctcgggggcgtacaggcgcagcggccgcagcagcagcggcagtcacaggcacatcagcaaagaggtttattccctgctgtcctgaatcttgcttctaatgctcttatcacgaccaatgcaacatgtggagaaaaaggacctgaaatgtactgcaaattggtagaacatgtccctgggcagcctgtgaggaacccgcagtgtcgaatctgcaatcaaaacagcagcaatccaaaccagagacacccgattacaaatgctattgatggaaagaacacttggtggcagagtcccagtattaagaatggaatcgaataccattatgtgacaattaccctggatttacagcaggtgttccagatcgcgtatgtgattgtgaaggcagctaactccccccggcctggaaactggattttggaacgctctcttgatgatgttgaatacaagccctggcagtatcatgctgtgacagacacggagtgcctaacgctttacaatatttatccccgcactgggccaccgtcatatgccaaagatgatgaggtcatctgcacttcattttactccaagatacaccccttagaaaatggagagattcacatctctttaatcaatgggagaccaagtgccgatgatccttctccagaactgctagaatttacctccgctcgctatattcgcctgagatttcagaggatccgcacactgaatgctgacttgatgatgtttgctcacaaagacccaagagaaattgaccccattgtcaccagaagatattactactcggtcaaggatatttcagttggagggatgtgcatctgctatggtcatgccagggcttgtccacttgatccagcgacaaataaatctcgctgtgagtgtgagcataacacatgtggcgatagctgtgatcagtgctgtccaggattccatcagaaaccctggagagctggaacttttctaactaaaactgaatgtgaagcatgcaattgtcatggaaaagctgaagaatgctattatgatgaaaatgttgccagaagaaatctgagtttgaatatacgtggaaagtacattggagggggtgtctgcattaattgtacccaaaacactgctggtataaactgcgagacatgtactgatggcttcttcagacccaaaggggtatctccaaattatccaaggccatgccagccatgtcattgcgatccaattggttccttaaatgaagtctgtgtcaaggatgagaaacatgctcgacgaggtttggcacctggatcctgtcattgcaaaactggttttggaggtgtgagctgtgatcggtgtgccaggggctacactggctacccggactgcaaagcctgtaactgcagtgggttagggagcaaaaatgaggatccttgttttggcccctgtatctgcaaggaaaatgttgaaggaggagactgtagtcgttgcaaatccggcttcttcaatttgcaagaggataattggaaaggctgcgatgagtgtttctgttcaggggtttcaaacagatgtcagagttcctactggacctatggcaaaatacaagatatgagtggctggtatctgactgaccttcctggccgcattcgagtggctccccagcaggacgacttggactcacctcagcagatcagcatcagtaacgcggaggcccggcaagccctgccgcacagctactactggagcgcgccggctccctatctgggaaacaaactcccagcagtaggaggacagttgacatttaccatatcatatgaccttgaagaagaggaagaagatacagaacgtgttctccagcttatgattatcttagagggtaatgacttgagcatcagcacagcccaagatgaggtgtacctgcacccatctgaagaacatactaatgtattgttacttaaagaagaatcatttaccatacatggcacacattttccagtccgtagaaaggaatttatgacagtgcttgcgaatttgaagagagtcctcctacaaatcacatacagctttgggatggatgccatcttcaggttgagctctgttaaccttgaatccgctgtctcctatcctactgatggaagcattgcagcagctgtagaagtgtgtcagtgcccaccagggtatactggctcctcttgtgaatcttgttggcctaggcacaggcgagttaacggcactatttttggtggcatctgtgagccatgtcagtgctttggtcatgcggagtcctgtgatgacgtcactggagaatgcctgaactgtaaggatcacacaggtggcccatattgtgataaatgtcttcctggtttctatggcgagcctactaaaggaacctctgaagactgtcaaccctgtgcctgtccactcaatatcccatccaataactttagcccaacgtgccatttagaccggagtcttggattgatctgtgatggatgccctgtcgggtacacaggaccacgctgtgagaggtgtgcagaaggctattttggacaaccctctgtacctggaggatcatgtcagccatgccaatgcaatgacaaccttgacttctccatccctggcagctgtgacagcttgtctggctcctgtctgatatgtaaaccaggtacaacaggccggtactgtgagctctgtgctgatggatattttggagatgcagttgatgcgaagaactgtcagccctgtcgctgtaatgccggtggctctttctctgaggtttgccacagtcaaactggacagtgtgagtgcagagccaacgttcagggtcagagatgtgacaaatgcaaggctgggacctttggcctacaatcagcaaggggctgtgttccctgcaactgcaattcttttgggtctaagtcattcgactgtgaagagagtggacaatgttggtgccaacctggagtcacagggaagaaatgtgaccgctgtgcccacggctatttcaacttccaagaaggaggctgcacagcttgtgaatgttctcatctgggtaataattgtgacccaaagactgggcgatgcatttgccctcccaataccattggagagaaatgttctaaatgtgcacccaatacctggggccacagcattaccactggttgtaaggcttgtaactgcagcacagtgggatccttggatttccaatgcaatgtaaatacaggccaatgcaactgtcatccaaaattctctggtgcaaaatgtacagagtgcagtcgaggtcactggaactaccctcgctgcaatctctgtgactgcttcctccctgggacagatgccacaacctgtgattcagagactaaaaaatgctcctgtagtgatcaaactgggcagtgcacttgtaaggtgaatgtggaaggcatccactgtgacagatgccggcctggcaaattcggactcgatgccaagaatccacttggctgcagcagctgctattgcttcggcactactacccagtgctctgaagcaaaaggactgatccggacgtgggtgactctgaaggctgagcagaccattctacccctggtagatgaggctctgcagcacacgaccaccaagggcattgtttttcaacatccagagattgttgcccacatggacctgatgagagaagatctccatttggaacctttttattggaaacttccagaacaatttgaaggaaagaagttgatggcctatgggggcaaactcaagtatgcaatctatttcgaggctcgggaagaaacaggtttctctacatataatcctcaagtgatcattcgaggtgggacacctactcatgctagaattatcgtcaggcatatggctgctcctctgattggccaattgacaaggcatgaaattgaaatgacagagaaagaatggaaatattatggggatgatcctcgagtccatagaactgtgacccgagaagacttcttggatatactatatgatattcattacattcttatcaaagctacttatggaaatttcatgcgacaaagcaggatttctgaaatctcaatggaggtagctgaacaaggacgtggaacaacaatgactcctccagctgacttgattgaaaaatgtgattgtcccctgggctattctggcctgtcctgtgaggcatgcttgccgggattttatcgactgcgttctcaaccaggtggccgcacccctggaccaaccctgggcacctgtgttccatgtcaatgtaatggacacagcagcctgtgtgaccctgaaacatcgatatgccagaattgtcaacatcacactgctggtgacttctgtgaacgatgtgctcttggatactatggaattgtcaagggattgccaaatgactgtcagcaatgtgcctgccctctgatttcttccagtaacaatttcagcccctcttgtgtcgcagaaggacttgacgactaccgctgcacggcttgtccacggggatatgaaggccagtactgtgaaaggtgtgcccctggctatactggcagtccaggcaaccctggaggctcctgccaagaatgtgagtgtgatccctatggctcactgcctgtgccctgtgaccctgtcacaggattctgcacgtgccgacctggagccacgggaaggaagtgtgacggctgcaagcactggcatgcacgcgagggctgggagtgtgttttttgtggagatgagtgcactggccttcttctcggtgacttggctcgcctggagcagatggtcatgagcatcaacctcactggtccgctgcctgcgccatataaaatgctgtatggtcttgaaaatatgactcaggagctaaagcacttgctgtcacctcagcgggccccagagaggcttattcagctggcagagggcaatctgaatacactcgtgaccgaaatgaacgagctgctgaccagggctaccaaagtgacagcagatggcgagcagaccggacaggatgctgagaggaccaacacaagagcaaagtccctgggagaattcattaaggagcttgcccgggatgcagaagctgtaaatgaaaaagctataaaactaaatgaaactctaggaactcgagacgaggcctttgagagaaatttggaagggcttcagaaagagattgaccagatgattaaagaactgaggaggaaaaatctagagacacaaaaggaaattgctgaagatgagttggtagctgcagaagcccttctgaaaaaagtgaagaagctgtttggagagtcccggggggaaaatgaagaaatggagaaggatctccgggaaaaactggctgactacaaaaacaaagttgatgatgcttgggaccttttgagagaagccacagataaaatcagagaagctaatcgcctatttgcagtaaatcagaaaaacatgactgcattggagaaaaagaaggaggctgttgaaagcggcaaacgacaaattgagaacactttaaaagagggcaatgacatactcgatgaagccaaccgtcttgcagatgaaatcaactccatcatagactatgttgaagacatccaaactaaattgccacctatgtctgaggagcttaatgataaaatagatgacctctcccaagaaataaaggacaggaagcttgctgagaaggtgtcccaggctgagagccacgcagctcagttgaatgactcatctgctgtccttgatggaatccttgatgaggctaaaaacatctccttcaatgccactgcagccttcaaagcttacagcaatattaaggactatattgatgaagctgagaaagttgccaaagaagccaaagatcttgcacatgaagctacaaaactggcaacaggtcctcggggtttattaaaggaagatgccaaaggctgtcttcagaaaagcttcaggattcttaacgaagccaagaagttagcaaatgatgtaaaagaaaatgaagaccatctaaatggcttaaaaaccaggatagaaaatgctgatgctagaaatggggatctcttgagaactttgaatgacactttgggaaagttatcagctattccaaatgatacagctgctaaactgcaagctgttaaggacaaagccagacaagccaacgacacagctaaagatgtactggcacagattacagagctccaccagaacctcgatggcctgaagaagaattacaataaactagcagacagcgtcgccaaaacgaatgctgtggttaaagatccttccaagaacattctatgcagttgccgatgcagatgccactgtcaaaaatttagaacaggaagctgaccggctaatagataaactcaaacccatcaaggaacttgaggataacctaaagaaaaacatctctgagataaaggaattgataaaccaagctcggaaacaagccaattctatcaaagtatctgtgtcttcaggaggtgactgcattcgaacatacaaaccagaaatcaagaaaggaagttacaataatattgttgtcaacgtaaagacagctgttgctgataacctcctcttttatcttggaagtgccaaatttattgactttctggctatagaaatgcgtaaaggcaaagtcagcttcctctgggatgttggatctggagttggacgtgtagagtacccagatttgactattgatgactcatattggtaccgtatcgtagcatcaagaactgggagaaatggaactatttctgtgagagccctggatggacccaaagccagcattgtgcccagcacacaccattcgacgtctcctccagggtacacgattctagatgtggatgcaaatgcaatgctgtttgttggtggcctgactgggaaattaaagaaggctgatgctgtacgtgtgattacattcactggctgcatgggagaaacatactttgacaacaaacctataggtttgtggaatttccgagaaaaagaaggtgactgcaaaggatgcactgtcagtcctcaggtggaagatagtgaggggactattcaatttgatggagaaggttatgcattggtcagccgtcccattcgctggtaccccaacatctccactgtcatgttcaagttcagaacattttcttcgagtgctcttctgatgtatcttgccacacgagacctgagagatttcatgagtgtggagctcactgatgggcacataaaagtcagttacgatctgggctcaggaatggcttccgttgtcagcaatcaaaaccataatgatgggaaatggaaatcattcactctgtcaagaattcaaaaacaagccaatatatcaattgtagatatagatactaatcaggaggagaatatagcaacttcgtcttctggaaacaactttggtcttgacttgaaagcagatgacaaaatatattttggtggcctgccaacgctgagaaacttgaggccagaagtaaatctgaagaaatattccggctgcctcaaagatattgaaatttcaagaactccgtacaatatactcagtagtcccgattatgttggtgttaccaaaggatgttccctggagaatgtttacacagttagctttcctaagcctggttttgtggagctctcccctgtgccaattgatgtaggaacagaaatcaacctgtcattcagcaccaagaatgagtccggcatcattcttttgggaagtggagggacaccagcaccacctaggagaaaacgaaggcagactggacaggcctattatgcaatactcctcaacaggggccgtctggaagtgcatctctccacaggggcacgaacaatgaggaaaattgtgatcagaccagagccgaatctgtttcatgatggaagagaacattccgttcatgtagagcgaactagaggcatctttacagttcaagtggatgaaaacagaagatacatgcaaaacctgacagttgaacagcctatcgaagttaaaaagcttttcgttgggggtgctccacctgaatttcaaccttccccactcagaaatattcctccttttgaaggctgcatatggaatcttgttattaactctgtccccatggactttgcaaggcctgtgtccttcaaaaatgctgacattggtcgctgtgcccatcagaaactccgtgaa

SEQ ID NO: 16156 - protein, 2107 aa, Homo sapiens [sequence omitted]

SEQ ID NO: 16157 - DNA, 395 bp, Homo sapiens
ccaccctttatagcagttacctgttaccaacctggacagcctgagacaacatgaataagattccatcaattctcagatgcttttcggctagccatactctcaagaaaaatgtgtgtgcttttcttagcacggaacaccagcaaaaagactacatccatctcctgccaactggattgattcatttatgacaagaacttagaattcgaacattacccccgattgttttggaaattattaaaagattgtcaatggaaagatttacaaaaacactggagaaaatgaggggctaacacactgcaattctagtgacagagcccctcatgttaaagagtgaccctcccattatgtaaacattgttggaaaacaattataaaacaggatgcattgtataagct

SEQ ID NO: 16158 - protein, 45 aa, Homo sapiens [sequence omitted]

SEQ ID NO: 16159 - DNA, 1037 bp, Homo sapiens
actgtcttggaattcatgagatggaagcataggtcaaagctgtttggagaaaatcggaagtacagttttatctagccacatcttggaggagacagaatctggatagtatgctccacggcactgggatgaaatcagactccgaccagaaaaagtcagaaaatggagtaaccttagcaccagaggataccttgccttttttcaagtgctattgctgagggcactgcccagatgatgctattaataacacatgcataactaatggacgttgctttgccatcatagaagaagatgaccagggagaaaccacattagcttcagggtgtatgaaatatgaaggatctgattttcagtgcaaagattctccaaaagcccagctacgccggacaatagaatgttgtcggaccaatttatgtaaccagtatttgcaacccacatgccccctgttgtcataggtccgttttttgatggcagcattcgatggctggttttgctcatttctatggctgtctgcataattgctatgatcatcttctccagctgcttttgttacaaacattattgcaagagcatctcaagcagacgtcgttacaatcgtgatttggaacaggatgaagcatttattccagttggaaaatcactaaaagaccttattgaccagtcacaaagttctggtagtgggtctggactacctttattggttcagcgaactattgccaaacagattcagatggtccggcaagttggtaaaggccgatatggagaagtacggatgggcaaatggcatggcgaaagagtggcggtgaaagtattctttaccactgaagaagccagctggtttcgagaaacagaaatctaccaaactgtgctaatgcgccatgaaaacatacttggtttcatagcggcagatattaaaggtacaggttcctggactcagctctatttgattactgattaccatgaaaatggatctctctatgacttcctgaaatgtgctacgctggacaccagagccctgcttaaattggcttattcagctg

SEQ ID NO: 16160 - protein, 200 aa, Homo sapiens
MPPVVIGPFFDGSIRWLVLLISMAVCIIAMIIFSSCFCYKHYCKSISSRRRYNRDLEQDEAFIPVGKSLKDLIDQSQSSGSGSGLPLLVQRTIAKQIQMVRQVGKGRYGEVRMGKWHGERVAVKVFFTTEEASWFRETEIYQTVLMRHENILGFIAADIKGTGSWTQLYLITDYHENGSLYDFLKCATLDTRALLKLAYS

SEQ ID NO: 16161 - DNA, 2390 bp, Homo sapiens
aaaagacgcggccaaggcccgctcggtccacgcttcccgccggcccggcaaggggttccggagaacggcttgggggggcgagaaccatgggcgggggaaatggaagacagagggaactgaagcacgggggtcttcgatgagcagtgcggatgttcgactccaaacatcaaagccaacgagaggttcaggttactcctccttgaccccaaacatccagtgagtggagactggcctgttcacagagtaaaatatgtcgtctctaattcggcaaagacggtgatgactgtatatatgcaggccaattccgctctccaagagattctaactcagtcacagtttgaaccactactgaaccactgctgttaggaagctacaacccaaaagaaaagccccacagatgctgagagctggtgatcctcaggataaaacaaaggaaccagaaccacatccactgatcggatttgcctggggaggaggggtgctctctcctttgatcttctcttctggaagagatggaccaaaagcctctccagcaataatccgaaatgattcttgaagactatctttccagcttgtcacatatgcaaggtgtatttacaggagacagcaatggaaacctggtcagttgagcaggtctgcagttggttggtggagaaaaatttaggagagctagttcatagatttcaagaggaagaagtaagtggggccgctcttcttgcacttaatgatcggatggttcagcaactggtaaagaaaattgggcaccaggctgttctgatggatttaattaaaaaatacaagcagaacactcaaggactgaagtccccagaaaaccccaaaaaggcagccctggtcatgcaaacagaagcagctcgagattacagggatgaagagtcctccagtccagccaggcatggggagcagatgccatctttctatccagctgaaaaccttgataatggactaattgaccaaagagtattgaaacagagaagaaatgtgaaacaaattctagcaagaagcaaagcattacagtggacgaagtcctatgttttaccagagtttccctatgatgtcaaatgcatgttagcagagcagaagtgcccggatcacagcatgaggataaggatcattgagtttctccaggccgacatgactaagtatctggaaggctcactgtaccccagcacccagcagtacaatgacgtggttaatgccctgctgcaggcccaccctttcctggatgaggatggctgtggcttctttttatggaaacgagccctcaaagatcgctttaaatatgttcgaagacccatagaagatgatgagcaagtgattagaaataagtgtaaatttggacaccgaagaggccagacaaggaaatctcttgctgatataagatttgatgaaattaaacttgtccagataaaagaagaagctgtttgttttgattctgagctagatgaacatattaagtggttccagcaagaatacgtgaaaacagaaaaggactggagagaaattgacaagagaatgagccaaactttggaaataagaagaaagatgattggcagccgaacacctctgaaggacattcttaaactgtttcctttcttgaagtgcccttatcagatgttcagagaattccaacttcttacaagaacagatatttataagaaaacaaggcacattttggaatcctattcagaaaatatactgacttctttttcagtggtggacaatccaatcaatattgtattgcaagaaaaaatgaaacattacacagatgaagacatgttgaaatacatgaagatgacagccacatgtttactcctcccagatgtttttggggatgatcccagcctttttgtcatcatgaatgaacaggtgcaagtgtccacacctgtgttggaagttaaaaaccctttcaacatggaggtctgcgaattttctttatatttagaaagggagaggctcacaaaggtggacgactgtgttacagccttggctgcgctagtagctgcctttcatgtatttaggattgagtgtccaagaagactgtcccaaactttcaacttcctagaaacgctgattttcgatatgcacagtccttattttccttctttgaaagaaaaggaaaacgaagtaggatttcagcacccactcacttaatagcatgccaaatattgtactggaatttacctctgggaaaactgaagcttcataagaaattgttttgatttagggttgtggtagaggtaggtatgagaaaatcatcttgtatttatagatgctaatgaatttcaatgctttctatctttacacttagatattaagttctttgtgaaattctgtaataaaattctacttcattaaagagctgtcgattt

SEQ ID NO: 16162 - protein, 520 aa, Homo sapiens
METWSVEQVCSWLVEKNLGELVHRFQEEEVSGAALLALNDRMVQQLVKKIGHQAVLMDLIKKYKQNTQGLKSPENPKKAALVMQTEAARDYRDEESSSPARHGEQMPSFYPAENLDNGLIDQRVLKQRRNVKQILARSKALQWTKSYVLPEFPYDVKCMLAEQKCPDHSMRIRIIEFLQADMTKYLEGSLYPSTQQYNDVVNALLQAHPFLDEDGCGFFLWKRALKDRFKYVRRPIEDDEQVIRNKCKFGHRRGQTRKSLADIRFDEIKLVQIKEEAVCFDSELDEHIKWFQQEYVKTEKDWREIDKRMSQTLEIRRKMIGSRTPLKDILKLFPFLKCPYQMFREFQLLTRTDIYKKTRHILESYSENILTSFSVVDNPINIVLQEKMKHYTDEDMLKYMKMTATCLLLPDVFGDDPSLFVIMNEQVQVSTPVLEVKNPFNMEVCEFSLYLERERLTKVDDCVTALAALVAAFHVFRIECPRRLSQTFNFLETLIFDMHSPYFPSLKEKENEVGFQHPLT

SEQ ID NO: 16163 - DNA, 3512 bp, Homo sapiens
ccaaagatgggttttgtctgcgggtgatttgggctctcgaagtgcaactttgtggccgggacgcggatcggccggcctgggctcctgcagagcagatcctgtctgcgtcctccaggaggagtgggtggcaggactggggtttcccacaggttttggggcggcggcgagattggcacggtccggggtcgcaggcgcgcagccacgcccctggaagtccgccccggcccccgcccccaacccgcctcttcggggctttatggcgtgaggtttggggctgggatccatctggagccgagcagaaaacttttcccctcccgttcccggtcccttttgtctttcttggacgcggtggcggcgccgcctgagcggcgactccctctcccctgcccggcttgctgcgcccggtgccctccgagggcaggcgcgcctggactctgcgcccggatggcggcggccctctgtgagcaccggcagcggcgcatcccctgccccgaggcctccggtgcccccccggcgcgggcataggggcgcccccaccctccgtccgcttgcaccccttgccacccgccccctcgcctgactcatccgcccgcggtggccgcccgagccctgggatggggagggagaccgcggctgcccgcggcggccgagattcccgctgacgcccccgaccctgccgccttcttcgtccgcctccagaggcgcccgacgtcccgacagctcctggagtgagaccaggactgagaacagggagaggcgacccgacccccagggcccggtgctcaggacagcacacagagccgctgaaaacgactgaagagagcaagggatttcctgggacatctggctctggagagtaaaaggccaagctatgatagcaactggtggagtgataactggcctggccgccttgaaaaggcaagactctgccagatcacagcagcatgtcaacctcagcccgtctcctgctacccaagagaagaagcccatcaggcgccggccccgggcagatgttgtggttgttcgtggcaaaatccggctttattccccatctggtttttttcttattttaggagtgctcatctccattataggaattgctatggccgttcttggatattggccccaaaaagaacattttattgatgctgaaacaacactgtcaacaaatgaaactcaggtcattcggaatgaaggcggtgtggtggttcgcttctttgagcagcatttgcattctgataagatgaaaatgcttggcccattcaccatggggattggcattttcattttcatttgtgctaatgccattcttcatgaaaaccgtgacaaagagaccaaaatcatacacatgagggatatctattccacagtcattgacattcacacgctaagaatcaaggagcaaaggcaaatgaacggcatgtacactggtttgatgggagaaacagaagtaaaacagaatgggagctcctgtgcctcgagattggcagcaaatacgatcgcctctttctcgggttttcggagcagttttcgaatggacagctccgtggaggaggatgaacttatgttaaatgaaggtaagagttctgggcatcttatgccccctttgctctctgacagctctgtgtctgtctttggcctctatccacctccttccaagacaactgatgataagaccagcggctctaagaaatgtgaaaccaagtcaattgtgtcatcgtccatcagtgcttttacattgcctgtgatcaaacttaataactgtgttattgatgagcccagtatagataacatcactgaagatgctgacaacctcaaaagtaggtcaaggaatttgtcaatggattcccttgtggttcctttgcccaacaccagtgaatccttccagcccgtcagcacagtgctaccaaggaataattccattggggagtcgttgtcgagtcagtacaagtcatctatggctctcggacctggggctggacagctcttgtctcctggggctgccagaagacagtttgggtccaatacatccttgcatttgctctcgtcacactcaaagtccttggacttagaccggggtccctccactctaactgttcaggcagaacaacggaaacatccaagttggcctaggttggatcggaacaacagcaagggatatatgaaactagagaacaaagaagacccgatggataggttgcttgtgccccaagttgccatcaaaaaggactttaccaataaggagaagcttcttatgatttcaagatctcacaataatttgagttttgaacatgatgagtttttgagtaacaacctaaagaggggaacttctgaaacaaggttttaatgttaaaagaatatatcattttacaagggtatatattttaaaacgattttcactggtgtttccttcttaaagtattggctgtaagcctttttaatcaaatggtttgtagtgtattagaattggctgcttagttctgtaatgaagatggttgtatgtttgggttacttgtgactgcagtactctatgttaccacacatgattttatttttctcttcctttgaaagcatgatctcttttattaatatgaatgcaaaatgcttgcatccaaattaaagcttattttctttacttttaagttctttgattgccctattcataaaatgaaatgtccagtatggaaaacatagggtaccaaagtgtggaccaggagtacaaattcagtcccaatactcaatacgtattatagatgactatgagtgcaaaccttaggatgtgattttctgaataattgttctttgtaggatttggttacattatttaaaatgaaaaagatctagttttagtgtgagctcagtaatgttaattggttaagttcattgtgaatcttgagttttagataagtagttatttttttcaatatcacttctgtttttagtgatattatatcaagaaacaacgtattcaagagccatggctgacagtgccagatatacttagggataaacatcaaaatgcaattatagttgctataacgttagatactcggaatcaaaatttatttgcaagctgacttgataaactaaatgaaccaataaaatttgtagaaatgctatcctgaaataattatatacatgaagacaatgttgactaatgaattaagatacattatatactagttaatgctaactagtctcagtacctgtttttagccatctgttactgtccaatagcacctcattcccacattctattttcccccggtattctttagatcctagtatttggaaaacaatcggctaaccttgacatttctttttaccttcatatgccactatctcggtagttcaaaaaaatttagttcttgataaattgccttgaagtttaccttgtgctggagagccttatgataactccaaagactttcttacggtataatacatgttgtttaggattgtgtttcttagtcactgaagataataaatattaaaatggatgttttcatcag

SEQ ID NO: 16164 - protein, 491 aa, Homo sapiens; identical to SEQ ID NO: 1866

SEQ ID NO: 16165 - DNA, 3811 bp, Homo sapiens
ccaaagatgggttttgtctgcgggtgatttgggctctcgaagtgcaactttgtggccgggacgcggatcggccggcctgggctcctgcagagcagatcctgtctgcgtcctccaggaggagtgggtggcaggactggggtttcccacaggttttggggcggcggcgagattggcacggtccggggtcgcaggcgcgcagccacgcccctggaagtccgccccggcccccgcccccaacccgcctcttcggggctttatggcgtgaggtttggggctgggatccatctggagccgagcagaaaacttttcccctcccgttcccggtcccttttgtctttcttggacgcggtggcggcgccgcctgagcggcgactccctctcccctgcccggcttgctgcgcccggtgccctccgagggcaggcgcgcctggactctgcgcccggatggcggcggccctctgtgagcaccggcagcggcgcatcccctgccccgaggcctccggtgcccccccggcgcgggcataggggcgcccccaccctccgtccgcttgcaccccttgccacccgccccctcgcctgactcatccgcccgcggtggccgcccgagccctgggatggggagggagaccgcggctgcccgcggcggccgagattcccgctgacgcccccgaccctgccgccttcttcgtccgcctccagaggcgcccgacgtcccgacagctcctggagtgagaccaggactgagaacagggagaggcgacccgacccccagggcccggtgctcaggacagcacacagagccgctgaaaacgactgaagagagcaagggatttcctgggacatctggctctggagagtaaaaggccaagctatgatagcaactggtggagtgataactggcctggccgccttgaaaaggcaagactctgccagatcacagcagcatgtcaacctcagcccgtctcctgctacccaagagaagaagcccatcaggcgccggccccgggcagatgttgtggttgttcgtggcaaaatccggctttattccccatctggtttttttcttattttaggagtgctcatctccattataggaattgctatggccgttcttggatattggccccaaaaagaacattttattgatgctgaaacaacactgtcaacaaatgaaactcaggtcattcggaatgaaggcggtgtggtggttcgcttctttgagcagcatttgcattctgataagatgaaaatgcttggcccattcaccatggggattggcattttcattttcatttgtgctaatgccattcttcatgaaaaccgtgacaaagagaccaaaatcatacacatgagggatatctattccacagtcattgacattcacacgctaagaatcaaggagcaaaggcaaatgaacggcatgtacactggtttgatgggagaaacagaagtaaaacagaatgggagctcctgtgcctcgagattggcagcaaatacgatcgcctctttctcgggttttcggagcagttttcgaatggacagctccgtggaggaggatgaacttatgttaaatgaaggtaagagttctgggcatcttatgccccctttgctctctgacagctctgtgtctgtctttggcctctatccacctccttccaagacaactgatgataagaccagcggctctaagaaatgtgaaaccaagtcaattgtgtcatcgtccatcagtgcttttacattgcctgtgatcaaacttaataactgtgttattgatgagcccagtatagataacatcactgaagatgctgacaacctcaaaagtaggtcaaggaatttgtcaatggattcccttgtggttcctttgcccaacaccagtgaatccttccagcccgtcagcacagtgctaccaaggaataattccattggggagtcgttgtcgagtcagtacaagtcatctatggctctcggacctggggctggacagctcttgtctcctggggctgccagaagacagtttgggtccaatacatccttgcatttgctctcgtcacactcaaagtccttggacttagaccggggtccctccactctaactgttcaggcagaacaacggaaacatccaagttggcctaggttggatcggaacaacagcaagggatatatgaaactagagaacaaagaagacccgatggataggttgcttgtgccccaagttgccatcaaaaaggactttaccaataaggagaagcttcttatgatttcaagatctcacaataatttgagttttgaacatgatgagtttttgagtaacaacctaaagaggggaacttctgaaacaaggttttaatgttaaaagaatatatcattttacaagggtatatattttaaaacgattttcactggtgtttccttcttaaagtattggctgtaagcctttttaatcaaatggtttgtagtgtattagaattggctgcttagttctgtaatgaagatggttgtatgtttgggttacttgtgactgcagtactctatgttaccacacatgattttatttttctcttcctttgaaagcatgatctcttttattaatatgaatgcaaaatgcttgcatccaaattaaagcttattttctttacttttaagttctttgattgccctattcataaaatgaaatgtccagtatggaaaacatagggtaccaaagtgtggaccaggagtacaaattcagtcccaatactcaatacgtattatagatgactatgagtgcaaaccttaggatgtgattttctgaataattgttctttgtaggatttggttacattatttaaaatgaaaaagatctagttttagtgtgagctcagtaatgttaattggttaagttcattgtgaatcttgagttttagataagtagttatttttttcaatatcacttctgtttttagtgatattatatcaagaaacaacgtattcaagagccatggctgacagtgccagatatacttagggataaacatcaaaatgcaattatagttgctataacgttagatactcggaatcaaaatttatttgcaagctgacttgataaactaaatgaaccaataaaatttgtagaaatgctatcctgaaataattatatacatgaagacaatgttgactaatgaattaagatacattatatactagttaatgctaactagtctcagtacctgtttttagccatctgttactgtccaatagcacctcattcccacattctattttcccccggtattctttagatcctagtatttggaaaacaatcggctaaccttgacatttctttttaccttcatatgccactatctcggtagttcaaaaaaatttagttcttgataaattgccttgaagtttaccttgtgctggagagccttatgataactccaaagactttcttacggtataatacatgttgtttaggattgtgtttcttagtcactgaagataataaatattaaaatggatgttttcatcagaaaattttcatgttttcctttaaggtaacataattgtaagaattgtttaataaaatactcaggaaattctaaaggtttctcccaatacctaaacatttctgaacatcagtattgcagttgtggaagagcagaaggaggatacatttgtttgtgttgctccccaaaattccaccttgcatttgcatcacaaacttccctcaattgaggcagttttctttgttagaacattaagtctgtgtattgtaatagagtgggctcaatattttactataaagcatttaataaactgttattaatag

SEQ ID NO: 16166 - protein, 491 aa, Homo sapiens; identical to SEQ ID NO: 1866

SEQ ID NO: 16167 - DNA, 3870 bp, Homo sapiens
ccaaagatgggttttgtctgcgggtgatttgggctctcgaagtgcaactttgtggccgggacgcggatcggccggcctgggctcctgcagagcagatcctgtctgcgtcctccaggaggagtgggtggcaggactggggtttcccacaggttttggggcggcggcgagattggcacggtccggggtcgcaggcgcgcagccacgcccctggaagtccgccccggcccccgcccccaacccgcctcttcggggctttatggcgtgaggtttggggctgggatccatctggagccgagcagaaaacttttcccctcccgttcccggtcccttttgtctttcttggacgcggtggcggcgccgcctgagcggcgactccctctcccctgcccggcttgctgcgcccggtgccctccgagggcaggcgcgcctggactctgcgcccggatggcggcggccctctgtgagcaccggcagcggcgcatcccctgccccgaggcctccggtgcccccccggcgcgggcataggggcgcccccaccctccgtccgcttgcaccccttgccacccgccccctcgcctgactcatccgcccgcggtggccgcccgagccctgggatggggagggagaccgcggctgcccgcggcggccgagattcccgctgacgcccccgaccctgccgccttcttcgtccgcctccagaggcgcccgacgtcccgacagctcctggagtgagaccaggactgagaacagggagaggcgacccgacccccagggcccggtgctcaggacagcacacagagccgctgaaaacgactgaagagagcaagggatttcctgggacatctggctctggagagtaaaaggccaagctatgatagcaactggtggagtgataactggcctggccgccttgaaaaggcaagactctgccagatcacagcagcatgtcaacctcagcccgtctcctgctacccaagagaagaagcccatcaggcgccggccccgggcagatgttgtggttgttcgtggcaaaatccggctttattccccatctggtttttttcttattttaggagtgctcatctccattataggaattgctatggccgttcttggatattggccccaaaaagaacattttattgatgctgaaacaacactgtcaacaaatgaaactcaggtcattcggaatgaaggcggtgtggtggttcgcttctttgagcagcatttgcattctgataagatgaaaatgcttggcccattcaccatggggattggcattttcattttcatttgtgctaatgccattcttcatgaaaaccgtgacaaagagaccaaaatcatacacatgagggatatctattccacagtcattgacattcacacgctaagaatcaaggagcaaaggcaaatgaacggcatgtacactggtttgatgggagaaacagaagtaaaacagaatgggagctcctgtgcctcgagattggcagcaaatacgatcgcctctttctcgggttttcggagcagttttcgaatggacagctccgtggaggaggatgaacttatgttaaatgaaggtaagagttctgggcatcttatgccccctttgctctctgacagctctgtgtctgtctttggcctctatccacctccttccaagacaactgatgataagaccagcggctctaagaaatgtgaaaccaagtcaattgtgtcatcgtccatcagtgcttttacattgcctgtgatcaaacttaataactgtgttattgatgagcccagtatagataacatcactgaagatgctgacaacctcaaaagtaggtcaaggaatttgtcaatggattcccttgtggttcctttgcccaacaccagtgaatccttccagcccgtcagcacagtgctaccaaggaataattccattggggagtcgttgtcgagtcagtacaagtcatctatggctctcggacctggggctggacagctcttgtctcctggggctgccagaagacagtttgggtccaatacatccttgcatttgctctcgtcacactcaaagtccttggacttagaccggggtccctccactctaactgttcaggcagaacaacggaaacatccaagttggcctaggttggatcggaacaacagcaagggatatatgaaactagagaacaaagaagacccgatggataggttgcttgtgccccaagttgccatcaaaaaggactttaccaataaggagaagcttcttatgatttcaagatctcacaataatttgagttttgaacatgatgagtttttgagtaacaacctaaagaggggaacttctgaaacaaggttttaatgttaaaagaatatatcattttacaagggtatatattttaaaacgattttcactggtgtttccttcttaaagtattggctgtaagcctttttaatcaaatggtttgtagtgtattagaattggctgcttagttctgtaatgaagatggttgtatgtttgggttacttgtgactgcagtactctatgttaccacacatgattttatttttctcttcctttgaaagcatgatctcttttattaatatgaatgcaaaatgcttgcatccaaattaaagcttattttctttacttttaagttctttgattgccctattcataaaatgaaatgtccagtatggaaaacatagggtaccaaagtgtggaccaggagtacaaattcagtcccaatactcaatacgtattatagatgactatgagtgcaaaccttaggatgtgattttctgaataattgttctttgtaggatttggttacattatttaaaatgaaaaagatctagttttagtgtgagctcagtaatgttaattggttaagttcattgtgaatcttgagttttagataagtagttatttttttcaatatcacttctgtttttagtgatattatatcaagaaacaacgtattcaagagccatggctgacagtgccagatatacttagggataaacatcaaaatgcaattatagttgctataacgttagatactcggaatcaaaatttatttgcaagctgacttgataaactaaatgaaccaataaaatttgtagaaatgctatcctgaaataattatatacatgaagacaatgttgactaatgaattaagatacattatatactagttaatgctaactagtctcagtacctgtttttagccatctgttactgtccaatagcacctcattcccacattctattttcccccggtattctttagatcctagtatttggaaaacaatcggctaaccttgacatttctttttaccttcatatgccactatctcggtagttcaaaaaaatttagttcttgataaattgccttgaagtttaccttgtgctggagagccttatgataactccaaagactttcttacggtataatacatgttgtttaggattgtgtttcttagtcactgaagataataaatattaaaatggatgttttcatcagaaaattttcatgttttcctttaaggtaacataattgtaagaattgtttaataaaatactcaggaaattctaaaggtttctcccaatacctaaacatttctgaacatcagtattgcagttgtggaagagcagaaggaggatacatttgtttgtgttgctccccaaaattccaccttgcatttgcatcacaaacttccctcaattgaggcagttttctttgttagaacattaagtctgtgtattgtaatagagtgggctcaatattttactataaagcatttaataaactgttattaatagaagtttgtgttcttcacacctttgctattgctttttaaataaaatgtacatttctgctt

SEQ ID NO: 16168 - protein, 491 aa, Homo sapiens; identical to SEQ ID NO: 1866

SEQ ID NO: 16169 - DNA, 538 bp, Homo sapiens
ggagtgagaccaggactgagaacagggagaggcgacccgacccccagggcccggtgctcaggacagcacacagagccgctgaaaacgactgaagagagcaagggatttcctgggacatctggctctggaggtgagcgacagcagggaatgacgtcagggacctgggagactgatcacctggatgagtaaaaggccaagctatgatagcaactggtggagtgataactggcctggccgccttgaaaaggcaagactctgccagatcacagcagcatgtcaacctcagcccgtctcctgctacccaagagaagaagcccatcaggcgccggccccgggcagatgttgtggttgttcgtggcaaaatccggctttattccccatctggtttttttcttattttaggagtgctcatctccattataggaattgctatggccgttcttggatattggccccaaaaagaacattttattgatgctgaaacaacactgtcaacaaatgaaactcaggtcattcggaatgaaggcggtgtggtggt

SEQ ID NO: 16170 - protein, 97 aa, Homo sapiens [sequence omitted]

SEQ ID NO: 16171 - DNA, 5019 bp, Homo sapiens
gcaagcatttaggaatagcatttgccaactcccaagacttggctgtccctctcgctctggccttacttacctaactgacctcctgtagtactgagttgtgtgctggccaagttcctattcctggactgctttctttcccttgaccttccttgaaatactgctaacctgacttttgactgtgatctatgtgctatctcctgtgtgaagcctaatgaaaggtccttctctaatggaaactttcattctaggagttacctcattctgttttatgtggatctgttagctccttcattaggtttcaagctgtttgaaacagtgattgaatttgctcacctttgctttcctctcagggtctacattgggaccctgagtgataatagagccttctgtagtattgaattgctttaaacagaattaaaggacattggcaccaaatgtgattttgccaatccttgggagtcttggtgcctctgtctgggcttgaccagggtagaatggctgaagaaaatgtgattcctccacccattaaattctttatttctcaactactctggaagtttttgcctctttttgtttctatccattttcatacttttaagatacccttttttactttaagataccttttttcttcctaacgtttctttacatgctcacatgcaagcccagtcatccatctctctttttcacctttctgtcctcatatatttttcttaaaatatcttttctcatctaatctcctttcctctatcaatcagcctcctaagcgaaaatggtagtgctaatgttttaaaaagtgggggaggactagaaatctgtatggaatgtaattcacttttattgcttttaaattaaatgaaacgtttttgcccttgtttccattctactcagaaggatttcagactaaatccttaagcctgccatatggaaataactgggctagagggctgctatctaatctaagcatttaattcaaacatttgaaatggtttttgcttcaagaaaacataggttgacactaagctttattttagcaaaggtttgggaaaggttctaatctgcagtatgtacactttgataaatttcatagactagagcaacagattacaatttagtttgttcttccaacataaaactattttaatcctagttataatttcactgaaggctggatttactcactggcttgttaaaactgtagataacaaccacaagcctgttatttaaacacaattcagaaatcataaatagaaattcaaaaggagagctcaatgctgcaagatgagatttgatgccctgaagaaactctctctgaaatttgccaaagaccttgtggaacttaaaatatcttcttgtttcctaccagctagatatggcagcttgagaactatttattatgaatcaagatagatattttaccaactcagaaaatgttgctttttgtttggatattaatcttgtttgttcatatttttaactaggaaagttagtacagtaatatggtggtcatccaacagaccacaagaagagaatttgtccctcattcagcattttagcaaatatttcttgaacactagccatgtgcaaggtattacagtgagtgtttctgctaataaaaatatgaattaaatttgatgtttgatcataagtagaagaactgtgatactataatattgtaagtgccatagaaaacttgctattataaaatgctgtaaggagttaatgcttgcatagggtgcagtgggtcagctagagaaggctttataaagaaagtggaatatgagctttgatgcctagccagatgtgggtatgtgaagaacagggcagggcagtggggagtgggtggattctggacagctgaaacattgttaacaaaatctcagaaatggtacaaaatggaatatgaatgagaaatacagaacatttgttaggttttatttttatgcaaattaaagagaagagttagagacaaagttaaagtcaatgggtctagaatttcagctaaaactttggtaggtagtggagaatattttatcattattctgctctttaaacaacttcagagatgattgattaatcttgattgtaaaggaagagaaattctttggaagaccagttagggggttatcatatggtctagtaaaagttaataagatctgcacaaggctgggaagagtaggattagaacagaggggtggaattaaaggacatcgtatattggaaatttctaggatttagaacctgattggaagaggaagaagaaagggaggagttaaaaataactgtaaagagccaaatctgagaactgaccctgctaaaaaagtcagacaagtcaagtggtgcagctggtgtgtgctagaagagtaaaaggccaagctatgatagcaactggtggagtgataactggcctggccgccttgaaaaggcaagactctgccagatcacagcagcatgtcaacctcagcccgtctcctgctacccaagagaagaagcccatcaggcgccggccccgggcagatgttgtggttgttcgtggcaaaatccggctttattccccatctggtttttttcttattttaggagtgctcatctccattataggaattgctatggccgttcttggatattggccccaaaaagaacattttattgatgctgaaacaacactgtcaacaaatgaaactcaggtcattcggaatgaaggcggtgtggtggttcgcttctttgagcagcatttgcattctgataagatgaaaatgcttggcccattcaccatggggattggcattttcattttcatttgtgctaatgccattcttcatgaaaaccgtgacaaagagaccaaaatcatacacatgagggatatctattccacagtcattgacattcacacgctaagaatcaaggagcaaaggcaaatgaacggcatgtacactggtttgatgggagaaacagaagtaaaacagaatgggagctcctgtgcctcgagattggcagcaaatacgatcgcctctttctcgggttttcggagcagttttcgaatggacagctccgtggaggaggatgaacttatgttaaatgaaggtaagagttctgggcatcttatgccccctttgctctctgacagctctgtgtctgtctttggcctctatccacctccttccaagacaactgatgataagaccagcggctctaagaaatgtgaaaccaagtcaattgtgtcatcgtccatcagtgcttttacattgcctgtgatcaaacttaataactgtgttattgatgagcccagtatagataacatcactgaagatgctgacaacctcaaaagtaggtcaaggaatttgtcaatggattcccttgtggttcctttgcccaacaccagtgaatccttccagcccgtcagcacagtgctaccaaggaataattccattggggagtcgttgtcgagtcagtacaagtcatctatggctctcggacctggggctggacagctcttgtctcctggggctgccagaagacagtttgggtccaatacatccttgcatttgctctcgtcacactcaaagtccttggacttagaccggggtccctccactctaactgttcaggcagaacaacggaaacatccaagttggcctaggttggatcggaacaacagcaagggatatatgaaactagagaacaaagaagacccgatggataggttgcttgtgccccaagttgccatcaaaaaggactttaccaataaggagaagcttcttatgatttcaagatctcacaataatttgagttttgaacatgatgagtttttgagtaacaacctaaagaggggaacttctgaaacaaggttttaatgttaaaagaatatatcattttacaagggtatatattttaaaacgattttcactggtgtttccttcttaaagtattggctgtaagcctttttaatcaaatggtttgtagtgtattagaattggctgcttagttctgtaatgaagatggttgtatgtttgggttacttgtgactgcagtactctatgttaccacacatgattttatttttctcttcctttgaaagcatgatctcttttattaatatgaatgcaaaatgcttgcatccaaattaaagcttattttctttacttttaagttctttgattgccctattcataaaatgaaatgtccagtatggaaaacatagggtaccaaagtgtggaccaggagtacaaattcagtcccaatactcaatacgtattatagatgactatgagtgcaaaccttaggatgtgattttctgaataattgttctttgtaggatttggttacattatttaaaatgaaaaagatctagttttagtgtgagctcagtaatgttaattggttaagttcattgtgaatcttgagttttagataagtagttatttttttcaatatcacttctgtttttagtgatattatatcaagaaacaacgtattcaagagccatggctgacagtgccagatatacttagggataaacatcaaaatgcaattatagttgctataacgttagatactcggaatcaaaatttatttgcaagctgacttgataaactaaatgaaccaataaaatttgtagaaatgctatcctgaaataattatatacatgaagacaatgttgactaatgaattaagatacattatatactagttaatgctaactagtctcagtacctgtttttagccatctgttactgtccaatagcacctcattcccacattctattttcccccggtattctttagatcctagtatttggaaaacaatcggctaaccttgacatttctttttaccttcatatgccactatctcggtagttcaaaaaaatttagttcttgataaattgccttgaagtttaccttgtgctggagagccttatgataactccaaagactttcttacggtataatacatgttgtttaggattgtgtttcttagtcactgaagataataaatattaaaatggatgttttcatcag

SEQ ID NO: 16172 - protein, 491 aa, Homo sapiens; identical to SEQ ID NO: 1866

SEQ ID NO: 16173 - DNA, 331 bp, Homo sapiens
gcatgagtttatttttctttcttattttacatgagaattgtataaatcctcacaacactataatagttattattattattattttacacataaggaaaatatatagaggcagaaggacttctacatagccagtaagcagtgcagctgggatttgaactccacagtcagtcttcagagtcagggacttcattgcaacactctatttctgaatgactcttcttatttataagggggaggtttacttccattcttctggcctgtacttatttccaaattttaagttgcaaccctgtctttaacaattcagaagcaccagagttttggtcaggga

SEQ ID NO: 16174 - protein, 41 aa, Homo sapiens
MSLFFFLILHENCINPHNTIIVIIIIILHIRKIYRGRRTST

SEQ ID NO: 16175 - DNA, 2515 bp, Homo sapiens
aatcacacaagaccttaaaagctgagaacttcctcctgctggggacaggacagatgaggcagaaggggaggttagggaggtttgaagagtgagaagaacttctgcagtggctgacttggaagatgaaggaggttatgaaccagggaatgggggcagcctctagaggctgagaacctgctgacacctacccacaaccgctaaggaaatgaagactttaattccacaactgcatgcaactaaactcagccaacaacctgaataagtcggaaaaaggcttctccagagcctccagataagaggccaggctggcgacaccttgattttgaccttgtgagacctagagcagagaaactagccaagatcactcagacttctgatctacagaactgtgagaccgtaaatttatgttgtattaagccactaattgcgtgggaatttgttacaggagcaatagaaaatgaatacaccttctgatgtagtttaatcagttgacattagactcctcccgtttgtaatatggagatttatttacaatggcgagagctgctatggggccatccataataacacagaagtcttggccgacaaacaccagaaggagctgtctggaaggtttgaataaataaacctgggtgggaagtatacagttattgtgcatcaccaatgaatgaatcaggttgagttccatcctcttcacctaaaacttccttaagtgagtgacaagcgtagtataaatcagaaaaccgagccatcaagaagcttgccttgaccaacgactcaaatcacatcaagcagaaccagaagagaactttacacctgtatcttcagccccacagtaaaacccaatgacacgatgaatgccatttaatctgtgtgatttcaccatgaaatctaaaccatcatttgaaaggctgctgaatgtggtaccagtgacacactttgtgcctaactctcttaactttttgctcatttgattgccatacaactctagaaatctgattttaaaacaattaccttaggttccagggaataattactttaatgatcttttaaatattttccccctaagagttgaccttgctgtaaattctttattgcctatttatatggtgataggggattaggcaggcactgttcttgagtctttactgagctaaaggaaagtggccaatagatggcctaaaagaatcatggggaaatgtttaagggggaattgaaaattcagtattttcacaagctacaaaaacatccaaagtcaatgataaaaacagatgtattatggcaaattagcagtagagggaaacagaaaatgtcgttttctgaatgaggacttagagtgggaagctgtcctttaactattatatatattttaaaataattttattgatatacgaaaactaatttagaaaccacattaataaattaataaaattattaaaatgatggtactccatgaatttttaacaagaatattccctatgttacacttacaagaaatcttttttgataacgtaaagtcataatttgcaaaatatttggcactcttgtttgctttctgcttcactatctttgagtctgtgacaggtagctgatggtaaacctcataggatttggagttatatttgaagacactatccaagatatttatttgaacttacacaaaaaggctattttcacccttaatattaaaaagctgagatgcatcccaggaggcaaatatcactcatgtacctggaagcttttactaaatgggtgacaccaagatgtgctacactgaacccaacttctgcatgtttaagacaagaatgtgcatctttatttttcctgaatatttctattgtctaaataccttaacgcaaggtcaaaaatttacatcaggtatctgaatgtgtagcatatacaactgagtgttgaaagaagacaaaatcgttttcatcacgaagaatatgtgctcagtaagaatcagaatgttcaattgtgtgaaggtgggagatgggaagattggtattatggcctggatccagaaatcagtcttccactataggaaatgggaatttaaagatgatcagaagacagttgggagcagagtgagaataagaaccctcaactgctgtctcacctttcagatcacgaagaagttttttacaatgagcagaacactcaacctgaaagcagaatggattgagtcactgcagcgtggcagtggaatggtgtttgatgttggcaaaggaaacatgtacttctagactggacagttttcccttagtttacagtttccaaatagagacatcactttgaaataacatggagaacatacatggatgtactgaacgaagaataaagtctgtgttgcagtcctgtctccattgacttttacaaatatggctttggatgaatcacctaagttttatttttgagaatttacgcttaccatgtataaaatgatattgctaatatgtttgctgcctaccccattgggttttgtgaggaataaatgataatgctaagaaaaagg

SEQ ID NO: 16176 - protein, 99 aa, Homo sapiens
MCSVRIRMFNCVKVGDGKIGIMAWIQKSVFHYRKWEFKDDQKTVGSRVRIRTLNCCLTFQITKKFFTMSRTLNLKAEWIESLQRGSGMVFDVGKGNMYF

SEQ ID NO: 16177 - DNA, 789 bp, Homo sapiens
ggacagatgaggcagaaggggaggttagggaggtttgaagagtgagaagaacttctgcagtggctgacttggaagatgaaggaggttatgaaccagggaatgggggcagcctctagaggctgagaacctgctgacacctacccacaaccgctaaggaaatgaagactttaattccacaactgcatgcaactaaactcagccaacaacctgaataagtcggaaaaaggcttctccagagcctccagataagaggccaggctggcgacaccttgattttgaccttgtgagacctagagcagagaaactagccaagatcactcagacttctgatctacagaactgtgagaccgtaaatttatgttgtattaagccactaattgcgtgggaatttgttacaggagcaatagaaaatgaatacaccttctgatgtagtttaatcagttgacattaggggtgacaccaagatgtgctacactgaacccaacttctgcatgtttaagacaagacgcaaggtcaaaaatttacatcaggtatctgaatgtgtagcatatacaactgagtgttgaaagaagacaaaatcgttttcatcacgaagaatatgtgctcagtaagaatcagaatgttcaattgtgtgaaggtgggagatgggaagattggtattatggcctggatccagaaatcagtcttccactataggaaatgggaatttaaagatgatcagaagacagttgggagcagagtgagaataagaaccctcaactgctgtctcacctttcagatcacgaagaa

SEQ ID NO: 16178 - protein, 62 aa, Homo sapiens
MCSVRIRMFNCVKVGDGKIGIMAWIQKSVFHYRKWEFKDDQKTVGSRVRIRTLNCCLTFQIT

SEQ ID NO: 16179 - DNA, 311 bp, Homo sapiens
gaagggcggtggctcgcacggcgcgggcggctttgctcactgcagctggggagatgcaggtgatcttaattgcacacctattgaaataaacctgtagtttctagaagtggaagaaaatttgctgagacgtcagctggggattcttcctggagaactccagaaatggagagcttccacaccagatttagtgcctggacaccttttagcaacaagtcattaaatagacagctctttcaggaaagagtggctcttataagtcattggtttgacctctggactaacaagcaacgtcaagaattcttattcgcaat

SEQ ID NO: 16180 - protein, 48 aa, Homo sapiens
MESFHTRFSAWTPFSNKSLNRQLFQERVALISHWFDLWTNKQRQEFLF

SEQ ID NO: 16181 - DNA, 362 bp, Homo sapiens
acccctctccggagctgcggcccgagttggcgcactcgattttcactgcgcggttccaagaggagacagccgccactgtaccgggcctcatagccacttcctagaggatctcatttggttgcccaggctggagtgcagggacaagataacagctcagtgcaacttcaacctccaggactcaagtgatcctcctacctcagcctccagagtaggtgggactacaggcatgcaccaccattcctggctaattttctttaaaaaattttgtagacacatggtcttgctatgttgcacgggctagtctcaaactctcagactcaagtaatcctcctgcctctgcccatattggatttttaaatgct

SEQ ID NO: 16182 - protein, 30 aa, Homo sapiens
PLPRGSHLVAQAGVQGQDNSSVQLQPPGLK

SEQ ID NO: 16183 - DNA, 2574 bp, Homo sapiens
atgcccaaatgcgttaagttcggatggtttctgccctatactccaacagataatgagtatggtgcttggaagcgccattacattgcttgtgtgtcccacttagactggctgacacctagggaggctgctgctacttatgggacgctgaatgaacccaaaacagaagatgaggaactactggagagacaaagagaaaagtgcctgaggaaaagaatttgggagaaaattgcactacgtaagaaggagttattcaaagttcgacccccttgggtgagtggaacttgctgctctagcgtgctaaagcccagatgccaaccacgcctctcccagactgtaagggagcgagtgggattacatgaagctttggagaaacagcttgttttgacatcgttagaaaccttgcccaagcgaagcaatatttctggaagccattcctaccctttattatcaaagaaaaattggcatggagttcataaaaatgatgacagatcttcatatgctctccggccacacttcatgttaatatcatcccggattcctgcgtatgagatggtgatggagagtgtgaaggctggtgttgtttctgtggtatatgaacacagcgtaaccttggaaagccttctgtatcttatagaaaaagctctggatgggcagaaggcacagagcatcggaatatttagcgatggagacagcagagaaatcaatttactccaaggctataaaattggtgttaaaaatttactgaggcctgaagtgagagatttctgggagaaattaggaagctatgtggccactgaagaagaagggggtcacgtggacttcttcgtgccccttggagcatcagaggcaggaattgaagttctttcccagctgtctcaactaactggcacgttctttacggcccccactgggattgcaactggctcttaccagcacattcttagtgattggctgggatcccaatggggaaaggccccctcttccatctacttctgcgaatcgaagctacagacgtggtccagcttcacagacttcctagaagaaaccttgaaaacagtaaggaagcagctgtatcctttcttcaaggaactgcagaagagcatcagtggcaggatgatagggcagtttatgtttgacaccatgggtatgaccaacattctaaacaaccaagatactgcgcaagctctggcagatggattgatggagttgtcaaaagaagattctgtaagtgtttctttgaagaaagtaaactatgaaaaccaacatttaaataaattctgtttgcagttattattaatttttttgaccagtttatccctttcagagcacagttcctcagagaaattacatcagtttataaaaatagccactaagagattctgggcccaagatgtgttaagtacacaaaacagacaaaaatgtggcaaaaagatcaaagatgttgaaggaaatgttattccaacaaaatgtgacccaaagacaacattcagtttattcatgaaggaaagaaatgttgtagaagacaattcttgggacacaaagtccaggctcagcaaaaatgatttaaattttgaagcactgattaatctggagagaatactccagaaggactcagcagaaaagcgagctagagttgtcagagaactcttacagagtgagagaaaatacgtgcagatactggaaattgtgagagatgtttatgtcgcaccactgaaagcagcattgtcatcaaacagagcgattctgagtgctgccaatatccagatcattttctgtgacattctacagattttaagtctcaacaggcagtttctagataacctgagagacagactgcaggaatggggcccagctcactgtgtgggagaaatagtcacgaagtttggaagccagttaaacacatataccaatttcttcaacaattaccctgtcattctgaaaactattgagaagtgcagagaaatgataccagcattccgaactttcctgaagaggcatgataagaccattgttaccaaaatgctgagcctgccagagctgctgctgtacccatcccgaagatttgaagaataccttaatcttctctacgctgtcaggcttcatacccctgcagagcatgttgaccgtggggacttgaccactgcaattgaccaaatcaaaaaatataaaggttatatagatcagactctatcagaagtaaacagatatctgattagggtacaagatgtagcccaacttcattgctgtgatgaagaaataagtttctctttaaggctctatgaacacatccatgatctcagccttttcctcttcaatgatgccctgctcgtttctagtcggggcacatctcacactccatttgagaggacttcaaaaacaacctaccagttcattgcatcagtggcccttcatcggttactcatagaaaatattccagattccaagtatgtcaagaatgcatttattcttcagggtccaaaatataaatggatttgtgctacagaaatagaggatgataagttcctatggctgtcagtacttcgaaatgcaatcaaaagcagtatggagaagtga

SEQ ID NO: 16184 - protein, 857 aa, Homo sapiens
MPKCVKFGWFLPYTPTDNEYGAWKRHYIACVSHLDWLTPREAAATYGTLNEPKTEDEELLERQREKCLRKRIWEKIALRKKELFKVRPPWVSGTCCSSVLKPRCQPRLSQTVRERVGLHEALEKQLVLTSLETLPKRSNISGSHSYPLLSKKNWHGVHKNDDRSSYALRPHFMLISSRIPAYEMVMESVKAGVVSVVYEHSVTLESLLYLIEKALDGQKAQSIGIFSDGDSREINLLQGYKIGVKNLLRPEVRDFWEKLGSYVATEEEGGHVDFFVPLGASEAGIEVLSQLSQLTGTFFTAPTGIATGSYQHILSDWLGSQWGKAPSSIYFCESKLQTWSSFTDFLEETLKTVRKQLYPFFKELQKSISGRMIGQFMFDTMGMTNILNNQDTAQALADGLMELSKEDSVSVSLKKVNYENQHLNKFCLQLLLIFLTSLSLSEHSSSEKLHQFIKIATKRFWAQDVLSTQNRQKCGKKIKDVEGNVIPTKCDPKTTFSLFMKERNVVEDNSWDTKSRLSKNDLNFEALINLERILQKDSAEKRARVVRELLQSERKYVQILEIVRDVYVAPLKAALSSNRAILSAANIQIIFCDILQILSLNRQFLDNLRDRLQEWGPAHCVGEIVTKFGSQLNTYTNFFNNYPVILKTIEKCREMIPAFRTFLKRHDKTIVTKMLSLPELLLYPSRRFEEYLNLLYAVRLHTPAEHVDRGDLTTAIDQIKKYKGYIDQTLSEVNRYLIRVQDVAQLHCCDEEISFSLRLYEHIHDLSLFLFNDALLVSSRGTSHTPFERTSKTTYQFIASVALHRLLIENIPDSKYVKNAFILQGPKYKWICATEIEDDKFLWLSVLRNAIKSSMEK

SEQ ID NO: 16185 - DNA, 649 bp, Homo sapiens
cacagagcatcggaatatttagcgatggagacagcagagaaatcaatttactccaaggctataaaattggtgttaaaaatttactgaggcctgaagtgagagatttctgggagaaattaggaagctatgtggccactgaagaagaagggggtcacgtggacttcttcgtgccccttggagcatcagaggcaggaattgaagttctttcccagctgtctcaactaactggcacgttctttacggcccccactgggattgcaactggctcttaccagcacattcttagtgattggctgggatcccaatggggaaaggccccctcttccatctacttctgcgaatcgaagctacagacgtggtccagcttcacagacttcctagaagaaaccttgaaaacagtaaggaagcagctgtatcctttcttcaaggaactgcagaagagcatcagtggcaggatgatagggcagtttatgtttgacaccatgggtatgaccaacattctaaacaaccaagatactgcgcaagctctggcagatggattgatggagttgtcaaaagaagattctgacaaacctctggaatttttgtcgtattttctgctgaagaaatgtggcaaaaagatcaaagatgttgaaggaaatgttattcc

SEQ ID NO: 16186 - protein, 63 aa, Homo sapiens
MIGQFMFDTMGMTNILNNQDTAQALADGLMELSKEDSDKPLEFLSYFLLKKCGKKIKDVEGNV

SEQ ID NO: 16187 - DNA, 1925 bp, Homo sapiens
aatgcttattattaatggaattcttgtcttaaagagcaaaggcacaacaccacttgctccaccacctaaacctgttcgaagaagattaaaatcagaagatgaattaaggccagaagttgatgaacatacacaaaagacgggtgtcttagctgctgttcttgcatcacaaccttctattcccagatctgttgggaaagataagaaagctattcaggcatcaattagacgtaataaggaaaccaacaccgttttggccagattgaatagcgaattgcagcaacaattaaaggatgttcttgaggagagaatttccctggaagttcaactggaacaacttcgaccattctctcacctataagccaattgccgttaactgtgaacatacttgtttttaagtggttttgggttcaaagccaatttggagacctagacattcagctcactgcttaactcaacattaaattttatgattctgttttgccctatatgttcaccgttgtatttaagtatcttttattttttaatttcgacaataaaaaggtcaggatggcgttttctggagggtagattgtgtttgttggcacacccaccttttctgttccctagcatctgggatatgcaatgcttctatggctaataccacacaccaatttaatttatagaatgggctcctcatttacatctcagtcacagactcagaaataaattgtcagtttgtccttttatgtttaatattttacataaagcatctattctataaaaatctttagaaagagtttcccatttaattttgattttaaagaattatattggataaggtggttttcaccataagctaatttactctctgcagccgtctacattcttcacaaatcatgtggtacattgaagcctcttttacatgtcaacttgtgacaaatacaaacatgtgagattttatattttccttgtggaaatgtgatcaacttcatcagcgacttcgaactattttatgagattcaataattcagcagtcatgtaaacttatgaaataggtatgagtaatggcctttcttaatttttttaagtattgttttaaaacttctgaggatatcagttattcccagaataaagggaaattccttaggatttctagtttacctttagccatcttgtcactcattcttttgctatacagacaagtttttcctattaatgagtttctggagtatgccttattcaggacaatatgctgttttagattttgtttaatattaaatgatatatacatttcgatccattgctaacagcagatattccctttaagatttattctgtctataggatcatagattttaaactgcatggatatatcttggcagaatcagaagtgtggttttacaccaataaaacagcataatattttaacttttgttcatctttttaacaagatttaaagttttaagaaatagaagattttgtattttcatttctgaaagaaaaaatgtttaaatactatagattcacagtcctaaactgcaccgatagactttgttactgtaaacaagaatttgaagaacaagggaaactgacaacctcaagcttccaagattaatacaatttttacctgacaatatctaggtaaaaatatacatcagctgaagtttccaagtggctttcagtatggctttagttgttaaataataaatttaaagcattaaaggcccaggaaactactcaacacctgtttttctgagtgtctttgttttcaaagaaacatttttactcagctgtatttcattacaagcaagttttgctgtttccatttagttttgttttttaaaatatgctttttaaaaatagccttctaatttaacaatgtcaaaaatatttgttaaagcttcttagaatttagccttccaataaataacacttaaaaattatag

SEQ ID NO: 16188 - protein, 118 aa, Homo sapiens
MLIINGILVLKSKGTTPLAPPPKPVRRRLKSEDELRPEVDEHTQKTGVLAAVLASQPSIPRSVGKDKKAIQASIRRNKETNTVLARLNSELQQQLKDVLEERISLEVQLEQLRPFSHL

SEQ ID NO: 16189 - DNA, 2685 bp, Homo sapiens
aaaagaaattttgcttaataactttattaaaaaaattgttagccacataaaataatcagttgtttagggtacatcataaacagtgctatcttaatttattgtaacacttacatacttgagtgttgagaaaatgtcatgctaataagatcctttgctgcttagccaagtgtaaatgtttaaaaagaaaaaagctctgatatcagtagtatgaccaattatcatggggtgaattttgcaggtctcattcaggaacgtcgcctgataacactgcaccaccacctccccctccaaggccacagccctctcattctagatcatcatctttagatatgaatcggacctttacagtcaccacaggacaacaacaggctggagttgttgcccatcctcctgcagtgcctccaagaccacagccctcacaggctcctggtcctgctgtgcatcgcccagtggatgccgatggcctcataactcacactagtacctcacctcagcagataccagagcaaccaaattttgcagatttcagtcagtttgaagtatttgctgcatcaaatgtaaacgacgaacaagatgatgaagccgagaaacatccagaagtcctgccggtcagttttcgagggcttggctaattttctgcaggcagtcacttcccataccatgttgtgtcaacagagcagatattagaggggacatcagctgaaaaagcttctgatcctgcaagttctcttcgagttgccaaaacagatagtaaaactgaagaaaagacagctgctagtgctcctgccaatgtgagcaaaggcacaacaccacttgctccaccacctaaacctgttcgaagaagattaaaatcagaagatgaattaaggccagaagttgatgaacatacacaaaagacgggtgtcttagctgctgttcttgcatcacaaccttctattcccagatctgttgggaaagataagaaagctattcaggcatcaattagacgtaataaggaaaccaacaccgttttggccagattgaatagcgaattgcagcaacaattaaaggatgttcttgaggagagaatttccctggaagttcaactggaacaacttcgaccattctctcacctataagccaattgccgttaactgtgaacatacttgtttttaagtggttttgggttcaaagccaatttggagacctagacattcagctcactgcttaactcaacattaaattttatgattctgttttgccctatatgttcaccgttgtatttaagtatcttttattttttaatttcgacaataaaaaggtcaggatggcgttttctggagggtagattgtgtttgttggcacacccaccttttctgttccctagcatctgggatatgcaatgcttctatggctaataccacacaccaatttaatttatagaatgggctcctcatttacatctcagtcacagactcagaaataaattgtcagtttgtccttttatgtttaatattttacataaagcatctattctataaaaatctttagaaagagtttcccatttaattttgattttaaagaattatattggataaggtggttttcaccataagctaatttactctctgcagccgtctacattcttcacaaatcatgtggtacattgaagcctcttttacatgtcaacttgtgacaaatacaaacatgtgagattttatattttccttgtggaaatgtgatcaacttcatcagcgacttcgaactattttatgagattcaataattcagcagtcatgtaaacttatgaaataggtatgagtaatggcctttcttaatttttttaagtattgttttaaaacttctgaggatatcagttattcccagaataaagggaaattccttaggatttctagtttacctttagccatcttgtcactcattcttttgctatacagacaagtttttcctattaatgagtttctggagtatgccttattcaggacaatatgctgttttagattttgtttaatattaaatgatatatacatttcgatccattgctaacagcagatattccctttaagatttattctgtctataggatcatagattttaaactgcatggatatatcttggcagaatcagaagtgtggttttacaccaataaaacagcataatattttaacttttgttcatctttttaacaagatttaaagttttaagaaatagaagattttgtattttcatttctgaaagaaaaaatgtttaaatactatagattcacagtcctaaactgcaccgatagactttgttactgtaaacaagaatttgaagaacaagggaaactgacaacctcaagcttccaagattaatacaatttttacctgacaatatctaggtaaaaatatacatcagctgaagtttccaagtggctttcagtatggctttagttgttaaataataaatttaaagcattaaaggcccaggaaactactcaacacctgtttttctgagtgtctttgttttcaaagaaacatttttactcagctgtatttcattacaagcaagttttgctgtttccatttagttttgttttttaaaatatgctttttaaaaatagccttctaatttaacaatgtcaaaaatatttgttaaagcttcttagaatttagccttccaataaataacacttaaaaattatag

SEQ ID NO: 16190 - protein, 100 aa, Homo sapiens
MNRTFTVTTGQQQAGVVAHPPAVPPRPQPSQAPGPAVHRPVDADGLITHTSTSPQQIPEQPNFADFSQFEVFAASNVNDEQDDEAEKHPEVLPVSFRGLG

SEQ ID NO: 16191 - DNA, 4546 bp, Homo sapiens
ggagcgcggccgccgctgtcactgttggtgcgggcgcgtcggggccgggccggggcactgtaaatggcggcggagggaggcggagcggcggccacgctcagcccagatcccccgaaactttaggttcgaagccccacaactttccgggaagcgctgccgctccggaggcgtggacggaaggggaagccgaggcgggaagtctgggggaatcggcagggagccggggagactcgaacccgcggcgggggcggagtccgccagtgcctcgcgcctccgcggcccccgcctctttctctgcaccctccccgcggccggagccggagccggagccggagccgtagtcgcagccgcagccgcagccgcgcgccgggcctcgcaggcagcggcgcggcgagcgcagccgggccccctcctcgcgacctccgggccctgttgctcgggcgcacctggcgcgtgtgaggccggggccggcgttttcgggaagctagcaggaggccgggccacgcgcagcccctgccggcccaggttcctggggccgggccccgagtagtgcatgcggggcggggcggccgtgagccggaggcgaagatggaaggcttaacgctgagcgatgcggagcagaaatactattcagatctcttctcctactgcgacattgagagcaccaagaaggtggtggtcaacgggcgggtgctggagctgttccgggccgcgcagctgccgaacgacgtggtcctacagatcatggagctttgtggtgcaacaagacttggttattttggaagaagtcagttctacattgctttgaaacttgtagctgttgcccagtctggtttccctttaagagtggaaagtataaatacagtaaaggaccttcctctgccaagatttgttgcttcaaagaatgaacaggaatctcgccatgcagcctcatattcttcagattctgaaaatcaagggtcgtattctggtgtaattcccccaccacctggcagggggcaagtgaaaaagggatccgtaagccatgatacggttcagcctcgtacatctgcagatgcacaggaacctgcatccccagtagtttcaccacagcaatccccaccaacttctccacacacatggaggaagcacagccgtcatcccagcggtgggaatagtgagaggcctctcgcgggacctgggccattttggtctccctttggtgaagcacaatcaggttcttctgctggtgatgcagtgtggtcagggcattccccacctccacctcaagaaaactgggtcagttttgcagatactccaccaaccagtactcttttaaccatgcatcctgcttctgtccaggaccagacaacagtacgaactgtagcatcagctacaactgccattgaaattcgtaggcaatccagtagttatgatgatccctggaaaataacagatgaacaaagacagtattatgtaaatcagtttaaaaccattcagcctgatctaaacggatttattccaggatctgcagctaaagagttttttacaaaatcaaaacttcctattcttgaactttctcatatttgggaactctcagactttgataaagatggtgcattgacactggatgagttttgtgctgcttttcatctggtggttgctaggaagaatggctatgatttaccagaaaaacttcctgaaagcttaatgcccaaactgattgatttggaagattcagcagatgttggggatcagccaggtgaggtaggttattcaggctctcctgctgaagctcctccaagcaagtcaccatcgatgccatcactaaaccagacatggcctgagctgaatcagagcagtgagcagtgggagacatttagtgaacgctcttcaagctcacaaactctgacccaatttgattctaacattgcaccagctgatcctgatactgctattgttcatccagttcccattcgtatgactccaagcaaaatccacatgcaggaaatggaacttaaaagaactggcagcgatcatacaaatcccactagcccattacttgtgaaaccatctgaccttttagaagaaaataagataaattcatcggtgaaattcgcttctggtaatactgtagcagatggttacagtagttcagactcttttacttctgacccagaacagatcgggagcaatgtaactcgtcaaaggtctcattcaggaacgtcgcctgataacactgcaccaccacctccccctccaaggccacagccctctcattctagatcatcatctttagatatgaatcggacctttacagtcaccacaggacaacaacaggctggagttgttgcccatcctcctgcagtgcctccaagaccacagccctcacaggctcctggtcctgctgtgcatcgcccagtggatgccgatggcctcataactcacactagtacctcacctcagcagataccagagcaaccaaattttgcagatttcagtcagtttgaagtatttgctgcatcaaatgtaaacgacgaacaagatgatgaagccgagaaacatccagaagtcctgccggctgaaaaagcttctgatcctgcaagttctcttcgagttgccaaaacagatagtaaaactgaagaaaagacagctgctagtgctcctgccaatgtgagcaaaggcacaacaccacttgctccaccacctaaacctgttcgaagaagattaaaatcagaagatgaattaaggccagaagttgatgaacatacacaaaagacgggtgtcttagctgctgttcttgcatcacaaccttctattcccagatctgttgggaaagataagaaagctattcaggcatcaattagacgtaataaggaaaccaacaccgttttggccagattgaatagcgaattgcagcaacaattaaaggatgttcttgaggagagaatttccctggaagttcaactggaacaacttcgaccattctctcacctataagccaattgccgttaactgtgaacatacttgtttttaagtggttttgggttcaaagccaatttggagacctagacattcagctcactgcttaactcaacattaaattttatgattctgttttgccctatatgttcaccgttgtatttaagtatcttttattttttaatttcgacaataaaaaggtcaggatggcgttttctggagggtagattgtgtttgttggcacacccaccttttctgttccctagcatctgggatatgcaatgcttctatggctaataccacacaccaatttaatttatagaatgggctcctcatttacatctcagtcacagactcagaaataaattgtcagtttgtccttttatgtttaatattttacataaagcatctattctataaaaatctttagaaagagtttcccatttaattttgattttaaagaattatattggataaggtggttttcaccataagctaatttactctctgcagccgtctacattcttcacaaatcatgtggtacattgaagcctcttttacatgtcaacttgtgacaaatacaaacatgtgagattttatattttccttgtggaaatgtgatcaacttcatcagcgacttcgaactattttatgagattcaataattcagcagtcatgtaaacttatgaaataggtatgagtaatggcctttcttaatttttttaagtattgttttaaaacttctgaggatatcagttattcccagaataaagggaaattccttaggatttctagtttacctttagccatcttgtcactcattcttttgctatacagacaagtttttcctattaatgagtttctggagtatgccttattcaggacaatatgctgttttagattttgtttaatattaaatgatatatacatttcgatccattgctaacagcagatattccctttaagatttattctgtctataggatcatagattttaaactgcatggatatatcttggcagaatcagaagtgtggttttacaccaataaaacagcataatattttaacttttgttcatctttttaacaagatttaaagttttaagaaatagaagattttgtattttcatttctgaaagaaaaaatgtttaaatactatagattcacagtcctaaactgcaccgatagactttgttactgtaaacaagaatttgaagaacaagggaaactgacaacctcaagcttccaagattaatacaatttttacctgacaatatctaggtaaaaatatacatcagctgaagtttccaagtggctttcagtatggctttagttgttaaataataaatttaaagcattaaaggcccaggaaactactcaacacctgtttttctgagtgtctttgttttcaaagaaacatttttactcagctgtatttcattacaagcaagttttgctgtttccatttagttttgttttttaaaatatgctttttaaaaatagccttctaatttaacaatgtcaaaaatatttgttaaagcttcttagaatttagccttccaataaataacacttaaaaattatag

SEQ ID NO: 16192 - protein, 796 aa, Homo sapiens
MEGLTLSDAEQKYYSDLFSYCDIESTKKVVVNGRVLELFRAAQLPNDVVLQIMELCGATRLGYFGRSQFYIALKLVAVAQSGFPLRVESINTVKDLPLPRFVASKNEQESRHAASYSSDSENQGSYSGVIPPPPGRGQVKKGSVSHDTVQPRTSADAQEPASPVVSPQQSPPTSPHTWRKHSRHPSGGNSERPLAGPGPFWSPFGEAQSGSSAGDAVWSGHSPPPPQENWVSFADTPPTSTLLTMHPASVQDQTTVRTVASATTAIEIRRQSSSYDDPWKITDEQRQYYVNQFKTIQPDLNGFIPGSAAKEFFTKSKLPILELSHIWELSDFDKDGALTLDEFCAAFHLVVARKNGYDLPEKLPESLMPKLIDLEDSADVGDQPGEVGYSGSPAEAPPSKSPSMPSLNQTWPELNQSSEQWETFSERSSSSQTLTQFDSNIAPADPDTAIVHPVPIRMTPSKIHMQEMELKRTGSDHTNPTSPLLVKPSDLLEENKINSSVKFASGNTVADGYSSSDSFTSDPEQIGSNVTRQRSHSGTSPDNTAPPPPPPRPQPSHSRSSSLDMNRTFTVTTGQQQAGVVAHPPAVPPRPQPSQAPGPAVHRPVDADGLITHTSTSPQQIPEQPNFADFSQFEVFAASNVNDEQDDEAEKHPEVLPAEKASDPASSLRVAKTDSKTEEKTAASAPANVSKGTTPLAPPPKPVRRRLKSEDELRPEVDEHTQKTGVLAAVLASQPSIPRSVGKDKKAIQASIRRNKETNTVLARLNSELQQQLKDVLEERISLEVQLEQLRPFSHL

SEQ ID NO: 16193 - DNA, 938 bp, Homo sapiens
aatgcttattattaatggaattcttgtcttaaagagcaaaggcacaacaccacttgctccaccacctaaacctgttcgaagaagattaaaatcagaagatgaattaaggccagaagttgatgaacatacacaaaagacgggtgtcttagctgctgttcttgcatcacaaccttctattcccagatctgttgggaaagataagaaagctattcaggcatcaattagacgtaataaggaaaccaacaccgttttggccagattgaatagcgaattgcagcaacaattaaaggatgttcttgaggagagaatttccctggaagttcaactggaacaacttcgaccattctctcacctataagccaattgccgttaactgtgaacatacttgtttttaagtggttttgggttcaaagccaatttggagacctagacattcagctcactgcttaactcaacattaaattttatgattctgttttgccctatatgttcaccgttgtatttaagtatcttttattttttaatttcgacaataaaaaggtcaggatggcgttttctggagggtagattgtgtttgttggcacacccaccttttctgttccctagcatctgggatatgcaatgcttctatggctaataccacacaccaatttaatttatagaatgggctcctcatttacatctcagtcacagactcagaaataaattgtcagtttgtccttttatgtttaatattttacataaagcatctattctataaaaatctttagaaagagtttcccatttaattttgattttaaagaattatattggataaggtggttttcaccataagctaatttactctctgcagccgtctacattcttcacaaatcatgtggtacattgaagcctcttttacatgtcaacttgtgacaaatacaaacatgtgagatttt

SEQ ID NO: 16194 - protein, 118 aa, Homo sapiens; identical to SEQ ID NO: 16188

SEQ ID NO: 16195 - DNA, 1698 bp, Homo sapiens
aaaagaaattttgcttaataactttattaaaaaaattgttagccacataaaataatcagttgtttagggtacatcataaacagtgctatcttaatttattgtaacacttacatacttgagtgttgagaaaatgtcatgctaataagatcctttgctgcttagccaagtgtaaatgtttaaaaagaaaaaagctctgatatcagtagtatgaccaattatcatggggtgaattttgcaggtctcattcaggaacgtcgcctgataacactgcaccaccacctccccctccaaggccacagccctctcattctagatcatcatctttagatatgaatcggacctttacagtcaccacaggacaacaacaggctggagttgttgcccatcctcctgcagtgcctccaagaccacagccctcacaggctcctggtcctgctgtgcatcgcccagtggatgccgatggcctcataactcacactagtacctcacctcagcagataccagagcaaccaaattttgcagatttcagtcagtttgaagtatttgctgcatcaaatgtaaacgacgaacaagatgatgaagccgagaaacatccagaagtcctgccggtcagttttcgagggcttggctaattttctgcaggcagtcacttcccataccatgttgtgtcaacagagcagatattagaggggacatcagctgaaaaagcttctgatcctgcaagttctcttcgagttgccaaaacagatagtaaaactgaagaaaagacagctgctagtgctcctgccaatgtgagcaaaggcacaacaccacttgctccaccacctaaacctgttcgaagaagattaaaatcagaagatgaattaaggccagaagttgatgaacatacacaaaagacgggtgtcttagctgctgttcttgcatcacaaccttctattcccagatctgttgggaaagataagaaagctattcaggcatcaattagacgtaataaggaaaccaacaccgttttggccagattgaatagcgaattgcagcaacaattaaaggatgttcttgaggagagaatttccctggaagttcaactggaacaacttcgaccattctctcacctataagccaattgccgttaactgtgaacatacttgtttttaagtggttttgggttcaaagccaatttggagacctagacattcagctcactgcttaactcaacattaaattttatgattctgttttgccctatatgttcaccgttgtatttaagtatcttttattttttaatttcgacaataaaaaggtcaggatggcgttttctggagggtagattgtgtttgttggcacacccaccttttctgttccctagcatctgggatatgcaatgcttctatggctaataccacacaccaatttaatttatagaatgggctcctcatttacatctcagtcacagactcagaaataaattgtcagtttgtccttttatgtttaatattttacataaagcatctattctataaaaatctttagaaagagtttcccatttaattttgattttaaagaattatattggataaggtggttttcaccataagctaatttactctctgcagccgtctacattcttcacaaatcatgtggtacattgaagcctcttttacatgtcaacttgtgacaaatacaaacatgtgagatttt

SEQ ID NO: 16196 - protein, 100 aa, Homo sapiens; identical to SEQ ID NO: 16190

SEQ ID NO: 16197 - DNA, 3559 bp, Homo sapiens
ggagcgcggccgccgctgtcactgttggtgcgggcgcgtcggggccgggccggggcactgtaaatggcggcggagggaggcggagcggcggccacgctcagcccagatcccccgaaactttaggttcgaagccccacaactttccgggaagcgctgccgctccggaggcgtggacggaaggggaagccgaggcgggaagtctgggggaatcggcagggagccggggagactcgaacccgcggcgggggcggagtccgccagtgcctcgcgcctccgcggcccccgcctctttctctgcaccctccccgcggccggagccggagccggagccggagccgtagtcgcagccgcagccgcagccgcgcgccgggcctcgcaggcagcggcgcggcgagcgcagccgggccccctcctcgcgacctccgggccctgttgctcgggcgcacctggcgcgtgtgaggccggggccggcgttttcgggaagctagcaggaggccgggccacgcgcagcccctgccggcccaggttcctggggccgggccccgagtagtgcatgcggggcggggcggccgtgagccggaggcgaagatggaaggcttaacgctgagcgatgcggagcagaaatactattcagatctcttctcctactgcgacattgagagcaccaagaaggtggtggtcaacgggcgggtgctggagctgttccgggccgcgcagctgccgaacgacgtggtcctacagatcatggagctttgtggtgcaacaagacttggttattttggaagaagtcagttctacattgctttgaaacttgtagctgttgcccagtctggtttccctttaagagtggaaagtataaatacagtaaaggaccttcctctgccaagatttgttgcttcaaagaatgaacaggaatctcgccatgcagcctcatattcttcagattctgaaaatcaagggtcgtattctggtgtaattcccccaccacctggcagggggcaagtgaaaaagggatccgtaagccatgatacggttcagcctcgtacatctgcagatgcacaggaacctgcatccccagtagtttcaccacagcaatccccaccaacttctccacacacatggaggaagcacagccgtcatcccagcggtgggaatagtgagaggcctctcgcgggacctgggccattttggtctccctttggtgaagcacaatcaggttcttctgctggtgatgcagtgtggtcagggcattccccacctccacctcaagaaaactgggtcagttttgcagatactccaccaaccagtactcttttaaccatgcatcctgcttctgtccaggaccagacaacagtacgaactgtagcatcagctacaactgccattgaaattcgtaggcaatccagtagttatgatgatccctggaaaataacagatgaacaaagacagtattatgtaaatcagtttaaaaccattcagcctgatctaaacggatttattccaggatctgcagctaaagagttttttacaaaatcaaaacttcctattcttgaactttctcatatttgggaactctcagactttgataaagatggtgcattgacactggatgagttttgtgctgcttttcatctggtggttgctaggaagaatggctatgatttaccagaaaaacttcctgaaagcttaatgcccaaactgattgatttggaagattcagcagatgttggggatcagccaggtgaggtaggttattcaggctctcctgctgaagctcctccaagcaagtcaccatcgatgccatcactaaaccagacatggcctgagctgaatcagagcagtgagcagtgggagacatttagtgaacgctcttcaagctcacaaactctgacccaatttgattctaacattgcaccagctgatcctgatactgctattgttcatccagttcccattcgtatgactccaagcaaaatccacatgcaggaaatggaacttaaaagaactggcagcgatcatacaaatcccactagcccattacttgtgaaaccatctgaccttttagaagaaaataagataaattcatcggtgaaattcgcttctggtaatactgtagcagatggttacagtagttcagactcttttacttctgacccagaacagatcgggagcaatgtaactcgtcaaaggtctcattcaggaacgtcgcctgataacactgcaccaccacctccccctccaaggccacagccctctcattctagatcatcatctttagatatgaatcggacctttacagtcaccacaggacaacaacaggctggagttgttgcccatcctcctgcagtgcctccaagaccacagccctcacaggctcctggtcctgctgtgcatcgcccagtggatgccgatggcctcataactcacactagtacctcacctcagcagataccagagcaaccaaattttgcagatttcagtcagtttgaagtatttgctgcatcaaatgtaaacgacgaacaagatgatgaagccgagaaacatccagaagtcctgccggctgaaaaagcttctgatcctgcaagttctcttcgagttgccaaaacagatagtaaaactgaagaaaagacagctgctagtgctcctgccaatgtgagcaaaggcacaacaccacttgctccaccacctaaacctgttcgaagaagattaaaatcagaagatgaattaaggccagaagttgatgaacatacacaaaagacgggtgtcttagctgctgttcttgcatcacaaccttctattcccagatctgttgggaaagataagaaagctattcaggcatcaattagacgtaataaggaaaccaacaccgttttggccagattgaatagcgaattgcagcaacaattaaaggatgttcttgaggagagaatttccctggaagttcaactggaacaacttcgaccattctctcacctataagccaattgccgttaactgtgaacatacttgtttttaagtggttttgggttcaaagccaatttggagacctagacattcagctcactgcttaactcaacattaaattttatgattctgttttgccctatatgttcaccgttgtatttaagtatcttttattttttaatttcgacaataaaaaggtcaggatggcgttttctggagggtagattgtgtttgttggcacacccaccttttctgttccctagcatctgggatatgcaatgcttctatggctaataccacacaccaatttaatttatagaatgggctcctcatttacatctcagtcacagactcagaaataaattgtcagtttgtccttttatgtttaatattttacataaagcatctattctataaaaatctttagaaagagtttcccatttaattttgattttaaagaattatattggataaggtggttttcaccataagctaatttactctctgcagccgtctacattcttcacaaatcatgtggtacattgaagcctcttttacatgtcaacttgtgacaaatacaaacatgtgagatttt

SEQ ID NO: 16198 - protein, 796 aa, Homo sapiens; identical to SEQ ID NO: 16192

SEQ ID NO: 16199 - DNA, 560 bp, Homo sapiens
aatgcttattattaatggaattcttgtcttaaagagcaaaggcacaacaccacttgctccaccacctaaacctgttcgaagaagattaaaatcagaagatgaattaaggccagaagttgatgaacatacacaaaagacgggtgtcttagctgctgttcttgcatcacaaccttctattcccagatctgttgggaaagataagaaagctattcaggcatcaattagacgtaataaggaaaccaacaccgttttggccagattgaatagcgaattgcagcaacaattaaaggatgttcttgaggagagaatttccctggaagttcaactggaacaacttcgaccattctctcacctataagccaattgccgttaactgtgaacatacttgtttttaagtggttttgggttcaaagccaatttggagacctagacattcagctcactgcttaactcaacattaaattttatgattctgttttgccctatatgttcaccgttgtatttaagtatcttttattttttaatttcgacaataaaaaggtcaggatggcgttttctgg

SEQ ID NO: 16200 - protein, 118 aa, Homo sapiens; identical to SEQ ID NO: 16188

SEQ ID NO: 16201 - DNA, 1320 bp, Homo sapiens
aaaagaaattttgcttaataactttattaaaaaaattgttagccacataaaataatcagttgtttagggtacatcataaacagtgctatcttaatttattgtaacacttacatacttgagtgttgagaaaatgtcatgctaataagatcctttgctgcttagccaagtgtaaatgtttaaaaagaaaaaagctctgatatcagtagtatgaccaattatcatggggtgaattttgcaggtctcattcaggaacgtcgcctgataacactgcaccaccacctccccctccaaggccacagccctctcattctagatcatcatctttagatatgaatcggacctttacagtcaccacaggacaacaacaggctggagttgttgcccatcctcctgcagtgcctccaagaccacagccctcacaggctcctggtcctgctgtgcatcgcccagtggatgccgatggcctcataactcacactagtacctcacctcagcagataccagagcaaccaaattttgcagatttcagtcagtttgaagtatttgctgcatcaaatgtaaacgacgaacaagatgatgaagccgagaaacatccagaagtcctgccggtcagttttcgagggcttggctaattttctgcaggcagtcacttcccataccatgttgtgtcaacagagcagatattagaggggacatcagctgaaaaagcttctgatcctgcaagttctcttcgagttgccaaaacagatagtaaaactgaagaaaagacagctgctagtgctcctgccaatgtgagcaaaggcacaacaccacttgctccaccacctaaacctgttcgaagaagattaaaatcagaagatgaattaaggccagaagttgatgaacatacacaaaagacgggtgtcttagctgctgttcttgcatcacaaccttctattcccagatctgttgggaaagataagaaagctattcaggcatcaattagacgtaataaggaaaccaacaccgttttggccagattgaatagcgaattgcagcaacaattaaaggatgttcttgaggagagaatttccctggaagttcaactggaacaacttcgaccattctctcacctataagccaattgccgttaactgtgaacatacttgtttttaagtggttttgggttcaaagccaatttggagacctagacattcagctcactgcttaactcaacattaaattttatgattctgttttgccctatatgttcaccgttgtatttaagtatcttttattttttaatttcgacaataaaaaggtcaggatggcgttttctgg

SEQ ID NO: 16202 - protein, 100 aa, Homo sapiens; identical to SEQ ID NO: 16190

SEQ ID NO: 16203 - DNA, 3181 bp, Homo sapiens
ggagcgcggccgccgctgtcactgttggtgcgggcgcgtcggggccgggccggggcactgtaaatggcggcggagggaggcggagcggcggccacgctcagcccagatcccccgaaactttaggttcgaagccccacaactttccgggaagcgctgccgctccggaggcgtggacggaaggggaagccgaggcgggaagtctgggggaatcggcagggagccggggagactcgaacccgcggcgggggcggagtccgccagtgcctcgcgcctccgcggcccccgcctctttctctgcaccctccccgcggccggagccggagccggagccggagccgtagtcgcagccgcagccgcagccgcgcgccgggcctcgcaggcagcggcgcggcgagcgcagccgggccccctcctcgcgacctccgggccctgttgctcgggcgcacctggcgcgtgtgaggccggggccggcgttttcgggaagctagcaggaggccgggccacgcgcagcccctgccggcccaggttcctggggccgggccccgagtagtgcatgcggggcggggcggccgtgagccggaggcgaagatggaaggcttaacgctgagcgatgcggagcagaaatactattcagatctcttctcctactgcgacattgagagcaccaagaaggtggtggtcaacgggcgggtgctggagctgttccgggccgcgcagctgccgaacgacgtggtcctacagatcatggagctttgtggtgcaacaagacttggttattttggaagaagtcagttctacattgctttgaaacttgtagctgttgcccagtctggtttccctttaagagtggaaagtataaatacagtaaaggaccttcctctgccaagatttgttgcttcaaagaatgaacaggaatctcgccatgcagcctcatattcttcagattctgaaaatcaagggtcgtattctggtgtaattcccccaccacctggcagggggcaagtgaaaaagggatccgtaagccatgatacggttcagcctcgtacatctgcagatgcacaggaacctgcatccccagtagtttcaccacagcaatccccaccaacttctccacacacatggaggaagcacagccgtcatcccagcggtgggaatagtgagaggcctctcgcgggacctgggccattttggtctccctttggtgaagcacaatcaggttcttctgctggtgatgcagtgtggtcagggcattccccacctccacctcaagaaaactgggtcagttttgcagatactccaccaaccagtactcttttaaccatgcatcctgcttctgtccaggaccagacaacagtacgaactgtagcatcagctacaactgccattgaaattcgtaggcaatccagtagttatgatgatccctggaaaataacagatgaacaaagacagtattatgtaaatcagtttaaaaccattcagcctgatctaaacggatttattccaggatctgcagctaaagagttttttacaaaatcaaaacttcctattcttgaactttctcatatttgggaactctcagactttgataaagatggtgcattgacactggatgagttttgtgctgcttttcatctggtggttgctaggaagaatggctatgatttaccagaaaaacttcctgaaagcttaatgcccaaactgattgatttggaagattcagcagatgttggggatcagccaggtgaggtaggttattcaggctctcctgctgaagctcctccaagcaagtcaccatcgatgccatcactaaaccagacatggcctgagctgaatcagagcagtgagcagtgggagacatttagtgaacgctcttcaagctcacaaactctgacccaatttgattctaacattgcaccagctgatcctgatactgctattgttcatccagttcccattcgtatgactccaagcaaaatccacatgcaggaaatggaacttaaaagaactggcagcgatcatacaaatcccactagcccattacttgtgaaaccatctgaccttttagaagaaaataagataaattcatcggtgaaattcgcttctggtaatactgtagcagatggttacagtagttcagactcttttacttctgacccagaacagatcgggagcaatgtaactcgtcaaaggtctcattcaggaacgtcgcctgataacactgcaccaccacctccccctccaaggccacagccctctcattctagatcatcatctttagatatgaatcggacctttacagtcaccacaggacaacaacaggctggagttgttgcccatcctcctgcagtgcctccaagaccacagccctcacaggctcctggtcctgctgtgcatcgcccagtggatgccgatggcctcataactcacactagtacctcacctcagcagataccagagcaaccaaattttgcagatttcagtcagtttgaagtatttgctgcatcaaatgtaaacgacgaacaagatgatgaagccgagaaacatccagaagtcctgccggctgaaaaagcttctgatcctgcaagttctcttcgagttgccaaaacagatagtaaaactgaagaaaagacagctgctagtgctcctgccaatgtgagcaaaggcacaacaccacttgctccaccacctaaacctgttcgaagaagattaaaatcagaagatgaattaaggccagaagttgatgaacatacacaaaagacgggtgtcttagctgctgttcttgcatcacaaccttctattcccagatctgttgggaaagataagaaagctattcaggcatcaattagacgtaataaggaaaccaacaccgttttggccagattgaatagcgaattgcagcaacaattaaaggatgttcttgaggagagaatttccctggaagttcaactggaacaacttcgaccattctctcacctataagccaattgccgttaactgtgaacatacttgtttttaagtggttttgggttcaaagccaatttggagacctagacattcagctcactgcttaactcaacattaaattttatgattctgttttgccctatatgttcaccgttgtatttaagtatcttttattttttaatttcgacaataaaaaggtcaggatggcgttttctgg

SEQ ID NO: 16204 - protein, 796 aa, Homo sapiens; identical to SEQ ID NO: 16192

SEQ ID NO: 16205 - DNA, 2748 bp, Homo sapiens
ggagcgcggccgccgctgtcactgttggtgcgggcgcgtcggggccgggccggggcactgtaaatggcggcggagggaggcggagcggcggccacgctcagcccagatcccccgaaactttaggttcgaagccccacaactttccgggaagcgctgccgctccggaggcgtggacggaaggggaagccgaggcgggaagtctgggggaatcggcagggagccggggagactcgaacccgcggcgggggcggagtccgccagtgcctcgcgcctccgcggcccccgcctctttctctgcaccctccccgcggccggagccggagccggagccggagccgtagtcgcagccgcagccgcagccgcgcgccgggcctcgcaggcagcggcgcggcgagcgcagccgggccccctcctcgcgacctccgggccctgttgctcgggcgcacctggcgcgtgtgaggccggggccggcgttttcgggaagctagcaggaggccgggccacgcgcagcccctgccggcccaggttcctggggccgggccccgagtagtgcatgcggggcggggcggccgtgagccggaggcgaagatggaaggcttaacgctgagcgatgcggagcagaaatactattcagatctcttctcctactgcgacattgagagcaccaagaaggtggtggtcaacgggcgggtgctggagctgttccgggccgcgcagctgccgaacgacgtggtcctacagatcatggagctttgtggtgcaacaagacttggttattttggaagaagtcagttctacattgctttgaaacttgtagctgttgcccagtctggtttccctttaagagtggaaagtataaatacagtaaaggaccttcctctgccaagatttgttgcttcaaagaatgaacaggaatctcgccatgcagcctcatattcttcagattctgaaaatcaagggtcgtattctggtgtaattcccccaccacctggcagggggcaagtgaaaaagggatccgtaagccatgatacggttcagcctcgtacatctgcagatgcacaggaacctgcatccccagtagtttcaccacagcaatccccaccaacttctccacacacatggaggaagcacagccgtcatcccagcggtgggaatagtgagaggcctctcgcgggacctgggccattttggtctccctttggtgaagcacaatcagggaactctcagactttgataaagatggtgcattgacactggatgagttttgtgctgcttttcatctggtggttgctaggaagaatggctatgatttaccagaaaaacttcctgaaagcttaatgcccaaactgattgatttggaagattcagcagatgttggggatcagccaggtgaggtaggttattcaggctctcctgctgaagctcctccaagcaagtcaccatcgatgccatcactaaaccagacatggcctgagctgaatcagagcagtgaggatactgctattgttcatccagttcccattcgtatgactccaagcaaaatccacatgcaggaaatggaacttaaaagaactggcagcgatcatacaaatcccactagcccattacttgtgaaaccatctgaccttttagaagaaaataagataaattcatcggtgaaattcgcttctggtaatactgtagcagatggttacagtagttcagactcttttacttctgacccagaacagatcgggagcaatgtaactcgtcaaaggtctcattcaggaacgtcgcctgataacactgcaccaccacctccccctccaaggccacagccctctcattctagatcatcatctttagatatgaatcggacctttacagtcaccacaggacaacaacaggctggagttgttgcccatcctcctgcagtgcctccaagaccacagccctcacaggctcctggtcctgctgtgcatcgcccagtggatgccgatggcctcataactcacactagtacctcacctcagcagataccagagcaaccaaattttgcagatttcagtcagtttgaagtatttgctgcatcaaatgtaaacgacgaacaagatgatgaagccgagaaacatccagaagtcctgccggctgaaaaagcttctgatcctgcaagttctcttcgagttgccaaaacagatagtaaaactgaagaaaagacagctgctagtgctcctgccaatgtgagcaaaggcacaacaccacttgctccaccacctaaacctgttcgaagaagattaaaatcagaagatgaattaaggccagaagttgatgaacatacacaaaagacgggtgtcttagctgctgttcttgcatcacaaccttctattcccagatctgttgggaaagataagaaagctattcaggcatcaattagacgtaataaggaaaccaacaccgttttggccagattgaatagcgaattgcagcaacaattaaaggatgttcttgaggagagaatttccctggaagttcaactggaacaacttcgaccattctctcacctataagccaattgccgttaactgtgaacatacttgtttttaagtggttttgggttcaaagccaatttggagacctagacattcagctcactgcttaactcaacattaaattttatgattctgttttgccctatatgttcaccgttgtatttaagtatcttttattttttaatttcgacaataaaaaggtcaggatggcgttttctgg

SEQ ID NO: 16206 - protein, 402 aa, Homo sapiens
MPKLIDLEDSADVGDQPGEVGYSGSPAEAPPSKSPSMPSLNQTWPELNQSSEDTAIVHPVPIRMTPSKIHMQEMELKRTGSDHTNPTSPLLVKPSDLLEENKINSSVKFASGNTVADGYSSSDSFTSDPEQIGSNVTRQRSHSGTSPDNTAPPPPPPRPQPSHSRSSSLDMNRTFTVTTGQQQAGVVAHPPAVPPRPQPSQAPGPAVHRPVDADGLITHTSTSPQQIPEQPNFADFSQFEVFAASNVNDEQDDEAEKHPEVLPAEKASDPASSLRVAKTDSKTEEKTAASAPANVSKGTTPLAPPPKPVRRRLKSEDELRPEVDEHTQKTGVLAAVLASQPSIPRSVGKDKKAIQASIRRNKETNTVLARLNSELQQQLKDVLEERISLEVQLEQLRPFSHL

SEQ ID NO: 16207 - DNA, 2908 bp, Homo sapiens
ggagcgcggccgccgctgtcactgttggtgcgggcgcgtcggggccgggccggggcactgtaaatggcggcggagggaggcggagcggcggccacgctcagcccagatcccccgaaactttaggttcgaagccccacaactttccgggaagcgctgccgctccggaggcgtggacggaaggggaagccgaggcgggaagtctgggggaatcggcagggagccggggagactcgaacccgcggcgggggcggagtccgccagtgcctcgcgcctccgcggcccccgcctctttctctgcaccctccccgcggccggagccggagccggagccggagccgtagtcgcagccgcagccgcagccgcgcgccgggcctcgcaggcagcggcgcggcgagcgcagccgggccccctcctcgcgacctccgggccctgttgctcgggcgcacctggcgcgtgtgaggccggggccggcgttttcgggaagctagcaggaggccgggccacgcgcagcccctgccggcccaggttcctggggccgggccccgagtagtgcatgcggggcggggcggccgtgagccggaggcgaagatggaaggcttaacgctgagcgatgcggagcagaaatactattcagatctcttctcctactgcgacattgagagcaccaagaaggtggtggtcaacgggcgggtgctggagctgttccgggccgcgcagctgccgaacgacgtggtcctacagatcatggagctttgtggtgcaacaagacttggttattttggaagaagtcagttctacattgctttgaaacttgtagctgttgcccagtctggtttccctttaagagtggaaagtataaatacagtaaaggaccttcctctgccaagatttgttgcttcaaagaatgaacaggaatctcgccatgcagcctcatattcttcagattctgaaaatcaagggtcgtattctggtgtaattcccccaccacctggcagggggcaagtgaaaaagggatccgtaagccatgatacggttcagcctcgtacatctgcagatgcacaggaacctgcatccccagtagtttcaccacagcaatccccaccaacttctccacacacatggaggaagcacagccgtcatcccagcggtgggaatagtgagaggcctctcgcgggacctgggccattttggtctccctttggtgaagcacaatcaggttcttctgctggtgatgcagtgtggtcagggcattccccacctccacctcaagaaaactgggtcagttttgcagatactccaccaaccagtactcttttaaccatgcatcctgcttctgtccaggaccagacaacagtacgaactgtagcatcagctacaactgccattgaaattcgtaggcaatccagtagttatgatgatccctggaaaataacagatgaacaaagacagtattatgtaaatcagtttaaaaccattcagcctgatctaaacggatttattccaggatctgcagctaaagagttttttacaaaatcaaaacttcctattcttgaactttctcatatttgggaactctcagactttgataaagatggtgcattgacactggatgagttttgtgctgcttttcatctggtggttgctaggaagaatggctatgatttaccagaaaaacttcctgaaagcttaatgcccaaactgattgatttggaagattcagcagatgttggggatcagccaggtgaggtaggttattcaggctctcctgctgaagctcctccaagcaagtcaccatcgatgccatcactaaaccagacatggcctgagctgaatcagagcagtgaggatactgctattgttcatccagttcccattcgtatgactccaagcaaaatccacatgcaggaaatggaacttaaaagaactggcagcgatcatacaaatcccactagcccattacttgtgaaaccatctgaccttttagaagaaaataagataaattcatcggtgaaattcgcttctggtaatactgtaggacaacaacaggctggagttgttgcccatcctcctgcagtgcctccaagaccacagccctcacaggctcctggtcctgctgtgcatcgcccagtggatgccgatggcctcataactcacactagtacctcacctcagcagataccagagcaaccaaattttgcagatttcagtcagtttgaagtatttgctgcatcaaatgtaaacgacgaacaagatgatgaagccgagaaacatccagaagtcctgccggctgaaaaagcttctgatcctgcaagttctcttcgagttgccaaaacagatagtaaaactgaagaaaagacagctgctagtgctcctgccaatgtgagcaaaggcacaacaccacttgctccaccacctaaacctgttcgaagaagattaaaatcagaagatgaattaaggccagaagttgatgaacatacacaaaagacgggtgtcttagctgctgttcttgcatcacaaccttctattcccagatctgttgggaaagataagaaagctattcaggcatcaattagacgtaataaggaaaccaacaccgttttggccagattgaatagcgaattgcagcaacaattaaaggatgttcttgaggagagaatttccctggaagttcaactggaacaacttcgaccattctctcacctataagccaattgccgttaactgtgaacatacttgtttttaagtggttttgggttcaaagccaatttggagacctagacattcagctcactgcttaactcaacattaaattttatgattctgttttgccctatatgttcaccgttgtatttaagtatcttttattttttaatttcgacaataaaaaggtcaggatggcgttttctgg

SEQ ID NO: 16208 - protein, 705 aa, Homo sapiens
MEGLTLSDAEQKYYSDLFSYCDIESTKKVVVNGRVLELFRAAQLPNDVVLQIMELCGATRLGYFGRSQFYIALKLVAVAQSGFPLRVESINTVKDLPLPRFVASKNEQESRHAASYSSDSENQGSYSGVIPPPPGRGQVKKGSVSHDTVQPRTSADAQEPASPVVSPQQSPPTSPHTWRKHSRHPSGGNSERPLAGPGPFWSPFGEAQSGSSAGDAVWSGHSPPPPQENWVSFADTPPTSTLLTMHPASVQDQTTVRTVASATTAIEIRRQSSSYDDPWKITDEQRQYYVNQFKTIQPDLNGFIPGSAAKEFFTKSKLPILELSHIWELSDFDKDGALTLDEFCAAFHLVVARKNGYDLPEKLPESLMPKLIDLEDSADVGDQPGEVGYSGSPAEAPPSKSPSMPSLNQTWPELNQSSEDTAIVHPVPIRMTPSKIHMQEMELKRTGSDHTNPTSPLLVKPSDLLEENKINSSVKFASGNTVGQQQAGVVAHPPAVPPRPQPSQAPGPAVHRPVDADGLITHTSTSPQQIPEQPNFADFSQFEVFAASNVNDEQDDEAEKHPEVLPAEKASDPASSLRVAKTDSKTEEKTAASAPANVSKGTTPLAPPPKPVRRRLKSEDELRPEVDEHTQKTGVLAAVLASQPSIPRSVGKDKKAIQASIRRNKETNTVLARLNSELQQQLKDVLEERISLEVQLEQLRPFSHL

SEQ ID NO: 16209 - DNA, 392 bp, Homo sapiens
gaattaaggccagaagttgatgaacatacacaaaagacgggtgtcttagctgctgttcttgcatcacaaccttctattcccagatctgttgggaaagataagaaagctattcaggcatcaattagacgtaataaggaaaccaacaccgttttggccagattgaatagcgaattgcagcaacaattaaaggatgttcttgaggagagaatttccctggaagttcaactggaacaacttcgaccattctctcacctataagccaattgccgttaactgtgaacatacttgtttttaagtggttttgggttcaaagccaatttggagacctagacattcagctcactgcttaactcaacattaaattttatgattctgttttgccctatatgttc

SEQ ID NO: 16210 - protein, 34 aa, Homo sapiens
MFLRREFPWKFNWNNFDHSLTYKPIAVNCEHTCF

SEQ ID NO: 16211 - DNA, 492 bp, Homo sapiens
aatgcttattattaatggaattcttgtcttaaagagcaaaggcacaacaccacttgctccaccacctaaacctgttcgaagaagattaaaatcagaagatgaattaaggccagaagttgatgaacatacacaaaagacgggtgtcttagctgctgttcttgcatcacaaccttctattcccagatctgttgggaaagataagaaagctattcaggcatcaattagacgtaataaggaaaccaacaccgttttggccagattgaatagcgaattgcagcaacaattaaaggatgttcttgaggagagaatttccctggaagttcaactggaacaacttcgaccattctctcacctataagccaattgccgttaactgtgaacatacttgtttttaagtggttttgggttcaaagccaatttggagacctagacattcagctcactgcttaactcaacattaaattttatgattctgttttgccctatatgttc

SEQ ID NO: 16212 - protein, 118 aa, Homo sapiens; identical to SEQ ID NO: 16188

SEQ ID NO: 16213 - DNA, 598 bp, Homo sapiens
attcacagtgttctaggatattctattgtagttccaatggcaagaacctctctaggaatctctgacctctccctcacacatctgttacatagctgcatccttgccctgtcctcctctccctcacacatctattacctgctctcccatctgcctttcagtagcagagaaggctcatttaataaagttccttcaagtttcttatcatcatctcagttttcttgtcagaatatttaacattttattctgatttggtacatattctatatttatgcataattacatgttatgtagaattaatagtgataaacatattcatttttaggctgaaaaagcttctgatcctgcaagttctcttcgagttgccaaaacagatagtaaaactgaagaaaagacagctgctagtgctcctgccaatgtggtatgcaaaatgtcttttataataataattttgtacatcataagtaatgtgaaataatttttagaaataaggtcagccagaaatcatctaacccatttctctgcctttaactgtagtatagtcagtctagctcagaacaaagtctgcctatttaatggagatgatattctgtaatctatg

SEQ ID NO: 16214 - protein, 65 aa, Homo sapiens
MARTSLGISDLSLTHLLHSCILALSSSPSHIYYLLSHLPFSSREGSFNKVPSSFLSSSQFSCQNI

SEQ ID NO: 16215 - DNA, 981 bp, Homo sapiens
atgcaaacagaactacagccagcccgcgtgactgggtcacctctgctttgtacatgcacatggagcttcagtgccagagctggcactgaagtttggccttggatttcagtaggcaaaggcttgtccctgggagtgtgggcggcccctttcttgagcgcagaaacacttacttttccccctaccctgctcctcctcctccacagccgtctttctctttgcctcagccacttccttccttggcctcaccctccccagtgcactgaagaaggtaaccgggtccagacccacgcggcgccagttctccggcgggaaggaaaaccgcgcagagaggcagcaatgaatgtggatcacgaggttaacctcttagtggaggaaattcatcgtttgggttcaaaaaatgctgatggaaagttaagcgtgaaatttggggtcctcttccgtgatgataaatgtgccaacctctttgaagcattggtaggaactcttaaagctgcaaaacgaaggaagattgtaacatatccaggagagctgcttctgcaaggtgttcatgatgatgttgacattatattactgcaagattaatgtggtttacatatctttatgtactgccattttttgtttctggtaaactggaatataaagtgaaagaacaaacatttgaacatacttaatgtatttttatagaactttgtaaacgaaaggagattcatgttttagaagtctgtccttttttatatcttgaaagaaaatctatgtatgatgctataaaataaatcctattatttttctcaggaatctggttaggaattgcaggcaatgagattttttgcggggcagggatgggaatgtttgttcataaataattagacattttctatagatatttgacattctgcgaaagcaacaagcaaactgaagaccaactcctatgagaaatattatgatgtttatgtaataaagacatgtaactgtcttaaattt

SEQ ID NO: 16216 - protein, 193 aa, Homo sapiens
MQTELQPARVTGSPLLCTCTWSFSARAGTEVWPWISVGKGLSLGVWAAPFLSAETLTFPPTLLLLLHSRLSLCLSHFLPWPHPPQCTEEGNRVQTHAAPVLRREGKPRREAAMNVDHEVNLLVEEIHRLGSKNADGKLSVKFGVLFRDDKCANLFEALVGTLKAAKRRKIVTYPGELLLQGVHDDVDIILLQD

SEQ ID NO: 16217 - DNA, 456 bp, Homo sapiens
agttctccggcgggaaggaaaaccgcgcagagaggcagcaatgaatgtggatcacgaggttaacctcttagtggaggaaattcatcgtttgggttcaaaaagtaagtatctgacagagatagagtatttctcctggctttaccttggaacaggtgagactggcatgctggagaagcctatgaaggggtcacccagggcttcaggacacaggtctgggagctctgcccacagccccaggttataactgcccttagccaggaattgacatctggagacacggggcttttggggtattgtgattctgatgcagggaatagttgagatatttcattatttttcgatagaaagcaaattaccaagcttcttgtatttgactgcattgaaatttggtaattgaatcatgttcaaatttttacttgtcatactattaaaattcatgttttctgccttgttctg

SEQ ID NO: 16218 - protein, 67 aa, Homo sapiens
MNVDHEVNLLVEEIHRLGSKSKYLTEIEYFSWLYLGTGETGMLEKPMKGSPRASGHRSGSSAHSPRL

SEQ ID NO: 16219 - DNA, 5620 bp, Homo sapiens
gccttttccctccggctcgggagcgtctcgcttgcgccccgggcccgcggcgcccgcgcggctgcgagcctcgggtggccgcgtgccggctccaggaagccggagagggcgcggcggccaggatggcgcggcacgggccgtgcggctagacgggagccgagggaaccgccggctcgcgccctccgttctttcccggagccggcttcacgcagggccgggaacggccgtgcctctgggatccgccttcgctgacgccgggcacctacctggacgcgagcgagcgagatgcccaaccccaaaaacagcaaaggcggccgcaaaaacaagcgcgccaacagcagcggcgacgagcaggaaaatggagccggggccctggcagcggcgggcgcggcgggagcggcggccgggggggccctggcggcggcggccggttgcggggcggcggcggcgggcgcgccgggcgccggaggcgcggcgggcgccggaggcgcggggactggcgccgcgaacgctgcggccgccgcgggggctgcggccgcgggcgatgccaaaaacgaagccccatgtgccactcccctgatctgcagcttcggtaggccggtggacctggagaaggacgactaccagaaggtggtgtgcaacaacgagcactgcccctgcagcacctggatgcacctgcagtgcttctacgagtgggagagcagcatcctcgtccagttcaactgcatcggccgcgcgcgcagctggaacgagaagcaatgccgccagaacatgtggacaaagaagggctacgacctggccttccgcttctgctcttgccgctgtggccagggccacttgaagaaggacacagactggtatcaggtgaagcggatgcaggacgagaaaaagaagaagtctggctccgagaagaacacagggaggcctcctggtgaggcggcggaggaggcaaaaaagtgcaggcccccaaataagccccagaaaggcccaagccacgacctcccccgccggcattccatggaccggcagaactcccaggagaaggcagtgggtgccgcagcctacggtgcccgttcccccggtggctccccgggccagtccccacccacgggctactccatcctctctcctgcccacttcagcggcccccgctcctccagatacctcggggagttcttaaagaacgccatccatctggagcctcacaagaaggccatggctgggggccatgtgttcagaaatgcccactttgattacagccctgcggggttggcagttcacagggggggacacttcgacacccccgtgcagttccttcggcggctggacctctccgaactcctcactcacatccccaggcataagctgaacactttccacgtgcgcatggaagacgatgcccaagtgggccagggggaagacttgcggaagttcattctggccgcgctcagtgccagccacagaaacgtggtaaactgtgccctgtgccaccgggcgctcccggtgttcgaacagttcccactggtggatggaactttgttcctaagcccgtcgagacatgatgagatcgaatatgatgttccttgtcaccttcaagggagactcatgcatctgtatgccgtgtgcgtggactgcctggaaggggttcacaagatcatctgcatcaagtgtaagtcacggtgggatggcagctggcaccagctgggcactatgtacacctacgacatcctggctgcctctccatgttgtcaggcccgcctgaactgtaagcactgtgggaagccggtgatcgacgtgaggatcgggatgcagtacttctccgaatatagcaacgtccagcagtgtccacactgtgggaacctggactaccacttcgtgaagccattttcctccttcaaagttctcgaagcttattgatgaaagctttgctttagtaatagctattttattgatattattactttattacatatcttttatagggaaacattctgtgacattaatttcctttctaatttaaaggagagttactttgttgtatgtgtgccactaaaataggggctgcccttgccctgtcttgattcccgagtgttaatctgtggttttgaccagagcccagatgggtaatcctgtgcatttgggttggggttcactcttaccaagaatctttgatgcagctttaagatggtggggaggatggggtgaatttaggaaaggaatttgtggttataaactaagagcttgataggagttggaaggaaactcttactaaaatgttaactttctaaaaaccttcttttagatcttccttgggcctttggaaaaatatgtgacaagtgaatgtaagtctgtgcctggagagctaatagtgcattagtctatctcagcctagtgttctgcagcacacatgggcaggcagtttactcacactgacaggtgacctgaaagtggcacaagtgctgtttctatcactattgtaatttgccagttcatttttcatgctgaaagtaatatccaaattgtaagacatatgaaagatattagtgttgcaaatatgtttaggtaaactgacctataacagaatatgtgaaatgaatttggaaataatgcaagaaggcagaactcaatcatttaaattgtgtctttgaagttggtaatatagcttttaaggagaacccatgaataacctgatttgggcagtgatgatttattacaggttgcactgttgaagtgtcatttggtgtcaggttcttctcacaggtaaatctttcagccacagaatctaactggtgagcttcagaaccaataattgccacatttattgtcctcaaaattgcttatggccatgtataaccaattaattctgagtttccaaaatcaaagatttgaccttaagagggaagggaaaaaagtgtgaaaggatgatgaagaaaataattttactatttcttttaaaagtatgttttggaaaatcaatgattttaatgcatagcagtatgtttgaaaaatagaccattctaaaaagcccatgataccttactgttgatgaaaaaggatgatcatatatatagaacttgattagtcagagcattgggcattccaaaatacagcctttggttcagtagattttaatgctttaaatagactgacgtcgcatacccttatagaattggaatatgatttctcaaaaattaatttgataatttcatgtatgatgtgcatatatgctaaaagaatgcagaaaatcattttatgaatagccaaatttggggttgatgtgaacattttatgttactcatttggtttatacttttttttttttttttttaactgtgtggtttttcttttcagaagtatttaggcaatattgcacgtgagtttcagttctttttttcttttttttgagatggagtctcactcttgtcacccaggctggagtgcagtagtgcgatctcagctcactgcaacctctgcctcctggattcaagcgattctcctgtcccagcctcccaggtagctgggactataggcacgtgccaccacacccggctaattttttgtatttttagtagagacagcgtttcaccatgttagctaggatggtctagatctcctgaccttgtgatctgcctgcctcggcctcccaaagtgctgggattacaggcgtgagtcactgtgcctggccaagtttcagttctatatgaagtatttgatgttttgtttgaaacaatacagcattaaagaaccaatgttattcactaatatcattcatctttcagtttggatgatttggtttgctgcatctaggttggtgtttgatcatctgaaaaaacatttcagtgggaagaaatgcataaaatgcctataagaagtagaaagtcattgaactgacagtgtttgatgcaactaaaagaggattgtaagacatagctttctgcaaacttgtctttaatgcacaaagctgtagtggtgaattaactatctccttattgattctctcctgtacccagatgcaaaaagtgctaagtttctcttgtcctcgtaataccatttggattttatttctgaatttaaatagtaaaatatttatgatgctgatctttaacccacctaaaattttatagtgaaacctgctttatattgttgttctgaagcttacaattgacctatacattgcattcagcaagctcctgaatttagaactgccgtcagtgtagtgtatgctgtgttccatgttgcctttttagatggctttctaccccctgaacaataaataggatgaggttttactgtaattgggtaaagtttactcttggacattatttcgatgctaaagtaaggattctgtggatgttacttaaagagaaaagcataagagcatgaagcatatctgggaatatcttttgcctttaagacgattcattcttgtctagagggaaaatctggctgatttgggaataaaatataatcgaatattcaacaccatgaagataaatcttattttggaaatctactgaccttaataccccaagcttgccctgaatactttgattggaattggaatatatcaaaaaaggttagtatttttgttgtagttaggatactaaaaggatattagttacccaagagatccaatttgtttttctgatgaatagtgttcagtaaaatgaagcagtcttaagagtgactaataatttcaaagtgatttttcgtctattcttaatattttttaattatttatttttaagagttttataccttgagcagatacaatgatctgctttagtgagaggacaatttctgattgattgttttctcttcaggccatctcacctcttcattctcttgttacatttgaagcagttgatataatgggtttatactttaaaagatagacatggtgccatgaagttggggagttgggtgaattatcccattctagttacagaggagctttccttaaatgccctttaacttctaggttttgttcaagaagttcattttctgagtaaaaggtattttcatatatgttgggggaaaattaactcatctaaaaagaatcttattaggtatttgaactctaaaactaacagataagacagatatgtaccttattagagcaccagaactaatttgctaagtcttttgtttagtcctgcaagactgatgcttaatacacagtctgttctcctgtgtctaggtcaggaactccagtttgcttttctgttttgtgtcctggtagcagctgttgagtaactttcattggaggttgggaaggaagtgaggagaaagtgttcttgtttagtgttttatttcctataataggatgctgcctaacccagttcatctctatgtcctgttcactgaatattccgggtaattgaaagaaaatataatggatgggctccattaaaaccagctcaaaaataaattcttgtcagtaaagatttcttgtcaagatgtcttggattgcacttttgttgaggaaagacagtgtaaatagttaaagaatgttgataaaattgaaacatttggttgtggaattgtgtgtggttttagagggtttctgtttgtgaaatgtatgtattaaaaataataaaattccagaaactaacattgt

SEQ ID NO: 16220 - protein, 543 aa, Homo sapiens; identical to SEQ ID NO: 1874

SEQ ID NO: 16221 - DNA, 502 bp, Homo sapiens
aagtgggcatttctgaacacatggcccccagccatggccttcttgtgaggctccagatggatggcgttctttaagaactccccgaggtatctggaggagcgggggccgctgaagtgggcaggagagaggatggagtagcccgtgggtggggactggcccggggagccaccgggggaacgggcaccgtaggctgcggcacccactgccttctcctgggagttctgccggtccatggaatgccggcgggggaggtcgtggcttgggcctttctggggcttatttgggggcctgcacttttttgcctcctccgccgcctcaccaggaggcctccctgtgttcttctcggagccagacttcttctttttctcgtcctgcatccgcttcacctgataccagtctgtgtccttcttcaagtggccctggccacagcggcaagagcagaagcggaaggccagctcccgccgcgcccgccgctgccagggccccggctccattttcctgc

SEQ ID NO: 16222 - protein, 87 aa, Homo sapiens
MPAGEVVAWAFLGLIWGPALFCLLRRLTRRPPCVLLGARLLLFLVLHPLHLIPVCVLLQVALATAARAEAEGQLPPRPPLPGPRLHF

SEQ ID NO: 16223 - DNA, 305 bp, Homo sapiens
acggaagtcaagttcagattctcttccttcctcaagcaagccaaaaaattaaagagcaaacacagaggccctaaatgtctcgaggcctcttcacctgtggcgatcgacgcagcaagcctgggtgtgctaagaattgaggctctctctccttcattccgggggttacgggtggccttggagcaccgggaagaattaaccggtgcctaagttttcaatcggatcattcttctcaacttgggcggctctttcctcccttccttcctcccttcgccccgtcttaccgtttttggcatcgcccgcggccg

SEQ ID NO: 16224 - protein, 55 aa, Homo sapiens
GSLSFIPGVTGGLGAPGRINRCLSFQSDHSSQLGRLFPPFLPPFAPSYRFWHRPR

SEQ ID NO: 16225 - DNA, 674 bp, Homo sapiens
caggaaaactgcacctgagtacatgcctcgttctccacttcatctaagcaaagaagagatcctacaaacaagaatacaactaagaaaatgaagaagctggaaaaggacacagccacatggaaagcccgatttgagaactgtaacaaagctctgttggacatgattgaagaggcttctctgccgtgcgtcctcctggaggaagggaggaagcgtagaaggtgccgatgcacttttcctctctccagccctcctgactgctccaagaatttcatcgaacaagactcaaagaggcccagctgctctgcgttttgattcttctccctctctcagtccacactgacctgggaggggcttctcaaacaccacatttcctagcgtgctgtgagaagaggactgtgagctaagaagggagaaaaggcactccctcctcatcaacaaacacctgacctgggtagaccctctgcttaccaagatccagtccaccttttgacatcagcattcatgctgcctctttttacgaaccaagccaaagtggtcccttcctctggaaattataggatacttaatgtacatcatatccagcttcccgactccagactgtgggagatgacacagagccagcctgcctggatgtgactcagctctgcaacttattaaagacctttggcaaatca

SEQ ID NO: 16226 - protein, 74 aa, Homo sapiens
MKKLEKDTATWKARFENCNKALLDMIEEASLPCVLLEEGRKRRRCRCTFPLSSPPDCSKNFIEQDSKRPSCSAF

SEQ ID NO: 16227 - DNA, 2293 bp, Homo sapiens
tacatgatgtaagtgctgctgaagccctgctgagtcagagtccacaaatcaaacagcccctagaaacctgcccttctctggcagggttagggctgagactgggccctcagaccatttggaatgaccagtgatttcagctctcactcccttctcatcagcacgtgtctacagttgcaagttctcactctgtagcccagtctggagtgcagtggtacaataatggctcacttcagctttgaccttccaggctcaagcggtccttctacctcagcctctggagcaactggaaccacgggtgcaccccaccacgcccagctaacttttgtatttttttgtagagacagggttttgccatgttgctcagtcccaatatcatcaccagatgagaatatgtatggattcatgaacaagaaaattgcttaaccatttgatcaagagagattggaaaatcaagatgaagcaggtctgggtgaaagagctgtgaatggattaatggaacagaaaggaggtgtggagatccttctattacatgttaatgatcaccagggaacatccactacaatagaacatcccactaaatcaccagtagacacaagagaatatgtggccagttgactttggccagcctctgtcattagatgtcaatgttcaaacaacggtacatgaatggcatagccctggtagcaggagtgggggctatgcatggatccagcaatacacactcccactccacaacattgacccagccaccaaggctgacaaaatattcaaccttccagcaacagaaaccaaggatgacccttatccctgcccaggtatggtattagcccttgagactaaccagccatgtggtgggaagttgaatatcttctaccctggaaaggtcattgattcattttagtatgaattaattcatgtttctgggttggatttgctgttcttgcctgcagggcctcagctggcaccagcatctaaaggcttagagagttagtgatccaccaacatggcatctcacataacatcccatcaaaccaagtgacccactttactagaaatgaggtgcacgagtggacaagctccagcttgacccaagtggaacaagctctactagtcccatcagatcatgcaccatccagaagctgccacactaacagagtgatggaaaggcctgttgaaggcatagtggatgagccacaccattgcaaggtaatgtcatcggaggtttatttagcatgtgtattacacccagaagaatggtgtcccatccttgcaaggtaatgtcatcatcagattctcctgggtgtaatatacatgctaaacaaacaatcattatatgatgctgtgtccccaagaggtaaaatatgtgggagctaaggagtggaagcagcaatagcctcacttaccatcaatacaattgactccttagggaacttgtgcctaggctctgtgggtttagaggtcctggtgcccaaaggagatgtgcttccatcagggaatacaacaagcattcaattgaacatgaggttaaggctgccacttgggagcatcaggctcctcatgccaagagatcaccaagcaaaaagaggaatcaccgtaccatgagcattaatcaatcccattcttcagaaggagatgggactgctgacacaaggccacagagaggcccccagataacttgcctgggtgtcccttagaattcccttgcccattttttaataatagatggataaatgcaacagtctccacctaacaaaggcataatgatgggacttctcaagagtgagaagctaggtcattccaccagccaagtagaccagcagaggtaccaaaaagagacaggaaatctagactgtaaagtaaaacaggaagattccccaggaacagaagccaactgtgatcctagaggagcttctccttaacatgcagaaagaagtggatccatgaagcacaagagctgagctgtcatggaaactgcacatctcaaatttcccatcaggactgaaggacctagtcccccacaggctgaagacagtcaccttacccaacttcatgctctcttccaggggcagcctgcatccaacaacttgtcagcacaggactataaaggccttaccctttgcctctgtgaagcatcccacagagaggtgcatccacctctgaaggtacatcccagcttcaggctcccagtcactttgggcttacccagcctcttcgtctgccctgcttttctccctccccttccttcctgcaggtttggatcctgagagcactccctaataaacctcatgcccac

SEQ ID NO: 16228 - protein, 67 aa, Homo sapiens
MAHFSFDLPGSSGPSTSASGATGTTGAPHHAQLTFVFFCRDRVLPCCSVPISSPDENMYGFMNKKIA

SEQ ID NO: 16229 - DNA, 774 bp, Homo sapiens
tccggtctcagtgcccacagtagatgtgctcctgcatgtagtgctcactagacaagccactgatttattcttgcctggtgacacagtcctgtttcccgcttcctgctttacattggcctttggaaagctcagagtcaagaggcaatccccactgagaatgcagaggactccaaggcacaaatgtgatatctaacttgattccttgcatttctctcttttctgacttggtttcacacgttctcatctatgcatcagttgatcaagcaattcatttatcatctcagctggctgaaattctgaataagatttcccatataatgaagcgattgcactgaagaatctcttccacgatatgaaattttgctaactaatcacaccttccttgatgttacgatttggaaagagtcattgttgtaaaaattggggatgagatttttgtccctagcaagtgtaaccttggttccaatccaagttcttaaggcaaggacgggagcaagatagagctgcagaatctgtcaatatggacttttatgggaagatgaaaagcatgtcctgaaaactcaggcagggatcattgaaggtgagctgtgtgccttcctggttgcccatctctcgaggtgcttgatcatggacattaggttgtaaatttcttccagctatatctatctatttaacaatgcattttctttagccaaagtaatgcttctatagtgcatatgaaatttagtccacaaaaattagagtgcaataaatgtcacatttatttcttttctt

SEQ ID NO: 16230 - protein, 30 aa, Homo sapiens
CYDLERVIVVKIGDEIFVPSKCNLGSNPSS

SEQ ID NO: 16231 - DNA, 521 bp, Homo sapiens
ctgttcggtgccaagtagaataatttccaccactttccctgttcttcagtactactgcatagccaagctggtttattgttgcatataaagtctgggctgtcttccgaagtgctctgtttcatcaacagccgaggagaggagggagtgctaggtggaccagatgactgcaaagcgtgaggacctcgcttctcatgctgcttagaaagcacataggggtccttggagaaggactcccctgacgcgcctttcttctcctcaaagccctccattggcaggggcaatgtgggtgaaggatgtaaactggaaagggctggcggcatggagtgaaccatctggatcccaccaacgggcaccatggggataggggctcgcacttgttgctgagagtggagtggaagatgactgaagacatagtcattaggaccctcagggaaaaggctggagcctggatgttcataagcaccttcttggtctccatagagactgaagtaaggaacctgaggtaatcctcttcttaaatt

SEQ ID NO: 16232 - protein, 35 aa, Homo sapiens
MTEDIVIRTLREKAGAWMFISTFLVSIETEVRNLR

SEQ ID NO: 16233 - DNA, 8192 bp, Homo sapiens
ggttccaaagagaaggagcaatcagcaagtttgcagacaccctggaacatggaagcaaccaagctttaagaagcacagctttggagacactccatgagtctgcactgctttcaggggaactagcacttaagaccttgtgtaacaaaatggacactggggacacagctctaggacaaaaagctacctcaaggtctggagaaactgataaagcatcaggtagatggagacaggaacaatcagctgttattaagatgagcacttttggcagtcatgaaggacagcggcaaccacaaatagagcctgagcaaatcggaaacacagcatcagcacaactgtttggttctgggaaactggcctcccctagtgaagtggtgcagcaagtcgcagagaagcaatatccaccgcatcgtccgagtccttactcatgccaacactcactctctttccctcagcactcattgccacagggggtcatgcacagcaccaagccacatcagagcctcgaaggtcctccgtggcttttccctggccctttgccatccgttgcctctgaggacttatttccttttcctatacatggccacagtggtggttatcctagaaaaaagatttcaagtctgaaccctgcttatagccaatactcccagaaaagtattgaacaggcagaagaggctcacaagaaagagcacaaacccaaaaagcctggcaagtacatttgcccttactgcagcagagcgtgtgccaaacctagtgtactgaaaaaacacatcaggtcccatactggggagcggccatatccatgtataccttgtggtttctctttcaagacaaagagcaatttgtacaagcacaggaagtcacatgcccatgcaattaaggcaggattagtacctttcacagagtcagctgtatctaaattggacctagaggctggttttattgatgtagaagcagaaatacattcagatggtgaacagagtacagacacagatgaggagagttctttatttgccgaggcttctgacaaaatgagtcctggtccacccatcccactggacattgccagcagaggcggctatcatgggtcattggaagaatcattgggaggtccaatgaaggtgccgattttgattatccctaaaagtgggattcctctccctaatgaaagctctcagtatattggccctgatatgctaccaaatccatctttaaatactaaggctgatgattcgcacacagtcaaacagaaacttgcactaagactgtcagagaaaaaaggacaagattctgagccatcgctcaaccttctgagcccgcacagtaaaggaagcactgattctggttacttttctcgctcagaaagtgctgagcagcaaataagccctcccaacacaaatgcaaagtcttatgaagaaatcatctttggaaaatactgtcggcttagtccgagaaatgcactcagtgttacaaccacaagtcaggagcgtgccgcaatgggtaggaagggcataatggaaccattacctcacgttaacaccaggttagatgtcaagatgtttgaagatcctgtttcacagctgatcccaagcaagggagatgtcgaccccagtcaaacgagcatgctgaaatccactaagttcaacagtgagtccagacaaccccagattattccatcatctatcaggaacgaaggaaaactttatccagcaaacttccaaggcagcaacccggttctcttagaagctcctgtagactcttcaccccttattagaagcaactcagtgccaacttcttcagcaactaatctaactattcctccttctttgagaggaagtcactcatttgatgaaaggatgactggttccgacgatgtattctatccagggaccgtgggcataccccctcagcgcatgctaagaagacaagcggcatttgagctgccttcggtacaggagggccacgtggaagtcgagcaccatggcaggatgttgaagggtatcagcagttcatccctgaaggaaaagaaattgtctcctggggacagggttgggtatgactatgatgtctgtcggaaaccctataagaagtgggaggactctgaaacaccaaagcaaaactacagggacatttcctgcttgagttctttaaagcatggtggagaatatttcatggatcccgtggtgccattgcagggagtaccaagcatgtttggaactacctgtgaaaacaggaaacgccggaaagagaagagcgtaggggatgaagaggacacgcccatgatctgcagcagcattgtaagcactcctgtgggcatcatggcttccgattatgaccccaaactgcagatgcaggaaggagtcaggagtggatttgccatggctggacacgaaaacctttctcatggtcacacggaacgctttgacccatgtcggccccaactgcagcctggaagtccatctcttgtgtcagaggagtcaccttcagccattgattcagacaagatgtcagacctagggggcaggaaacctcctggaaatgtgatttctgtgattcagcacaccaactcactgagccgacccaattcatttgaaaggtctgagtcagccgaacttgtggcttgcacacaggataaagccccttccccttcagagacttgtgacagtgagatttcagaagccccagtgagtcctgagtgggctccacctggggatggtgcagaaagtggggggaaaccctctccatctcagcaggtgcagcagcagtcctatcacacacagcccaggctagttcggcaacacaacatccaggttcctgagattcgagtgaccgaggagcctgataaacctgagaaggagaaggaagcccagagcaaagagccagagaagcctgtggaagaatttcagtggccccagagaagtgagaccctttcccagctccccgcggagaagttgccacccaaaaagaagcgtctgcgacttgcagatatggagcactcctcaggggagtccagctttgaatccacaggcacaggcctctcccgcagccccagccaagaaagcaacttgtcccacagctccagtttctccatgtcttttgaaagagaagaaaccagtaagctttctgcacttcctaagcaggatgagtttgggaagcattcagagtttctgactgtccctgctggttcatactcattgtctgtcccaggccatcaccaccagaaagagatgcgacgctgctcatcagagcagatgccttgtcctcacccagcggaagtcccagaagttcggagcaaatcatttgattatgggaatctgtcccatgctcctgtgtcgggagcagcagcctccacggtatcaccgtccagggagaggaagaaatgctttctggtgcggcaagcttccttcagtggctccccagaaatctcccagggcgaggttggcatggatcagagcgtgaagcaagagcagctggagcacctgcatgctggcctccggtccgggtggcaccatggcccgcctgctgtgctgcctcctcttcagcaagaggacccagggaagcaggtggcgggtccttgtcccccgctgagctcggggccactgcacctggcccagccacagatcatgcacatggacagtcaggaatctttgagaaatcccttgatccaaccaacatcctatatgacaagcaagcacttacctgaacagccacacttatttccacatcaagagacaattccattttctccaatccagaatgccttgtttcagtttcagtatcctacagtttgtatggttcatttaccagctcagcagcctccctggtggcaggcacatttcccacatccctttgctcagcaccctcagaagagctatggcaagccctcttttcagacagaaatccattcgagctatcccttagagcatgtggcagagcacactggaaagaaacctgctgagtatgcacacacgaaagagcagacctacccatgttattcaggagcatcagggctacacccaaagaaccttcttccaaagtttccatcagaccagagcagtaagtcaactgaaacgccctctgagcaggttcttcaagaagattttgcctcggcaaatgctgggtctttgcagtccctcccaggaacagtggttcctgttcggatccagacgcacgtaccatcctatggaagtgtcatgtacacaagcatttctcagatacttgggcagaatagccctgccattgtcatatgcaaagtcgatgagaatatgacccaaaggacactggtcaccaacgcagccatgcaagggataggattcaacattgcccaggtgctggggcagcatgcgggcttggagaagtaccccatttggaaagcacctcagactttgcccctcggcttagaatcctccatccccttgtgtttaccttccacctctgacagcgtggccaccctgggaggtagcaagcgaatgctttctccagccagtagcttggagctcttcatggaaaccaagcagcagaaaagggtcaaagaagaaaagatgtacggacagattgtggaggagcttagtgctgtggagctgaccaactcagacatcaaaaaggacctctcccgcccccagaaaccccagctggttcgacaaggatgtgcttctgagccaaaagatggcttgcagtcagggtcatcttccttctcctcgctgtcgccctcctcatctcaagactatccttctgttagcccgtcttccagggagccattcctgcccagcaaggagatgctttccggttcccgggcaccacttccggggcagaagtccagtgggccttctgaaagcaaagaatcttcagatgaattagatatcgatgagacggcatcggacatgagcatgagcccacagagttcttcattaccagcaggagatggtcagctggaagaggaagggaagggccacaagcggcctgttggcatgctggtccgcatggcctctgcccccagcgggaacgtggcagactcaactcttcttctcacggacatggcagatttccagcagattcttcagttccccagtctgcggacaacaactactgtgagttggtgcttcttgaattatacaaaacccaattatgtgcaacaggccaccttcaaatcctcggtttatgcttcatggtgcattagttcctgtaatccaaacccatcaggattgaacaccaagaccacgctggctcttctgaggtccaagcaaaaaatcactgcagaaatttatactctggctgctatgcataggcctggaaccggcaagcttacatcatcaagtgcttggaagcagtttactcagatgaaacctgatgcgtcctttttatttggcagcaaactagaaaggaaactagtgggaaatatcttaaaggaaagagggaaaggagatattcatggagataaagatattggatccaaacaaactgagccaatccgaattaaaatatttgaaggagggtacaaatcgaatgaagattatgtatatgtcagaggacgtggccggggaaagtacatttgtgaagaatgtgggattcgctgtaagaagccaagcatgctcaaaaaacacatccgtacccatactgatgttcggccttatgtatgcaagttatgtaactttgccttcaaaacgaaaggaaacctaacgaagcatatgaaatctaaagcacacatgaaaaaatgcctggaattgggagtctcaatgacatcggtggatgatacagaaactgaggaagcagaaaatttggaagatttgcacaaagcagcagagaagcatagcatgtccagcatttcaactgatcatcagttctccgatgctgaggaatcagatggtgaggatggagatgataatgatgatgatgatgaagatgaagatgactttgacgaccagggagatttaacaccaaaaacaagatcaagaagcaccagtcctcagcctcctagattctcctccttgcctgtgaatgttggcgccgtaccccacggggttccttcagatagttccctgggacattcttcgttgatcagctatttggttactttgccaagtattcgagttactcagcttatgacacccagtgattcatgtgaagatacccagatgacagaataccagaggctattccagagcaaaagtacggactcagaaccagacaaagacagattggacatacctagttgtatggatgaggagtgcatgctaccttcagagccaagctcctctcccagggacttctcaccctcaagccaccattcctctccaggatatgattcttcaccctgtcgagataattcaccaaagaggtatctgatacccaaaggagatttatctcccaggagacatttatcacctaggagagatctgtcacccatgagacatctttcaccaagaaaggaagctgcattgagaagagagatgtcccaaagagatgtttcaccaagaaggcatttgtctccaaggaggccagtgtctcctgggaaagatatcacagcaagaagagacctctctcctagaagagagagaagatacatgaccacaataagagcgccatctcccagaagggctttataccataacccaccattgtccatgggacagtatttgcaagcagagccaattgtattggggcctcctaatttaagaagaggattacctcaggttccttacttcagtctctatggagaccaagaaggtgcttatgaacatccaggctccagccttttccctgagggtcctaatgactatgtcttcagtcatcttccactccactctcagcaacaagtgcgagcccctatccccatggtgcccgttggtgggatccagatggttcactccatgccgccagccctttccagtttacatccttcacccacattgcccctgccaatggagggctttgaggagaagaaaggcgcgtcaggggagtccttctccaaggacccctatgtgctttctaagcagcatgagaagcgaggtcctcacgctttgcagtcatctggtccacctagcactccctcctctcctcggctgttgatgaaacagagcacttcggaagacagcctaaacgcaacagagcgggaacaggaggaaaatatacagacttgtacaaaagccattgcctctctccggattgccacggaagaggcagctctgctcgggccagatcagccagcgcgggtgcaggagccccaccagaaccccctgggaagtgcacatgttagcattagacactttagtagacctgagccaggtcagccctgtacctcagccacccaccctgacttgcatgatggtgaaaaggacaattttggtacatcacagactccattagctcactccacgttttacagcaagagttgtgtggatgacaagcagttggactttcacagcagcaaggaattatcttcaagcacagaggaaagcaaagatccttcatcagaaaagagtcagctacattgatctatgatgcatggagactttcatttccacattttcccatttttttgtttttgtttttctagaaatggaggtaatccagtttatagcatgcctgtcctaagttacagtagtttgctattatatatacttttgttatatcaaaagaattaggtaaattaacaagtcatcatgagcctgaccaaaacaaaatttgaaattaacctattgggtctggtacttttaaaattgtacagatgtttgtgccttttctttactttgcttatattcttataagcattttttagcagtaatttgtacatattttagaatttgtgtatctgctttgtaataaatgtaatttctttccttttttggacacttggatctaaatgatgtaaagcaaaacagcatcaatatatatgtgaggttgcactaaaacatatttttatatgattaaaactgaacagcttttatgtacagctctgattctgtaatactaatatttatttactttgtttcataaattgtacattttttcttaatgttgtggattgcttttctatgtgaagcatgggatttactgttgcgtaactagaacaaaaatgtacattgtaaacaagatatttaaactagagtatcttattctgcacttatgcattagttaaaaaaagataaaggatgtatcagtcagttcttaactcttgtatatttttttgtctcttgttt

SEQ ID NO: 16234 - protein, 2446 aa, Homo sapiens
MDTGDTALGQKATSRSGETDKASGRWRQEQSAVIKMSTFGSHEGQRQPQIEPEQIGNTASAQLFGSGKLASPSEVVQQVAEKQYPPHRPSPYSCQHSLSFPQHSLPQGVMHSTKPHQSLEGPPWLFPGPLPSVASEDLFPFPIHGHSGGYPRKKISSLNPAYSQYSQKSIEQAEEAHKKEHKPKKPGKYICPYCSRACAKPSVLKKHIRSHTGERPYPCIPCGFSFKTKSNLYKHRKSHAHAIKAGLVPFTESAVSKLDLEAGFIDVEAEIHSDGEQSTDTDEESSLFAEASDKMSPGPPIPLDIASRGGYHGSLEESLGGPMKVPILIIPKSGIPLPNESSQYIGPDMLPNPSLNTKADDSHTVKQKLALRLSEKKGQDSEPSLNLLSPHSKGSTDSGYFSRSESAEQQISPPNTNAKSYEEIIFGKYCRLSPRNALSVTTTSQERAAMGRKGIMEPLPHVNTRLDVKMFEDPVSQLIPSKGDVDPSQTSMLKSTKFNSESRQPQIIPSSIRNEGKLYPANFQGSNPVLLEAPVDSSPLIRSNSVPTSSATNLTIPPSLRGSHSFDERMTGSDDVFYPGTVGIPPQRMLRRQAAFELPSVQEGHVEVEHHGRMLKGISSSSLKEKKLSPGDRVGYDYDVCRKPYKKWEDSETPKQNYRDISCLSSLKHGGEYFMDPVVPLQGVPSMFGTTCENRKRRKEKSVGDEEDTPMICSSIVSTPVGIMASDYDPKLQMQEGVRSGFAMAGHENLSHGHTERFDPCRPQLQPGSPSLVSEESPSAIDSDKMSDLGGRKPPGNVISVIQHTNSLSRPNSFERSESAELVACTQDKAPSPSETCDSEISEAPVSPEWAPPGDGAESGGKPSPSQQVQQQSYHTQPRLVRQHNIQVPEIRVTEEPDKPEKEKEAQSKEPEKPVEEFQWPQRSETLSQLPAEKLPPKKKRLRLADMEHSSGESSFESTGTGLSRSPSQESNLSHSSSFSMSFEREETSKLSALPKQDEFGKHSEFLTVPAGSYSLSVPGHHHQKEMRRCSSEQMPCPHPAEVPEVRSKSFDYGNLSHAPVSGAAASTVSPSRERKKCFLVRQASFSGSPEISQGEVGMDQSVKQEQLEHLHAGLRSGWHHGPPAVLPPLQQEDPGKQVAGPCPPLSSGPLHLAQPQIMHMDSQESLRNPLIQPTSYMTSKHLPEQPHLFPHQETIPFSPIQNALFQFQYPTVCMVHLPAQQPPWWQAHFPHPFAQHPQKSYGKPSFQTEIHSSYPLEHVAEHTGKKPAEYAHTKEQTYPCYSGASGLHPKNLLPKFPSDQSSKSTETPSEQVLQEDFASANAGSLQSLPGTVVPVRIQTHVPSYGSVMYTSISQILGQNSPAIVICKVDENMTQRTLVTNAAMQGIGFNIAQVLGQHAGLEKYPIWKAPQTLPLGLESSIPLCLPSTSDSVATLGGSKRMLSPASSLELFMETKQQKRVKEEKMYGQIVEELSAVELTNSDIKKDLSRPQKPQLVRQGCASEPKDGLQSGSSSFSSLSPSSSQDYPSVSPSSREPFLPSKEMLSGSRAPLPGQKSSGPSESKESSDELDIDETASDMSMSPQSSSLPAGDGQLEEEGKGHKRPVGMLVRMASAPSGNVADSTLLLTDMADFQQILQFPSLRTTTTVSWCFLNYTKPNYVQQATFKSSVYASWCISSCNPNPSGLNTKTTLALLRSKQKITAEIYTLAAMHRPGTGKLTSSSAWKQFTQMKPDASFLFGSKLERKLVGNILKERGKGDIHGDKDIGSKQTEPIRIKIFEGGYKSNEDYVYVRGRGRGKYICEECGIRCKKPSMLKKHIRTHTDVRPYVCKLCNFAFKTKGNLTKHMKSKAHMKKCLELGVSMTSVDDTETEEAENLEDLHKAAEKHSMSSISTDHQFSDAEESDGEDGDDNDDDDEDEDDFDDQGDLTPKTRSRSTSPQPPRFSSLPVNVGAVPHGVPSDSSLGHSSLISYLVTLPSIRVTQLMTPSDSCEDTQMTEYQRLFQSKSTDSEPDKDRLDIPSCMDEECMLPSEPSSSPRDFSPSSHHSSPGYDSSPCRDNSPKRYLIPKGDLSPRRHLSPRRDLSPMRHLSPRKEAALRREMSQRDVSPRRHLSPRRPVSPGKDITARRDLSPRRERRYMTTIRAPSPRRALYHNPPLSMGQYLQAEPIVLGPPNLRRGLPQVPYFSLYGDQEGAYEHPGSSLFPEGPNDYVFSHLPLHSQQQVRAPIPMVPVGGIQMVHSMPPALSSLHPSPTLPLPMEGFEEKKGASGESFSKDPYVLSKQHEKRGPHALQSSGPPSTPSSPRLLMKQSTSEDSLNATEREQEENIQTCTKAIASLRIATEEAALLGPDQPARVQEPHQNPLGSAHVSIRHFSRPEPGQPCTSATHPDLHDGEKDNFGTSQTPLAHSTFYSKSCVDDKQLDFHSSKELSSSTEESKDPSSEKSQLH

SEQ ID NO: 16235 - DNA, 1071 bp, Homo sapiens
gcttggtgctgtgcatgaccccctgtggcaatgagtgctgagggaaagagagtgagtgttggcatgagtaaggactcggacgatgcggtggatattgcttctctgcgacttgctgcaccacttcactaggggaggccagtttcccagaaccaaacagttgtgctgatgctgtgtttccgatttgctcaggctctatttgtggttgccgctgtccttcatgactgccaaaagtgctcatcttaataacagctgattgttcctgtctccatctacctgatgctttatcagtttctccagaccttgaggtagctttttgtcctagagctgtgtccccagtgtccattttgttacacaaggtcttaagtgctagttcccctgaaagcagtgcagactcatggagtgtctccaaagctgtgcttcttaaagcttggttgcttccatgttccagggtgtctgcaaacttgctgattgctccttctctttggaaccttccacacgcacaccacagtcgatgggcattagctagtaatgtccttggaccagggctataacacagttctctccattgtagaaacgtccatccaaaagctaagtgcaaatctataaagatttcttatggcatttgaaaattttcaactaggatgaaattgggatgatgaatagtctaggagaaattttgcccatcaactagagcaaagttcaattgccagtttcactaagataaaatgatctgaacagtttagagttcttatgggcatgattgtcctgacgcttcctgttatcctcatatcaaaaaactgcatcacaaccgtctttgatttccaagatgccaactctcctcacaggaactcatgcacaacttctgggaatctagtggctgtatgttaaagcatcggtaaaagagcattccaaccaaatcaattcacttaatttttcaagtagatctgattactatggtcttttaaaaaattcaaaggctccacctggaaagtcaccgctgaggaggaggagaaggaggacggggaggaggagggagaggaggagggggaggaaacccccctggtgcccttg

SEQ ID NO: 16236 - protein, 45 aa, Homo sapiens
MGMIVLTLPVILISKNCITTVFDFQDANSPHRNSCTTSGNLVAVC

SEQ ID NO: 16237 - DNA, 515 bp, Homo sapiens
ttgcctaaaacatggttctaccagtgattttcttaagttcaagaagaaagtcgcttctccactgagatatttacaatcatctctgacattgcagaagtgaattactggttacagaatgcttccattatacattatctcacaagactggatcatccagccatgaggggaagaaaagatgtgcaaatattggaaggaaaaagggttatggagatgaatgatctgtgcacctgggctatggatcgagatctactatcacccagttgagtaacttcaaataagtcacccaacctccctgggccttgccctcctgtgtaaaatgagagactttgagtcactcacagataccacctagcttttaaaactcttattctgcaattcagctaattcggcaacatcgctgagacacggcccccgatggtctaagtccttgctggttctttgtcctctctcaaacactgtaatccctcttaacaatatctgtttctccacaatcgaaaaactggacttcattaagg

SEQ ID NO: 16238 - protein, 34 aa, Homo sapiens
MRGRKDVQILEGKRVMEMNDLCTWAMDRDLLSPS

SEQ ID NO: 16239 - DNA, 402 bp, Homo sapiens
caaatactattgtctcaattttgtagaaaaatgaagctcttagagatgttaagggattggccaaatcactgtcaggtaaatgagggtgttgggttttgatctctggcctgtcactagacatcatgacagtatcagcagactgtctctcgaaggcataggactgtctcctctctgttgattttgcactgcacgggacggcctcctacttacgctgtaaacagctgcattttagtctttagccttgttagatctcattgtcagaaaaataaataaaggcaagaggagcctgggctggcggtcgggatcttttccctccctccgcgcccgccctccctctgtccttaaggaaatgctaccagacaccccccaccagacacgctcagccttggcgaggagcggccg

SEQ ID NO: 16240 - protein, 32 aa, Homo sapiens
MRVLGFDLWPVTRHHDSISRLSLEGIGLSPLC

SEQ ID NO: 16241 - DNA, 1085 bp, Homo sapiens
ggagacactgtacatgaagtttccagaaccagccatgtccatcttactaatcaagactctctctgttaaatctgcaactcaaatgactttaaggaaaaatggatttcattgattcacataaccatcactcaaggactaactttcaacatagtgagatcctgaggctcaaatattattacccgaaacaaccttcagtacataagtaatggctgctggatgtaacttgcaattgggtggcaggtcggcaaggaaagaattccaaacagaggactttctgaaagcctaattatacatattgaatgtaacaaaaggaaaatagtttttaagggttccatgaactgcttcctctgacatgagatctaacaaggctaaagactaaaatgcagctgtttacagcgtaagtaggaggccgtcccgtgcagtgcaaaatcaacagagaggagacagtcctatgccttcgagagacagtctgctgatactgtcatgatgtctagtgacaggccagagatcaaaacccaacaccctcatttacctgacagtgatttggccaatcccttaacatctctaagagcttcatttttctacaaaattgagacaatagtatttgtttcatagtgttactgtcagggttaaatgttatacattaagcatttaatatatgctgcttgtttatctaaatattcatggtcaggcactaacttcttatgtgactctgagcaatgcattcatctctgtacctgtttcctcatccataaattgggagttgaacaaggtgagccctaagtttcgttccaacttcaatattctataattcttgcaacttatatggcctcagttttcttatctttataatgggcataagagtacctacctcacagaatttttgagaggataaaatgaattaagacaggtagaaaattcttagaacagtgcctgccacattggaagtgcttaatatgtattagctgtgatgatgctgctaatgatgaagatgataatgaccctatttgcagatagtatggcagccataaaacattcagtatcagattgattacattctcttattttctgagtcaatgccagag

SEQ ID NO: 16242 - protein, 35 aa, Homo sapiens
MDFIDSHNHHSRTNFQHSEILRLKYYYPKQPSVHK

SEQ ID NO: 16243 - DNA, 1081 bp, Homo sapiens
tcatagaagaagtgcctttggcctcctgccatgattctgaggcctcgccagccatgtggaactgtaccctgagccactatctaaattgtctgcttaccttatgaagacaccataaggaggtataacgtgtggtgagcacaggtgaagagctagaggcctgaaactagatggggagggagaagccagccatgcctgcatccagggctgcactcagcctcccagcatctgtgcagaggcatcagtcaagccacagctaactgcagtcccagctaacattatgtggaacatcccagtcatcccagatcatcccagtcaaccaagatcataaaattgttttcagctattaagtttaaatatgtgaaataaggagataaaaatactgacttggactctgtctgaatgaaaggattagtagattagattagtgattcttaaaagactttcttggatgcatataagtgtccacaaaataagagtatgatggtttccaggtacaaataagatggaaaactattttgtgaatcagaattaaattggtttatttactgtagaacttctaagaggctttaacatgtacatttaattatcataagccttatgaaaactccaggaggacagaagagttgcctgtgactttttttaaagtgtttattcacatcccaaggaaggattcccagaagagatgatgcctaagcagtgtcccaaccatgaaataaagtctcctagctactggacaagatcatctcgaagcttatttccagctccaaatgttattattttcctcaaacccattataaaatggcctctcttagcactatgagatctgtaatacaagaagtagaacaaacacatgaagttcctgttggaaattcaaacttctcatacagccttcactgagttctactcattatggataaaggcttctgctttgagtcacctaagtacttttgacccccaacttaatcaatgccttgaagtgaaaatacagtgtcaggcagtccctattcatgacacaaacaaaccaaccaactcatatcatgacttaatggtgtgagacctcagtaaaaactttatatgaact

SEQ ID NO: 16244 - protein, 67 aa, Homo sapiens
MKFLLEIQTSHTAFTEFYSLWIKASALSHLSTFDPQLNQCLEVKIQCQAVPIHDTNKPTNSYHDLMV

SEQ ID NO: 16245 - DNA, 1900 bp, Homo sapiens
aatggaatgctatctctagagtactgaaagaaactaaaggccaacgtgtgaaaaacaatcttcagaaatgaacgttaaatgatgacattttcaaacaaacaagcaacaaaaagaagcaaaaagtaaacaaaaaacaaaaattcacataatttattgctaggagttttacactgaaatgctgaagggatttctactagcaaaagtaaaaatgatctcatttgaaaagatggaaattcaaggagggaatgaagaatactggatgggtaaatgtgttggtaactgtaaatgaatactgactacacaaaattatgttgaataactgaaagatgaaaacacaatcacttgaaggagaaatgtatggtcaaactgcatgcaggaaaaacttctataaaagagttacttcatgctctgggttggcagatacaatgagcaggagtgcatcagaagtaatcaagaaggtgattagttggtgtacttcagcaggagcaaccagatgaattggcttctctatatccccgtattagccacaagctaggcagcagcctgcaggtgggagcaatgcctatgcatgtatggatcagtgtgctacatacagtcacgttgacagcatgaaccttcgatgtgatgtgaggaaaatggcattctacctctgtgttcttcctccccaaaatttgtaaccaccatctaatcatgaggaaaacatcatacaagtccaaattgaggaagattctacaaaatgcctgattaatattcatcgaaactgtcaaggtcatcaaaagcaaggaaagtctgagaaactgccacagcctaaagacaatccagggaaacgtgatgactcagtggtattcggggtgggtttctggaacagcaaaaggacaacaggtaccctgagccactatctaaattgtctgcttaccttatgaagacaccataaggaggtataacgtgtggtgagcacaggtgaagagctagaggcctgaaactagatggggagggagaagccagccatgcctgcatccagggctgcactcagcctcccagcatctgtgcagaggcatcagtcaagccacagctaactgcagtcccagctaacattatgtggaacatcccagtcatcccagatcatcccagtcaaccaagatcataaaattgttttcagctattaagtttaaatatgtgaaataaggagataaaaatactgacttggactctgtctgaatgaaaggattagtagattagattagtgattcttaaaagactttcttggatgcatataagtgtccacaaaataagagtatgatggtttccaggtacaaataagatggaaaactattttgtgaatcagaattaaattggtttatttactgtagaacttctaagaggctttaacatgtacatttaattatcataagccttatgaaaactccaggaggacagaagagttgcctgtgactttttttaaagtgtttattcacatcccaaggaaggattcccagaagagatgatgcctaagcagtgtcccaaccatgaaataaagtctcctagctactggacaagatcatctcgaagcttatttccagctccaaatgttattattttcctcaaacccattataaaatggcctctcttagcactatgagatctgtaatacaagaagtagaacaaacacatgaagttcctgttggaaattcaaacttctcatacagccttcactgagttctactcattatggataaaggcttctgctttgagtcacctaagtacttttgacccccaacttaatcaatgccttgaagtgaaaatacagtgtcaggcagtccctattcatgacacaaacaaaccaaccaactcatatcatgacttaatggtgtgagacctcagtaaaaactttatatgaact

SEQ ID NO: 16246 - protein, 34 aa, Homo sapiens
MDQCATYSHVDSMNLRCDVRKMAFYLCVLPPQNL

SEQ ID NO: 16247 - DNA, 468 bp, Homo sapiens
gtgattagttggtgtacttcagcaggagcaaccagatgaattggcttctctatatccccgtattagccacaagctaggcagcagcctgcaggtgggagcaatgcctatgcatgtatggatcagtgtgctacatacagtcacgttgacagcatgaaccttcgatgtgatgtgaggaaaatggcattctacctctgtgttcttcctccccaaaatttgtaaccaccatctaatcatgaggaaaacatcatacaagtccaaattgaggaagattctacaaaatgcctgattaatattcatcgaaactgtcaaggtcatcaaaagcaaggaaagtctgagaaactgccacagcctaaagacaatccagggaaacgtgatgactcagtggtattcggggtgggtttctggaacagcaaaaggacaacaggtaaaatctaagaacatacgaataaagtgtgaactttaattaat

SEQ ID NO: 16248 - protein, 34 aa, Homo sapiens; identical to SEQ ID NO: 16246

SEQ ID NO: 16249 - DNA, 552 bp, Homo sapiens
tttattttcttaaacatattcataaaaattatttgtaaattctcatttgctgattacaatatcttgatcatctataattgtgtttctattgtgtgtgtttttttctcttgattattgggcaaatgaacttgatcttccacatctagtaatttaaaaaatgttagacattatgtataataaaaccataaagggtccagatgatattgccttccaccgaaagtgttccctttttcttctgttgggcaggtagaatagcctttgatcacctcaatcgagtcagagattattctgaatcagaagctggtttcagttttgctaagtgtacctccgattcacttctgttcttagggtgtagccctccagggctttcaattgagagcctggtggatctctgtcttccagccttatacagaggaggcagattggttggggtggcagtagtgatgaagcgatgaggataatgctggggtaaatgtcgatgacaatgtgagagaagcaaagatgattgacttggacctggagttcagtaccttttctattctttcctttctc

SEQ ID NO: 16250 - protein, 85 aa, Homo sapiens
MILPSTESVPFFFCWAGRIAFDHLNRVRDYSESEAGFSFAKCTSDSLLFLGCSPPGLSIESLVDLCLPALYRGGRLVGVAVVMKR

SEQ ID NO: 16251 - DNA, 4200 bp, Homo sapiens
cggccctccccatgtgcagccggccagccgggctctcctcctcgcggcggatgggtgaccttttcctggcacgggcaggctgtgggaggcagcggagcaggcgatgaagaagaagcagcagcatcccggcggcggcgcggatccctggccccatggggcccctatggggggcgcccctccgggcctgggcagctggaagcgtcgggtgcccctgctgcctttcctgcgcttctccctccgggactacggcttctgcatggccaccctgctggtcttctgcctgggctccctcctctatcagctcagcgggggaccccctcgcttcctgctcgacctgcggcagtacttgggaaattccacttacttggatgaccatggaccacctcctagtaaggtactacctttcccaagccaggtggtgtacaacagggtaggcaagtgtgggagccgtactgtggtcttgcttctgagaatcttgtcggagaagcacggatttaatttggtcacatcagacattcacaacaaaaccaggcttactaaaaatgaacaaatggaactgattaaaaatataagtactgccgaacaaccctatttattcactcgacatgttcatttcctcaacttctcaaggtttggaggagaccagcctgtctacatcaacatcattagagaccccgtcaaccggttcttatccaactattttttccgtcgctttggagactggagaggggaacaaaatcacatgatccgcacccccagcatgaggcaggaggagcgctacctggatatcaatgagtgtattcttgaaaactatcccgagtgctccaaccccaggttattttacatcattccgtacttttgtggacagcatcccagatgcagggagcctggtgaatgggcccttgagagagcaaagctgaacgtgaatgaaaacttcctgctcgtggggattcttgaagagttggaagatgtgctgctgttactggaaagatttttacctcattacttcaagggcgtgctcagtatctacaaagacccagagcacaggaagcttggaaacatgactgtgacggtgaagaagactgtcccctctcctgaggctgtgcagatcctctaccagcggatgagatacgagtacgagttttaccactacgtcaaagagcagttccacctgctgaagcgcaagtttggacttaagtctcacgtcagcaagccccccctgaggccacacttctttatcccaactccactggaaaccgaggagccaatcgacgatgaagaacaggatgatgaaaagtggctggaagatatttataagaggtgatgtgactgtgttgcctctatggctttatctcccttttccagaaagttctttgtttggggaagtaaaatccttaagggactaaattaatgcttgggtgcattaaaaagaacaaaacattcccacatgttggggtcattgggagatgcccggttttgcgggttttatttgtttaattttattctgtgttttctcttggctctttgggtctttcccgggtacactagatggctccatcccaaggcatcttgtcataaaacagctttcccccaccccatatcatgggaaaagggggagaaatatagcccctagcctaataacttatcatttgtaaaatgacttataaaaatattacctcaatggtaggagacatccagacttgtatatttcagtggaaatacaaaaccacttcagagaccagggtatctcctctggaaggatctaagagaaggtaagacagattaggacatcgaaaaggaggatggagccaggtgccatggcttgagcctataatccgaggctgaggtgggaggatcacttgagcccaggagtttgaggttgcagtgagctgtgatcacaccactgcactccagcctgggtgacagagtgagactctgtctcaattaattttttttttttaaaggaggaggatctccatgggtaagtggtttctacccgcatgggtagagttctgcctctggtccttctcagggggcactttcaccaagagcagtgtaattatctctgaaagagcaagtcagcttgtgccgcatccccaaccaatccacagcctggagtacctttcaaggtcaaagtgcatggccagctccattgagacattccatttcaaagcaccgtgctgacagatatcaaagtactctagcagggaaaataatttgtttgctgtgtaaggaagaatgtagacaagacagataaatctgaaggtcatgtggcatcagggaaagggcatggctgtgtcttttgcacccaatatgaaacatcttctcccaacactgctttaatggaagttctaggaaccaatttagctcaggcatttgactcctacagcagaagttctgagcctgaccacagatggtgtgtaatctatcaaacacacccctggccaagttgggtcctataggacctggtactatgtactattgtaacttctagttccctaagaggtacctgttttcagtaaaaaggggtcctgagttctgtgcaggtggaagagctacccgagaactacctgagttctgtgcaggtagagtcccatttcttatgggacctgtgtgctcctgagaactcttacttgagacatcaaaaagaagcagcaagagcttctgggacagagactgcttggccagctttgtaagtaagtggctgcctccaatgtgatgtgagtacatgttgggcagtctcactgtcctaaggtatgtcttctttccacctcccactgcccctcccctgccacctatcaatgatgccttggttcagtcattagaaatctgttgctttgagttctgaaatattttcaccttaaaaaaaatgctgaaaatacacattctcctgggaagacgataaacagctagctaagaagccgaggttcagtggtggcagcaggaaggacactgccacaaattttgtctatttcatatttgtcccctagagccagccctagcaaatgtgtgagttgggagtagttaatagtaaataagactctgactttacacaagctacacattttatacttttcataaaccacaaagtctctctagaattttttctgccttcactaaaattggactgtagccaagatataaagcaagtcatttggaacctgccgagtgagcactgaagctactttatcatgagatgtgtgttaagaaggctgcagcccacaggagtccagggaaggcggggaccacagaggcacagagtccagcacttggccgctcatgggccttctttctgcctcagaggacgggggcagagaagtgatgaagggaaatgttcttagaggaggaaatatcctttgtcctgttcagagagaccagggccctaccattaggcatactttcagaagcaacctggagaacagctatcaatcatattcaaaaccagtacaagaactgctgcctggtaccctgtgagtcatttctatgaaattccatataaagaatgatgataagtttacacactgtgcaatctcacaatctgaaaataaagttgagttggctgtgttttctctgctcttgtcagaacattgggacaattggtcgttcaaaaacattcatcctcttactgcaagtttatctgggtacttttacctgtgtgttcaaaggcatttcttttcagcagtgatcattataacttcacaaaaaaagatgctgacggatttacttacagggccttaatgttattttgtcccagccaacaccctctaggtcctaaaagtcaaggtacttcagtttatttggcaaacatgacaacattttttttggccctgggcccaacagtttgtacttcatgaaacatattgtacattttacatagtttaatttaaaaaataccttttaagctagttgatctttgactgtcttatttattataacctttcagcacattccaaggttttagttactcaggaaggagttaattaaaatgattttattttggtctgatggatgttttttaaaaggaaaattattattatgaaccttcagcctactttcttgagtgccgtaaaagtgcttgtaaatctttttttttttttaagaagaaagaaaaaaatggtgtttgacgttgatggaaattcaaaaatatatatggaactgaaacattaacttagctaaaataaaagcaatctgtgtttgaga

SEQ ID NO: 16252 - protein, 406 aa, Homo sapiens; identical to SEQ ID NO: 1878

SEQ ID NO: 16253 - DNA, 2079 bp, Homo sapiens
gcgccacgctccatggaggcgccaaggagaaggcctgggaagggaagagtgaaccttccctggtggagggcccactcctcaggcagtggggagaccgccttttgcatgcgacaggacttaccagttactattggcaccggaaccaccatctgagatacaggagaagacagaaatggaagcaaaggaagatggaaaaatagaaaacagagacccccaagaggttgaacagcttgccgagaatcatgaccagttgggaggccagttctgacaccagaggtcctgacggccaggccagcactgttttctgtagacatggtatcttctaaaaggcatttatcattttttttcctttcagaattaaatgaagactaaactcctgtacacgtgtttgttggtagaggccatcacagaatatggccaccatactgtgatctgccaacccaattaagatactggccatggcttctaatttgtgttttacactgttcagacataaatatttaaaatttgttgcattgcaatctgtttggttgtaaagatttgacctatgaagcaagaagtgttcatgaatgaggtttaaggatgtcaggggtgactcagaaggaaacgcgctagaacagcaaggatcagggaagcagcgcttttctctttgcaagtcataaaatacaatgcctgaaagagctaataagccttgttatctaatcatgtctaataatatgcatgtggccttctggaattaagaggcagggcacacaccctggataatccagtaacaagccattttataaatgtggttgaaaacacagtcctagctgcccagcacctggccctggattactgtggaaaatttgcaggagtcctgttaccatcccaggaactctggttatcaggaaggcccaggaaacttcagggaacacttgcttttaaagataaggcagcagctccttttctctgcttaataacttgctttactgaatctcattctttgcacttaacttgcacaggacctgctgcatagcagggaagtccttggatggctgaaatcttcttccagccaggtgggttgtcaggcaccctggaccagagcagcagctcctccagacccagctcccttggtgcctggcctgcaggagccactgggtcagcactaactagcagatgttgcctgctgccctgggtcctttggtgctctcgtgtggacctgcaaggaactgtcaaccccatgttaagatgacagaagtgcccgtcagagggctgacaagggaggcccggaggttcccaggctggtctccagcagatctgcctctggatccagtgatctgtcagctattagatagcagctgtgtatgcagacttgagccagcacagggagagcaaaacactgagggccatcagcaaaggagtgaggcacagtgacaatcaacctatgctaatgaaagactggggaagagaacactcagaacctgaagctagtaatttaacaaatagggaatctaaaaacctgaatttgaagatttgcattgttatcagaagaccacagctgctggaaacaaaaaccagaattttaaatacctccccagcatcaaacacgtgaggcttagaaaatcaaatggtttacagtcacgcattgcttaatgtcaggggtacattctgagaaatgcatcattaggtgatttcgtggttgtgcaagcatcatagagtacatacacaaacctcgatggcacggcctactgcgtaactatgctgtagagtacagcctgttgcttctgggctacaaacctggacagcatgtgactatactgaatactggaggcaactgtgacacaataataatcatttgtgtatctaaacatagaaaagatatggtaaaaataccatattataatcttatggattaatgtatatatgaggtctgtcattgaccaaaatgtcgtgatgtggcacacgattgtattaaaaagacagacagaggctggtactttggatcctagaaaatactcattactctagcactaaattatttctagagttctgtgcaggttcaaattgtacaaaaatgtgcaataaaatatttatgct

SEQ ID NO: 16254 - protein, 46 aa, Homo sapiens
MEAPRRRPGKGRVNLPWWRAHSSGSGETAFCMRQDLPVTIGTGTTI

SEQ ID NO: 16255 - DNA, 624 bp, Homo sapiens
ctggagaggggaacaaaatcacatgatccgcacccccagcatgaggcaggaggagcgctacctggatatcaatgagtgtattcttgaaaactatcccgagtgctccaaccccaggttattttacatcattccgtacttttgtggacagcatcccagatgcagggagcctggtgaatggggcgtgctcagtatctacaaagacccagagcacaggaagcttggaaacatgactgtgacggtgaagaagactgtcccctctcctgaggctgtgcagatcctctaccagcggatgagatacgagtacgagttttaccactacgtcaaagagcagttccacctgctgaagcgcaagtttggacttaagtctcacgtcagcaagccccccctgaggccacacttctttatcccaactccactggaaaccgaggagccaatcgacgatgaagaacaggatgatgaaaagtggctggaagatatttataagaggtgatgtgactgtgttgcctctatggctttatctcccttttccagaaagttctttgtttggggaagtaaaatccttaagggactaaattaatgcttgggtgcattaaaaagaacaaaacattcccacatgttggggtc

SEQ ID NO: 16256 - protein, 155 aa, Homo sapiens
MIRTPSMRQEERYLDINECILENYPECSNPRLFYIIPYFCGQHPRCREPGEWGVLSIYKDPEHRKLGNMTVTVKKTVPSPEAVQILYQRMRYEYEFYHYVKEQFHLLKRKFGLKSHVSKPPLRPHFFIPTPLETEEPIDDEEQDDEKWLEDIYKR

SEQ ID NO: 16257 - DNA, 3532 bp, Homo sapiens
cttggcgagagaaactggttccgggtgacccagatcctaatgaacatttcctcaaattattttctgattttgctttgctcagttgtctttagtgctaggttttgggacccagagcgttaacagtctttcctaaggagtcctgactagcactgtagtgcttaagaagaacaaaggtgttgggggggtgtctgttagagggcggcagagccccttctcatccctcagcccattcagttcccatgaccactctgggagggggaggtgttttcagatgaggaccctgagattctaaaggttgtgggatttgccacagtcacctctcaggtaagggcgcaactgcgaccgactgtttcgggtttcctgccttcacagtctgggttctttccaccacagcgcgatagaaccctgtcattgcaccagtaattgtttgctttctctggacttgttttgggaccctcagctccataagggatgttagtctcgagcccagtaattatttccgcagcacagaggttggtaacaaaaacggagggcggagttgcgcgtctttctttcagcactagaacgaaaggtacatttcccatccctgtgttgagaaacatgtactgaggagctgacagcctggtgcccaggaggctgaaatcctggtctctgtgtctgagagagcccttggggttcacccggacccatcctgggctgttgtcgggcacaagcaggaaagtaggaagtgttgaggatcagtcagaggtgttgttcccaaagctggaagatcgcccagagctgaggccactgctgatgtgccgtcagcagcagccttgccgctggagaaaagcaccgaatctcagggccacggccaggacggctgcttcctcatctcattttaaaaacataatggaagtggatgttcagaggctgggagcatttggggatgatgtcccctcagtgtcacgttcatgttttcaaatccatgattagagtagagaaaactgagatacagagaagttagtgtctcagccagggccagacgactacaccagacccacggctttccactcaccttcggtatttgatcaactacctaaggcttcagtgaaatattttgatgattttatttttatttttattttcttcctttgatgatatattttaaaagtggcttttccctttttttttttttttttttttagtttttatggcgaaaccctaatctatttctttataggttatgaggctggtctcgaactcctgacctaaaatgatccacccacctcagcctcccaaagtgctgagattacaggtgtgagccaccgtgcccagcctggtttggagtttttttaaaaaggtcataaaatattgaaagttggtagttggggcaagtgttatatttttgaagagctggtaactgcctttgttatgtgacttgagagattgtagagagatttccctgcctggaattctgcccttagaaatttgtaggggctcctttccaaatgtaagcactgtgttcgggaagggtctatgtcagatgaggtcatcagatcgatccttggcaaggccccagcaggaaagcactgggctccccaaagcagcacagcagaaactcgggggggctcagattcaagagaggagagcctggtggtgggggggaggggtgtccccttcatgatctggttccagcctgacctggttagaaggctgtcttcttgttcaaaggatagtttgtttatttggaagaagatggtctattgcctttttttaatagctgaaacttttaattccatctccttggtcccattagacccttgaaataaaattgccccctttcagaagagtctgtcctcattttggcaaaggctgggtagtcagttgtttgactcaaaagagggtgttgtttgtgtctcagcggggcgcaggcagctgtgaggagcccactgtcccctccttgccggccacccctcccctcggaggcccttccctgcacaccgcatgcccacagggtcttggttgctggcctgaaatgagtctgctgatttaccacgtcattccagatctcagtgctctaaagccccttgctttatcccattgccaaaattcgggcagttctgcccctggccctgagcctcacagagctgcttagcatacagctgggagtggccagtgcctgcctccaagcctgctctgaggatgaaataatatcatcttgtgaggcagggtggtttggaagaaaatggaaagggtaaaggaatcctaggatttgcaggaaccccaaagaggatgaggactctctcattttacaggtgtgggaacgggcctgggattcggggtggggtaaagtccctgccaggaggagaatccagacctcctgattccacttcggtgctgtttgcccactcagaccttatgttcctgaagggtaaagggagaagaggactgggccgagtcccacgcttttgaagcagaatcatttgatgtaacatcgtctctccatctttacaaagacatcgctgttacagcaatttgttttcaaatattcaagcatcttatagctataccttattttctgggaacaactagcttttctcaaactttctatttctttccaaactcttcttcctttgcatttcctggaaaatcatttttaaataaattagtgctcgcatagatgcaagttcaacttctagcagccatactgtgaaaaggcagttgtcttaggctcatttctttttgtccagagctggaagctccccagtgtggaggtggctgcctcctttttgggggtgggagtcctctgaacccaggcacacttggacacatcccagcacctgagactctaatccagctcatgtccagcctcctttatttccagggtagggaaatacctggcacacagaccatatttaatgaatggtggaaagctttttctaatgaagagcaactgttgtcatctccagatgagggagagcatcttattcctgctgaagccactcccttttccagtcttggagcttccatgaaagtggatttcttatgctgtcattttcaccctgctggttacacatcaagttctcaaaaatgtcaaattgggctgctgccctaaccattattgccacttcactaggccatcctccatttgaagaataggaagaaaagggagaaaatcttcccagagagaacactgcctctgtgacactgtttattcggcttggctgtaaaatgtggaaagtaatgcatgtttaaaagaaaagatgtgtaatttacagcttcttaattcataaagaattcagtgaatcatgttggccctgttggattctggagaagtctgaaaattggccagagtcagcaaaggtttttagaaagctatgcattttaatctacttgaaagttttggactctgaatgtcctttaactttgaaagtatacatatgaaataccagcatgtggaaatttccactctgtcccaaccagctgagactgtcctttgagcaaaagaaacctcaggcattgcctctatttctaaggcattgtttttctt

SEQ ID NO: 16258 - protein, 95 aa, Homo sapiens [sequence omitted]

SEQ ID NO: 16259 - DNA, 688 bp, Homo sapiens
gtggggctggaagaacttgatctggagggatgatcccgaaggctcccagtgaagaaggccaggaagagcagaggatggtgccaggaggatgatgtcgggggacacaggcagctcatgcctggatcaggcagtgactggtgtgtgtgtgtgtgttatgaagagagagggatggaaattgtgaccagagagttggagttgggacccctgtcttgatcacttgagcatcagcagctccagggaagaacacattctgaaggaggaactctccagctaggatttcatcctgtcctagaggacacgaagaggtggagaccacccccacaactaaacttgaggattactaaggcaatggggactgcctaggaatatttttgagggggtaaaagcaccccataattgtgctaagtaacaaaagacagaacaagcagccttaaaacattctacatgatacactggtattagaataataagatcttaaagaccatccacttgaaaactggatttgcccctggtcatatgggcagacccatggcagacaaagaactagaagttcctcctaactcccaactcaatgtcctttccttaaagaataactgttctttattataaataggccaagcttttattatttagtatagaactcaggctgatatttttattgatggattaaaatttgaattatttctgt

SEQ ID NO: 16260 - protein, 32 aa, Homo sapiens
MPGSGSDWCVCVCYEERGMEIVTRELELGPLS

SEQ ID NO: 16261 - DNA, 497 bp, Homo sapiens
tgtgaggcgccctctgagctaccaacaaggaagcgagagtaactgaatggagtacagaaggaacagaaagcaggttttgagcacaggaagcttggaaacatgactgtgacggtgaagaagactgtcccctctcctgaggctgtgcagatcctctaccagcggatgagatacgagtacgagttttaccactacgtcaaagagcagttccacctgctgaagcgcaagtttggacttaagtctcacgtcagcaagccccccctgaggccacacttctttatcccaactccactggaaaccgaggagccaatcgacgatgaagaacaggatgatgaaaagtggctggaagatatttataagaggtgatgtgactgtgttgcctctatggctttatctcccttttccagaaagttctttgtttggggaagtaaaatccttaagggactaaattaatgcttgggtgcattaaaaagaacaaaacattcccacatgttggggtc

SEQ ID NO: 16262 - protein, 87 aa, Homo sapiens [sequence omitted]

SEQ ID NO: 16263 - DNA, 725 bp, Homo sapiens
ggcctagcctcccagcctacatctttctcctgtgctggatgctccttgccctcgaacatcgaactccaagttcttcagttctgggactctgactggctctccctgtcagcttgcagacagcctattgtgggaccttgtgatcatatccttccagaggagataccctggtctctgaagtggttttgtatttccactgaaatatacaagtctggatgtctcctaccattgagccacttttcatcatcctgttcttcatcgtcgattggctcctcggtttccagtggagttgggataaagaagtgtggcctcagggggggcttgctgacgtgagacttaagtccaaacttgcgcttcagcaggtggaactgctctttgacgtagtggtaaaactcgtactcgtatctcatccgctggtagaggatctgcacagcctcaggagaggggacagtcttcttcaccgtcacagtcatgtttccaagcttcctgtgctctggaagagaaccggggtcgcacatgagccatcatttgcagtagcttagaagggatcccggcgaggacccacattacctgtacaactctggtagcacctaaggaagcaactgcatatccaagtattagaagagaagaagggttcctgacaatatttggaaacacttaccaactctaggtgttaatgtcaacatgagttgacgaagcacaagctatcaaatttcctttcatcagat

SEQ ID NO: 16264 - protein, 108 aa, Homo sapiens [sequence omitted]

SEQ ID NO: 16265 - DNA, 787 bp, Homo sapiens
atgtacttgattttctgcaggaaacgctgcttttggagccaacaactatggatgtgttgtccagaggaaacctgtggatcaagcaaggatgcctacaaaaagactaatttcccagtaatccaacttattccaaacactccacccacaaggcagcaagtgagggaaaaaatagaattctgcttgaagatgcttttcagtcaactctctctagctcataaatcagcgcttctccaagagtgttatgaaccctgcaccctccttgtcagtgctgatttctgcacccatctcccagttaccatctggaatagaatccaatagtgatccaccaatggacaatttttgctatgaaggaggaaagagaggacagatttgattacaacaaaagcatcccaagaatgtgtcctgcatgagctcttcaggctgtgaaatcttgaacttctacacccatccttggctggctttttccatgtgaggccatatagagttgctgcaggtgataagcatcctgatggaactgagcttcactaacaggaggacaacactgattgcagtatcagggatgatatagtttgagccggattatagagctcatcaactgatccacatcttaaatgctccatctttggcataaggtgtttgtaaataatatgcagggcatttataaatatgatgggatacttaataccaaaattaactataagtgaattgctgggatagaataaaatacagaaaacgaatacataagatcaatatgttaccataaaattaaaatatttaatagcttcaa

SEQ ID NO: 16266 - protein, 105 aa, Homo sapiens
MYLIFCRKRCFWSQQLWMCCPEETCGSSKDAYKKTNFPVIQLIPNTPPTRQQVREKIEFCLKMLFSQLSLAHKSALLQECYEPCTLLVSADFCTHLPVTIWNRIQ

SEQ ID NO: 16267 - DNA, 8192 bp, Homo sapiens; identical to SEQ ID NO: 1879

SEQ ID NO: 16268 - protein, 2231 aa, Homo sapiens; identical to SEQ ID NO: 1880

SEQ ID NO: 16269 - DNA, 8065 bp, Homo sapiens
cggccgccgccggcacccacagcgccaagagcggcggctccgaggcggctctcaaggagggtggaagcgccgccgcgctgtcctcctcctcctcctcctccgcggcggcagcggcggcatcctcttcctcctcgtcgggcccgggctcggccatggagacggggctgctccccaaccacaaactgaaaaccgttggcgaagcccccgccgcgccgccccaccagcagcaccaccaccaccaccatgcccaccaccaccaccaccatgcccaccacctccaccaccaccacgcactacagcagcagctaaaccagttccagcagcagcagcagcagcagcaacagcagcagcagcagcagcagcaacagcaacatcccatttccaacaacaacagcttgggcggcgcgggcggcggcgcgcctcagcccggccccgacatggagcagccgcaacatggaggcgccaaggacagtgctgcgggcggccaggccgaccccccgggcccgccgctgctgagcaagccgggcgacgaggacgacgcgccgcccaagatgggggagccggcgggcggccgctacgagcacccgggcttgggcgccctgggcacgcagcagccgccggtcgccgtgcccgggggcggcggcggcccggcggccgtcccggagtttaataattactatggcagcgctgcccctgcgagcggcggccccggcggccgcgctgggccttgctttgatcaacatggcggacaacaaagccccgggatggggatgatgcactccgcctccgccgccgccgccggggcccccggcagcatggaccccctgcagaactcccacgaagggtaccccaacagccagtgcaaccattatccgggctacagccggcccggcgcgggcggcggcggcggcggcggcggcggaggaggaggaggcagcggaggaggaggaggaggaggaggagcaggagcaggaggagcaggagcgggagctgtggcggcggcggccgcggcggcggcggcagcagcaggaggcggcggcggcggcggctatgggggctcgtccgcggggtacggggtgctgagctccccccggcagcagggcggcggcatgatgatgggccccgggggcggcggggccgcgagcctcagcaaggcggccgccggctcggcggcggggggcttccagcgcttcgccggccagaaccagcacccgtcgggggccaccccgaccctcaatcagctgctcacctcgcccagccccatgatgcggagctacggcggcagctaccccgagtacagcagccccagcgcgccgccgccgccgccgtcgcagccccagtcccaggcggcggcggcgggggcggcggcgggcggccagcaggcggccgcgggcatgggcttgggcaaggacatgggcgcccagtacgccgctgccagcccggcctgggcggccgcgcaacaaaggagtcacccggcgatgagccccggcacccccggaccgaccatgggcagatcccagggcagcccaatggatccaatggtgatgaagagacctcagttgtatggcatgggcagtaaccctcattctcagcctcagcagagcagtccgtacccaggaggttcctatggccctccaggcccacagcggtatccaattggcatccagggtcggactcccggggccatggccggaatgcagtaccctcagcagcagatgccacctcagtatggacagcaaggtgtgagtggttactgccagcagggccaacagccatattacagccagcagccgcagcccccgcacctcccaccccaggcgcagtatctgccgtcccagtcccagcagaggtaccagccgcagcaggacatgtctcaggaaggctatggaactagatctcaacctcctctggcccccggaaaacctaaccatgaagacttgaacttaatacagcaagaaagaccatcaagtttaccagatctgtctggctccattgatgacctccccacgggaacggaagcaactttgagctcagcagtcagtgcatccgggtccacgagcagccaaggggatcagagcaacccggcgcagtcgcctttctccccacatgcgtcccctcatctctccagcatcccggggggcccatctccctctcctgttggctctcctgtaggaagcaaccagtctcgatctggcccaatctctcctgcaagtatcccaggtagtcagatgcctccgcagccacccgggagccagtcagaatccagttcccatcccgccttgagccagtcaccaatgccacaggaaagaggttttatggcaggcacacaaagaaaccctcagatggctcagtatggacctcaacagacaggaccatccatgtcgcctcatccttctcctgggggccagatgcatgctggaatcagtagctttcagcagagtaactcaagtgggacttacggtccacagatgagccagtatggaccacaaggtaactactccagacccccagcgtatagtggggtgcccagtgcaagctacagcggcccagggcccggtatgggtatcagtgccaacaaccagatgcatggacaagggccaagccagccatgtggtgctgtgcccctgggacgaatgccatcagctgggatgcagaacagaccatttcctggaaatatgagcagcatgacccccagttctcctggcatgtctcagcagggagggccaggaatggggccgccaatgccaactgtgaaccgtaaggcacaggaggcagccgcagcagtgatgcaggctgctgcgaactcagcacaaagcaggcaaggcagtttccccggcatgaaccagagtggacttatggcttccagctctccctacagccagcccatgaacaacagctctagcctgatgaacacgcaggcgccgccctacagcatggcgcccgccatggtgaacagctcggcagcatctgtgggtcttgcagatatgatgtctcctggtgaatccaaactgcccctgcctctcaaagcagacggcaaagaagaaggcactccacagcccgagagcaagtcaaagaagtccagctcctccaccactactggggagaagatcacgaaggtgtacgagctggggaatgagccagagagaaagctctgggtcgaccgatacctcaccttcatggaagagagaggctctcctgtctcaagtctgcctgccgtgggcaagaagcccctggacctgttccgactctacgtctgcgtcaaagagatcgggggtttggcccaggttaataaaaacaagaagtggcgtgagctggcaaccaacctaaacgttggcacctcaagcagtgcagcgagctccctgaaaaagcagtatattcagtacctgtttgcctttgagtgcaagatcgaacgtggggaggagcccccgccggaagtcttcagcaccggggacaccaaaaagcagcccaagctccagccgccatctcctgctaactcgggatccttgcaaggcccacagaccccccagtcaactggcagcaattccatggcagaggttccaggtgacctgaagccacctaccccagcctccacccctcacggccagatgactccaatgcaaggtggaagaagcagtacaatcagtgtgcacgacccattctcagatgtgagtgattcatccttcccgaaacggaactccatgactccaaacgccccctaccagcagggcatgagcatgcccgatgtgatgggcaggatgccctatgagcccaacaaggacccctttgggggaatgagaaaagtgcctggaagcagcgagccctttatgacgcaaggacagatgcccaacagcagcatgcaggacatgtacaaccaaagtccctccggagcaatgtctaacctgggcatggggcagcgccagcagtttccctatggagccagttacgaccgaaggcatgaaccttatgggcagcagtatccaggccaaggccctccctcgggacagccgccgtatggagggcaccagcccggcctgtacccacagcagccgaattacaaacgccatatggacggcatgtacgggcccccagccaagcgccacgagggcgacatgtacaacatgcagtacagcagccagcagcaggagatgtacaaccagtatggaggctcctactcgggcccggaccgcaggcccatccagggccagtacccgtatccctacagcagggagaggatgcagggcccggggcagatccagacacacggaatcccgcctcagatgatgggcggcccgctgcagtcgtcctccagtgaggggcctcagcagaatatgtgggcagcacgcaatgatatgccttatccctaccagaacaggcagggccctggcggccctacacaggcgcccccttacccaggcatgaaccgcacagacgatatgatggtacccgatcagaggataaatcatgagagccagtggccttctcacgtcagccagcgtcagccttatatgtcgtcctcagcctccatgcagcccatcacacgcccaccacagccgtcctaccagacgccaccgtcactgccaaatcacatctccagggcgcccagcccagcgtccttccagcgctccctggagaaccgcatgtctccaagcaagtctccttttctgccgtctatgaagatgcagaaggtcatgcccacggtccccacatcccaggtcaccgggccaccaccccaaccacccccaatcagaagggagatcacctttcctcctggctcagtagaagcatcacaaccagtcttgaaacaaaggcgaaagattacctccaaagatatcgttactcctgaggcgtggcgtgtgatgatgtcccttaaatcaggtcttttggctgagagtacgtgggctttggacactattaatattcttctgtatgatgacagcactgttgctactttcaatctctcccagttgtctggatttctcgaacttttagtcgagtactttagaaaatgcctgattgacatttttggaattcttatggaatatgaagtgggagaccccagccaaaaagcacttgatcacaacgcagcaaggaaggatgacagccagtccttggcagacgattctgggaaagaggaggaagatgctgaatgtattgatgacgacgaggaagacgaggaggatgaggaggaagacagcgagaagacagaaagcgatgaaaagagcagcatcgctctgactgccccggacgccgctgcagacccaaaggagaagcccaagcaagccagtaagttcgacaagctgccaataaagatagtcaaaaagaacaacctgtttgttgttgaccgatctgacaagttggggcgtgtgcaggagttcaatagtggccttctgcactggcagctcggcgggggtgacaccaccgagcacattcagactcactttgagagcaagatggaaattcctcctcgcaggcgcccacctccccccttaagctccgcaggtagaaagaaagagcaagaaggcaaaggcgactctgaagagcagcaagagaaaagcatcatagcaaccatcgatgacgtcctctctgctcggccaggggcattgcctgaagacgcaaaccctgggccccagaccgaaagcagtaagtttccctttggtatccagcaagccaaaagtcaccggaacatcaagctgctggaggacgagcccaggagccgagacgagactcctctgtgtaccatcgcgcactggcaggactcgctggctaagcgatgcatctgtgtgtccaatattgtccgtagcttgtcattcgtgcctggcaatgatgccgaaatgtccaaacatccaggcctggtgctgatcctggggaagctgattcttcttcaccacgagcatccagagagaaagcgagcaccgcagacctatgagaaagaggaggatgaggacaagggggtggcctgcagcaaagatgagtggtggtgggactgcctcgaggtcttgagggataacacgttggtcacgttggccaacatttccgggcagctagacttgtctgcttacacggaaagcatctgcttgccaattttggatggcttgctgcactggatggtgtgcccgtctgcagaggcacaagatccctttccaactgtgggacccaactcggtcctgtcgcctcagagacttgtgctggagaccctctgtaaactcagtatccaggacaataatgtggacctgatcttggccactcctccatttagtcgtcaggagaaattctatgctacattagttaggtacgttggggatcgcaaaaacccagtctgtcgagaaatgtccatggcgcttttatcgaaccttgcccaaggggacgcactagcagcaagggccatagctgtgcagaaaggaagcattggaaacttgataagcttcctagaggatggggtcacgatggcccagtaccagcagagccagcacaacctcatgcacatgcagcccccgcccctggaaccacctagcgtagacatgatgtgcagggcggccaaggctttgctagccatggccagagtggacgaaaaccgctcggaattccttttgcacgagggccggttgctggatatctcgatatcagctgtcctgaactctctggttgcatctgtcatctgtgatgtactgtttcagattgggcagttatgacataagtgagaaggcaagcatgtgtgagtgaagattagagggtcacatataactggctgttttctgttcttgtttatccagcgtaggaagaaggaaaagaaaatctttgctcctctgccccattcactatttaccaattgggaattaaagaaataattaatttgaacagttatgaaattaatatttgctgtctgtgtgtataagtacatcctttggggttttttttttctcttttttttaaccaaagttgctgtctagtgcattcaaaggtcactttttgttcttcacagatctttttaatgttctttcccatgttgtattgcatttttgggggaagcaaattgactttaaagaaaaaagttgtggcaaaagatgctaagatgcgaaaatttcaccacactgagtcaaaaaggtgaaaaattatccatttcctatgcgttttactcctcagagaatgaaaaaaactgcatcccatcacccaaagttctgtgcaatagaaatttctacagatacaggtataggggctcaaggaggtatgtcggtcagtagtcaaaactatgaaatgatactggtttctccacaggaatatggttccattaggctgggagcaaaaacaatgttttttaagattgagaatacatacctgacaacgatccggaaactgctcctcaccactcccgtcatgcctgctgtcggcgtttgaccttccacgtgacagttcttcacaattcctttcatcattttttaaatattttttttactgcctatgggctgtgatgtatatagaagttgtacattaaacataccctcatttttttcttttcttttttttttttttttttagtacaaagttttagtttctttttcatgatgtggtaactacgaagtgatggtagatttaaataattttttatttttattttatatattttttcattagggccatatctccaaaaaaagaaagaaaaaatacaaaaaacaaaaacaaaaaaaaaagagggtaatgtacaagtttctgtatgtataaagtcatgctcgatttcaggagagcagctgatcacaatttgcttcatgaatcaaggtgtggaaatggttatatatggattgatttagaaaatggttaccagtacagtcaaaaaagagaaaatgaaaaaaatacaactaaaaggaagaaacacaacttcaaagatttttcagtgatgagaatccacatttgtatttcaagataatgtagtttaaaaaaaaaaaaaagaaaaaaacttgatgtaaattcctccttttcctctggcttaatgaatatcatttattcagtataaaatctttatatgttccacatgttaagaataaatgtacattaaatcttgttaagcactgtg

SEQ ID NO: 16270 - protein, 2178 aa, Homo sapiens; identical to SEQ ID NO: 1884

SEQ ID NO: 16271 - DNA, 8104 bp, Homo sapiens
cggccgccgccggcacccacagcgccaagagcggcggctccgaggcggctctcaaggagggtggaagcgccgccgcgctgtcctcctcctcctcctcctccgcggcggcagcggcggcatcctcttcctcctcgtcgggcccgggctcggccatggagacggggctgctccccaaccacaaactgaaaaccgttggcgaagcccccgccgcgccgccccaccagcagcaccaccaccaccaccatgcccaccaccaccaccaccatgcccaccacctccaccaccaccacgcactacagcagcagctaaaccagttccagcagcagcagcagcagcagcaacagcagcagcagcagcagcagcaacagcaacatcccatttccaacaacaacagcttgggcggcgcgggcggcggcgcgcctcagcccggccccgacatggagcagccgcaacatggaggcgccaaggacagtgctgcgggcggccaggccgaccccccgggcccgccgctgctgagcaagccgggcgacgaggacgacgcgccgcccaagatgggggagccggcgggcggccgctacgagcacccgggcttgggcgccctgggcacgcagcagccgccggtcgccgtgcccgggggcggcggcggcccggcggccgtcccggagtttaataattactatggcagcgctgcccctgcgagcggcggccccggcggccgcgctgggccttgctttgatcaacatggcggacaacaaagccccgggatggggatgatgcactccgcctccgccgccgccgccggggcccccggcagcatggaccccctgcagaactcccacgaagggtaccccaacagccagtgcaaccattatccgggctacagccggcccggcgcgggcggcggcggcggcggcggcggcggaggaggaggaggcagcggaggaggaggaggaggaggaggagcaggagcaggaggagcaggagcgggagctgtggcggcggcggccgcggcggcggcggcagcagcaggaggcggcggcggcggcggctatgggggctcgtccgcggggtacggggtgctgagctccccccggcagcagggcggcggcatgatgatgggccccgggggcggcggggccgcgagcctcagcaaggcggccgccggctcggcggcggggggcttccagcgcttcgccggccagaaccagcacccgtcgggggccaccccgaccctcaatcagctgctcacctcgcccagccccatgatgcggagctacggcggcagctaccccgagtacagcagccccagcgcgccgccgccgccgccgtcgcagccccagtcccaggcggcggcggcgggggcggcggcgggcggccagcaggcggccgcgggcatgggcttgggcaaggacatgggcgcccagtacgccgctgccagcccggcctgggcggccgcgcaacaaaggagtcacccggcgatgagccccggcacccccggaccgaccatgggcagatcccagggcagcccaatggatccaatggtgatgaagagacctcagttgtatggcatgggcagtaaccctcattctcagcctcagcagagcagtccgtacccaggaggttcctatggccctccaggcccacagcggtatccaattggcatccagggtcggactcccggggccatggccggaatgcagtaccctcagcagcaggactctggagatgccacatggaaagaaacattctggttgatgccacctcagtatggacagcaaggtgtgagtggttactgccagcagggccaacagccatattacagccagcagccgcagcccccgcacctcccaccccaggcgcagtatctgccgtcccagtcccagcagaggtaccagccgcagcaggacatgtctcaggaaggctatggaactagatctcaacctcctctggcccccggaaaacctaaccatgaagacttgaacttaatacagcaagaaagaccatcaagtttaccagatctgtctggctccattgatgacctccccacgggaacggaagcaactttgagctcagcagtcagtgcatccgggtccacgagcagccaaggggatcagagcaacccggcgcagtcgcctttctccccacatgcgtcccctcatctctccagcatcccggggggcccatctccctctcctgttggctctcctgtaggaagcaaccagtctcgatctggcccaatctctcctgcaagtatcccaggtagtcagatgcctccgcagccacccgggagccagtcagaatccagttcccatcccgccttgagccagtcaccaatgccacaggaaagaggttttatggcaggcacacaaagaaaccctcagatggctcagtatggacctcaacagacaggaccatccatgtcgcctcatccttctcctgggggccagatgcatgctggaatcagtagctttcagcagagtaactcaagtgggacttacggtccacagatgagccagtatggaccacaaggtaactactccagacccccagcgtatagtggggtgcccagtgcaagctacagcggcccagggcccggtatgggtatcagtgccaacaaccagatgcatggacaagggccaagccagccatgtggtgctgtgcccctgggacgaatgccatcagctgggatgcagaacagaccatttcctggaaatatgagcagcatgacccccagttctcctggcatgtctcagcagggagggccaggaatggggccgccaatgccaactgtgaaccgtaaggcacaggaggcagccgcagcagtgatgcaggctgctgcgaactcagcacaaagcaggcaaggcagtttccccggcatgaaccagagtggacttatggcttccagctctccctacagccagcccatgaacaacagctctagcctgatgaacacgcaggcgccgccctacagcatggcgcccgccatggtgaacagctcggcagcatctgtgggtcttgcagatatgatgtctcctggtgaatccaaactgcccctgcctctcaaagcagacggcaaagaagaaggcactccacagcccgagagcaagtcaaagaagtccagctcctccaccactactggggagaagatcacgaaggtgtacgagctggggaatgagccagagagaaagctctgggtcgaccgatacctcaccttcatggaagagagaggctctcctgtctcaagtctgcctgccgtgggcaagaagcccctggacctgttccgactctacgtctgcgtcaaagagatcgggggtttggcccaggttaataaaaacaagaagtggcgtgagctggcaaccaacctaaacgttggcacctcaagcagtgcagcgagctccctgaaaaagcagtatattcagtacctgtttgcctttgagtgcaagatcgaacgtggggaggagcccccgccggaagtcttcagcaccggggacaccaaaaagcagcccaagctccagccgccatctcctgctaactcgggatccttgcaaggcccacagaccccccagtcaactggcagcaattccatggcagaggttccaggtgacctgaagccacctaccccagcctccacccctcacggccagatgactccaatgcaaggtggaagaagcagtacaatcagtgtgcacgacccattctcagatgtgagtgattcatccttcccgaaacggaactccatgactccaaacgccccctaccagcagggcatgagcatgcccgatgtgatgggcaggatgccctatgagcccaacaaggacccctttgggggaatgagaaaagtgcctggaagcagcgagccctttatgacgcaaggacagatgcccaacagcagcatgcaggacatgtacaaccaaagtccctccggagcaatgtctaacctgggcatggggcagcgccagcagtttccctatggagccagttacgaccgaaggcatgaaccttatgggcagcagtatccaggccaaggccctccctcgggacagccgccgtatggagggcaccagcccggcctgtacccacagcagccgaattacaaacgccatatggacggcatgtacgggcccccagccaagcgccacgagggcgacatgtacaacatgcagtacagcagccagcagcaggagatgtacaaccagtatggaggctcctactcgggcccggaccgcaggcccatccagggccagtacccgtatccctacagcagggagaggatgcagggcccggggcagatccagacacacggaatcccgcctcagatgatgggcggcccgctgcagtcgtcctccagtgaggggcctcagcagaatatgtgggcagcacgcaatgatatgccttatccctaccagaacaggcagggccctggcggccctacacaggcgcccccttacccaggcatgaaccgcacagacgatatgatggtacccgatcagaggataaatcatgagagccagtggccttctcacgtcagccagcgtcagccttatatgtcgtcctcagcctccatgcagcccatcacacgcccaccacagccgtcctaccagacgccaccgtcactgccaaatcacatctccagggcgcccagcccagcgtccttccagcgctccctggagaaccgcatgtctccaagcaagtctccttttctgccgtctatgaagatgcagaaggtcatgcccacggtccccacatcccaggtcaccgggccaccaccccaaccacccccaatcagaagggagatcacctttcctcctggctcagtagaagcatcacaaccagtcttgaaacaaaggcgaaagattacctccaaagatatcgttactcctgaggcgtggcgtgtgatgatgtcccttaaatcaggtcttttggctgagagtacgtgggctttggacactattaatattcttctgtatgatgacagcactgttgctactttcaatctctcccagttgtctggatttctcgaacttttagtcgagtactttagaaaatgcctgattgacatttttggaattcttatggaatatgaagtgggagaccccagccaaaaagcacttgatcacaacgcagcaaggaaggatgacagccagtccttggcagacgattctgggaaagaggaggaagatgctgaatgtattgatgacgacgaggaagacgaggaggatgaggaggaagacagcgagaagacagaaagcgatgaaaagagcagcatcgctctgactgccccggacgccgctgcagacccaaaggagaagcccaagcaagccagtaagttcgacaagctgccaataaagatagtcaaaaagaacaacctgtttgttgttgaccgatctgacaagttggggcgtgtgcaggagttcaatagtggccttctgcactggcagctcggcgggggtgacaccaccgagcacattcagactcactttgagagcaagatggaaattcctcctcgcaggcgcccacctccccccttaagctccgcaggtagaaagaaagagcaagaaggcaaaggcgactctgaagagcagcaagagaaaagcatcatagcaaccatcgatgacgtcctctctgctcggccaggggcattgcctgaagacgcaaaccctgggccccagaccgaaagcagtaagtttccctttggtatccagcaagccaaaagtcaccggaacatcaagctgctggaggacgagcccaggagccgagacgagactcctctgtgtaccatcgcgcactggcaggactcgctggctaagcgatgcatctgtgtgtccaatattgtccgtagcttgtcattcgtgcctggcaatgatgccgaaatgtccaaacatccaggcctggtgctgatcctggggaagctgattcttcttcaccacgagcatccagagagaaagcgagcaccgcagacctatgagaaagaggaggatgaggacaagggggtggcctgcagcaaagatgagtggtggtgggactgcctcgaggtcttgagggataacacgttggtcacgttggccaacatttccgggcagctagacttgtctgcttacacggaaagcatctgcttgccaattttggatggcttgctgcactggatggtgtgcccgtctgcagaggcacaagatccctttccaactgtgggacccaactcggtcctgtcgcctcagagacttgtgctggagaccctctgtaaactcagtatccaggacaataatgtggacctgatcttggccactcctccatttagtcgtcaggagaaattctatgctacattagttaggtacgttggggatcgcaaaaacccagtctgtcgagaaatgtccatggcgcttttatcgaaccttgcccaaggggacgcactagcagcaagggccatagctgtgcagaaaggaagcattggaaacttgataagcttcctagaggatggggtcacgatggcccagtaccagcagagccagcacaacctcatgcacatgcagcccccgcccctggaaccacctagcgtagacatgatgtgcagggcggccaaggctttgctagccatggccagagtggacgaaaaccgctcggaattccttttgcacgagggccggttgctggatatctcgatatcagctgtcctgaactctctggttgcatctgtcatctgtgatgtactgtttcagattgggcagttatgacataagtgagaaggcaagcatgtgtgagtgaagattagagggtcacatataactggctgttttctgttcttgtttatccagcgtaggaagaaggaaaagaaaatctttgctcctctgccccattcactatttaccaattgggaattaaagaaataattaatttgaacagttatgaaattaatatttgctgtctgtgtgtataagtacatcctttggggttttttttttctcttttttttaaccaaagttgctgtctagtgcattcaaaggtcactttttgttcttcacagatctttttaatgttctttcccatgttgtattgcatttttgggggaagcaaattgactttaaagaaaaaagttgtggcaaaagatgctaagatgcgaaaatttcaccacactgagtcaaaaaggtgaaaaattatccatttcctatgcgttttactcctcagagaatgaaaaaaactgcatcccatcacccaaagttctgtgcaatagaaatttctacagatacaggtataggggctcaaggaggtatgtcggtcagtagtcaaaactatgaaatgatactggtttctccacaggaatatggttccattaggctgggagcaaaaacaatgttttttaagattgagaatacatacctgacaacgatccggaaactgctcctcaccactcccgtcatgcctgctgtcggcgtttgaccttccacgtgacagttcttcacaattcctttcatcattttttaaatattttttttactgcctatgggctgtgatgtatatagaagttgtacattaaacataccctcatttttttcttttcttttttttttttttttttagtacaaagttttagtttctttttcatgatgtggtaactacgaagtgatggtagatttaaataattttttatttttattttatatattttttcattagggccatatctccaaaaaaagaaagaaaaaatacaaaaaacaaaaacaaaaaaaaaagagggtaatgtacaagtttctgtatgtataaagtcatgctcgatttcaggagagcagctgatcacaatttgcttcatgaatcaaggtgtggaaatggttatatatggattgatttagaaaatggttaccagtacagtcaaaaaagagaaaatgaaaaaaatacaactaaaaggaagaaacacaacttcaaagatttttcagtgatgagaatccacatttgtatttcaagataatgtagtttaaaaaaaaaaaaaagaaaaaaacttgatgtaaattcctccttttcctctggcttaatgaatatcatttattcagtataaaatctttatatgttccacatgttaagaataaatgtacattaaatcttgttaagcactgtg

SEQ ID NO: 16272 - protein, 2191 aa, Homo sapiens; identical to SEQ ID NO: 1882

SEQ ID NO: 16273 - DNA, 8192 bp, Homo sapiens
gttggcgaagcccccgccgcgccgccccaccagcagcaccaccaccaccaccatgcccaccaccaccaccaccatgcccaccacctccaccaccaccacgcactacagcagcagctaaaccagttccagcagcagcagcagcagcagcaacagcagcagcagcagcagcagcaacagcaacatcccatttccaacaacaacagcttgggcggcgcgggcggcggcgcgcctcagcccggccccgacatggagcagccgcaacatggaggcgccaaggacagtgctgcgggcggccaggccgaccccccgggcccgccgctgctgagcaagccgggcgacgaggacgacgcgccgcccaagatgggggagccggcgggcggccgctacgagcacccgggcttgggcgccctgggcacgcagcagccgccggtcgccgtgcccgggggcggcggcggcccggcggccgtcccggagtttaataattactatggcagcgctgcccctgcgagcggcggccccggcggccgcgctgggccttgctttgatcaacatggcggacaacaaagccccgggatggggatgatgcactccgcctccgccgccgccgccggggcccccggcagcatggaccccctgcagaactcccacgaagggtaccccaacagccagtgcaaccattatccgggctacagccggcccggcgcgggcggcggcggcggcggcggcggcggaggaggaggaggcagcggaggaggaggaggaggaggaggagcaggagcaggaggagcaggagcgggagctgtggcggcggcggccgcggcggcggcggcagcagcaggaggcggcggcggcggcggctatgggggctcgtccgcggggtacggggtgctgagctccccccggcagcagggcggcggcatgatgatgggccccgggggcggcggggccgcgagcctcagcaaggcggccgccggctcggcggcggggggcttccagcgcttcgccggccagaaccagcacccgtcgggggccaccccgaccctcaatcagctgctcacctcgcccagccccatgatgcggagctacggcggcagctaccccgagtacagcagccccagcgcgccgccgccgccgccgtcgcagccccagtcccaggcggcggcggcgggggcggcggcgggcggccagcaggcggccgcgggcatgggcttgggcaaggacatgggcgcccagtacgccgctgccagcccggcctgggcggccgcgcaacaaaggagtcacccggcgatgagccccggcacccccggaccgaccatgggcagatcccagggcagcccaatggatccaatggtgatgaagagacctcagttgtatggcatgggcagtaaccctcattctcagcctcagcagagcagtccgtacccaggaggttcctatggccctccaggcccacagcggtatccaattggcatccagggtcggactcccggggccatggccggaatgcagtaccctcagcagcagatgccacctcagtatggacagcaaggtgtgagtggttactgccagcagggccaacagccatattacagccagcagccgcagcccccgcacctcccaccccaggcgcagtatctgccgtcccagtcccagcagaggtaccagccgcagcaggacatgtctcaggaaggctatggaactagatctcaacctcctctggcccccggaaaacctaaccatgaagacttgaacttaatacagcaagaaagaccatcaagtttaccagatctgtctggctccattgatgacctccccacgggaacggaagcaactttgagctcagcagtcagtgcatccgggtccacgagcagccaaggggatcagagcaacccggcgcagtcgcctttctccccacatgcgtcccctcatctctccagcatcccggggggcccatctccctctcctgttggctctcctgtaggaagcaaccagtctcgatctggcccaatctctcctgcaagtatcccaggtagtcagatgcctccgcagccacccgggagccagtcagaatccagttcccatcccgccttgagccagtcaccaatgccacaggaaagaggttttatggcaggcacacaaagaaaccctcagatggctcagtatggacctcaacagacaggaccatccatgtcgcctcatccttctcctgggggccagatgcatgctggaatcagtagctttcagcagagtaactcaagtgggacttacggtccacagatgagccagtatggaccacaaggtaactactccagacccccagcgtatagtggggtgcccagtgcaagctacagcggcccagggcccggtatgggtatcagtgccaacaaccagatgcatggacaagggccaagccagccatgtggtgctgtgcccctgggacgaatgccatcagctgggatgcagaacagaccatttcctggaaatatgagcagcatgacccccagttctcctggcatgtctcagcagggagggccaggaatggggccgccaatgccaactgtgaaccgtaaggcacaggaggcagccgcagcagtgatgcaggctgctgcgaactcagcacaaagcaggcaaggcagtttccccggcatgaaccagagtggacttatggcttccagctctccctacagccagcccatgaacaacagctctagcctgatgaacacgcaggcgccgccctacagcatggcgcccgccatggtgaacagctcggcagcatctgtgggtcttgcagatatgatgtctcctggtgaatccaaactgcccctgcctctcaaagcagacggcaaagaagaaggcactccacagcccgagagcaagtcaaagaagtccagctcctccaccactactggggagaagatcacgaaggtgtacgagctggggaatgagccagagagaaagctctgggtcgaccgatacctcaccttcatggaagagagaggctctcctgtctcaagtctgcctgccgtgggcaagaagcccctggacctgttccgactctacgtctgcgtcaaagagatcgggggtttggcccaggttaataaaaacaagaagtggcgtgagctggcaaccaacctaaacgttggcacctcaagcagtgcagcgagctccctgaaaaagcagtatattcagtacctgtttgcctttgagtgcaagatcgaacgtggggaggagcccccgccggaagtcttcagcaccggggacaccaaaaagcagcccaagctccagccgccatctcctgctaactcgggatccttgcaaggcccacagaccccccagtcaactggcagcaattccatggcagaggttccaggtgacctgaagccacctaccccagcctccacccctcacggccagatgactccaatgcaaggtggaagaagcagtacaatcagtgtgcacgacccattctcagatgtgagtgattcatccttcccgaaacggaactccatgactccaaacgccccctaccagcagggcatgagcatgcccgatgtgatgggcaggatgccctatgagcccaacaaggacccctttgggggaatgagaaaagtgcctggaagcagcgagccctttatgacgcaaggacagatgcccaacagcagcatgcaggacatgtacaaccaaagtccctccggagcaatgtctaacctgggcatggggcagcgccagcagtttccctatggagccagttacgaccgaaggcatgaaccttatgggcagcagtatccaggccaaggccctccctcgggacagccgccgtatggagggcaccagcccggcctgtacccacagcagccgaattacaaacgccatatggacggcatgtacgggcccccagccaagcgccacgagggcgacatgtacaacatgcagtacagcagccagcagcaggagatgtacaaccagtatggaggctcctactcgggcccggaccgcaggcccatccagggccagtacccgtatccctacagcagggagaggatgcagggcccggggcagatccagacacacggaatcccgcctcagatgatgggcggcccgctgcagtcgtcctccagtgaggggcctcagcagaatatgtgggcagcacgcaatgatatgccttatccctaccagaacaggcagggccctggcggccctacacaggcgcccccttacccaggcatgaaccgcacagacgatatgatggtacccgatcagaggataaatcatgagagccagtggccttctcacgtcagccagcgtcagccttatatgtcgtcctcagcctccatgcagcccatcacacgcccaccacagccgtcctaccagacgccaccgtcactgccaaatcacatctccagggcgcccagcccagcgtccttccagcgctccctggagaaccgcatgtctccaagcaagtctccttttctgccgtctatgaagatgcagaaggtcatgcccacggtccccacatcccaggtcaccgggccaccaccccaaccacccccaatcagaagggagatcacctttcctcctggctcagtagaagcatcacaaccagtcttgaaacaaaggcgaaagattacctccaaagatatcgttactcctgaggcgtggcgtgtgatgatgtcccttaaatcaggtcttttggctgagagtacgtgggctttggacactattaatattcttctgtatgatgacagcactgttgctactttcaatctctcccagttgtctggatttctcgaacttttagtcgagtactttagaaaatgcctgattgacatttttggaattcttatggaatatgaagtgggagaccccagccaaaaagcacttgatcacaacgcagcaaggaaggatgacagccagtccttggcagacgattctgggaaagaggaggaagatgctgaatgtattgatgacgacgaggaagacgaggaggatgaggaggaagacagcgagaagacagaaagcgatgaaaagagcagcatcgctctgactgccccggacgccgctgcagacccaaaggagaagcccaagcaagccagtaagttcgacaagctgccaataaagatagtcaaaaagaacaacctgtttgttgttgaccgatctgacaagttggggcgtgtgcaggagttcaatagtggccttctgcactggcagctcggcgggggtgacaccaccgagcacattcagactcactttgagagcaagatggaaattcctcctcgcaggcgcccacctccccccttaagctccgcaggtagaaagaaagagcaagaaggcaaaggcgactctgaagagcagcaagagaaaagcatcatagcaaccatcgatgacgtcctctctgctcggccaggggcattgcctgaagacgcaaaccctgggccccagaccgaaagcagtaagtttccctttggtatccagcaagccaaaagtcaccggaacatcaagctgctggaggacgagcccaggagccgagacgagactcctctgtgtaccatcgcgcactggcaggactcgctggctaagcgatgcatctgtgtgtccaatattgtccgtagcttgtcattcgtgcctggcaatgatgccgaaatgtccaaacatccaggcctggtgctgatcctggggaagctgattcttcttcaccacgagcatccagagagaaagcgagcaccgcagacctatgagaaagaggaggatgaggacaagggggtggcctgcagcaaagatgagtggtggtgggactgcctcgaggtcttgagggataacacgttggtcacgttggccaacatttccgggcagctagacttgtctgcttacacggaaagcatctgcttgccaattttggatggcttgctgcactggatggtgtgcccgtctgcagaggcacaagatccctttccaactgtgggacccaactcggtcctgtcgcctcagagacttgtgctggagaccctctgtaaactcagtatccaggacaataatgtggacctgatcttggccactcctccatttagtcgtcaggagaaattctatgctacattagttaggtacgttggggatcgcaaaaacccagtctgtcgagaaatgtccatggcgcttttatcgaaccttgcccaaggggacgcactagcagcaagggccatagctgtgcagaaaggaagcattggaaacttgataagcttcctagaggatggggtcacgatggcccagtaccagcagagccagcacaacctcatgcacatgcagcccccgcccctggaaccacctagcgtagacatgatgtgcagggcggccaaggctttgctagccatggccagagtggacgaaaaccgctcggaattccttttgcacgagggccggttgctggatatctcgatatcagctgtcctgaactctctggttgcatctgtcatctgtgatgtactgtttcagattgggcagttatgacataagtgagaaggcaagcatgtgtgagtgaagattagagggtcacatataactggctgttttctgttcttgtttatccagcgtaggaagaaggaaaagaaaatctttgctcctctgccccattcactatttaccaattgggaattaaagaaataattaatttgaacagttatgaaattaatatttgctgtctgtgtgtataagtacatcctttggggttttttttttctcttttttttaaccaaagttgctgtctagtgcattcaaaggtcactttttgttcttcacagatctttttaatgttctttcccatgttgtattgcatttttgggggaagcaaattgactttaaagaaaaaagttgtggcaaaagatgctaagatgcgaaaatttcaccacactgagtcaaaaaggtgaaaaattatccatttcctatgcgttttactcctcagagaatgaaaaaaactgcatcccatcacccaaagttctgtgcaatagaaatttctacagatacaggtataggggctcaaggaggtatgtcggtcagtagtcaaaactatgaaatgatactggtttctccacaggaatatggttccattaggctgggagcaaaaacaatgttttttaagattgagaatacatacctgacaacgatccggaaactgctcctcaccactcccgtcatgcctgctgtcggcgtttgaccttccacgtgacagttcttcacaattcctttcatcattttttaaatattttttttactgcctatgggctgtgatgtatatagaagttgtacattaaacataccctcatttttttcttttcttttttttttttttttttagtacaaagttttagtttctttttcatgatgtggtaactacgaagtgatggtagatttaaataattttttatttttattttatatattttttcattagggccatatctccaaaaaaagaaagaaaaaatacaaaaaacaaaaacaaaaaaaaaagagggtaatgtacaagtttctgtatgtataaagtcatgctcgatttcaggagagcagctgatcacaatttgcttcatgaatcaaggtgtggaaatggttatatatggattgatttagaaaatggttaccagtacagtcaaaaaagagaaaatgaaaaaaatacaactaaaaggaagaaacacaacttcaaagatttttcagtgatgagaatccacatttgtatttcaagataatgtagtttaaaaaaaaaaaaaagaaaaaaacttgatgtaaattcctccttttcctctggcttaatgaatatcatttattcagtataaaatctttatatgttccacatgttaagaataaatgtacattaaatcttgttaagcactgtgatgggtgttcttgaatactgttctagtttccttaaagtggtttcctagtaatcaagttatttacaagaaataggggaatgcagcagtgtattcacattataaaaccctacatttggaagagacctttaggggttacctactttagagtggggagcaacagtttgattttctcaaattacttagctaattagtctttctttgaagcaattaactctaacgacattgaggtatgatcattttcagtatttatgggaggtggctgctgacccacttgaggtgagatctcagaagcttaactggcctgaaaatgtaacattc

SEQ ID NO: 16274 - protein, 2083 aa, Homo sapiens
MEQPQHGGAKDSAAGGQADPPGPPLLSKPGDEDDAPPKMGEPAGGRYEHPGLGALGTQQPPVAVPGGGGGPAAVPEFNNYYGSAAPASGGPGGRAGPCFDQHGGQQSPGMGMMHSASAAAAGAPGSMDPLQNSHEGYPNSQCNHYPGYSRPGAGGGGGGGGGGGGGSGGGGGGGGAGAGGAGAGAVAAAAAAAAAAAGGGGGGGYGGSSAGYGVLSSPRQQGGGMMMGPGGGGAASLSKAAAGSAAGGFQRFAGQNQHPSGATPTLNQLLTSPSPMMRSYGGSYPEYSSPSAPPPPPSQPQSQAAAAGAAAGGQQAAAGMGLGKDMGAQYAAASPAWAAAQQRSHPAMSPGTPGPTMGRSQGSPMDPMVMKRPQLYGMGSNPHSQPQQSSPYPGGSYGPPGPQRYPIGIQGRTPGAMAGMQYPQQQMPPQYGQQGVSGYCQQGQQPYYSQQPQPPHLPPQAQYLPSQSQQRYQPQQDMSQEGYGTRSQPPLAPGKPNHEDLNLIQQERPSSLPDLSGSIDDLPTGTEATLSSAVSASGSTSSQGDQSNPAQSPFSPHASPHLSSIPGGPSPSPVGSPVGSNQSRSGPISPASIPGSQMPPQPPGSQSESSSHPALSQSPMPQERGFMAGTQRNPQMAQYGPQQTGPSMSPHPSPGGQMHAGISSFQQSNSSGTYGPQMSQYGPQGNYSRPPAYSGVPSASYSGPGPGMGISANNQMHGQGPSQPCGAVPLGRMPSAGMQNRPFPGNMSSMTPSSPGMSQQGGPGMGPPMPTVNRKAQEAAAAVMQAAANSAQSRQGSFPGMNQSGLMASSSPYSQPMNNSSSLMNTQAPPYSMAPAMVNSSAASVGLADMMSPGESKLPLPLKADGKEEGTPQPESKSKKSSSSTTTGEKITKVYELGNEPERKLWVDRYLTFMEERGSPVSSLPAVGKKPLDLFRLYVCVKEIGGLAQVNKNKKWRELATNLNVGTSSSAASSLKKQYIQYLFAFECKIERGEEPPPEVFSTGDTKKQPKLQPPSPANSGSLQGPQTPQSTGSNSMAEVPGDLKPPTPASTPHGQMTPMQGGRSSTISVHDPFSDVSDSSFPKRNSMTPNAPYQQGMSMPDVMGRMPYEPNKDPFGGMRKVPGSSEPFMTQGQMPNSSMQDMYNQSPSGAMSNLGMGQRQQFPYGASYDRRHEPYGQQYPGQGPPSGQPPYGGHQPGLYPQQPNYKRHMDGMYGPPAKRHEGDMYNMQYSSQQQEMYNQYGGSYSGPDRRPIQGQYPYPYSRERMQGPGQIQTHGIPPQMMGGPLQSSSSEGPQQNMWAARNDMPYPYQNRQGPGGPTQAPPYPGMNRTDDMMVPDQRINHESQWPSHVSQRQPYMSSSASMQPITRPPQPSYQTPPSLPNHISRAPSPASFQRSLENRMSPSKSPFLPSMKMQKVMPTVPTSQVTGPPPQPPPIRREITFPPGSVEASQPVLKQRRKITSKDIVTPEAWRVMMSLKSGLLAESTWALDTINILLYDDSTVATFNLSQLSGFLELLVEYFRKCLIDIFGILMEYEVGDPSQKALDHNAARKDDSQSLADDSGKEEEDAECIDDDEEDEEDEEEDSEKTESDEKSSIALTAPDAAADPKEKPKQASKFDKLPIKIVKKNNLFVVDRSDKLGRVQEFNSGLLHWQLGGGDTTEHIQTHFESKMEIPPRRRPPPPLSSAGRKKEQEGKGDSEEQQEKSIIATIDDVLSARPGALPEDANPGPQTESSKFPFGIQQAKSHRNIKLLEDEPRSRDETPLCTIAHWQDSLAKRCICVSNIVRSLSFVPGNDAEMSKHPGLVLILGKLILLHHEHPERKRAPQTYEKEEDEDKGVACSKDEWWWDCLEVLRDNTLVTLANISGQLDLSAYTESICLPILDGLLHWMVCPSAEAQDPFPTVGPNSVLSPQRLVLETLCKLSIQDNNVDLILATPPFSRQEKFYATLVRYVGDRKNPVCREMSMALLSNLAQGDALAARAIAVQKGSIGNLISFLEDGVTMAQYQQSQHNLMHMQPPPLEPPSVDMMCRAAKALLAMARVDENRSEFLLHEGRLLDISISAVLNSLVASVICDVLFQIGQL

SEQ ID NO: 16275 - DNA, 576 bp, Homo sapiens
gcggccgcgcaacaaaggagtcacccggcgatgagccccggcacccccggaccgaccatgggcagatcccagggcagcccaatggatccaatggtgatgaagagacctcagttgtatggcatgggcagtaaccctcattctcagcctcagcagagcagtccgtacccaggaggttcctatggccctccaggcccacagcggtatccaattggcatccagggtcggactcccggggccatggccggaatgcagtaccctcagcagcaggtttgtgctggtcccccgacccgctgcttttttgtaatagttttgtctttgccttttgctgtccacctaagattgatgttaaagagaattagggggcattgcacggattttctgctttaatttttattgtttctttaatcacaggtataattttttttttcttttaaagatggaaaggtgagcttcttaaagtggacagaatacctgtttggtagaagggcagcaggaccagctgtatttgataggtgcactgtgtcataaatttgcagcaggttataacagatgtaagctctgaagtgaacttggcat

SEQ ID NO: 16276 - protein, 118 aa, Homo sapiens
MSPGTPGPTMGRSQGSPMDPMVMKRPQLYGMGSNPHSQPQQSSPYPGGSYGPPGPQRYPIGIQGRTPGAMAGMQYPQQQVCAGPPTRCFFVIVLSLPFAVHLRLMLKRIRGHCTDFLL

SEQ ID NO: 16277 - DNA, 532 bp, Homo sapiens
gcggccgcgcaacaaaggagtcacccggcgatgagccccggcacccccggaccgaccatgggcagatcccagggcagcccaatggatccaatggtgatgaagagacctcagttgtatggcatgggcagtaaccctcattctcagcctcagcagagcagtccgtacccaggaggttcctatggccctccaggcccacagcggtatccaattggcatccagggtcggactcccggggccatggccggaatgcagtaccctcagcagcagttctagctccgaaacaccctggattacagtctttgaagaagtaggagagccggtggccgaagtgcccactcatgacctggccttgctagtggaggtggcaaccagagaagctggagagcgcctcctgatccacagggaacttcagtaaatccttttgcctccccccggtcgtcagattgcgttcatactgtggtagcaggccccgtctgaggcccatcctggtgttgagaggctggatgctagcagggagctccaggagacgttc

SEQ ID NO: 16278 - protein, 99 aa, Homo sapiens
MAWAVTLILSLSRAVRTQEVPMALQAHSGIQLASRVGLPGPWPECSTLSSSSSSETPWITVFEEVGEPVAEVPTHDLALLVEVATREAGERLLIHRELQ

SEQ ID NO: 16279 - DNA, 1013 bp, Homo sapiens
gcggccgcgcaacaaaggagtcacccggcgatgagccccggcacccccggaccgaccatgggcagatcccagggcagcccaatggatccaatggtgatgaagagacctcagttgtatggcatgggcagtaaccctcattctcagcctcagcagagcagtccgtacccaggaggttcctatggccctccaggcccacagcggtatccaattggcatccagggtcggactcccggggccatggccggaatgcagtaccctcagcagcagatgccacctcagtatggacagcaaggtgtgagtggttactgccagcagggccaacagccatattacagccagcagccgcagcccccgcacctcccaccccaggcgcagtatctgccgtcccagtcccagcagaggtaccagccgcagcaggacatgtctcaggaaggctatggaactagatctcaacctcctctggcccccggaaaacctaaccatgaagacttgaacttaatacagcaagaaagaccatcaagtttaccagtaagacattattgtgctgatttggaaatgtaatgagttaaagacttttagaaagagctgttgtttttgtttgttctactttatattatgacatgattgagaagtttctagacttcaggtttattttgtggtcaatttttcaaggtttaccttttaggagctctgtagtcctggataagtctatttcatgtgtatatatctctgttgcagagtgtagacatcagttggaaggttttatgcggctggtcgattttgtgtgcaggtggttattgctgttgtacagttgagctttctttaggctgttgctttttggcagcgatacagaacagaggtgtccttagaggagtcaaaacttaaaagaaatttgcactttgcaaaggatacaaatgatgagataaaatacctgatagtaatttgaatttcttctaggactttctatttatgtaatgagaaatcacccaaaagaaggtagtttgaaatttgag

SEQ ID NO: 16280 - protein, 176 aa, Homo sapiens [sequence omitted]

SEQ ID NO: 16281 - DNA, 5459 bp, Homo sapiens
gcggccgcgcaacaaaggagtcacccggcgatgagccccggcacccccggaccgaccatgggcagatcccagggcagcccaatggatccaatggtgatgaagagacctcagttgtatggcatgggcagtaaccctcattctcagcctcagcagagcagtccgtacccaggaggttcctatggccctccaggcccacagcggtatccaattggcatccagggtcggactcccggggccatggccggaatgcagtaccctcagcagcaggactctggagatgccacatggaaagaaacattctggttgatgccacctcagtatggacagcaaggtgtgagtggttactgccagcagggccaacagccatattacagccagcagccgcagcccccgcacctcccaccccaggcgcagtatctgccgtcccagtcccagcagaggtaccagccgcagcaggacatgtctcaggaaggctatggaactagatctcaacctcctctggcccccggaaaacctaaccatgaagacttgaacttaatacagcaagaaagaccatcaagtttaccagatctgtctggctccattgatgacctccccacgggaacggaagcaactttgagctcagcagtcagtgcatccgggtccacgagcagccaaggggatcagagcaacccggcgcagtcgcctttctccccacatgcgtcccctcatctctccagcatcccggggggcccatctccctctcctgttggctctcctgtaggaagcaaccagtctcgatctggcccaatctctcctgcaagtatcccaggtagtcagatgcctccgcagccacccgggagccagtcagaatccagttcccatcccgccttgagccagtcaccaatgccacaggaaagaggttttatggcaggcacacaaagaaaccctcagatggctcagtatggacctcaacagacaggaccatccatgtcgcctcatccttctcctgggggccagatgcatgctggaatcagtagctttcagcagagtaactcaagtgggacttacggtccacagatgagccagtatggaccacaaggtaactactccagacccccagcgtatagtggggtgcccagtgcaagctacagcggcccagggcccggtatgggtatcagtgccaacaaccagatgcatggacaagggccaagccagccatgtggtgctgtgcccctgggacgaatgccatcagctgggatgcagaacagaccatttcctggaaatatgagcagcatgacccccagttctcctggcatgtctcagcagggagggccaggaatggggccgccaatgccaactgtgaaccgtaaggcacaggaggcagccgcagcagtgatgcaggctgctgcgaactcagcacaaagcaggcaaggcagtttccccggcatgaaccagagtggacttatggcttccagctctccctacagccagcccatgaacaacagctctagcctgatgaacacgcaggcgccgccctacagcatggcgcccgccatggtgaacagctcggcagcatctgtgggtcttgcagatatgatgtctcctggtgaatccaaactgcccctgcctctcaaagcagacggcaaagaagaaggcactccacagcccgagagcaagtcaaagaagtccagctcctccaccactactggggagaagatcacgaaggtgtacgagctggggaatgagccagagagaaagctctgggtcgaccgatacctcaccttcatggaagagagaggctctcctgtctcaagtctgcctgccgtgggcaagaagcccctggacctgttccgactctacgtctgcgtcaaagagatcgggggtttggcccaggttaataaaaacaagaagtggcgtgagctggcaaccaacctaaacgttggcacctcaagcagtgcagcgagctccctgaaaaagcagtatattcagtacctgtttgcctttgagtgcaagatcgaacgtggggaggagcccccgccggaagtcttcagcaccggggacaccaaaaagcagcccaagctccagccgccatctcctgctaactcgggatccttgcaaggcccacagaccccccagtcaactggcagcaattccatggcagaggttccaggtgacctgaagccacctaccccagcctccacccctcacggccagatgactccaatgcaaggtggaagaagcagtacaatcagtgtgcacgacccattctcagatgtgagtgattcatccttcccgaaacggaactccatgactccaaacgccccctaccagcagggcatgagcatgcccgatgtgatgggcaggatgccctatgagcccaacaaggacccctttgggggaatgagaaaagtgcctggaagcagcgagccctttatgacgcaaggacagatgcccaacagcagcatgcaggacatgtacaaccaaagtccctccggagcaatgtctaacctgggcatggggcagcgccagcagtttccctatggagccagttacgaccgaaggcatgaaccttatgggcagcagtatccaggccaaggccctccctcgggacagccgccgtatggagggcaccagcccggcctgtacccacagcagccgaattacaaacgccatatggacggcatgtacgggcccccagccaagcgccacgagggcgacatgtacaacatgcagtacagcagccagcagcaggagatgtacaaccagtatggaggctcctactcgggcccggaccgcaggcccatccagggccagtacccgtatccctacagcagggagaggatgcagggcccggggcagatccagacacacggaatcccgcctcagatgatgggcggcccgctgcagtcgtcctccagtgaggggcctcagcagaatatgtgggcagcacgcaatgatatgccttatccctaccagaacaggcagggccctggcggccctacacaggcgcccccttacccaggcatgaaccgcacagacgatatgatggtacccgatcagaggataaatcatgagagccagtggccttctcacgtcagccagcgtcagccttatatgtcgtcctcagcctccatgcagcccatcacacgcccaccacagccgtcctaccagacgccaccgtcactgccaaatcacatctccagggcgcccagcccagcgtccttccagcgctccctggagaaccgcatgtctccaagcaagtctccttttctgccgtctatgaagatgcagaaggtcatgcccacggtccccacatcccaggtcaccgggccaccaccccaaccacccccaatcagaagggagatcacctttcctcctggctcagtagaagcatcacaaccagtcttgaaacaaaggcgaaagattacctccaaagatatcgttactcctgaggcgtggcgtgtgatgatgtcccttaaatcaggtcttttggctgagagtacgtgggctttggacactattaatattcttctgtatgatgacagcactgttgctactttcaatctctcccagttgtctggatttctcgaacttttagtcgagtactttagaaaatgcctgattgacatttttggaattcttatggaatatgaagtgggagaccccagccaaaaagcacttgatcacaacgcagcaaggaaggatgacagccagtccttggcagacgattctgggaaagaggaggaagatgctgaatgtattgatgacgacgaggaagacgaggaggatgaggaggaagacagcgagaagacagaaagcgatgaaaagagcagcatcgctctgactgccccggacgccgctgcagacccaaaggagaagcccaagcaagccagtaagttcgacaagctgccaataaagatagtcaaaaagaacaacctgtttgttgttgaccgatctgacaagttggggcgtgtgcaggagttcaatagtggccttctgcactggcagctcggcgggggtgacaccaccgagcacattcagactcactttgagagcaagatggaaattcctcctcgcaggcgcccacctccccccttaagctccgcaggtagaaagaaagagcaagaaggcaaaggcgactctgaagagcagcaagagaaaagcatcatagcaaccatcgatgacgtcctctctgctcggccaggggcattgcctgaagacgcaaaccctgggccccagaccgaaagcagtaagtttccctttggtatccagcaagccaaaagtcaccggaacatcaagctgctggaggacgagcccaggagccgagacgagactcctctgtgtaccatcgcgcactggcaggactcgctggctaagcgatgcatctgtgtgtccaatattgtccgtagcttgtcattcgtgcctggcaatgatgccgaaatgtccaaacatccaggcctggtgctgatcctggggaagctgattcttcttcaccacgagcatccagagagaaagcgagcaccgcagacctatgagaaagaggaggatgaggacaagggggtggcctgcagcaaagatgagtggtggtgggactgcctcgaggtcttgagggataacacgttggtcacgttggccaacatttccgggcagctagacttgtctgcttacacggaaagcatctgcttgccaattttggatggcttgctgcactggatggtgtgcccgtctgcagaggcacaagatccctttccaactgtgggacccaactcggtcctgtcgcctcagagacttgtgctggagaccctctgtaaactcagtatccaggacaataatgtggacctgatcttggccactcctccatttagtcgtcaggagaaattctatgctacattagttaggtacgttggggatcgcaaaaacccagtctgtcgagaaatgtccatggcgcttttatcgaaccttgcccaaggggacgcactagcagcaagggccatagctgtgcagaaaggaagcattggaaacttgataagcttcctagaggatggggtcacgatggcccagtaccagcagagccagcacaacctcatgcacatgcagcccccgcccctggaaccacctagcgtagacatgatgtgcagggcggccaaggctttgctagccatggccagagtggacgaaaaccgctcggaattccttttgcacgagggccggttgctggatatctcgatatcagctgtcctgaactctctggttgcatctgtcatctgtgatgtactgtttcagattgggcagttatgacataagtgagaaggcaagcatgtgtgagtgaagattagagggtcacatataactggctgttttctgttcttgtttatccagcgtaggaagaaggaaaagaaaatctttgctcctctgccccattcactatttaccaattgggaattaaagaaataattaatttgaacagttatgaaatt

SEQ ID NO: 16282 - protein, 1749 aa, Homo sapiens
MSPGTPGPTMGRSQGSPMDPMVMKRPQLYGMGSNPHSQPQQSSPYPGGSYGPPGPQRYPIGIQGRTPGAMAGMQYPQQQDSGDATWKETFWLMPPQYGQQGVSGYCQQGQQPYYSQQPQPPHLPPQAQYLPSQSQQRYQPQQDMSQEGYGTRSQPPLAPGKPNHEDLNLIQQERPSSLPDLSGSIDDLPTGTEATLSSAVSASGSTSSQGDQSNPAQSPFSPHASPHLSSIPGGPSPSPVGSPVGSNQSRSGPISPASIPGSQMPPQPPGSQSESSSHPALSQSPMPQERGFMAGTQRNPQMAQYGPQQTGPSMSPHPSPGGQMHAGISSFQQSNSSGTYGPQMSQYGPQGNYSRPPAYSGVPSASYSGPGPGMGISANNQMHGQGPSQPCGAVPLGRMPSAGMQNRPFPGNMSSMTPSSPGMSQQGGPGMGPPMPTVNRKAQEAAAAVMQAAANSAQSRQGSFPGMNQSGLMASSSPYSQPMNNSSSLMNTQAPPYSMAPAMVNSSAASVGLADMMSPGESKLPLPLKADGKEEGTPQPESKSKKSSSSTTTGEKITKVYELGNEPERKLWVDRYLTFMEERGSPVSSLPAVGKKPLDLFRLYVCVKEIGGLAQVNKNKKWRELATNLNVGTSSSAASSLKKQYIQYLFAFECKIERGEEPPPEVFSTGDTKKQPKLQPPSPANSGSLQGPQTPQSTGSNSMAEVPGDLKPPTPASTPHGQMTPMQGGRSSTISVHDPFSDVSDSSFPKRNSMTPNAPYQQGMSMPDVMGRMPYEPNKDPFGGMRKVPGSSEPFMTQGQMPNSSMQDMYNQSPSGAMSNLGMGQRQQFPYGASYDRRHEPYGQQYPGQGPPSGQPPYGGHQPGLYPQQPNYKRHMDGMYGPPAKRHEGDMYNMQYSSQQQEMYNQYGGSYSGPDRRPIQGQYPYPYSRERMQGPGQIQTHGIPPQMMGGPLQSSSSEGPQQNMWAARNDMPYPYQNRQGPGGPTQAPPYPGMNRTDDMMVPDQRINHESQWPSHVSQRQPYMSSSASMQPITRPPQPSYQTPPSLPNHISRAPSPASFQRSLENRMSPSKSPFLPSMKMQKVMPTVPTSQVTGPPPQPPPIRREITFPPGSVEASQPVLKQRRKITSKDIVTPEAWRVMMSLKSGLLAESTWALDTINILLYDDSTVATFNLSQLSGFLELLVEYFRKCLIDIFGILMEYEVGDPSQKALDHNAARKDDSQSLADDSGKEEEDAECIDDDEEDEEDEEEDSEKTESDEKSSIALTAPDAAADPKEKPKQASKFDKLPIKIVKKNNLFVVDRSDKLGRVQEFNSGLLHWQLGGGDTTEHIQTHFESKMEIPPRRRPPPPLSSAGRKKEQEGKGDSEEQQEKSIIATIDDVLSARPGALPEDANPGPQTESSKFPFGIQQAKSHRNIKLLEDEPRSRDETPLCTIAHWQDSLAKRCICVSNIVRSLSFVPGNDAEMSKHPGLVLILGKLILLHHEHPERKRAPQTYEKEEDEDKGVACSKDEWWWDCLEVLRDNTLVTLANISGQLDLSAYTESICLPILDGLLHWMVCPSAEAQDPFPTVGPNSVLSPQRLVLETLCKLSIQDNNVDLILATPPFSRQEKFYATLVRYVGDRKNPVCREMSMALLSNLAQGDALAARAIAVQKGSIGNLISFLEDGVTMAQYQQSQHNLMHMQPPPLEPPSVDMMCRAAKALLAMARVDENRSEFLLHEGRLLDISISAVLNSLVASVICDVLFQIGQL

SEQ ID NO: 16283 - DNA, 965 bp, Homo sapiens
atggaatgccagttttctcagaactctcaattctaggccatgcctgtgtctggtttctgtggctagactcaaagaggtttttgatagtgcctaaattatgtttttccttatgatttcaggttgaagtcttggcctcggaggatgcagcctttggactcaagttttaatctcctcataaaaggataagtgtcttttcttcagtcatcttaatgtgttaacctgcacttcatatcatcatgattttaaaacatgcattgaatgctgctacagtccaagaataacaacgcctgtggcctccaaggagtaagggacccctggaacatcagcaccagcaaaaggaagagagacactctcagttgtggggtgtctctccctgactcagcccccacctcactgagggtcttccatccccacagtttccatctcagatgcccagaagaatgggaggggccaaaggaggtccactttgtatatcatcaatgaaaccccctgtacccagtcccccaacaaggaagaacaacagataactcaatttaaaaaatgttacttgtggctgggcatggtggctcactcctagaatcccagcactttgggaggccgaggcgggtgggtcatgaggtcaggagtttgagaccagcctaatcaacatggtgaaaccccgtctctactaaaaatacaaaaattagccaggcgtggtggtgcgtgactgtaatcgcagctactcaggaggctgaggcaggagaattgcttgaacccaggaggcgggggttgcagtgagcggagatcacaccactgcactccagcctgggcgacagagcgagaatcttatctcaaaaataaaaaagttacttgtgataaatgaataatttgggaagaagaaatcctgagttttatgatgcagaaggtatttctttatcatgtagacacttagagggcttcaattttggtagtaaataaccttcatt

SEQ ID NO: 16284 - protein, 74 aa, Homo sapiens [sequence omitted]

SEQ ID NO: 16285 - DNA, 423 bp, Homo sapiens
agagggtgcctggcccataggggcagcacggtgactggttatgcttccttcatttgttcacccaacaaacactgactcaagcacctactaagagccaggctgaggaccttaagaatcaggacaaagtacacaggcatagtttaaacatcgtcacagcagatgatgactcagaaaatgcatttgagaaagtgataacagaagactcatttgtgtccttggcccatgtaaagaagaaaattcagagccctccgaaccaaccgaattcaataaacaccttcaaaattacagatttttatatgacatgtgttggtcacaagtaaaacctcttaaacaaagtgtggtaataatttttaaagcgcatactgctgggcacagtgaaccaacccactttatgaaggcactttaacattaaaatagcttaaa

SEQ ID NO: 16286 - protein, 34 aa, Homo sapiens [sequence omitted]

SEQ ID NO: 16287 - DNA, 874 bp, Homo sapiens
aggtaactactccagacccccagcgtatagtggggtgcccagtgcaagctacagcggcccagggcccggtatgggtatcagtgccaacaaccagatgcatggacaagggccaagccagccatgtggtgctgtgcccctgggacgaatgccatcagctgggatgcagaacagaccatttcctggaaatatgagcagcatgacccccagttctcctggcatgtctcagcagggagggccaggaatggggccgccaatgccaactgtgaaccgtaaggcacaggaggcagccgcagcagtgatgcaggctgctgcgaactcagcacaaagcaggccaccatacattaggtcgcctgcttatcccagccagtctggggctggcggacgccccatgttttcttcccagcaccccaactatggcaactctcaggctcccatggtgcaccagcctgaccagtacgggcaaggcagtttccccggcatgaaccagagtggacttatggcttccagctctccctacagccagcccatgaacaacagctctagcctgatgaacacgcaggcgccgccctacagcatggcgcccgccatggtgaacagctcggcagcatctgtgggtcttgcagatatgatgtctcctggtgaatccaaactgcccctgcctctcaaagcagacggcaaagaagaaggcactccacagcccgagagcaagtcaaaggatagctacagctctcagggtatttctcagcccccaaccccaggcaacctgccagtcccttccccaatgtcccccagctctgctagcatctcctcatttcatggagatgaaagtgatagcattagcagcccaggctggccaaagactccatcaagccct

SEQ ID NO: 16288 - protein, 267 aa, Homo sapiens
MGISANNQMHGQGPSQPCGAVPLGRMPSAGMQNRPFPGNMSSMTPSSPGMSQQGGPGMGPPMPTVNRKAQEAAAAVMQAAANSAQSRPPYIRSPAYPSQSGAGGRPMFSSQHPNYGNSQAPMVHQPDQYGQGSFPGMNQSGLMASSSPYSQPMNNSSSLMNTQAPPYSMAPAMVNSSAASVGLADMMSPGESKLPLPLKADGKEEGTPQPESKSKDSYSSQGISQPPTPGNLPVPSPMSPSSASISSFHGDESDSISSPGWPKTPSS

SEQ ID NO: 16289 - DNA, 561 bp, Homo sapiens
aaccactttaaggaaactagaacagtattcaagaacacccatcacagtgcttaacaagatttaatgtacatttattcttaacatgtggaacatataaagattttatactgaataaatgatattcattaagccagaggaaaaggaggaatttacatcaagtttttttcttttttttttttttaaactacattatcttgaaatacaaatgtggattctcatcactgaaaaatctttgaagttgtgtttcttccttttagttgtatttttttcattttctcttttttgactgtactggtaaccattttctaaatcaatccatatataaccatttccacaccttgattcatgaagcaaattgtgatcagctgctctcctgaaatcgagcatgactttatacatacagaaacttgtacattaccctcttttttttttgtttttgttttttgtattttttctttctttttttggagatatggccccagagctttctctctggctcattccccagctcgtacaccttcgtgatcttctccccagtagtggtggaggagctggacttct

SEQ ID NO: 16290 - protein, 59 aa, Homo sapiens
MKQIVISCSPEIEHDFIHTETCTLPSFFFVFVFCIFSFFFWRYGPRAFSLAHSPARTPS

SEQ ID NO: 16291 - DNA, 3619 bp, Homo sapiens
aaggaaggatgacagccagtccttggcagacgattctgggaaagaggaggaagatgctgaatgtattgatgacgacgaggaagacgaggaggatgaggaggaagacagcgagaagacagaaagcgatgaaaagagcagcatcgctctgactgccccggacgccgctgcagacccaaaggagaagcccaagcaagccagtaagttcgacaagctgccaataaagatagtcaaaaagaacaacctgtttgttgttgaccgatctgacaagttggggcgtgtgcaggagttcaatagtggccttctgcactggcagctcggcgggggtgacaccaccgagcacattcagactcactttgagagcaagatggaaattcctcctcgcaggcgcccacctccccccttaagctccgcaggtagaaagaaagagcaagaaggcaaaggcgactctgaagagcagcaagagaaaagcatcatagcaaccatcgatgacgtcctctctgctcggccaggggcattgcctgaagacgcaaaccctgggccccagaccgaaagcagtaagtttccctttggtatccagcaagccaaaagtcaccggaacatcaagctgctggaggacgagcccaggagccgagacgagactcctctgtgtaccatcgcgcactggcaggactcgctggctaagcgatgcatatctgtcatctgtgatgtactgtttcagattgggcagttatgacataagtgagaaggcaagcatgtgtgagtgaagattagagggtcacatataactggctgttttctgttcttgtttatccagcgtaggaagaaggaaaagaaaatctttgctcctctgccccattcactatttaccaattgggaattaaagaaataattaatttgaacagttatgaaattaatatttgctgtctgtgtgtataagtacatcctttggggttttttttttctcttttttttaaccaaagttgctgtctagtgcattcaaaggtcactttttgttcttcacagatctttttaatgttctttcccatgttgtattgcatttttgggggaagcaaattgactttaaagaaaaaagttgtggcaaaagatgctaagatgcgaaaatttcaccacactgagtcaaaaaggtgaaaaattatccatttcctatgcgttttactcctcagagaatgaaaaaaactgcatcccatcacccaaagttctgtgcaatagaaatttctacagatacaggtataggggctcaaggaggtatgtcggtcagtagtcaaaactatgaaatgatactggtttctccacaggaatatggttccattaggctgggagcaaaaacaatgttttttaagattgagaatacatacctgacaacgatccggaaactgctcctcaccactcccgtcatgcctgctgtcggcgtttgaccttccacgtgacagttcttcacaattcctttcatcattttttaaatattttttttactgcctatgggctgtgatgtatatagaagttgtacattaaacataccctcatttttttcttttcttttttttttttttttttagtacaaagttttagtttctttttcatgatgtggtaactacgaagtgatggtagatttaaataattttttatttttattttatatattttttcattagggccatatctccaaaaaaagaaagaaaaaatacaaaaaacaaaaacaaaaaaaaaagagggtaatgtacaagtttctgtatgtataaagtcatgctcgatttcaggagagcagctgatcacaatttgcttcatgaatcaaggtgtggaaatggttatatatggattgatttagaaaatggttaccagtacagtcaaaaaagagaaaatgaaaaaaatacaactaaaaggaagaaacacaacttcaaagatttttcagtgatgagaatccacatttgtatttcaagataatgtagtttaaaaaaaaaaaaaagaaaaaaacttgatgtaaattcctccttttcctctggcttaatgaatatcatttattcagtataaaatctttatatgttccacatgttaagaataaatgtacattaaatcttgttaagcactgtgatgggtgttcttgaatactgttctagtttccttaaagtggtttcctagtaatcaagttatttacaagaaataggggaatgcagcagtgtattcacattataaaaccctacatttggaagagacctttaggggttacctactttagagtggggagcaacagtttgattttctcaaattacttagctaattagtctttctttgaagcaattaactctaacgacattgaggtatgatcattttcagtatttatgggaggtggctgctgacccacttgaggtgagatctcagaagcttaactggcctgaaaatgtaacattctgccttttactaactccatcttagtttaatcaaagttcaatctattccttgtttcttctgtgtgcctcagagttattttgcatttagtttactccaccgtgtataatatttatactgtgcaatgttaaaaaagaatctgttatattgtatgtggtgtacatagtgcaaagtgatgatttctatttcagggcatattatggttctcatattccttcctacctggtgcacagtagctttttaatactagtcacttctaatttaaactttctcttcctgggtcattgactgttactgtgtaataatcgatttctttgaaactgctgcataattatgctgttagtggacctctacctcttctcttccctctcccaatcacagtatactcagaatccccagcccctcgcatacattgtgtcggttcacattactcacagtaatatatggaagagttagacaagaacatgcagttacagtcattgtgagacgtgactctccagtgtcacgaggaaaaaaatcatcttttctgcaaacagtctctcatctgtcaactcccacattactgagtcaaacagtcttcttacataacaatgcaaccaaatatatgttgaattaaagacccatttataattctgctttaaatacatctgcttgctaagaacagatttcagtgctccaagcttcaaatatggagatttgtaagagggaattcaatattattctaatttctctcttacagagtacaaataaaaggtgtatacaaactccgaacatatccagtattccaattcctttgtcaatcagaagagtaaaataattaacaaaagactgttgttatggtttgcattgtaaccgatacgcagagtctgaccgttgggcaacaagtttttctatcctgatgcgcaacacagtctctagagactaatccaggaagactttagcctcctttccatattctcacccccgaatcaagatttacagaagcccacgaagaatttacagcctgcttgagatcatcttgcctataaactgagttattgctttgtcctaaaaattagtcggtttttttttttctatgaggcttttcagaaatttacaggatgcccagactttacatgtgtaccaaaaaaaaaaaaaagataaaaaataaaggtgcaaagaaagtttagtattttggaatggtgctataaagttg

SEQ ID NO: 16292 - protein, 122 aa, Homo sapiens
MEIPPRRRPPPPLSSAGRKKEQEGKGDSEEQQEKSIIATIDDVLSARPGALPEDANPGPQTESSKFPFGIQQAKSHRNIKLLEDEPRSRDETPLCTIAHWQDSLAKRCISVICDVLFQIGQL

SEQ ID NO: 16293 - DNA, 1799 bp, Homo sapiens
agattgcacaggaggaggcggtagcggaacctttctcctccgcctggttctcgcttccacccgggcccagttggggacggacgcactagaggcgacctaaacatggagacagcgggcgctgcaactgggcagccggcctctgggctggaggctccggggtccacgaatgaccggcttttcctggttaaaggtggaattttccttggtaccgttgctgcagcgggaatgctagctggatttattacaacattatcattggctaaaaagaaaagccctgaatggttcaataagggaagtatggccacggctgcattaccggaaagcgggtcttcccttgccttgcgagctctgggctggggctccctgtatgcatggtgtggggttggtgtgattagcttcgcagtctggaaagctttaggagttcacagtatgaacgactttcgaagtaaaatgcaatcaatatttccaacaattcccaagaactccgaatcggctgttgagtgggaggaaacattgaaatccaaatgagatgagcatggatgaatttcaaaatgcttgttacagaaaggggtggctctggagacaccatgacagcaaaaggactgggactgatttctcccaggaacatgggcagattgctgactgaaccagtgcactggatagcattcagcctcatcacaggagagtatgtgtgtgcgtgctgggggagggtaaagttttcccacagttaagaagactatttaaaaatagtaattacaggaataacttccttatgtggaggggaccccataggaaatgattctgtttgtaacagttgaagcaaatttcatactaaaaaagtttataataaaagtatgataagaaaatatttataaaacagaccccctaatagcaatagtactgcaatgtgtctaattaaaggagtttcaagagcctttcttgtcaatatatgacagaacttggaagtcttattctgattagccagactacaaagtgacagtcacctggtaagtcctgtatggtaggaagtgggtgtggctctcgggtcctaaatgtggtctgtgctttacagccatcacacacatgctagttatttacctgatgcccttgcttgaaggccctataaattcttatacttaaaacaaaaagccagtaatgagttgtgatcaccccaaaaggcacagttgggctaaaataatgatgatatcaggggtaaacatatttttttgagaagttggtctggatctctgaacactgacaatttgtcattttgtctcagttgtcaaagtaaaaaaagcccagttgtcatccgtcttcaatatttttaaccagaaagtcacctgagtacggagtcccaatataaagtatttgggaccacctccctaacaaagctgttagggtaaattctgtgtgcacgcccaactccctcctgtcttccacagtctcctacaaaaaaaacagatggagaataatgtctacatgcaattgtttttactgcaattgtattttaaaatattttcaagaagagaaatactttaatatgtcaatatgtccagagaaaaaacctgtagttaaatatcagttgtgcaatttcttcctacttgcctaggctctaattagtcagcaatcaggtttaataaaggacatttgaaatttctgttatcatgaaaccttttattctaagggagatttttaaatgaaatgacaagaacttaatgtaatacttttctctagaccatgttaccctgttaaaattgctgtattgttaatgaaacaggtgtaatcagcatctggaattc

SEQ ID NO: 16294 - protein, 141 aa, Homo sapiens; identical to SEQ ID NO: 4813

SEQ ID NO: 16295 - DNA, 1661 bp, Homo sapiens
agattgcacaggaggaggcggtagcggaacctttctcctccgcctggttctcgcttccacccgggcccagttggggacggacgcactagaggcgacctaaacatggagacagcgggcgctgcaactgggcagccggcctctgggctggaggctccggggtccacgaatgaccggcttttcctggttaaaggtggaattttccttggtaccgttgctgcagcgggaatgctagctggatttattacaacattatcattggctaaaaagaaaagccctgaatggttcaataagggaagtatggccacggctgcattaccggaaagcgggtcttcccttgccttgcgagctctgggctggggctccctgtatgcatggtgtggggttggtgtgattagcttcgcagtctggaaagctttaggagttcacagtatgaacgactttcgaagtaaaatgcaatcaatatttccaacaattcccaagaactccgaatcggctgttgagtgggaggaaacattgaaatccaaatgagatgagcatggatgaatttcaaaatgcttgttacagaaaggggtggctctggagacaccatgacagcaaaaggactgggactgatttctcccaggaacatgggcagattgctgactgaaccagtgcactggatagcattcagcctcatcacaggagagtatgtgtgtgcgtgctgggggagggtaaagttttcccacagttaagaagactatttaaaaatagtaattacaggaataacttccttatgtggaggggaccccataggaaatgattctgtttgtaacagttgaagcaaatttcatactaaaaaagtttataataaaagtatgataagaaaatatttataaaacagaccccctaatagcaatagtactgcaatgtgtctaattaaaggagtttcaagagcctttcttgtcaatatatgacagaacttggaagtcttattctgattagccagactacaaagtgacagtcacctggtaagtcctgtatggtaggaagtgggtgtggctctcgggtcctaaatgtggtctgtgctttacagccatcacacacatgctagttatttacctgatgcccttgcttgaaggccctataaattcttatacttaaaacaaaaagccagtaatgagttgtgatcaccccaaaaggcacagttgggctaaaataatgatgatatcaggggtaaacatatttttttgagaagttggtctggatctctgaacactgacaatttgtcattttgtctcagttgtcaaagtaaaaaaagcccagttgtcatccgtcttcaatatttttaaccagaaagtcacctgagtacggagtcccaatataaagtatttgggaccacctccctaacaaagctgttagggtaaattctgtgtgcacgcccaactccctcctgtcttccacagtctcctacaaaaaaaacagatggagaataatgtctacatgcaattgtttttactgcaattgtattttaaaatattttcaagaagagaaatactttaatatgtcaatatgtccagagaaaaaacctgtagttaaatatcagttgtgcaatttcttcctacttgcctaggctctaattagtcagcaatcaggtttaataaaggacatttgaaatttctgtt

SEQ ID NO: 16296 - protein, 141 aa, Homo sapiens; identical to SEQ ID NO: 4813

SEQ ID NO: 16297 - DNA, 949 bp, Homo sapiens
agattgcacaggaggaggcggtagcggaacctttctcctccgcctggttctcgcttccacccgggcccagttggggacggacgcactagaggcgacctaaacatggagacagcgggcgctgcaactgggcagccggcctctgggctggaggctccggggtccacgaatgaccggcttttcctggttaaaggtggaattttccttggtaccgttgctgcagcgggaatgctagctggatttattacaacattatcattggctaaaaagaaaagccctgaatggttcaataagggaagtatggccacggctgcattaccggaaagcgggtcttcccttgccttgcgagctctgggctggggctccctgtatgcatggtgtggggttggtgtgattagcttcgcagtctggaaagctttaggagttcacagtatgaacgactttcgaagtaaaatgcaatcaatatttccaacaattcccaagaactccgaatcggctgttgagtgggaggaaacattgaaatccaaatgagatgagcatggatgaatttcaaaatgcttgttacagaaaggggtggctctggagacaccatgacagcaaaaggactgggactgatttctcccaggaacatgggcagattgctgactgaaccagtgcactggatagcattcagcctcatcacaggagagtatgtgtgtgcgtgctgggggagggtaaagttttcccacagttaagaagactatttaaaaatagtaattacaggaataacttccttatgtggaggggaccccataggaaatgattctgtttgtaacagttgaagcaaatttcatactaaaaaagtttataataaaagtatgataagaaaatatttataaaacagaccccctaatagcaatagtactgcaatgtgtctaattaaaggagtttcaagagcctttcttgtcaatat

SEQ ID NO: 16298 - protein, 141 aa, Homo sapiens; identical to SEQ ID NO: 4813

SEQ ID NO: 16299 - DNA, 887 bp, Homo sapiens
agattgcacaggaggaggcggtagcggaacctttctcctccgcctggttctcgcttccacccgggcccagttggggacggacgcactagaggcgacctaaacatggagacagcgggcgctgcaactgggcagccggcctctgggctggaggctccggggtccacgaatgaccggcttttcctggttaaaggtggaattttccttggtaccgttgctgcagcgggaatgctagctggatttattacaacattatcattggctaaaaagaaaagccctgaatggttcaataagggaagtatggccacggctgcattaccggaaagcgggtcttcccttgccttgcgagctctgggctggggctccctgtatgcatggtgtggggttggtgtgattagcttcgcagtctggaaagctttaggagttcacagtatgaacgactttcgaagtaaaatgcaatcaatatttccaacaattcccaagaactccgaatcggctgttgagtgggaggaaacattgaaatccaaatgagatgagcatggatgaatttcaaaatgcttgttacagaaaggggtggctctggagacaccatgacagcaaaaggactgggactgatttctcccaggaacatgggcagattgctgactgaaccagtgcactggatagcattcagcctcatcacaggagagtatgtgtgtgcgtgctgggggagggtaaagttttcccacagttaagaagactatttaaaaatagtaattacaggaataacttccttatgtggaggggaccccataggaaatgattctgtttgtaacagttgaagcaaatttcatactaaaaaagtttataataaaagtatgataagaaaatatttataaaacagaccccct

SEQ ID NO: 16300 - protein, 141 aa, Homo sapiens; identical to SEQ ID NO: 4813

SEQ ID NO: 16301 - DNA, 192 bp, Homo sapiens
ggcactatgctgaggctaggtgagtgctcactggggcactatgatgagggctagctcagtgcacactgggacactatgatgaggccgggtgagtgactggaacactatgatgaggctaggtgagcgcacactgggacactatgatgaggctaggtgaacacacactgggacactataatgaggctcggtgtg

SEQ ID NO: 16302 - DNA, 1146 bp, Homo sapiens
ttgcacaggaggaggcggtagcggaacctttctcctccgcctggttctcgcttccacccgggcccagttggggacggacgcactagaggcgacctaaacatggagacagcgggcgctgcaactgggcagccggcctctgggctggaggctccggggtccacgaatgaccggcttttcctggttaaaggtggaattttccttggtaccgttgctgcagcgggaatgctagctggatttattacaacattatcattggctaaaaagaaaagccctgaatggttcaataagggaagtatggccacggctgcattaccggaaagcgggtcttcccttgccttgcgagctctgggctggggctccctgtatgcatggtgtggggttggtgtgattagcttcgcagtctggaaagctttaggagttcacagtgtaagtaactactgtcttgtccctggtatctacatgtttattctgcttactgtgttctaaatttttctggttttcaaatttatttgcatgtagtttggtcactgtctagggagatgatgacagagtacgtgactaaattcttacaaataactagacaacttcttattactaataaatacaatttttgaaggtggtaaaacttcaaatataattaagtaatgactaatttatagctaatgttctatataaattgacattagggcgagtgcagtgggttatgcctgtaatcccagcaccttgggagcctgcggcaggcaaatcacttgagctctgaagtccaaaaccagcctgggcaatgtaaagaaaccctgtctctataaaaaaattagctgggtgtggtggcatgcgcctatagtcctagctactcagaaggctgagggaggaggatcacctgagcctcacaggctgaggctgcagtgtgccaagatcattgcgcttcagccttggcagcggggtaagaccctgtctcaaaaacaaagtagaataaataaacaaattgacattagcgatttgttcaataaaattattaatttggaacaactttctattgctgtttgacatatatatataatctttgtaaaagttaaagcattttaaaattaattatttaaattactaatgtgttatttacacatttttggaaaaaatcctaaaatcttg

SEQ ID NO: 16303 - protein, 128 aa, Homo sapiens
METAGAATGQPASGLEAPGSTNDRLFLVKGGIFLGTVAAAGMLAGFITTLSLAKKKSPEWFNKGSMATAALPESGSSLALRALGWGSLYAWCGVGVISFAVWKALGVHSVSNYCLVPGIYMFILLTVF

SEQ ID NO: 16304 - DNA, 3835 bp, Homo sapiens
gtttatcccgcgcagcagctgccgcctcgggacacgctcattcccacggccaccggcaagccactcctggcgactccccgggacctgaggagccgcggcgcggaggtgaccctccccggcctgcgcctcccttcttcctcctccccagctgggcgcgtggtcgcgtcgcccggggactctggtgatgcccgagaaatgggctgggggtgccgggtgccaggatggggtggggcggccctaggccggcctgacttcgggaccgggctgcgggcgagggtctcggggcccggctcggccggcttccgggccgagaaagaagggcagaggaagcggtcagggtcccctccggccccggcctccctcccggagtataagcccttggaggccaggttttgggttgctgccgcccagctctttcggtctccacttctccccacggacgtttacagctgctcgctttatttctccctccattcccccgtggagccccctcggcagcggaggggtcgcgtgcttctcctctcccgcctgcgcctccccccttcccacccgacagcccaggaggagctgcgggcgcggccctgggacggccggagcctggggcttctgctcgctcgcgccctcccaggcgttgccgcgggtccgagcccccgcagaggtgggcatagccccggggccgcagaaaacgaaggcagctgggcagggatgctcaatttcccgagccccactttcctttcacagcccactgggatgtgtagttcttccgcccgcaggcctgcgccgaggagaagcacgactcggggccttagaaactacaagtccctgcatcccccgcgacaagggcaggagaggcgtggtgctgggcgttctggggctaggtggtgggagatgggaaccaacaaagggggttgtggggaacggtgccttctctgtactgggcagtttgcacgttacacatgttctttgtctaatcttcgccggaacccggtgaggcattattgtatccagcttagagaaagcttaactactggccaaacatcacaaagctcccaagtagtagagatggcatcgaacccagagccctaagtatgtcccttacaaagcgtgcctcagtgaggagtgtcgaagggggatgagattggcttatccaagagggccagttgggaggagctgtggtaaggaaaaagtgatgggaatagcaattagagtatgacatgcaattacaaggagttttgaatacaagtgaaatttacaggggtccattccaaagccggttagagtctagggagaatggatcttaagcacacgataataattgggttttaattattttagatattgtatgagagacaagcatattacagggacaattaagtatttgtggctggactagttttaaaaaaccaactggaaagcttcatacatttcaagtgaaagctctcatatgctttcctgtcctttagctaatgagatcaacggggtattattcttattctgtttattgcaagcaccttttctgtgggtgtccaattaatataatagatccattgatttgatggcattaaaaaagactcccactcttattctcaatgaaaccgaatttttctggcattatggttatgcttttaaaaagtccttccttgtctgttagagatatgtactaaagtatctgccagcgaaataatataaagtctgaaatgtgctttaaaacacaccagcccatccactcccctcctcccacccacccagctccagacatggaggtataaatgaaacaattggaaactgttgaaaatagttgaccttgggtgacatgtacttgtacttaattatttattgctgcaaattgccacaaacgtagtggccttaaaacaagacagatttttctcacagtttttatggatcaggtgtccaggtacactcagtcccccacttagggtctcacgcctgccatcaaggggctggccaggctgcgttcacattcactggagaagaactggcttccactctgactccgggcacaggcaaaattcctttccttgcagcagtaggaccgagggccctggcttcttgctggctggagactggagactgtcctcagctccaagagggaacctgcaattcctagaggttacctggacttcattgtcacttgggctttccgagcacagccacttattttgtcaggcctgcaaggagagtccccagagtgagtctccagcaagacagaattttatataacataaagcaatcccacgggggcaacttcaaatgtgaacattctgttggccagaaagcatgttttgcacacactcaaagggagaggagtacacagggcatgaaccctagggtgagggacaccccggagtgcatccaccacagtgtacatgagagtccattatgcttttcttacctaccacatctactcatgtttatgtttgacattttccataataaaaagaaatgaattcgttttaaaatgttacctaaagtttccacagcaaataagatatgctgatatgatttctaaatagctgatacaattgtctgtagttgtcttccaggggataacttttttcttcccactccatgtgtactaagacctctgcggttaattcacttgtatgggttaccctcccctaagagcgttcactagaacctggtgtgtgatagctgcagagttcacctcaccagctacagttgatcttgaacaatatgggtttgaacagcgtggatgcccttagacacggatttttttcaaccaaatgcagatggaaaatacagcatccgtgggatgggaaatgcgagtattcagagggcaaaggcccactcttcctatatgcaggttctgtggagcctgtttaaggacctgaatatgtgcagattcaggtatacgcaggtgatcctggaaccaatctcctgaggatactgagggatgactgtaaaacctactgtataagggatggtagagtttattcatttattttacagttatctatttcagggcctagattgtgctaagtactgttttagcagcagtgatacaaaaagatccaagatagaagcttatatttggggactgggggagaggtggagagaataaacaaataaataaatgactagtaagacaatttcagagagtaattacaagaacgaaaaaacaaagcagggttatgggatggagagactggggtcgggcagagaatcgaatgatgggaaggggcaagtaccaagtcctcaaggcagaacaacctggaaaattctaggggtacaaagaaaaaccagtctggctggagtggagcgagggccagggagagagggaaaaaggaacaggaattcattctgtgtgcaccagcatcaattctgtatgccacactctgtacccaccatcggtgtaagtgttgaggggtctgaaagaaaaatcaccgtccttgccctccaggaatgtatagattccaaactttaatgctagagggacgtcagcgtatctagaattagagaccaaaacttgtatttctcaaacaaggacactgaaaagtcaaaagacctgctaaaaattccttgagaatgcctcgccaataacaaataatccaaaaatgagtcttgaattgaattgaaagagtgcatgatctacttttgctaaatggggtttagcctaatactgcctctttacatattttaagtttggcctaaaggtttctctgtacactgaactgtagcctaaatggaagtgtaaacagagtgtgatctactcgggtgtcaattactgagttttggccactcaattgtggccagctgttcaaaccatgttcaaataagacaaatgctgagctgt

SEQ ID NO: 16305 - protein, 296 aa, Homo sapiens
MGWGCRVPGWGGAALGRPDFGTGLRARVSGPGSAGFRAEKEGQRKRSGSPPAPASLPEYKPLEARFWVAAAQLFRSPLLPTDVYSCSLYFSLHSPVEPPRQRRGRVLLLSRLRLPPSHPTAQEELRARPWDGRSLGLLLARALPGVAAGPSPRRGGHSPGAAENEGSWAGMLNFPSPTFLSQPTGMCSSSARRPAPRRSTTRGLRNYKSLHPPRQGQERRGAGRSGARWWEMGTNKGGCGERCLLCTGQFARYTCSLSNLRRNPVRHYCIQLRESLTTGQTSQSSQVVEMASNPEP

SEQ ID NO: 16306 - DNA, 2800 bp, Homo sapiens
tgccggaggaaggagtggacccaacctggccgcgccgcagaagtggctcccgaggaagccggcgccggggccgccgcctcgtgtcccctcggggcgcagtgctcgggggtcggcgggccagagccgaggcgcggccggggagccgggggctgcggggccgagcgggcagccgcgcgagggggcgggcgctcggcgacccgggggccggccgggctgagccccgcgccccgggacgcgggctggaagcgacggaggagtgctgccgcgggctgcggaccagcgccgtcccctcacggagcggggattctgctatgacagttgggctccccggagggttaacctgggtgtcctcggcaaagttgtcgccgagccgggagcccgtgtaggggccgcggcgccgcggctcggggggcggccgggcggccggcggcggtcgtggctcggcggggcccgcgcggccggggggctcctgggggtgtgcgcccccagccggctgccctcgtggatgcctcccggcggcggcgggcccatgaaagactgcgagtacagccagatcagcacccacagctcctcccccatggagtcgccccacaagaagaagaaaatcgcggcccggaggaaatgggaggtgttcccgggaagaaacaagttcttctgtaacgggaggatcatgatggcccggcagacgggcgtcttctacctgacgctcgtcctcatcctggtcactagcggactcttcttcgccttcgactgtccgtacctggcggtgaaaatcacccctgccatccctgcagtcgctggcatcctgttcttctttgtgatggggaccctgctccgcaccagcttcagcgaccccggagtcctcccacgagccacgcctgatgaagccgccgatctggaaaggcaaatagatatcgcaaacggcaccagttcaggggggtaccgcccgcctcccagaaccaaagaagtcatcatcaatggccagaccgtgaaacttaaatactgtttcacctgcaagattttccggccccctcgcgcctcccattgcagcctttgtgataactgcgtagaacggtttgatcaccactgtccctgggtaggcaactgtgtggggaaaagaaactacagatttttttatatgtttattttatctctgtcttttctgacagtctttatatttgcattcgttatcacccacgtcattcttcgttcacagcaaacaggattcctaaatgcccttaaggacagtcctgcaagcgtcctggaggctgtggtgtgcttcttctctgtctggtccatcgttggcctctcaggattccacacctacttgatcagctccaaccagacaacaaatgaggacattaaaggatcctggtcaaataaaagaggtaaagaaaattacaatccctacagctacggaaatatctttaccaactgctgtgttgccctgtgtgggcccatctcaccaagcctgatcgacagaagagggtacatccagcccgacacgccgcagccagcagcaccctccaatggcatcaccatgtacggggccacgcagtcacagagtgacatgtgcgaccaagaccagtgcattcagagcaccaaattcgttttgcaggctgcagccacgcccctgctgcagagcgagcccagcctcaccagcgacgagctgcacctgcccgggaagcctggcctgggcacgccctgcgccagcctcacactgggcccgcccacaccgcccgcctccatgcccaacctcgccgaggccacgctcgcggacgtgatgccccggaaagatgagcacatgggccaccagttcctgacgcccgatgaggcgccctcgccccccaggctactggcggcgggcagccccctggcgcacagccgcaccatgcacgtgctgggcctggccagccaggactccctgcatgaggactctgtgcgcggcctggtgaagctcagctccgtgtgacccacatggccccaggccgggggacaccagaggctcctccatgggcagcaggagtgagcggaggggtgtgtcccacagcgactttcccagccaatgccacggtggagatgacagccccaggtctggggtacagagaccacttaggatggcacagggtggctggccccggatgctgagagcttggtttcatttgaattttcttccccaacctgagtgctttgacaacaatggaaatagagaagtggctgctttcttttggtgaccctccaggggtggaatcggagtgtgtctgcccgcccttgtgacagacacacggaaggcttctgacgcttgtggccagactgcaattgcacttatgtgttatgctactaatatttgaaacagacctgccattccatttgttaattaaaaaaaaaaaaaatcctaaagggaaaaaaccgaccaggtgtggatctgcatgccacgctgccgtctgtgttacagtggtgttgctatttccaaggaagtgctgctttctttttctttttttaattttgtgaattttcaagtgctgttttgttggaagacagtgcaacgaactgagactaatggacagtgtcatcactcagcttactgggctgaggcgtctgtggagaggtggcaccggggctgcagagggcggctggggttccgtcgtgtcgggtgtcacttcaccttctgtttggccgctcgatgaggtctcgtgttgagatattgtgtgccacaacccccacagtcttcacctccgtgtgtgatgaaacttcccgtggacagccaataaaatgacgtcctctgttattttggatctgc

SEQ ID NO: 16307 - protein, 488 aa, Homo sapiens; identical to SEQ ID NO: 1886

SEQ ID NO: 16308 - DNA, 2755 bp, Homo sapiens
tgccggaggaaggagtggacccaacctggccgcgccgcagaagtggctcccgaggaagccggcgccggggccgccgcctcgtgtcccctcggggcgcagtgctcgggggtcggcgggccagagccgaggcgcggccggggagccgggggctgcggggccgagcgggcagccgcgcgagggggcgggcgctcggcgacccgggggccggccgggctgagccccgcgccccgggacgcgggctggaagcgacggaggagtgctgccgcgggctgcggaccagcgccgtcccctcacggagcggggattctgctatgacagttgggctccccggagggttaacctgggtgtcctcggcaaagttgtcgccgagccgggagcccgtgtaggggccgcggcgccgcggctcggggggcggccgggcggccggcggcggtcgtggctcggcggggcccgcgcggccggggggctcctgggggtgtgcgcccccagccggctgccctcgtggatgcctcccggcggcggcgggcccatgaaagactgcgagtacagccagatcagcacccacagctcctcccccatggagtcgccccacaagaagaagaaaatcgcggcccggaggaaatgggaggtgttcccgggaagaaacaagttcttctgtaacgggaggatcatgatggcccggcagacgggcgtcttctacctgacgctcgtcctcatcctggtcactagcggactcttcttcgccttcgactgtccgtacctggcggtgaaaatcacccctgccatccctgcagtcgctggcatcctgttcttctttgtgatggggaccctgctccgcaccagcttcagcgaccccggagtcctcccacgagccacgcctgatgaagccgccgatctggaaaggcaaatagatatcgcaaacggcaccagttcaggggggtaccgcccgcctcccagaaccaaagaagtcatcatcaatggccagaccgtgaaacttaaatactgtttcacctgcaagattttccggccccctcgcgcctcccattgcagcctttgtgataactgcgtagaacggtttgatcaccactgtccctgggtaggcaactgtgtggggaaaagaaactacagatttttttatatgtttattttatctctgtcttttctgacagtctttatatttgcattcgttatcacccacgtcattcttcgttcacagcaaacaggattcctaaatgcccttaaggacagtcctgcaagcgtcctggaggctgtggtgtgcttcttctctgtctggtccatcgttggcctctcaggattccacacctacttgatcagctccaaccagacaacaaatgaggacattaaaggatcctggtcaaataaaagaggtaaagaaaattacaatccctacagctacggaaatatctttaccaactgctgtgttgccctgtgtgggcccatctcaccaagcctgatcgacagaagagggtacatccagcccgacacgccgcagccagcagcaccctccaatggcatcaccatgtacggggccacgcagtcacagagtgacatggctgcagccacgcccctgctgcagagcgagcccagcctcaccagcgacgagctgcacctgcccgggaagcctggcctgggcacgccctgcgccagcctcacactgggcccgcccacaccgcccgcctccatgcccaacctcgccgaggccacgctcgcggacgtgatgccccggaaagatgagcacatgggccaccagttcctgacgcccgatgaggcgccctcgccccccaggctactggcggcgggcagccccctggcgcacagccgcaccatgcacgtgctgggcctggccagccaggactccctgcatgaggactctgtgcgcggcctggtgaagctcagctccgtgtgacccacatggccccaggccgggggacaccagaggctcctccatgggcagcaggagtgagcggaggggtgtgtcccacagcgactttcccagccaatgccacggtggagatgacagccccaggtctggggtacagagaccacttaggatggcacagggtggctggccccggatgctgagagcttggtttcatttgaattttcttccccaacctgagtgctttgacaacaatggaaatagagaagtggctgctttcttttggtgaccctccaggggtggaatcggagtgtgtctgcccgcccttgtgacagacacacggaaggcttctgacgcttgtggccagactgcaattgcacttatgtgttatgctactaatatttgaaacagacctgccattccatttgttaattaaaaaaaaaaaaaatcctaaagggaaaaaaccgaccaggtgtggatctgcatgccacgctgccgtctgtgttacagtggtgttgctatttccaaggaagtgctgctttctttttctttttttaattttgtgaattttcaagtgctgttttgttggaagacagtgcaacgaactgagactaatggacagtgtcatcactcagcttactgggctgaggcgtctgtggagaggtggcaccggggctgcagagggcggctggggttccgtcgtgtcgggtgtcacttcaccttctgtttggccgctcgatgaggtctcgtgttgagatattgtgtgccacaacccccacagtcttcacctccgtgtgtgatgaaacttcccgtggacagccaataaaatgacgtcctctgttattttggatctgc

SEQ ID NO: 16309 - protein, 473 aa, Homo sapiens; identical to SEQ ID NO: 1888

SEQ ID NO: 16310 - DNA, 745 bp, Homo sapiens
ttccaaaagagatggaaagattcaaagagttaatttcacctctgtcttctgccagcttcttatagcagttttgattagacaagagccatcacggtttattaaaaataaacaaagccaagatgcgccagaaatagatgaaaacctggttcatttgtcttgcctccgtctcattcctgttacatctccatgtcatgcagttagttgtctgtccaaaacagtttctatttttaaagcaacagaggatacttttcaggcttgggttagagaggcctctctttggaccaatggtccctcacggtgtgtggcaagccccctctgcccccttgggttggtgagcggagagttcttttaagcctaatgtcctgcagaaattatctgggaaatctgttaaaacagagtctggtctgaaagtgaaacatctcctttccgcttttcttatgcctttaatggttttttaaactactatatttagacgcagaaaaaaaataactgaggcaagatggttctggtttggaaaaagccagagagagagagagagaaagagagagagagaggttaggatataagcctaaatgctatcaaatgcctagtgtttagtagttatgaaaccgaggcatcaacttaatatccttctcccagcaaattatccagggcaaaaatcgcttgaacccgggacgtggaggttgcagtgagctgagatgcaccactgtacttcagcccggatgatgtgatgagattccatatc

SEQ ID NO: 16311 - protein, 66 aa, Homo sapiens
MKTWFICLASVSFLLHLHVMQLVVCPKQFLFLKQQRILFRLGLERPLFGPMVPHGVWQAPSAPLGW

SEQ ID NO: 16312 - DNA, 1946 bp, Homo sapiens
ctcagtcacgtggcccctgcacgtgtgcaacgaaggaggccggggtcccagcggaggatatcgcaaacggcaccagttcaggggggtaccgcccgcctcccagaaccaaagaagtcatcatcaatggccagaccgtgaaacttaaatactgtttcacctgcaagattttccggccccctcgcgcctcccattgcagcctttgtgataactgcgtagaacggtttgatcaccactgtccctgggtaggcaactgtgtggggaaaagaaactacagatttttttatatgtttattttatctctgtcttttctgacagtctttatatttgcattcgttatcacccacgtcattcttcgttcacagcaaacaggattcctaaatgcccttaaggacagtcctgcaagcgtcctggaggctgtggtgtgcttcttctctgtctggtccatcgttggcctctcaggattccacacctacttgatcagctccaaccagacaacaaatgaggacattaaaggatcctggtcaaataaaagaggtaaagaaaattacaatccctacagctacggaaatatctttaccaactgctgtgttgccctgtgtgggcccatctcaccaagcctgatcgacagaagagggtacatccagcccgacacgccgcagccagcagcaccctccaatggcatcaccatgtacggggccacgcagtcacagagtgacatgtgcgaccaagaccagtgcattcagagcaccaaattcgttttgcaggctgcagccacgcccctgctgcagagcgagcccagcctcaccagcgacgagctgcacctgcccgggaagcctggcctgggcacgccctgcgccagcctcacactgggcccgcccacaccgcccgcctccatgcccaacctcgccgaggccacgctcgcggacgtgatgccccggaaagatgagcacatgggccaccagttcctgacgcccgatgaggcgccctcgccccccaggctactggcggcgggcagccccctggcgcacagccgcaccatgcacgtgctgggcctggccagccaggactccctgcatgaggactctgtgcgcggcctggtgaagctcagctccgtgtgacccacatggccccaggccgggggacaccagaggctcctccatgggcagcaggagtgagcggaggggtgtgtcccacagcgactttcccagccaatgccacggtggagatgacagccccaggtctggggtacagagaccacttaggatggcacagggtggctggccccggatgctgagagcttggtttcatttgaattttcttccccaacctgagtgctttgacaacaatggaaatagagaagtggctgctttcttttggtgaccctccaggggtggaatcggagtgtgtctgcccgcccttgtgacagacacacggaaggcttctgacgcttgtggccagactgcaattgcacttatgtgttatgctactaatatttgaaacagacctgccattccatttgttaattaaaaaaaaaaaaaatcctaaagggaaaaaaccgaccaggtgtggatctgcatgccacgctgccgtctgtgttacagtggtgttgctatttccaaggaagtgctgctttctttttctttttttaattttgtgaattttcaagtgctgttttgttggaagacagtgcaacgaactgagactaatggacagtgtcatcactcagcttactgggctgaggcgtctgtggagaggtggcaccggggctgcagagggcggctggggttccgtcgtgtcgggtgtcacttcaccttctgtttggccgctcgatgaggtctcgtgttgagatattgtgtgccacaacccccacagtcttcacctccgtgtgtgatgaaacttcccgtggacagccaataaaatgacgtcctctgttattttggatctgc

SEQ ID NO: 16313 - protein, 277 aa, Homo sapiens
MFILSLSFLTVFIFAFVITHVILRSQQTGFLNALKDSPASVLEAVVCFFSVWSIVGLSGFHTYLISSNQTTNEDIKGSWSNKRGKENYNPYSYGNIFTNCCVALCGPISPSLIDRRGYIQPDTPQPAAPSNGITMYGATQSQSDMCDQDQCIQSTKFVLQAAATPLLQSEPSLTSDELHLPGKPGLGTPCASLTLGPPTPPASMPNLAEATLADVMPRKDEHMGHQFLTPDEAPSPPRLLAAGSPLAHSRTMHVLGLASQDSLHEDSVRGLVKLSSV

SEQ ID NO: 16314 - DNA, 5159 bp, Homo sapiens
aatgtttccgtaagtatctgcacaacggcttcacttccttcccaggccgcggtgctcaaaccacaaatggcgtgggctgggctcaggctcacgttaggagtacatcttcctccctttctcttctggtgggttcgtatgggggtggggaagtgggtgggagagaatgttttgcattcattctttttgaatattagtcaaattgggccgttaaatggaacatcccaaattttcataggtactttcaatcctagttgccattctttctgactataatctttcatccaaacgtgacacaaatgtgtaatatgtgcttgagagccatgacttggtgggcttgcaagaggacaatggacacccgccttttccacatcagctgggcaggatgcagacaggggcaccctctccctctattttcaaagtcctcaaaatggcaaaaatgtggctagggtcctatctgtgcattaatagacaaaagaagcagagagaatgactagggcattatatgttattttcaaagaagcagttgttgacacaactagggaagaaatacgaaccgatcctccagcacacacgtaacactgaaaagcagtgtttagacattatttatttttatttttgagatggagtgtcgctctgttgcctcagctggagtgcagtggcgggatctcggctcactgcagcccctgcctcccaggttcaagcaattctcctgcctcgagtagctgggattacaggcgtgggccacagcacccggctgatttttgtatttttagtagagatagggtttcaccatcttggccagactggtctcaaactcctgacctcaggtgatccgcctgcttcggcctcccaaagtgctgggattacaggcgtgagccaccccacccggcctagacattgtatttttatatcacctttcacaacctcaagatgcttttgtgtgtattatgggattgtatttatggccttgtccctgcattgtggatgtcaagggccagttgccacgtgcttagtcatatacctaaactcagggaacacacacacgcatgcttatggactcacacacactcacactcttacccacactcattctagccacactcacactcatatatactcaccaatacgctcacactcacacatatccttacacacccacactctcacatacccttacacacccacacacccttacacactcacactcacggtagccacactcatgtataaccaatatgctcacacatgtacccttacacacccacactcatactagccatactcacactcatatatactcaccaataagctcacacacatacccttacacacccacacaccgccttacacacacatactcgtacacgcccacacacacccttacacacccacacacatacccttacacagccacacacatacccttggacacccacactcactctagccactcatatatactcaccaataagctcacacacacatagccttacacacacatccttacccacatttacacactcatacccttacactgtcacactcacatgtacccttacacacccacactcacacacacccttacccacactcacacacacccttacacacccacactctcacacctttacacacccactcacacacatacccttacccccacacacccttatacacccacactcacactctagctacacccacactcatatatagtcaccaatatgctcacactctcgcactcacatgctgtcgtgctcgctcacataccgttgcacactcacatgctctcacacactctcacggtgaaatctgtgcctgccaccacactcaggttgcgatgtgtgtttcacttttagctcctctaaggttttactcacctggctccaccaaactggattttaccatagtctatacttaaatactgttcatctcttcttctacacaaaagtattaagaatttacctgcctgcaagttattggaatatcctgggcaaaagcaaataaaactttcccttttcccttgtttgacaccccctcatcagtgacccccacgacacgaccccaccaccctatctggcttggcatgtgatgcttcaggaagggcacagggtttccacggctcctgttaccctcttaagcctcagaaaacattggcacaggcagagaggagagctgtcatctgagtctctctgtgggatcctgggctcttagggaaaggccagacagggaggggcgggagagatttctgtggcctccaagattcctgggaaggcgaagtctggatttccttggagaggaaggagggcttaggccagccacataattagggtgcagtagacaaacagaaatcatttcttttggtccctcatctgcctcaaggctgtgtttgctccacatggccgcacaggcacttgcgtctgtgccctttggggctggcagagatggaggagaaagccttaagcaccatctctcctgattagcgctccacgcagcttctcttcacagcccctcccacacactgtgtcccactactcagacacatgggccgtgggcacagagggaaagggaccttgggaagaatagggagccaagccactcttcaccctcccaggtgtcgcccatagtggggcacatggggacacggtggccactcaccccctgccactgagtcccacagtgcagctgggcctgtggtcagatgccacagggacaccatagcacccgtagagtgtgtcatttccttggtgcacgagggccggatgatgtccccagaggctcactggcttcccacagcacagagggacctggcaccgctaccctaagatggaattgttaaaactacctccatttttatttttaaaagtatgatgtcaatgcataaaataaaaattgctttctgtcagatgcttctttattcaagcccctaaagaaatgttttcttgcctaagacagctcatattaaaatgtctaaagcccaagagaagtctaataaatttcagctttatgactttgtttactctgggtgtagaaaaagaattcttttatacgtagcctagtttccagaacttccagggtcaaaagttaacaaatttggggaaaacagaagagaaaagatagcatacagtattctgttttcctattaaaatgaggaaaacaaaggagtcatcagaactataatttacgggaaagtgtgcagacatccatctgcttttattgaaaaaataccctgcagatgttgggcctaattatgaatcctccattttcttgatgaaaaactttagtggcatctcaatctctgatcggtaaactgggtgtcgtagcacttacaaaatagaattatttcattgatctttagccatctattatttttttgtagatgagagagcattcagcatgaaggctgtttctatctgaatactaaatgttggtttcattcccacaggttcacagcaaacaggattcctaaatgcccttaaggacagtcctgcaagcgtcctggaggctgtggtgtgcttcttctctgtctggtccatcgttggcctctcaggattccacacctacttgatcagctccaaccagacaacaaatgaggacgattatctgcctgcacttaatacagatggagaggaagtatgaaaataggaaacaaggccgggcgcggtggctcatgcctgtaatcccagcacttcgggaggccgaggcaggcggatcacgagattaaaggatcctggtcaaataaaagaggtaaagaaaattacaatccctacagctacggaaatatctttaccaactgctgtgttgccctgtgtgggcccatctcaccaagcctgatcgacagaagagggtacatccagcccgacacgccgcagccagcagcaccctccaatggcatcaccatgtacggggccacgcagtcacagagtgacatgtgcgaccaagaccagtgcattcagagcaccaaattcgttttgcaggctgcagccacgcccctgctgcagagcgagcccagcctcaccagcgacgagctgcacctgcccgggaagcctggcctgggcacgccctgcgccagcctcacactgggcccgcccacaccgcccgcctccatgcccaacctcgccgaggccacgctcgcggacgtgatgccccggaaagatgagcacatgggccaccagttcctgacgcccgatgaggcgccctcgccccccaggctactggcggcgggcagccccctggcgcacagccgcaccatgcacgtgctgggcctggccagccaggactccctgcatgaggactctgtgcgcggcctggtgaagctcagctccgtgtgacccacatggccccaggccgggggacaccagaggctcctccatgggcagcaggagtgagcggaggggtgtgtcccacagcgactttcccagccaatgccacggtggagatgacagccccaggtctggggtacagagaccacttaggatggcacagggtggctggccccggatgctgagagcttggtttcatttgaattttcttccccaacctgagtgctttgacaacaatggaaatagagaagtggctgctttcttttggtgaccctccaggggtggaatcggagtgtgtctgcccgcccttgtgacagacacacggaaggcttctgacgcttgtggccagactgcaattgcacttatgtgttatgctactaatatttgaaacagacctgccattccatttgttaattaaaaaaaaaaaaaatcctaaagggaaaaaaccgaccaggtgtggatctgcatgccacgctgccgtctgtgttacagtggtgttgctatttccaaggaagtgctgctttctttttctttttttaattttgtgaattttcaagtgctgttttgttggaagacagtgcaacgaactgagactaatggacagtgtcatcactcagcttactgggctgaggcgtctgtggagaggtggcaccggggctgcagagggcggctggggttccgtcgtgtcgggtgtcacttcaccttctgtttggccgctcgatgaggtctcgtgttgagatattgtgtgccacaacccccacagtcttcacctccgtgtgtgatgaaacttcccgtggacagccaataaaatgacgtcctctgttattttggatctgc

SEQ ID NO: 16315 - protein, 143 aa, Homo sapiens
MYGATQSQSDMCDQDQCIQSTKFVLQAAATPLLQSEPSLTSDELHLPGKPGLGTPCASLTLGPPTPPASMPNLAEATLADVMPRKDEHMGHQFLTPDEAPSPPRLLAAGSPLAHSRTMHVLGLASQDSLHEDSVRGLVKLSSV

SEQ ID NO: 16316 - DNA, 4101 bp, Homo sapiens
tagacattgtatttttatatcacctttcacaacctcaagatgcttttgtgtgtattatgggattgtatttatggccttgtccctgcattgtggatgtcaagggccagttgccacgtgcttagtcatatacctaaactcagggaacacacacacgcatgcttatggactcacacacactcacactcttacccacactcattctagccacactcacactcatatatactcaccaatacgctcacactcacacatatccttacacacccacactctcacatacccttacacacccacacacccttacacactcacactcacggtagccacactcatgtataaccaatatgctcacacatgtacccttacacacccacactcatactagccatactcacactcatatatactcaccaataagctcacacacatacccttacacacccacacaccgccttacacacacatactcgtacacgcccacacacacccttacacacccacacacatacccttacacagccacacacatacccttggacacccacactcactctagccactcatatatactcaccaataagctcacacacacatagccttacacacacatccttacccacatttacacactcatacccttacactgtcacactcacatgtacccttacacacccacactcacacacacccttacccacactcacacacacccttacacacccacactctcacacctttacacacccactcacacacatacccttacccccacacacccttatacacccacactcacactctagctacacccacactcatatatagtcaccaatatgctcacactctcgcactcacatgctgtcgtgctcgctcacataccgttgcacactcacatgctctcacacactctcacggtgaaatctgtgcctgccaccacactcaggttgcgatgtgtgtttcacttttagctcctctaaggttttactcacctggctccaccaaactggattttaccatagtctatacttaaatactgttcatctcttcttctacacaaaagtattaagaatttacctgcctgcaagttattggaatatcctgggcaaaagcaaataaaactttcccttttcccttgtttgacaccccctcatcagtgacccccacgacacgaccccaccaccctatctggcttggcatgtgatgcttcaggaagggcacagggtttccacggctcctgttaccctcttaagcctcagaaaacattggcacaggcagagaggagagctgtcatctgagtctctctgtgggatcctgggctcttagggaaaggccagacagggaggggcgggagagatttctgtggcctccaagattcctgggaaggcgaagtctggatttccttggagaggaaggagggcttaggccagccacataattagggtgcagtagacaaacagaaatcatttcttttggtccctcatctgcctcaaggctgtgtttgctccacatggccgcacaggcacttgcgtctgtgccctttggggctggcagagatggaggagaaagccttaagcaccatctctcctgattagcgctccacgcagcttctcttcacagcccctcccacacactgtgtcccactactcagacacatgggccgtgggcacagagggaaagggaccttgggaagaatagggagccaagccactcttcaccctcccaggtgtcgcccatagtggggcacatggggacacggtggccactcaccccctgccactgagtcccacagtgcagctgggcctgtggtcagatgccacagggacaccatagcacccgtagagtgtgtcatttccttggtgcacgagggccggatgatgtccccagaggctcactggcttcccacagcacagagggacctggcaccgctaccctaagatggaattgttaaaactacctccatttttatttttaaaagtatgatgtcaatgcataaaataaaaattgctttctgtcagatgcttctttattcaagcccctaaagaaatgttttcttgcctaagacagctcatattaaaatgtctaaagcccaagagaagtctaataaatttcagctttatgactttgtttactctgggtgtagaaaaagaattcttttatacgtagcctagtttccagaacttccagggtcaaaagttaacaaatttggggaaaacagaagagaaaagatagcatacagtattctgttttcctattaaaatgaggaaaacaaaggagtcatcagaactataatttacgggaaagtgtgcagacatccatctgcttttattgaaaaaataccctgcagatgttgggcctaattatgaatcctccattttcttgatgaaaaactttagtggcatctcaatctctgatcggtaaactgggtgtcgtagcacttacaaaatagaattatttcattgatctttagccatctattatttttttgtagatgagagagcattcagcatgaaggctgtttctatctgaatactaaatgttggtttcattcccacaggttcacagcaaacaggattcctaaatgcccttaaggacagtcctgcaagcgtcctggaggctgtggtgtgcttcttctctgtctggtccatcgttggcctctcaggattccacacctacttgatcagctccaaccagacaacaaatgaggacattaaaggatcctggtcaaataaaagaggtaaagaaaattacaatccctacagctacggaaatatctttaccaactgctgtgttgccctgtgtgggcccatctcaccaagcctgatcgacagaagagggtacatccagcccgacacgccgcagccagcagcaccctccaatggcatcaccatgtacggggccacgcagtcacagagtgacatggctgcagccacgcccctgctgcagagcgagcccagcctcaccagcgacgagctgcacctgcccgggaagcctggcctgggcacgccctgcgccagcctcacactgggcccgcccacaccgcccgcctccatgcccaacctcgccgaggccacgctcgcggacgtgatgccccggaaagatgagcacatgggccaccagttcctgacgcccgatgaggcgccctcgccccccaggctactggcggcgggcagccccctggcgcacagccgcaccatgcacgtgctgggcctggccagccaggactccctgcatgaggactctgtgcgcggcctggtgaagctcagctccgtgtgacccacatggccccaggccgggggacaccagaggctcctccatgggcagcaggagtgagcggaggggtgtgtcccacagcgactttcccagccaatgccacggtggagatgacagccccaggtctggggtacagagaccacttaggatggcacagggtggctggccccggatgctgagagcttggtttcatttgaattttcttccccaacctgagtgctttgacaacaatggaaatagagaagtggctgctttcttttggtgaccctccaggggtggaatcggagtgtgtctgcccgcccttgtgacagacacacggaaggcttctgacgcttgtggccagactgcaattgcacttatgtgttatgctactaatatttgaaacagacctgccattccatttgttaattaaaaaaaaaaaaaatcctaaagggaaaaaaccgaccaggtgtggatctgcatgccacgctgccgtctgtgttacagtggtgttgctatttccaaggaagtgctgctttctttttctttttttaattttgtgaattttcaagtgctgttttgttggaagacagtgcaacgaactgagactaatggacagtgtcatcactcagcttactgggctgaggcgtctgtggagaggtggcaccggggctgcagagggcggctggggttccgtcgtgtcgggtgtcacttcaccttctgtttggccgctcgatgaggtctcgtgttgagatattgtgtgccacaacccccacagtcttcacctccgtgtgtgatgaaacttcccgtggacagccaataaaatgacgtcctctgttattttggatctgc

SEQ ID NO: 16317 - protein, 128 aa, Homo sapiens [sequence omitted]

SEQ ID NO: 16318 - DNA, 3304 bp, Homo sapiens
ctctcgcactcacatgctgtcgtgctcgctcacataccgttgcacactcacatgctctcacacactctcacggtgaaatctgtgcctgccaccacactcaggttgcgatgtgtgtttcacttttagctcctctaaggttttactcacctggctccaccaaactggattttaccatagtctatacttaaatactgttcatctcttcttctacacaaaagtattaagaatttacctgcctgcaagttattggaatatcctgggcaaaagcaaataaaactttcccttttcccttgtttgacaccccctcatcagtgacccccacgacacgaccccaccaccctatctggcttggcatgtgatgcttcaggaagggcacagggtttccacggctcctgttaccctcttaagcctcagaaaacattggcacaggcagagaggagagctgtcatctgagtctctctgtgggatcctgggctcttagggaaaggccagacagggaggggcgggagagatttctgtggcctccaagattcctgggaaggcgaagtctggatttccttggagaggaaggagggcttaggccagccacataattagggtgcagtagacaaacagaaatcatttcttttggtccctcatctgcctcaaggctgtgtttgctccacatggccgcacaggcacttgcgtctgtgccctttggggctggcagagatggaggagaaagccttaagcaccatctctcctgattagcgctccacgcagcttctcttcacagcccctcccacacactgtgtcccactactcagacacatgggccgtgggcacagagggaaagggaccttgggaagaatagggagccaagccactcttcaccctcccaggtgtcgcccatagtggggcacatggggacacggtggccactcaccccctgccactgagtcccacagtgcagctgggcctgtggtcagatgccacagggacaccatagcacccgtagagtgtgtcatttccttggtgcacgagggccggatgatgtccccagaggctcactggcttcccacagcacagagggacctggcaccgctaccctaagatggaattgttaaaactacctccatttttatttttaaaagtatgatgtcaatgcataaaataaaaattgctttctgtcagatgcttctttattcaagcccctaaagaaatgttttcttgcctaagacagctcatattaaaatgtctaaagcccaagagaagtctaataaatttcagctttatgactttgtttactctgggtgtagaaaaagaattcttttatacgtagcctagtttccagaacttccagggtcaaaagttaacaaatttggggaaaacagaagagaaaagatagcatacagtattctgttttcctattaaaatgaggaaaacaaaggagtcatcagaactataatttacgggaaagtgtgcagacatccatctgcttttattgaaaaaataccctgcagatgttgggcctaattatgaatcctccattttcttgatgaaaaactttagtggcatctcaatctctgatcggtaaactgggtgtcgtagcacttacaaaatagaattatttcattgatctttagccatctattatttttttgtagatgagagagcattcagcatgaaggctgtttctatctgaatactaaatgttggtttcattcccacaggttcacagcaaacaggattcctaaatgcccttaaggacagtcctgcaagcgtcctggaggctgtggtgtgcttcttctctgtctggtccatcgttggcctctcaggattccacacctacttgatcagctccaaccagacaacaaatgaggacattaaaggatcctggtcaaataaaagaggtaaagaaaattacaatccctacagctacggaaatatctttaccaactgctgtgttgccctgtgtgggcccatctcaccaagcctgatcgacagaagagggtacatccagcccgacacgccgcagccagcagcaccctccaatggcatcaccatgtacggggccacgcagtcacagagtgacatgtgcgaccaagaccagtgcattcagagcaccaaattcgttttgcaggctgcagccacgcccctgctgcagagcgagcccagcctcaccagcgacgagctgcacctgcccgggaagcctggcctgggcacgccctgcgccagcctcacactgggcccgcccacaccgcccgcctccatgcccaacctcgccgaggccacgctcgcggacgtgatgccccggaaagatgagcacatgggccaccagttcctgacgcccgatgaggcgccctcgccccccaggctactggcggcgggcagccccctggcgcacagccgcaccatgcacgtgctgggcctggccagccaggactccctgcatgaggactctgtgcgcggcctggtgaagctcagctccgtgtgacccacatggccccaggccgggggacaccagaggctcctccatgggcagcaggagtgagcggaggggtgtgtcccacagcgactttcccagccaatgccacggtggagatgacagccccaggtctggggtacagagaccacttaggatggcacagggtggctggccccggatgctgagagcttggtttcatttgaattttcttccccaacctgagtgctttgacaacaatggaaatagagaagtggctgctttcttttggtgaccctccaggggtggaatcggagtgtgtctgcccgcccttgtgacagacacacggaaggcttctgacgcttgtggccagactgcaattgcacttatgtgttatgctactaatatttgaaacagacctgccattccatttgttaattaaaaaaaaaaaaaatcctaaagggaaaaaaccgaccaggtgtggatctgcatgccacgctgccgtctgtgttacagtggtgttgctatttccaaggaagtgctgctttctttttctttttttaattttgtgaattttcaagtgctgttttgttggaagacagtgcaacgaactgagactaatggacagtgtcatcactcagcttactgggctgaggcgtctgtggagaggtggcaccggggctgcagagggcggctggggttccgtcgtgtcgggtgtcacttcaccttctgtttggccgctcgatgaggtctcgtgttgagatattgtgtgccacaacccccacagtcttcacctccgtgtgtgatgaaacttcccgtggacagccaataaaatgacgtcctctgttattttggatctgc

SEQ ID NO: 16319 - protein, 143 aa, Homo sapiens; identical to SEQ ID NO: 16315

SEQ ID NO: 16320 - DNA, 1543 bp, Homo sapiens
ccctcatgaggccctccatccctgggggaagactcctggaggaaatgcgtaggcggggattccacagggacgcagtgttcatgcagcgcctgtctggtgccagttctgaagcacacactgcaaagattaagaagatgggtctcagctgattgggagtagagcacagcatcttcagagaaggccacggaagtcctcctcaaggtgtccaagtgtcctccaaacattagccactgttgttattaataaaggaatttaagaccgaaaagacctatggaggattcaggagtccaggggcctgtattacacagaagagttaagagggtgattcacacacccgtgaagatgagtctcctccctcatcctccccacactgggtccataagaggtgctcctgagcagtttcacctcataacccacaggcttagatttggtgctgaggtagccagggtcagccctagtgcagagtagagcagcttaatttcagatgaatttttcagtggccattgctcactaggtgcctggacaggtcaaaccgttttccacttgtgaacaagcatctcaaagccagtccccccgcagctgactggcaggtgtgctctgccgtctgcttttggaaacaagccctcaagtgaattatttaaagtcagacagcctactattagcagacctaaaggaggaactcctagcaattaattaaatcctgatatttaaccccctgagctgagctagtgcctgtagggcaaaggtgctcaaacttcaggctgcgtcggaataaccctgagagcttgttaaaaagcagactgctgggccccaaccccggagtttctggttcagtaggtctggggtgggcctggaaatgtgcacttctagcaagtttcaggggcttctgctgaccctggatcagtgtatcacacaggaccgatagattattgtccctgattatggtgaataatatggcccaaaacacttaagaaacctccaattttctcaaactagcacatctgtgtacctaattatccatgtgtcgtctctctgtgtgtgaggccacgtgctctccacgaagacaggtgagtggagaccaagacacagaggtgctgctatgaccgcaactgcacccaccttgcagaaagcgcaaagcttcactttacagcaaaaataccagcaatctcctcccagactttcagagcagttcccaacaggtacaaggataaaatttaagaagagaggactacagatcactttaacgctaaagggaattgtagtgaagcatggatgttttcccattaaggacccatgactttacacttcaatatttctgcagggctcacagttcactgagaggctagagtgcagtgtcacgatcagagctcactgcagccatgaacccctaggctcctgggctcttggacttaagctgtcctcccacctcatcctcctgagtagctggaactacagtcatgaagctttatgttaagtttcatctactaaattgtaacaactaaaacttgaggactaaaatatatggaaaaattactactacatg

SEQ ID NO: 16321 - protein, 65 aa, Homo sapiens
MTATAPTLQKAQSFTLQQKYQQSPPRLSEQFPTGTRIKFKKRGLQITLTLKGIVVKHGCFPIKDP

SEQ ID NO: 16322 - DNA, 2136 bp, Homo sapiens
gcgggaggcggttcctgcagggtccagtcccgggagcacccccaggaggaggggagggtgggagcgcctctctttgagtccccgggtttggtcgctgggatgtgaggaagccggagaggccgcggctggacgcaggtgggtgtggaggggccgcccggactgcggggacccgctccgcgcacagtggctgagcgcccgcctctctttccaggggctgaggatccggcggctcggctgcactatgcccttcccgcccatgccgccgccgcccgcccccgccccgggggcccaagccgcgcgccagttaccccggaggccctgcgccgcgggggacaagaagaagaggcccccacagcggcccgaggggctcctctccagctcctggccctccgccacgctcaagaggccgccggcccggcgcggccccggcctggacaggacgcagccgccggcccctccgggcgtctccccccaggccttgcccagccgcgcgcgggccccagccacgtgcgccccgccccggccggcaggctccggccacagcccagcgaggaccacctatgcggcgacctcggcggggacggggaccaccgccgcgggcacctcctcgggggcggggccttgtccagactccgctgcgcgcttctgcctgaatctcacccccgaggccgtcctggtcatccagaagcgtcatctggagaagcagctgctggcgcggccccgcaggcccttcccctcaccctcggccgaacccaggcgcctactcgccccgtgtctcccggctagggccgcgggcccgcggaggggcggccccgccagcgaccccgacgcaccccccaccgccggccagggccgccgcgcgcctccgcccggcgcccagctgctgcacggcggcctgcaggttccccagctcagcccgcggcccggggccctgcggccgatgctcaaggtgtcgctgctcaacgagcggcacaggtacgacgacgtggagtacgaggaggagccagaggcggtggacgagggcctggtacgcaagtgcacggagtggctgcgcggcgtggagtccgcggctgccgcgcggggccgggcgggggccctggactcacggcggcacctgagcacgctgtgagcccagcgggcctgcggggacaggccaggcctgatcccacctcacttcctgcacgcgccactccgcctaggggccctcgggggagaccgcaggctcctctggccgccagcgcccactttcgggacaccagtgcgcaagctggcccacgtggggcgcagccagactcgcccgacggccacggcccccctcctgccctcgccagccggcagcccgggcctttctcgttcacaccggtggtatctaccccagatgcctgcctctgcccccactctggcctcctcttggcatcgccgagcatccatgcagttcgtggggaattaagcaactgagaaaatgcctcttggtgccccgacccccagggttcgtctaggtcccagagaccctctgcctggaggcgggccttccccagggctacatctgcacgccccgtggtgtcaccctcagccggcgccgggcaccctggacagtgcggtgggcgatggcccaggtgggtggccgcgacggtggcctcctgcagagctgggacccggtcctacattcgtgattttgttttctcccaagtcagaaaaatgttgagggtattagacatccctgaaactcagttaaccgaatttccagtctccaaagcggaagggtaggcatcgccaggcgctggtgagccctggtcaatgagcgcttccatggaaaccgctcggctgattacattttttctgtgtattatttgaatagagagtaaagctcctccgctgtttcgtaaccatatcctttcccccgctaactggaggctgatttctacatatttcttccatgtatctgagaatatctaactagaaggatgagaaggaaataaaatgttataatcagataaggctggttataaaagagtaatgtattacctcaatttttgactgactttgtaaaagccaataactggtttaatgtttatcttgatagactttaaatgtatcaagtcttaattgtattttaaattgaagccttacattttt

SEQ ID NO: 16323 - protein, 295 aa, Homo sapiens; identical to SEQ ID NO: 1890

SEQ ID NO: 16324 - DNA, 580 bp, Homo sapiens
gccggcccggcccgcgtctcagctgtggggacccgggggcgccgcgactcgcccacagtcggacggcgggaggcggttcctgcagggtccagtcccgggagcacccccaggaggaggggagggtgggagcgcctctctttgagtccccgggtttggtcgctgggatgtgaggaagccggagaggccgcggctggacgcaggggctgaggatccggcggctcggctgcactatgcccttcccgcccatgccgccgccgcccgcccccgccccgggggcccaagccgcgcgccagttaccccggaggccctgcgccgcgggggacaagaagaagaggcccccacagcggcccgaggggctcctctccagctcctggccctccgccacgctcaagaggccgccggcccggcgcggccccggcctggacaggacgcagccgccggcccctccgggcgtctccccccaggccttgcccagccgcgcgcgggccccagccacgtgcgccccgccccggccggcaggctccggccacagcccagcgaggaccacctatgcggcgacctcggcggggacggggaccac

SEQ ID NO: 16325 - protein, 115 aa, Homo sapiens
MPFPPMPPPPAPAPGAQAARQLPRRPCAAGDKKKRPPQRPEGLLSSSWPSATLKRPPARRGPGLDRTQPPAPPGVSPQALPSRARAPATCAPPRPAGSGHSPARTTYAATSAGTG

SEQ ID NO: 16326 - DNA, 444 bp, Homo sapiens
agagcttgggttggggtgacaggtttgggccctgtcatctctaccagcacctcccaagccaccccaatacagctctgaaacaagcctcccagctcacaggcactttccctccatccctgccagcctgtctctgccggtgggctcaggctgttaatcggcttgacaggtgaggtcctaagatactgaaacctcctcctcaatatgttttattccaggttttagaatctctggatgggtgtgggaagaggcacgtcagtggcggcaggaggcccacagttctgtgcctggaaagtggagaactggaagagaagatgagaaacattcccctcaaggcaaaaatgtccccaagatgtattctggagaattcagcccagtcagagtgtatgtacctttttccctctcagacttgaaacaaattaaaatagacctaggtacattctcaga

SEQ ID NO: 16327 - protein, 32 aa, Homo sapiens
MRNIPLKAKMSPRCILENSAQSECMYLFPSQT

SEQ ID NO: 16328 - DNA, 1503 bp, Homo sapiens
atgatgctcagatttggttgatactcaaccagtaaatgtaatgcagatattccaaaaatccagaaaaatccagtatccaacacatttctagttcctatcatttcagatcagaggtgcttcacctgcactgcctttcccagtccacttttgtgaagattcagtcatgtcctggtttctgctcagactgtcctccttgtagcctttttgtgtctcgcacagtaagagttcatctgcataaaggccataaatatctgggtggttgattaaacgtgccctgcagctcctgcgctcttctgtgttagtgaagagtacttttccttttcctttagagcagctcttgcttcctaatttttgcttcctggttttgccattttacattcctcttactcgacattacccagtttgggatcacctttctttcggccttctttctactgacagatgaaacatcagtgaatgttaaatgtaattctctgtatatctcaaattcaccataaaatgttctttactttttttcactgatatgtgaagaaacttaatctcttggttattttctctagtattttgccttttattgcctaatttgtaactaataattgatttatccctaaaggagactataattatcagttgtggtacagtttctattttattataagaagctcaaactttagcatgcaccagaatcacctagagagtttgtttaaagtgcaggttgcttgttaaagcaagcttgtgatttaggaggtttaaggtaggacctaataatttacatttttaacaagttcccagatgatgctctcactgctggtcggggtcacactttgagaaccactgtacagtctcatgctgctgtatttattataaggttagacatggccttttggcataaaggaaaaccatcattcagatgaagattcaacatgcttgaatatttcttgcaggtatagcctgtcgtacatcccatatgcaagggatgcagttattaaatgctgttcttctctcctaagttgaaaatcagaaacttgtggaaaagagcacttgaatgttggtactctatgtttggtgaagtttgcttttccccataaaacactccaggaacaactgacgtgacagttgaagaccgttttgtactaagtctcattttgtatactggtaaaaactacatgcttgattaaaccattaaatgcttgtaactttaaattcattatgtgtcattaatatacttttccaaagataagatttttaatcactgccagttgtaaattatttttagccaatttttaaatcttttcaaagcagctttgaaatgtgaatatttaaaggtagacctgtgctgcaagataattaaacttttttgcttttaaaaaatgtctgcatttttaagattttttttactttaaatgtgaaacttattttaagctaaaaattgcttattatatgtaataaaaataatatataaatctttacaattttgaaataaacccatccttggaaaaataa

SEQ ID NO: 16329 - protein, 32 aa, Homo sapiens
MLFFSPKLKIRNLWKRALECWYSMFGEVCFSP

SEQ ID NO: 16330 - DNA, 3428 bp, Homo sapiens
cattaataaacacacatgtgtgcccgagctcacctgcttgtgggcctggttggcaaatctgacagtgcccggtgtggtgaagggccctggctcaggggctgtgctctccaccatgctgctgcaggggtgcgctgtgagtctgcagtggtgaggcaagtgtgctgccgagtagcaaggtgtaaaaccaatagagagggccagaaaacacagatagtaacaacaaagagaggaactgaaatcattctcctaccctgtggagaaggttaacagctgttcattagcctttaaagaagtcacattgttacaattccgtttacttcttgatctcctgattctacatcatatttttctattgtactcaacctatttcccaaatgggtttgaagcagttcttgaactatcaacaagaaaagtcccattttaaagaagaaagggtagatattttagaatgctatcagaaatattccagttttttttttattttgatgatgtaaggacaggactttagttatatgagattgatttacgtgtcatttcttaatgataaaagaatattcttaacttgcacctctctatagaaccttgatttttggttttggaattgcctgtttacttataaacagtagattgaagataaataagtaaaaaagcactgatggacaaggaattctgaaaatattttaaaacaaccatggaaactgtttatattattccagaagatcacaataaaatacaattttccttcaaaatatcactcaaggagcaaatgggaatgagtaaaataagtaaatttcacatggggcatacagatctcagtgggattttacatgtcgattctagataagttaacattgactttaaagacctaaccacctttaaaagtctaatgttttcagtctatgcacaattgtttcagtaacgtttatttaaagtcatatattttgcagtatttaaattaatggatatagttttagaaaggaaatgtattttttgggttttaaagtttcagatcaactgtatcttaaatttatcacactaaaatttaataaagataaatgaagccatcatctacatttttgaaagacaagaattaagtttgattgagaaagatgtttttaaaactttgaaactcataattgctctgtttttgctgttgttagtggcataagaagggactggctgtgttattctgcatattgcagttcttgtcaatgacctggtaagtctttccttaccctagtgaagtgttaaaattgcctgagacgtgacgagcattttgtttgggacctgtgaagccctagcatttcgtctggtgttttggagccagacaggccctgcagggtcagaggaggggaggtctgcgatgagtcctgttgcacttgacagcgtggctcagtggtactgttcgggagaagtatggggtgctgtgctcgtagagttacatagtgatatgttctgcttttttctaatgtgagaaagagaaataataagaaaagtaggtgatgccatgtgagtacataaaagtgagaccaaatcacagggtgagtccaagggaagatgagtttacctgcattctccactctattgctggataaatacaacgtggaatttatcctgatgttgactctgtggccctgtgatatctggagatgtcttctgaattggcagtgattaaatacttcttaagttactggttgagcatcccaaatccaaaatgcttcaggatccaaaactttttttttttttttttgaggcagagtctcactctgtcacccaggctggagtgcagtggcattatcttggctcactgcaacctctgcctcccgggttcaagtgattctcgtgcctcagccttccaagtagctgggattacaaatgtgaggcaccatgcccagccccaaatccaaaacttcttgaacgctgacatgatgctcagatttggttgatactcaaccagtaaatgtaatgcagatattccaaaaatccagaaaaatccagtatccaacacatttctagttcctatcatttcagatcagaggtgcttcacctgcactgcctttcccagtccacttttgtgaagattcagtcatgtcctggtttctgctcagactgtcctccttgtagcctttttgtgtctcgcacagtaagagttcatctgcataaaggccataaatatctgggtggttgattaaacgtgccctgcagctcctgcgctcttctgtgttagtgaagagtacttttccttttcctttagagcagctcttgcttcctaatttttgcttcctggttttgccattttacattcctcttactcgacattacccagtttgggatcacctttctttcggccttctttctactgacagatgaaacatcagtgaatgttaaatgtaattctctgtatatctcaaattcaccataaaatgttctttactttttttcactgatatgtgaagaaacttaatctcttggttattttctctagtattttgccttttattgcctaatttgtaactaataattgatttatccctaaaggagactataattatcagttgtggtacagtttctattttattataagaagctcaaactttagcatgcaccagaatcacctagagagtttgtttaaagtgcaggttgcttgttaaagcaagcttgtgatttaggaggtttaaggtaggacctaataatttacatttttaacaagttcccagatgatgctctcactgctggtcggggtcacactttgagaaccactgtacagtctcatgctgctgtatttattataaggttagacatggccttttggcataaaggaaaaccatcattcagatgaagattcaacatgcttgaatatttcttgcaggtatagcctgtcgtacatcccatatgcaagggatgcagttattaaatgctgttcttctctcctaagttgaaaatcagaaacttgtggaaaagagcacttgaatgttggtactctatgtttggtgaagtttgcttttccccataaaacactccaggaacaactgacgtgacagttgaagaccgttttgtactaagtctcattttgtatactggtaaaaactacatgcttgattaaaccattaaatgcttgtaactttaaattcattatgtgtcattaatatacttttccaaagataagatttttaatcactgccagttgtaaattatttttagccaatttttaaatcttttcaaagcagctttgaaatgtgaatatttaaaggtagacctgtgctgcaagataattaaacttttttgcttttaaaaaatgtctgcatttttaagattttttttactttaaatgtgaaacttattttaagctaaaaattgcttattatatgtaataaaaataatatataaatctttacaattttgaaataaacccatccttggaaaaataa

SEQ ID NO: 16331 - protein, 98 aa, Homo sapiens
MSSELAVIKYFLSYWLSIPNPKCFRIQNFFFFFLRQSLTLSPRLECSGIILAHCNLCLPGSSDSRASAFQVAGITNVRHHAQPQIQNFLNADMMLRFG

SEQ ID NO: 16332 - DNA, 1006 bp, Homo sapiens
ggcgggaccggacttccggctggtctgtggggtttcgggttcggggtttcctggtgggcgtcaggggcaggcaacagagtggcggccgctacggccctgtaacagggccatggagaagctgcggcgagtcctgagcggccaggacgacgaggagcagggcctgactgcgcaggattcacagattaatctcttgaggtcctggatgcctcatcccttagtttcaacaccagattgaaatggtttgccatctgcttcgtatgtggcgttttcttttctattcttggaactggattgctgtggcttccgggcggcataaagctttttgcagtgttttataccctcggcaatcttgctgcgttagccagtacatgctttttaatgggacctgtgaagcaactgaagaaaatgtttgaagcaacaagattgcttgcaacaattgttatgcttgtatagcctgtcgtacatcccatatgcaagggatgcagttattaaatgctgttcttctctcctaagttgaaaatcagaaacttgtggaaaagagcacttgaatgttggtactctatgtttggtgaagtttgcttttccccataaaacactccaggaacaactgacgtgacagttgaagaccgttttgtactaagtctcattttgtatactggtaaaaactacatgcttgattaaaccattaaatgcttgtaactttaaattcattatgtgtcattaatatacttttccaaagataagatttttaatcactgccagttgtaaattatttttagccaatttttaaatcttttcaaagcagctttgaaatgtgaatatttaaaggtagacctgtgctgcaagataattaaacttttttgcttttaaaaaatgtctgcatttttaagattttttttactttaaatgtgaaacttattttaagctaaaaattgcttattatatgtaataaaaataatatataaatctttacaattttgaaataaacccatccttggaaaaataa

SEQ ID NO: 16333 - protein, 58 aa, Homo sapiens
MVCHLLRMWRFLFYSWNWIAVASGRHKAFCSVLYPRQSCCVSQYMLFNGTCEATEENV

SEQ ID NO: 16334 - DNA, 1105 bp, Homo sapiens
agcgggcgggaccggacttccggctggtctgtggggtttcgggttcggggtttcctggtgggcgtcaggggcaggcaacagagtggcggccgctacggccctgtaacagggccatggagaagctgcggcgagtcctgagcggccaggacgacgaggagcagggcctgactgcgcaggattcacagattaatctcttgaggtcctggatgcctcatcccttagtttcaacaccagattgaaatggtttgccatctgcttcgtatgtggcgttttcttttctattcttggaactggattgctgtggcttccgggcggcataaagctttttgcagtgttttataccctcggcaatcttgctgcgttagccagtacatgctttttaatgggacctgtgaagcaactgaagaaaatgtttgaagcaacaagattgcttgcaacaattgttatgcttttgtgtttcatatttaccctgtgtgctgctctttggtggcataagaagggactggctgtgttattctgcatattgcagttcttgtcaatgacctggtatagcctgtcgtacatcccatatgcaagggatgcagttattaaatgctgttcttctctcctaagttgaaaatcagaaacttgtggaaaagagcacttgaatgttggtactctatgtttggtgaagtttgcttttccccataaaacactccaggaacaactgacgtgacagttgaagaccgttttgtactaagtctcattttgtatactggtaaaaactacatgcttgattaaaccattaaatgcttgtaactttaaattcattatgtgtcattaatatacttttccaaagataagatttttaatcactgccagttgtaaattatttttagccaatttttaaatcttttcaaagcagctttgaaatgtgaatatttaaaggtagacctgtgctgcaagataattaaacttttttgcttttaaaaaatgtctgcatttttaagattttttttactttaaatgtgaaacttattttaagctaaaaattgcttattatatgtaataaaaataatatataaatctttacaattttgaaataaacccatccttggaaaaataa

SEQ ID NO: 16335 - protein, 77 aa, Homo sapiens
MGPVKQLKKMFEATRLLATIVMLLCFIFTLCAALWWHKKGLAVLFCILQFLSMTWYSLSYIPYARDAVIKCCSSLLS

SEQ ID NO: 16336 - DNA, 1079 bp, Homo sapiens
agcgggcgggaccggacttccggctggtctgtggggtttcgggttcggggtttcctggtgggcgtcaggggcaggcaacagagtggcggccgctacggccctgtaacagggccatggagaagctgcggcgagtcctgagcggccaggacgacgaggagcagggcctgactgcgcaggtcctggatgcctcatcccttagtttcaacaccagattgaaatggtttgccatctgcttcgtatgtggcgttttcttttctattcttggaactggattgctgtggcttccgggcggcataaagctttttgcagtgttttataccctcggcaatcttgctgcgttagccagtacatgctttttaatgggacctgtgaagcaactgaagaaaatgtttgaagcaacaagattgcttgcaacaattgttatgcttttgtgtttcatatttaccctgtgtgctgctctttggtggcataagaagggactggctgtgttattctgcatattgcagttcttgtcaatgacctggtaagtctttccttaccctagtgaagtggatgcagttattaaatgctgttcttctctcctaagttgaaaatcagaaacttgtggaaaagagcacttgaatgttggtactctatgtttggtgaagtttgcttttccccataaaacactccaggaacaactgacgtgacagttgaagaccgttttgtactaagtctcattttgtatactggtaaaaactacatgcttgattaaaccattaaatgcttgtaactttaaattcattatgtgtcattaatatacttttccaaagataagatttttaatcactgccagttgtaaattatttttagccaatttttaaatcttttcaaagcagctttgaaatgtgaatatttaaaggtagacctgtgctgcaagataattaaacttttttgcttttaaaaaatgtctgcatttttaagattttttttactttaaatgtgaaacttattttaagctaaaaattgcttattatatgtaataaaaataatatataaatctttacaattttgaaataaacccatccttggaaaaataa

SEQ ID NO: 16337 - protein, 137 aa, Homo sapiens
MEKLRRVLSGQDDEEQGLTAQVLDASSLSFNTRLKWFAICFVCGVFFSILGTGLLWLPGGIKLFAVFYTLGNLAALASTCFLMGPVKQLKKMFEATRLLATIVMLLCFIFTLCAALWWHKKGLAVLFCILQFLSMTW

SEQ ID NO: 16338 - DNA, 1091 bp, Homo sapiens
cgcacaggaagcgggcgggaccggacttccggctggtctgtggggtttcgggttcggggtttcctggtgggcgtcaggggcaggcaacagagtggcggccgctacggccctgtaacagggccatggagaagctgcggcgagtcctgagcggccaggacgacgaggagcagggcctgactgcgcaggtcctggatgcctcatcccttagtttcaacaccagattgaaatggtttgccatctgcttcgtatgtggcgttttcttttctattcttggaactggattgctgtggcttccgggcggcataaagctttttgcagtgttttataccctcggcaatcttgctgcgttagccagtacatgctttttaatgggacctgtgaagcaactgaagaaaatgtttgaagcaacaagattgcttgcaacaattgttatgcttttgtgtttcatatttaccctgtgtgctgctctttggtggcataagaagggactggctgtgttattctgcatattgcagttcttgtcaatgacctggtatagcctgtcgtacatcccatatgcaagggatgcagttattaaatgctgttcttctctcctaagttgaaaatcagaaacttgtggaaaagagcacttgaatgttggtactctatgtttggtgaagtttgcttttccccataaaacactccaggaacaactgacgtgacagttgaagaccgttttgtactaagtctcattttgtatactggtaaaaactacatgcttgattaaaccattaaatgcttgtaactttaaattcattatgtgtcattaatatacttttccaaagataagatttttaatcactgccagttgtaaattatttttagccaatttttaaatcttttcaaagcagctttgaaatgtgaatatttaaaggtagacctgtgctgcaagataattaaacttttttgcttttaaaaaatgtctgcatttttaagattttttttactttaaatgtgaaacttattttaagctaaaaattgcttattatatgtaataaaaataatatataaatctttacaattttgaaataaacccatccttggaaaaataa

SEQ ID NO: 16339 - protein, 159 aa, Homo sapiens; identical to SEQ ID NO: 1892

SEQ ID NO: 16340 - DNA, 2613 bp, Homo sapiens
ggcgggaccggacttccggctggtctgtggggtttcgggttcggggtttcctggtgggcgtcaggggcaggcaacagagtggcggccgctacggccctgtaacagggccatggagaagctgcggcgagtcctgagcggccaggacgacgaggagcagggcctgactgcgcaggattcacagattaatctcttgaggtcctggatgcctcatcccttagtttcaacaccagattgaaatggtttgccatctgcttcgtatgtggcgttttcttttctattcttggaactggattgctgtggcttccgggcggcataaagctttttgcagtgttttataccctcggcaatcttgctgcgttagccagtacatgctttttaatgggacctgtgaagcaactgaagaaaatgtttgaagcaacaagattgcttgcaacaattgttatgcttttgtgtttcatatttaccctgtgtgctgctctttggtggcataagaagggactggctgtgttattctgcatattgcagttcttgtcaatgacctggtaagtctttccttaccctagtgaagtgttaaaattgcctgagacgtgacgagcattttgtttgggacctgtgaagccctagcatttcgtctggtgttttggagccagacaggccctgcagggtcagaggaggggaggtctgcgatgagtcctgttgcacttgacagcgtggctcagtggtactgttcgggagaagtatggggtgctgtgctcgtagagttacatagtgatatgttctgcttttttctaatgtgagaaagagaaataataagaaaagtaggtgatgccatgtgagtacataaaagtgagaccaaatcacagggtgagtccaagggaagatgagtttacctgcattctccactctattgctggataaatacaacgtggaatttatcctgatgttgactctgtggccctgtgatatctggagatgtcttctgaattggcagtgattaaatacttcttaagttactggttgagcatcccaaatccaaaatgcttcaggatccaaaactttttttttttttttttgaggcagagtctcactctgtcacccaggctggagtgcagtggcattatcttggctcactgcaacctctgcctcccgggttcaagtgattctcgtgcctcagccttccaagtagctgggattacaaatgtgaggcaccatgcccagccccaaatccaaaacttcttgaacgctgacatgatgctcagatttggttgatactcaaccagtaaatgtaatgcagatattccaaaaatccagaaaaatccagtatccaacacatttctagttcctatcatttcagatcagaggtgcttcacctgcactgcctttcccagtccacttttgtgaagattcagtcatgtcctggtttctgctcagactgtcctccttgtagcctttttgtgtctcgcacagtaagagttcatctgcataaaggccataaatatctgggtggttgattaaacgtgccctgcagctcctgcgctcttctgtgttagtgaagagtacttttccttttcctttagagcagctcttgcttcctaatttttgcttcctggttttgccattttacattcctcttactcgacattacccagtttgggatcacctttctttcggccttctttctactgacagatgaaacatcagtgaatgttaaatgtaattctctgtatatctcaaattcaccataaaatgttctttactttttttcactgatatgtgaagaaacttaatctcttggttattttctctagtattttgccttttattgcctaatttgtaactaataattgatttatccctaaaggagactataattatcagttgtggtacagtttctattttattataagaagctcaaactttagcatgcaccagaatcacctagagagtttgtttaaagtgcaggttgcttgttaaagcaagcttgtgatttaggaggtttaaggtaggacctaataatttacatttttaacaagttcccagatgatgctctcactgctggtcggggtcacactttgagaaccactgtacagtctcatgctgctgtatttattataaggttagacatggccttttggcataaaggaaaaccatcattcagatgaagattcaacatgcttgaatatttcttgcaggtatagcctgtcgtacatcccatatgcaagggatgcagttattaaatgctgttcttctctcctaagttgaaaatcagaaacttgtggaaaagagcacttgaatgttggtactctatgtttggtgaagtttgcttttccccataaaacactccaggaacaactgacgtgacagttgaagaccgttttgtactaagtctcattttgtatactggtaaaaactacatgcttgattaaaccattaaatgcttgtaactttaaattcattatgtgtcattaatatacttttccaaagataagatttttaatcactgccagttgtaaattatttttagccaatttttaaatcttttcaaagcagctttgaaatgtgaatatttaaaggtagacctgtgctgcaagataattaaacttttttgctttt

SEQ ID NO: 16341 - protein, 58 aa, Homo sapiens; identical to SEQ ID NO: 16333

SEQ ID NO: 16342 - DNA, 967 bp, Homo sapiens
agcgggcgggaccggacttccggctggtctgtggggtttcgggttcggggtttcctggtgggcgtcaggggcaggcaacagagtggcggccgctacggccctgtaacagggccatggagaagctgcggcgagtcctgagcggccaggacgacgaggagcagggcctgactgcgcaggattcacagattaatctcttgaggtcctggatgcctcatcccttagtttcaacaccagattgaaatggtttgccatctgcttcgtatgtggcgttttcttttctattcttggaactggattgctgtggcttccgggcggcataaagctttttgcagtgttttataccctcggcaatcttgctgcgttagccagtacatgctttttaatgggacctgtgaagcaactgaagaaaatgtttgaagcaacaagattgcttgcaacaattgttatgcttttgtgtttcatatttaccctgtgtgctgctctttggtggcataagaagggactggctgtgttattctgcatattgcagttcttgtcaatgacctggtatagcctgtcgtacatcccatatgcaagggatgcagttattaaatgctgttcttctctcctaagttgaaaatcagaaacttgtggaaaagagcacttgaatgttggtactctatgtttggtgaagtttgcttttccccataaaacactccaggaacaactgacgtgacagttgaagaccgttttgtactaagtctcattttgtatactggtaaaaactacatgcttgattaaaccattaaatgcttgtaactttaaattcattatgtgtcattaatatacttttccaaagataagatttttaatcactgccagttgtaaattatttttagccaatttttaaatcttttcaaagcagctttgaaatgtgaatatttaaaggtagacctgtgctgcaagataattaaacttttttgctttt

SEQ ID NO: 16343 - protein, 77 aa, Homo sapiens; identical to SEQ ID NO: 16335

SEQ ID NO: 16344 - DNA, 953 bp, Homo sapiens
cgcacaggaagcgggcgggaccggacttccggctggtctgtggggtttcgggttcggggtttcctggtgggcgtcaggggcaggcaacagagtggcggccgctacggccctgtaacagggccatggagaagctgcggcgagtcctgagcggccaggacgacgaggagcagggcctgactgcgcaggtcctggatgcctcatcccttagtttcaacaccagattgaaatggtttgccatctgcttcgtatgtggcgttttcttttctattcttggaactggattgctgtggcttccgggcggcataaagctttttgcagtgttttataccctcggcaatcttgctgcgttagccagtacatgctttttaatgggacctgtgaagcaactgaagaaaatgtttgaagcaacaagattgcttgcaacaattgttatgcttttgtgtttcatatttaccctgtgtgctgctctttggtggcataagaagggactggctgtgttattctgcatattgcagttcttgtcaatgacctggtatagcctgtcgtacatcccatatgcaagggatgcagttattaaatgctgttcttctctcctaagttgaaaatcagaaacttgtggaaaagagcacttgaatgttggtactctatgtttggtgaagtttgcttttccccataaaacactccaggaacaactgacgtgacagttgaagaccgttttgtactaagtctcattttgtatactggtaaaaactacatgcttgattaaaccattaaatgcttgtaactttaaattcattatgtgtcattaatatacttttccaaagataagatttttaatcactgccagttgtaaattatttttagccaatttttaaatcttttcaaagcagctttgaaatgtgaatatttaaaggtagacctgtgctgcaagataattaaacttttttgctttt

SEQ ID NO: 16345 - protein, 159 aa, Homo sapiens; identical to SEQ ID NO: 1892

SEQ ID NO: 16346 - DNA, 1200 bp, Homo sapiens
atgatgctcagatttggttgatactcaaccagtaaatgtaatgcagatattccaaaaatccagaaaaatccagtatccaacacatttctagttcctatcatttcagatcagaggtgcttcacctgcactgcctttcccagtccacttttgtgaagattcagtcatgtcctggtttctgctcagactgtcctccttgtagcctttttgtgtctcgcacagtaagagttcatctgcataaaggccataaatatctgggtggttgattaaacgtgccctgcagctcctgcgctcttctgtgttagtgaagagtacttttccttttcctttagagcagctcttgcttcctaatttttgcttcctggttttgccattttacattcctcttactcgacattacccagtttgggatcacctttctttcggccttctttctactgacagatgaaacatcagtgaatgttaaatgtaattctctgtatatctcaaattcaccataaaatgttctttactttttttcactgatatgtgaagaaacttaatctcttggttattttctctagtattttgccttttattgcctaatttgtaactaataattgatttatccctaaaggagactataattatcagttgtggtacagtttctattttattataagaagctcaaactttagcatgcaccagaatcacctagagagtttgtttaaagtgcaggttgcttgttaaagcaagcttgtgatttaggaggtttaaggtaggacctaataatttacatttttaacaagttcccagatgatgctctcactgctggtcggggtcacactttgagaaccactgtacagtctcatgctgctgtatttattataaggttagacatggccttttggcataaaggaaaaccatcattcagatgaagattcaacatgcttgaatatttcttgcaggtatagcctgtcgtacatcccatatgcaagggatgcagttattaaatgctgttcttctctcctaagttgaaaatcagaaacttgtggaaaagagcacttgaatgttggtactctatgtttggtgaagtttgcttttccccataaaacactccaggaacaactgacgtgacagttgaagaccgttttgtactaagtctcattttgtatactggtaaaaactacatgcttgattaaaccattaaatgcttgtaacttt

SEQ ID NO: 16347 - protein, 32 aa, Homo sapiens; identical to SEQ ID NO: 16329

SEQ ID NO: 16348 - DNA, 703 bp, Homo sapiens
ggcgggaccggacttccggctggtctgtggggtttcgggttcggggtttcctggtgggcgtcaggggcaggcaacagagtggcggccgctacggccctgtaacagggccatggagaagctgcggcgagtcctgagcggccaggacgacgaggagcagggcctgactgcgcaggattcacagattaatctcttgaggtcctggatgcctcatcccttagtttcaacaccagattgaaatggtttgccatctgcttcgtatgtggcgttttcttttctattcttggaactggattgctgtggcttccgggcggcataaagctttttgcagtgttttataccctcggcaatcttgctgcgttagccagtacatgctttttaatgggacctgtgaagcaactgaagaaaatgtttgaagcaacaagattgcttgcaacaattgttatgcttgtatagcctgtcgtacatcccatatgcaagggatgcagttattaaatgctgttcttctctcctaagttgaaaatcagaaacttgtggaaaagagcacttgaatgttggtactctatgtttggtgaagtttgcttttccccataaaacactccaggaacaactgacgtgacagttgaagaccgttttgtactaagtctcattttgtatactggtaaaaactacatgcttgattaaaccattaaatgcttgtaacttt

SEQ ID NO: 16349 - protein, 58 aa, Homo sapiens; identical to SEQ ID NO: 16333

SEQ ID NO: 16350 - DNA, 802 bp, Homo sapiens
agcgggcgggaccggacttccggctggtctgtggggtttcgggttcggggtttcctggtgggcgtcaggggcaggcaacagagtggcggccgctacggccctgtaacagggccatggagaagctgcggcgagtcctgagcggccaggacgacgaggagcagggcctgactgcgcaggattcacagattaatctcttgaggtcctggatgcctcatcccttagtttcaacaccagattgaaatggtttgccatctgcttcgtatgtggcgttttcttttctattcttggaactggattgctgtggcttccgggcggcataaagctttttgcagtgttttataccctcggcaatcttgctgcgttagccagtacatgctttttaatgggacctgtgaagcaactgaagaaaatgtttgaagcaacaagattgcttgcaacaattgttatgcttttgtgtttcatatttaccctgtgtgctgctctttggtggcataagaagggactggctgtgttattctgcatattgcagttcttgtcaatgacctggtatagcctgtcgtacatcccatatgcaagggatgcagttattaaatgctgttcttctctcctaagttgaaaatcagaaacttgtggaaaagagcacttgaatgttggtactctatgtttggtgaagtttgcttttccccataaaacactccaggaacaactgacgtgacagttgaagaccgttttgtactaagtctcattttgtatactggtaaaaactacatgcttgattaaaccattaaatgcttgtaacttt

SEQ ID NO: 16351 - protein, 77 aa, Homo sapiens; identical to SEQ ID NO: 16335

SEQ ID NO: 16352 - DNA, 776 bp, Homo sapiens
agcgggcgggaccggacttccggctggtctgtggggtttcgggttcggggtttcctggtgggcgtcaggggcaggcaacagagtggcggccgctacggccctgtaacagggccatggagaagctgcggcgagtcctgagcggccaggacgacgaggagcagggcctgactgcgcaggtcctggatgcctcatcccttagtttcaacaccagattgaaatggtttgccatctgcttcgtatgtggcgttttcttttctattcttggaactggattgctgtggcttccgggcggcataaagctttttgcagtgttttataccctcggcaatcttgctgcgttagccagtacatgctttttaatgggacctgtgaagcaactgaagaaaatgtttgaagcaacaagattgcttgcaacaattgttatgcttttgtgtttcatatttaccctgtgtgctgctctttggtggcataagaagggactggctgtgttattctgcatattgcagttcttgtcaatgacctggtaagtctttccttaccctagtgaagtggatgcagttattaaatgctgttcttctctcctaagttgaaaatcagaaacttgtggaaaagagcacttgaatgttggtactctatgtttggtgaagtttgcttttccccataaaacactccaggaacaactgacgtgacagttgaagaccgttttgtactaagtctcattttgtatactggtaaaaactacatgcttgattaaaccattaaatgcttgtaacttt

SEQ ID NO: 16353 - protein, 137 aa, Homo sapiens; identical to SEQ ID NO: 16337

SEQ ID NO: 16354 - DNA, 788 bp, Homo sapiens
cgcacaggaagcgggcgggaccggacttccggctggtctgtggggtttcgggttcggggtttcctggtgggcgtcaggggcaggcaacagagtggcggccgctacggccctgtaacagggccatggagaagctgcggcgagtcctgagcggccaggacgacgaggagcagggcctgactgcgcaggtcctggatgcctcatcccttagtttcaacaccagattgaaatggtttgccatctgcttcgtatgtggcgttttcttttctattcttggaactggattgctgtggcttccgggcggcataaagctttttgcagtgttttataccctcggcaatcttgctgcgttagccagtacatgctttttaatgggacctgtgaagcaactgaagaaaatgtttgaagcaacaagattgcttgcaacaattgttatgcttttgtgtttcatatttaccctgtgtgctgctctttggtggcataagaagggactggctgtgttattctgcatattgcagttcttgtcaatgacctggtatagcctgtcgtacatcccatatgcaagggatgcagttattaaatgctgttcttctctcctaagttgaaaatcagaaacttgtggaaaagagcacttgaatgttggtactctatgtttggtgaagtttgcttttccccataaaacactccaggaacaactgacgtgacagttgaagaccgttttgtactaagtctcattttgtatactggtaaaaactacatgcttgattaaaccattaaatgcttgtaacttt

SEQ ID NO: 16355 - protein, 159 aa, Homo sapiens; identical to SEQ ID NO: 1892

SEQ ID NO: 16356 - DNA, 550 bp, Homo sapiens
cgggttcggggtttcctggtgggcgtcaggggcaggcaacagagtggcggccgctacggccctgtaacagggccatggagaagctgcggcgagtcctgagcggccaggacgacgaggagcagggcctgactgcgcagaatacttagttatttttatctgcttttcatgctacataaggattcacagattaatctcttgaggtcctggatgcctcatcccttagtttcaacaccagattgaaatggtttgccatctgcttcgtatgtggcgttttcttttctattcttggaactggattgctgtggcttccgggcggcataaagctttttgcagtgttttataccctcggcaatcttgctgcgttagccagtacatgctttttaatgggacctgtgaagcaactgaagaaaatgtttgaagcaacaagattgcttgcaacaattgttatgcttttgtgtttcatatttaccctgtgtgctgctctttggtggcataagaagggactggctgtgttattctgcatattgcagttcttgtcaatgacctggta

SEQ ID NO: 16357 - protein, 58 aa, Homo sapiens; identical to SEQ ID NO: 16333

SEQ ID NO: 16358 - DNA, 754 bp, Homo sapiens
ttcggggtttcctggtgggcgtcaggggcaggcaacagagtggcggccgctacggccctgtaacagggccatggagaagctgcggcgagtcctgagcggccaggacgacgaggagcagggcctgactgcgcaggtcctggatgcctcatcccttagtttcaacaccagattgaaatggtttgccatctgcttcgtatgtggcgttttcttttctattcttggaactggattgctgtggcttccgggcggcataaagctttttgcagtgttttataccctcggcaatcttgctgcgttagccagtacatgctttttaatgggacctgtgaagcaactgaagaaaatgtttgaagcaacaagattgcttgcaacaattgttatgcttgtaagtaaataatacatttttaaaacttttattgaagtattctttgcactgttattttacgaataattgcctgttatgtatgtatacttctttttttatttttatttttttttattattatactttaagtttcagggttgtatgtatacttcttgtgttgaatataataattatatccggccgggcacggtggctcacgtctgtaatcccagcactttggggggccaaggtgggcggatcacctgatggcaggagttcaagaccagcctgaccaatataatgaaaccccgtctctactaaaaatacaaaaattagcccggtgaggtggcatgcacctgtaatcccagctacttgggaggctgagacaga

SEQ ID NO: 16359 - protein, 108 aa, Homo sapiens
MEKLRRVLSGQDDEEQGLTAQVLDASSLSFNTRLKWFAICFVCGVFFSILGTGLLWLPGGIKLFAVFYTLGNLAALASTCFLMGPVKQLKKMFEATRLLATIVMLVSK

SEQ ID NO: 16360 - DNA, 405 bp, Homo sapiens
ggagaagctgcggcgagtcctgagcggccaggacgacgaggagcagggcctgactgcgcaggattcacagattaatctcttgaggtaaggaatgtaaccaaatgtattttgaactgttgcatatagaactttctcttatttttcattattcttgaaaatataagcatgtagtcttatttttaagtggatgtggtagtataaattagaaatttaagttttggaatataaatccttgctgtatatttctagtttcttgcacagctgctgttgatagatacttttttagccttatttggaaaatatattttaatagtataattagtaatctgagtgtgtttatttcaccactactgtgtgctgggttatcatactgtacaaagtagacttagtaatttctactttttt

SEQ ID NO: 16361 - protein, 58 aa, Homo sapiens
KFKFWNINPCCIFLVSCTAAVDRYFFSLIWKIYFNSIISNLSVFISPLLCAGLSYCTK

SEQ ID NO: 16362 - DNA, 315 bp, Homo sapiens
tggagaagctgcggcgagtcctgagcggccaggacgacgaggagcagggcctgactgcgcagatcaatacacggaagatggcaataggaggaaaaaatacctactattatacaaatagccgtgctgtttccttgctgagagaaaaactggctattgaaaagcagcgattgaacttgtgaacaatggggtgatttgaacttggaaaagaaggaaaaatggatgctttttcctctcactaaatcctcacagcattgtggactcacacgaacctttagaaatcattattctttccatttttaattgacaaataaaagt

SEQ ID NO: 16363 - protein, 33 aa, Homo sapiens
MAIGGKNTYYYTNSRAVSLLREKLAIEKQRLNL

SEQ ID NO: 16364 - DNA, 3895 bp, Homo sapiens
ctttctctcggacccggtagtggtccgtgaagtccgcggagtgggcgctgatggtggggctatcccttcccactgtccgcgaggtgcgccgtggtaacgcgcggggacacagcgcgggtgtggaccccctgcccacagctggcgcacagccattgagtgtagacccgactggggcacgaccactgaaccctgcacttggcgtcctccgggccccgcgaggggccttgctgggcgggtccgcggcaccccgggttcccagaagtcgaggccccgaatgcgcctcccctcgcctggaatcggagagcggagggctcctgcgggcaggtggccgtgctccgaagagcgccctgccacccatgaggtggccctgggggcgtcgctagccttcccagctgggtgtcctcatccggagacacaaacacctgcctcaggattaaagcgaggagctgtatttcagaccgtctcaggagaaatagcaagaggctgcctcactcctttgcccttgttcaagtttgaggcattaagaaggataagacatcaatttgaaaagagcccctgtcagagcaacatgacttgaaagcaagaagaaaaaacaaaaaatgaagcaagaacaaacatcaaatttatgctgagtttggctgcaagaatggtgaaatcattgatactttacaagacactaatcaggacagtgccccaaaggaatcagcagtttacaaatggatataacctgttttcagaagagacaagattaatttgaagatgaagcagtggcggaccatccatgtcaatttatgagaaaaaaattcattctgttcatgccctaactgaagaggactgacaacagcacaaacaatagccaacatcatagacatctcaactggttcagcttactcaattctgactgaaagttaaagttgagcaaactttccactcaatgagtgtcgaaaccctcatgcccagatcagctgcagacaagagcagaggtttcaatggaaattttaaacaagtgagattaagatcctgaagcatttcttgaaagaattgtaacaggagataaaccatggcttcaccagtacaatactgaagactaagcacaatcaaagcaatggctaccaagaggccgaagtggtcccattaaggcgaaagtggaccagtcaagagcaaaggtcatggcaacagtgttttgggatgccaagacattttgctcgttgactttctggagggccaaagtgcagtaatgtctgtttattatgttttgagaaagttggccaaacctttagtagaaaaatgcccaggagaacttcactagagtgaccttcgttcaatttcagatcaccacaataaagcaaaaaattgcaattataaattttttggtttcccagtacatgtaaaagttataattacactatactatagtctattaagggtgcaatagcattatgtctgaaaaaaacaatggtcatgccttaatttaaaaatactttattactaaaaaatgctagcaatcatctgaaccttcagtgagtcataatatttttgctagtggagggccttgcctggatgttgatggctgctgactgatcaggatggtggttgctgaaggttagggtggctgcagcaatttcttaacataagacaacagtgaagtttcctgcattgattgactcttcctttcatgaaatatttctctatagcatgtaatgctgtttgatagcattttacccacagtagaatttatttcagaattgaagtcagtcctcttaaaccctgtcacttctttattaactaagttcacgcaatattctaaatcctttgttgtcatttcaacaatgttcacaacatcttcaccagggatagattctgtctcaagaaaccactttctttgttcattcgtaagaagcaacccctcatctgttcaagttttctcatgagattggagcaattcagtcacattttcaggctgcatttttaattctagttctcttgctatttctaccacatctgcagttacttccttcactgaaggcttgaacccctcaaagtcacccatgagggttggaatcaacttcttccaaattcctgttaatgttgatgttttgacctcctctcatgaatgatgaatgtttttaatgacatctaaaatggtcagtcctttccagaaggttttcaatttactttgccccaatccatcagaggaatcactgtctatggcaactgtaggcttataaaaggtatttcttaaataatatgtcttgaaagtctaaatgactccttgatccataagctgcagaatgggtgttgtgttagcaagcatgaaaacaacattcatcttgtgcctctccatctgagctcttctatgaccaggtgccttgttgatgagcagtaatattttgaaagaaatcttttttcctgagcagtgggtctcaacaatgggcttaaaatgttcattaagccatgctgtaaacagatgtgctatcatccaggctttgatgttccttatacagagtacaggcacaggcagagtagatttagtataattcttaagggcccttggattttcagaatggtaagtgaacattggtgtgaacttaaggtcaccagctgcattagcccctaacaagagagtcagcctgtcctttgaagctttgaagctaggcattgacttctctctagctatgaaagtcctagatgacatcttctgatttaaggctgttttgtctacattgaaagtctattatttagtgtagccaccttcatcaattatcttagtaaggtcttctggataacttgctgcagcttctacatcagcatttactgcttcacctcgcacttttatgttatggagatggcttcattccttaaacctcatgaaccaacgagcttcaaacctttcttctgcagcttcctcacctccctcaggcttcatagaatttaatagagttagggctttgctatggattaggtttttgcttatgggaggattgtggctggtttaatcttctatccagactactacaactttccccatatcaaaaataaggcactttcattttttgatcatttgttcactggagtgacacttacttttaatttcctgaaaattttcctttgcatttacaatgtagctaactattcagtggaagagggctagtttttgacatgccttcctcaatatgcttaataatttctagtttttgatttaaagtgagacacatgtgactcttcctttcacttgaatgccgagaggccatgcagggttattaattagcctaatttcaatattgttatttaagttatggggaggcttgaggagagggagagagagacaggagaatggccggtcagtggagcagtcagaatacacacaacatatattgattaactttcctatcttatatgagcacagttcttggcactccaaaacaattacagtactaacatcaaagatcactgatcacagatcaccataactgatattataataatggaaagtcttgaaatattgtgaaaattaccaaaatgtgacagatacaacatgaacaaatgctgttggaagaatggcactgatagatttgcccaatgcagggttgccacaaactttcaacttgtaaaaagagcagtatctgtgaaagacggtaaagcagaaagcaataaaatgaagtgtgcccatgtatactaataagacatagttcattttattaataaagcacctgtcaatttcagttgagtaatttttatcaggaatgggttttgaattttgttcaaggcttttacagcatctgtgggataactatgtattgtttccctggatctataaatacatacaggatactaatgacttttcaaatattgaaccaactttgcattcttggaataaatctcacttgatcatgat

SEQ ID NO: 16365 - protein, 100 aa, Homo sapiens
MRLPSPGIGERRAPAGRWPCSEERPATHEVALGASLAFPAGCPHPETQTPASGLKRGAVFQTVSGEIARGCLTPLPLFKFEALRRIRHQFEKSPCQSNMT

SEQ ID NO: 16366 - DNA, 1032 bp, Homo sapiens
aaaactaagatctaatttcatgaagtcaaagttcttattagaaataatattacttgatcttttaaaaataataaaagaatgtacactgttaacgttgtagtcctgttactgaaatttgaatacaggtgtgaggttgcagtaacctaataagaccaaaatcatttgatttttgtttcttttttttccatgtctgtcctgtctgaacttcggtgactcttcacaaaatagtacgcacttctggggcccagtagccaactggggtcttcccattgctgccatcaatgatatgaaaaagtctccagagattatcagtgggcggatgacatttgccctctgttgctattctttgacattcatgagatttgcctacaaggtacagcctcggaactggcttctgtttgcatgccacgcaacaaatgaagtagcccagctcatccagggagggcggcttatcaaacacgagatgactaaaacggcatctgcataacaatggaaaaggaagaacaaggtcttgaagggacagcattgccagctgctgctgagtcacagatttcattataaatagcctccctaaggaaaatacactgaatgctatttttactaaccattctatttttatagaaatagctgagagtttctaaaccaactctctgctgccttacaagtattaaatattttacttctttccataaagagtagctcaaaatatgcaattaatttaataatttctgatgatggttttatctgcagtaatatgtatatcatctattagaatttacttaatgaaaaactgaagagaacaaaatttgtaaccactagcacttaagtactcctgattcttaacattgtctttaatgaccacaagacaaccaacagctggccacgtacttaaaattttgtccccactgtttaaaaatgttacctgtgtatttccatgcagtgtatatattgagatgctgtaacttaatggcaataaatgatttaaatatttgttaaatgagtatgattaaatatcttgctgcattccctagg

SEQ ID NO: 16367 - protein, 66 aa, Homo sapiens
MKKSPEIISGRMTFALCCYSLTFMRFAYKVQPRNWLLFACHATNEVAQLIQGGRLIKHEMTKTASA

SEQ ID NO: 16368 - DNA, 1168 bp, Homo sapiens
gggtgtcattggctctgggaagcggcagcagaggcagggaccactcggggtctggtgtcggcacagccatggcgggcgcgttggtgcggaaagcggcggactatgtccgaagcaaggatttccgggactacctcatgagaataactcttcaggctctgtttatagccctgggttcatgcatgataaagtagacagcaacaccaccatacagtgcagaggagtggcaagagagtaaacggaaaaggagatgaaaatagaccaagtggagaaaggcctggtcaaaaaaggaggaaaaggaagatcactatggaataatagagagttgaaaaatgaagtgacacccaataacaggacgggtaagaaaagaacacttctggggcccagtagccaactggggtcttcccattgctgccatcaatgatatgaaaaagtctccagagattatcagtgggcggatgacatttgccctctgttgctattctttgacattcatgagatttgcctacaaggtacagcctcggaactggcttctgtttgcatgccacgcaacaaatgaagtagcccagctcatccagggagggcggcttatcaaacacgagatgactaaaacggcatctgcataacaatggaaaaggaagaacaaggtcttgaagggacagcattgccagctgctgctgagtcacagatttcattataaatagcctccctaaggaaaatacactgaatgctatttttactaaccattctatttttatagaaatagctgagagtttctaaaccaactctctgctgccttacaagtattaaatattttacttctttccataaagagtagctcaaaatatgcaattaatttaataatttctgatgatggttttatctgcagtaatatgtatatcatctattagaatttacttaatgaaaaactgaagagaacaaaatttgtaaccactagcacttaagtactcctgattcttaacattgtctttaatgaccacaagacaaccaacagctggccacgtacttaaaattttgtccccactgtttaaaaatgttacctgtgtatttccatgcagtgtatatattgagatgctgtaacttaatggcaataaatgatttaaatatttgttaaatgagtatgattaaatatcttgctgcattccctagg

SEQ ID NO: 16369 - protein, 66 aa, Homo sapiens; identical to SEQ ID NO: 16367

SEQ ID NO: 16370 - DNA, 1158 bp, Homo sapiens
gggtgtcattggctctgggaagcggcagcagaggcagggaccactcggggtctggtgtcggcacagccatggcgggcgcgttggtgcggaaagcggcggactatgtccgaagcaaggatttccgggactacctcatgagtaggacaatcagagatgacttggttgtagtgtggaaaccagtagggaccttgggaagctgccaaaccctttctagctctgggctcagctgtaagaactgctgattcctacaggaacacttggacaatccaatacctaaatgttaaccatcaattaacccagtaaacctgcaagatggaaacgaagatttgttctcacgagtttcacgtgattatttaaacacttctggggcccagtagccaactggggtcttcccattgctgccatcaatgatatgaaaaagtctccagagattatcagtgggcggatgacatttgccctctgttgctattctttgacattcatgagatttgcctacaaggtacagcctcggaactggcttctgtttgcatgccacgcaacaaatgaagtagcccagctcatccagggagggcggcttatcaaacacgagatgactaaaacggcatctgcataacaatggaaaaggaagaacaaggtcttgaagggacagcattgccagctgctgctgagtcacagatttcattataaatagcctccctaaggaaaatacactgaatgctatttttactaaccattctatttttatagaaatagctgagagtttctaaaccaactctctgctgccttacaagtattaaatattttacttctttccataaagagtagctcaaaatatgcaattaatttaataatttctgatgatggttttatctgcagtaatatgtatatcatctattagaatttacttaatgaaaaactgaagagaacaaaatttgtaaccactagcacttaagtactcctgattcttaacattgtctttaatgaccacaagacaaccaacagctggccacgtacttaaaattttgtccccactgtttaaaaatgttacctgtgtatttccatgcagtgtatatattgagatgctgtaacttaatggcaataaatgatttaaatatttgttaaatgagtatgattaaatatcttgctgcattccctagg

SEQ ID NO: 16371 - protein, 66 aa, Homo sapiens; identical to SEQ ID NO: 16367

SEQ ID NO: 16372 - DNA, 892 bp, Homo sapiens
gggtgtcattggctctgggaagcggcagcagaggcagggaccactcggggtctggtgtcggcacagccatggcgggcgcgttggtgcggaaagcggcggactatgtccgaagcaaggatttccgggactacctcatgagtagcacttctggggcccagtagccaactggggtcttcccattgctgccatcaatgatatgaaaaagtctccagagattatcagtgggcggatgacatttgcctcggaactggcttctgtttgcatgccacgcaacaaatgaagtagcccagctcatccagggagggcggcttatcaaacacgagatgactaaaacggcatctgcataacaatggaaaaggaagaacaaggtcttgaagggacagcattgccagctgctgctgagtcacagatttcattataaatagcctccctaaggaaaatacactgaatgctatttttactaaccattctatttttatagaaatagctgagagtttctaaaccaactctctgctgccttacaagtattaaatattttacttctttccataaagagtagctcaaaatatgcaattaatttaataatttctgatgatggttttatctgcagtaatatgtatatcatctattagaatttacttaatgaaaaactgaagagaacaaaatttgtaaccactagcacttaagtactcctgattcttaacattgtctttaatgaccacaagacaaccaacagctggccacgtacttaaaattttgtccccactgtttaaaaatgttacctgtgtatttccatgcagtgtatatattgagatgctgtaacttaatggcaataaatgatttaaatatttgttaaatgagtatgattaaatatcttgctgcattccctagg

SEQ ID NO: 16373 - protein, 30 aa, Homo sapiens
MAGALVRKAADYVRSKDFRDYLMSSTSGAQ

SEQ ID NO: 16374 - DNA, 922 bp, Homo sapiens
ggctggctcgccgtcggctgccggggggttggccggggtgtcattggctctgggaagcggcagcagaggcagggaccactcggggtctggtgtcggcacagccatggcgggcgcgttggtgcggaaagcggcggactatgtccgaagcaaggatttccgggactacctcatgagtagcacttctggggcccagtagccaactggggtcttcccattgctgccatcaatgatatgaaaaagtctccagagattatcagtgggcggatgacatttgccctctgttgctattctttgacattcatgagatttgcctacaaggtacagcctcggaactggcttctgtttgcatgccacgcaacaaatgaagtagcccagctcatccagggagggcggcttatcaaacacgaggacagcattgccagctgctgctgagtcacagatttcattataaatagcctccctaaggaaaatacactgaatgctatttttactaaccattctatttttatagaaatagctgagagtttctaaaccaactctctgctgccttacaagtattaaatattttacttctttccataaagagtagctcaaaatatgcaattaatttaataatttctgatgatggttttatctgcagtaatatgtatatcatctattagaatttacttaatgaaaaactgaagagaacaaaatttgtaaccactagcacttaagtactcctgattcttaacattgtctttaatgaccacaagacaaccaacagctggccacgtacttaaaattttgtccccactgtttaaaaatgttacctgtgtatttccatgcagtgtatatattgagatgctgtaacttaatggcaataaatgatttaaatatttgttaaatgagtatgattaaatatcttgctgcattccctagg

SEQ ID NO: 16375 - protein, 66 aa, Homo sapiens
MKKSPEIISGRMTFALCCYSLTFMRFAYKVQPRNWLLFACHATNEVAQLIQGGRLIKHEDSIASCC

SEQ ID NO: 16376 - DNA, 996 bp, Homo sapiens
gtcgtgaggcgggccttcgggctggctcgccgtcggctgccggggggttggccggggtgtcattggctctgggaagcggcagcagaggcagggaccactcggggtctggtgtcggcacagccatggcgggcgcgttggtgcggaaagcggcggactatgtccgaagcaaggatttccgggactacctcatgagtagcacttctggggcccagtagccaactggggtcttcccattgctgccatcaatgatatgaaaaagtctccagagattatcagtgggcggatgacatttgccctctgttgctattctttgacattcatgagatttgcctacaaggtacagcctcggaactggcttctgtttgcatgccacgcaacaaatgaagtagcccagctcatccagggagggcggcttatcaaacacgagatgactaaaacggcatctgcataacaatggaaaaggaagaacaaggtcttgaagggacagcattgccagctgctgctgagtcacagatttcattataaatagcctccctaaggaaaatacactgaatgctatttttactaaccattctatttttatagaaatagctgagagtttctaaaccaactctctgctgccttacaagtattaaatattttacttctttccataaagagtagctcaaaatatgcaattaatttaataatttctgatgatggttttatctgcagtaatatgtatatcatctattagaatttacttaatgaaaaactgaagagaacaaaatttgtaaccactagcacttaagtactcctgattcttaacattgtctttaatgaccacaagacaaccaacagctggccacgtacttaaaattttgtccccactgtttaaaaatgttacctgtgtatttccatgcagtgtatatattgagatgctgtaacttaatggcaataaatgatttaaatatttgttaaatgagtatgattaaatatcttgctgcattccctagg

SEQ ID NO: 16377 - protein, 66 aa, Homo sapiens; identical to SEQ ID NO: 16367

SEQ ID NO: 16378 - DNA, 994 bp, Homo sapiens
aaaactaagatctaatttcatgaagtcaaagttcttattagaaataatattacttgatcttttaaaaataataaaagaatgtacactgttaacgttgtagtcctgttactgaaatttgaatacaggtgtgaggttgcagtaacctaataagaccaaaatcatttgatttttgtttcttttttttccatgtctgtcctgtctgaacttcggtgactcttcacaaaatagtacgcacttctggggcccagtagccaactggggtcttcccattgctgccatcaatgatatgaaaaagtctccagagattatcagtgggcggatgacatttgccctctgttgctattctttgacattcatgagatttgcctacaaggtacagcctcggaactggcttctgtttgcatgccacgcaacaaatgaagtagcccagctcatccagggagggcggcttatcaaacacgagatgactaaaacggcatctgcataacaatggaaaaggaagaacaaggtcttgaagggacagcattgccagctgctgctgagtcacagatttcattataaatagcctccctaaggaaaatacactgaatgctatttttactaaccattctatttttatagaaatagctgagagtttctaaaccaactctctgctgccttacaagtattaaatattttacttctttccataaagagtagctcaaaatatgcaattaatttaataatttctgatgatggttttatctgcagtaatatgtatatcatctattagaatttacttaatgaaaaactgaagagaacaaaatttgtaaccactagcacttaagtactcctgattcttaacattgtctttaatgaccacaagacaaccaacagctggccacgtacttaaaattttgtccccactgtttaaaaatgttacctgtgtatttccatgcagtgtatatattgagatgctgtaacttaatggcaataaatgatttaaatatttgtt

SEQ ID NO: 16379 - protein, 66 aa, Homo sapiens; identical to SEQ ID NO: 16367

SEQ ID NO: 16380 - DNA, 854 bp, Homo sapiens
gggtgtcattggctctgggaagcggcagcagaggcagggaccactcggggtctggtgtcggcacagccatggcgggcgcgttggtgcggaaagcggcggactatgtccgaagcaaggatttccgggactacctcatgagtagcacttctggggcccagtagccaactggggtcttcccattgctgccatcaatgatatgaaaaagtctccagagattatcagtgggcggatgacatttgcctcggaactggcttctgtttgcatgccacgcaacaaatgaagtagcccagctcatccagggagggcggcttatcaaacacgagatgactaaaacggcatctgcataacaatggaaaaggaagaacaaggtcttgaagggacagcattgccagctgctgctgagtcacagatttcattataaatagcctccctaaggaaaatacactgaatgctatttttactaaccattctatttttatagaaatagctgagagtttctaaaccaactctctgctgccttacaagtattaaatattttacttctttccataaagagtagctcaaaatatgcaattaatttaataatttctgatgatggttttatctgcagtaatatgtatatcatctattagaatttacttaatgaaaaactgaagagaacaaaatttgtaaccactagcacttaagtactcctgattcttaacattgtctttaatgaccacaagacaaccaacagctggccacgtacttaaaattttgtccccactgtttaaaaatgttacctgtgtatttccatgcagtgtatatattgagatgctgtaacttaatggcaataaatgatttaaatatttgtt

SEQ ID NO: 16381 - protein, 30 aa, Homo sapiens; identical to SEQ ID NO: 16373

SEQ ID NO: 16382 - DNA, 1130 bp, Homo sapiens
gggtgtcattggctctgggaagcggcagcagaggcagggaccactcggggtctggtgtcggcacagccatggcgggcgcgttggtgcggaaagcggcggactatgtccgaagcaaggatttccgggactacctcatgagaataactcttcaggctctgtttatagccctgggttcatgcatgataaagtagacagcaacaccaccatacagtgcagaggagtggcaagagagtaaacggaaaaggagatgaaaatagaccaagtggagaaaggcctggtcaaaaaaggaggaaaaggaagatcactatggaataatagagagttgaaaaatgaagtgacacccaataacaggacgggtaagaaaagaacacttctggggcccagtagccaactggggtcttcccattgctgccatcaatgatatgaaaaagtctccagagattatcagtgggcggatgacatttgccctctgttgctattctttgacattcatgagatttgcctacaaggtacagcctcggaactggcttctgtttgcatgccacgcaacaaatgaagtagcccagctcatccagggagggcggcttatcaaacacgagatgactaaaacggcatctgcataacaatggaaaaggaagaacaaggtcttgaagggacagcattgccagctgctgctgagtcacagatttcattataaatagcctccctaaggaaaatacactgaatgctatttttactaaccattctatttttatagaaatagctgagagtttctaaaccaactctctgctgccttacaagtattaaatattttacttctttccataaagagtagctcaaaatatgcaattaatttaataatttctgatgatggttttatctgcagtaatatgtatatcatctattagaatttacttaatgaaaaactgaagagaacaaaatttgtaaccactagcacttaagtactcctgattcttaacattgtctttaatgaccacaagacaaccaacagctggccacgtacttaaaattttgtccccactgtttaaaaatgttacctgtgtatttccatgcagtgtatatattgagatgctgtaacttaatggcaataaatgatttaaatatttgtt

SEQ ID NO: 16383 - protein, 66 aa, Homo sapiens; identical to SEQ ID NO: 16367

SEQ ID NO: 16384 - DNA, 1120 bp, Homo sapiens
gggtgtcattggctctgggaagcggcagcagaggcagggaccactcggggtctggtgtcggcacagccatggcgggcgcgttggtgcggaaagcggcggactatgtccgaagcaaggatttccgggactacctcatgagtaggacaatcagagatgacttggttgtagtgtggaaaccagtagggaccttgggaagctgccaaaccctttctagctctgggctcagctgtaagaactgctgattcctacaggaacacttggacaatccaatacctaaatgttaaccatcaattaacccagtaaacctgcaagatggaaacgaagatttgttctcacgagtttcacgtgattatttaaacacttctggggcccagtagccaactggggtcttcccattgctgccatcaatgatatgaaaaagtctccagagattatcagtgggcggatgacatttgccctctgttgctattctttgacattcatgagatttgcctacaaggtacagcctcggaactggcttctgtttgcatgccacgcaacaaatgaagtagcccagctcatccagggagggcggcttatcaaacacgagatgactaaaacggcatctgcataacaatggaaaaggaagaacaaggtcttgaagggacagcattgccagctgctgctgagtcacagatttcattataaatagcctccctaaggaaaatacactgaatgctatttttactaaccattctatttttatagaaatagctgagagtttctaaaccaactctctgctgccttacaagtattaaatattttacttctttccataaagagtagctcaaaatatgcaattaatttaataatttctgatgatggttttatctgcagtaatatgtatatcatctattagaatttacttaatgaaaaactgaagagaacaaaatttgtaaccactagcacttaagtactcctgattcttaacattgtctttaatgaccacaagacaaccaacagctggccacgtacttaaaattttgtccccactgtttaaaaatgttacctgtgtatttccatgcagtgtatatattgagatgctgtaacttaatggcaataaatgatttaaatatttgtt

SEQ ID NO: 16385 - protein, 66 aa, Homo sapiens; identical to SEQ ID NO: 16367

SEQ ID NO: 16386 - DNA, 884 bp, Homo sapiens
ggctggctcgccgtcggctgccggggggttggccggggtgtcattggctctgggaagcggcagcagaggcagggaccactcggggtctggtgtcggcacagccatggcgggcgcgttggtgcggaaagcggcggactatgtccgaagcaaggatttccgggactacctcatgagtagcacttctggggcccagtagccaactggggtcttcccattgctgccatcaatgatatgaaaaagtctccagagattatcagtgggcggatgacatttgccctctgttgctattctttgacattcatgagatttgcctacaaggtacagcctcggaactggcttctgtttgcatgccacgcaacaaatgaagtagcccagctcatccagggagggcggcttatcaaacacgaggacagcattgccagctgctgctgagtcacagatttcattataaatagcctccctaaggaaaatacactgaatgctatttttactaaccattctatttttatagaaatagctgagagtttctaaaccaactctctgctgccttacaagtattaaatattttacttctttccataaagagtagctcaaaatatgcaattaatttaataatttctgatgatggttttatctgcagtaatatgtatatcatctattagaatttacttaatgaaaaactgaagagaacaaaatttgtaaccactagcacttaagtactcctgattcttaacattgtctttaatgaccacaagacaaccaacagctggccacgtacttaaaattttgtccccactgtttaaaaatgttacctgtgtatttccatgcagtgtatatattgagatgctgtaacttaatggcaataaatgatttaaatatttgtt

SEQ ID NO: 16387 - protein, 66 aa, Homo sapiens; identical to SEQ ID NO: 16375

SEQ ID NO: 16388 - DNA, 958 bp, Homo sapiens
gtcgtgaggcgggccttcgggctggctcgccgtcggctgccggggggttggccggggtgtcattggctctgggaagcggcagcagaggcagggaccactcggggtctggtgtcggcacagccatggcgggcgcgttggtgcggaaagcggcggactatgtccgaagcaaggatttccgggactacctcatgagtagcacttctggggcccagtagccaactggggtcttcccattgctgccatcaatgatatgaaaaagtctccagagattatcagtgggcggatgacatttgccctctgttgctattctttgacattcatgagatttgcctacaaggtacagcctcggaactggcttctgtttgcatgccacgcaacaaatgaagtagcccagctcatccagggagggcggcttatcaaacacgagatgactaaaacggcatctgcataacaatggaaaaggaagaacaaggtcttgaagggacagcattgccagctgctgctgagtcacagatttcattataaatagcctccctaaggaaaatacactgaatgctatttttactaaccattctatttttatagaaatagctgagagtttctaaaccaactctctgctgccttacaagtattaaatattttacttctttccataaagagtagctcaaaatatgcaattaatttaataatttctgatgatggttttatctgcagtaatatgtatatcatctattagaatttacttaatgaaaaactgaagagaacaaaatttgtaaccactagcacttaagtactcctgattcttaacattgtctttaatgaccacaagacaaccaacagctggccacgtacttaaaattttgtccccactgtttaaaaatgttacctgtgtatttccatgcagtgtatatattgagatgctgtaacttaatggcaataaatgatttaaatatttgtt

SEQ ID NO: 16389 - protein, 66 aa, Homo sapiens; identical to SEQ ID NO: 16367

SEQ ID NO: 16390 - DNA, 5820 bp, Homo sapiens
gaggcggagaaggaggcggagggagcgattgtggccccggccgcggtggccggcgcggcctgccctttgtgaccgcagctcgcgccccacgccccgcgcccatggccgccgtgccgggctccctggccacgcgtgcccgcccgcggacctgagccccgcgcctgggatgccggggatgcgcgtcccccggccctgcggctgctccgggctgggcgcggggcgatggacctgagcatgaagaagttcgccgtgcgcaggttcttctctgtgtacctgcgcaggaagtcgcgctccaagagctccagcctgagccggctcgaggaagaaggcgtcgtgaaggagatagacatcagccatcatgtgaaggagggctttgagaaggcagatccttcccagtttgagctgctgaaggttttaggacaaggatcctatggaaaggtgttcctggtgaggaaggtgaaggggtccgacgctgggcagctctacgccatgaaggtccttaagaaagccaccctaaaagttcgggaccgagtgagatcgaagatggagagagacatcttggcagaagtgaatcaccccttcattgtgaagcttcattatgcctttcagacggaaggaaagctctacctgatcctggacttcctgcggggaggggacctcttcacccggctctccaaagaggtcatgttcacggaggaggatgtcaagttctacctggctgagctggccttggctttagaccatctccacagcctggggatcatctacagagatctgaagcctgagaacatcctcctggatgaagaggggcacattaagatcacagatttcggcctgagtaaggaggccattgaccacgacaagagagcgtactccttctgcgggacgatcgagtacatggcgcccgaggtggtgaaccggcgaggacacacgcagagtgccgactggtggtccttcggcgtgctcatgtttgagatgctcacggggtccctgccgttccaggggaaggacaggaaggagaccatggctctcatcctcaaagccaagctggggatgccgcagttcctcagtggggaggcacagagtttgctgcgagctctcttcaaacggaacccctgcaaccggctgggtgctggcattgacggagtggaggaaattaagcgccatcccttctttgtgaccatagactggaacacgctgtaccggaaggagatcaagccaccgttcaaaccagcagtgggcaggcctgaggacaccttccactttgaccccgagttcacagcgcggacgcccacagactctcctggcgtccccccgagtgcaaacgctcatcacctgtttagaggattcagctttgtggcctcaagcctgatccaggagccctcacagcaagatctgcacaaagtcccagttcacccaatcgtgcagcagttacacgggaacaacatccacttcaccgatggctacgagatcaaggaggacatcggggtgggctcctactcagtgtgcaagcgatgtgtgcataaagccacagacaccgagtatgccgtgaagatcattgataagagcaagagagacccctcggaagagattgagatcctcctgcggtacggccagcacccgaacatcatcaccctcaaggatgtctatgatgatggcaagtttgtgtacctggtaatggagctgatgcgtggtggggagctcctggaccgcatcctccggcagagatacttctcggagcgcgaagccagtgacgtcctgtgcaccatcaccaagaccatggactacctccattcccagggggttgttcatcgagacctgaagccgagtaacatcctgtacagggatgagtcggggagcccagaatccatccgagtctgcgacttcggctttgccaagcagctgcgcgcggggaacgggctgctcatgacaccctgctacacggccaatttcgtggccccggaggtcctgaagcgtcaaggctatgatgcggcgtgtgacatctggagtttggggatcctgttgtacaccatgctggcaggatttaccccttttgcaaatgggccagacgatacccctgaggagattctggcgcggatcggcagtgggaagtatgccctttctgggggaaactgggactcgatatctgacgcagctaaagacgtcgtgtccaagatgctccacgtggaccctcatcagcgcctgacggcgatgcaagtgctcaaacacccgtgggtggtcaacagagagtacctgtccccaaaccagctcagccgacaggacgtgcacctggtgaagggcgcgatggccgccacctactttgctctaaacagaacacctcaggccccgcggctggagcccgtgctgtcatccaacctggctcagcgcagaggcatgaagagactcacgtccacgcggctgtagcgggtgggaccctggccccagcgtcccctgccagcatcctcgtgggctcacagaccccggcctcggagcccgtctggcacccagagtgaccacaagtccagcagggaggcggcgcccgccctcgccgtgtccgtgttttctttttcagccccggagagggtcctgacctgggggcttctccaagcctcactgcgccagcctccccgcccgctctcttttctcccaagcgaaaccaaatgcgccccttcacctcgcgtgcccgtgcgaggccgggggcttctttcagagcccgcgggtcctctcatacatggcttctgtttctgccgagagatctgttttccaattatgaagccggtcggtttggtcagactcccgacacccacgtcccaggtacccggtgggaaagtggcagtgcgagggcgcagccattggtggttgcagggccccagagggctggggtgacctggcatcccggggctccccacgggctggatgacggggttggcactgtggcgtccaggaggagatgcctggttctgcccaaaataatccaaagagccgtttcctcctcgcccttcagtttttgcctgaggtgctgggtagcccatcctttcctctgtcccagattcaaatgaggagtaagagcccagacgagaggaaggcaggctggatctttgccttgagagctccgtgtcaccaggatggaagggggtgcctctcggaggagcctgtgtccacctccagtctcggctttccccggggggccaagcgcactgggctgccgtctgtccccagctcccgtggccacacagctatctggaggctttgcagggagtcgtgggttctcgcacctgctcagccctgtgtcggcttcctgtgtgctcacctaaagctgtggttttgctgtgttcacttcgatttttctggtctgtggagaaactgtgaattggagaaatggagctctgtggcttcccacccaaaccttctcagtccagctggaggctggagggagacacaggccccacccagcagactgaggggcagaggcacaggtgggagggcagcggagatcagcgtggacaggagcgatgcactttgtagatgctgtggctttgtgttgcgttttgtgtctctgttgcacagatctgttttttcacactgatccgtattcccctgggtgtgcacacagggcgggtgtggggcatttaggccatgctgtgctctacttcattgagtaaaatcgagtgagaggttccgggcagcaggatcgacgcccagtccagccggcagagggaacacacgggtccttcattgtcctgtaagggtgttgaagatgctccctggcggcccccaagcagactagatgggaggaggcgccgctcagcccctcaccctgcatcactgaagagcggcgcctctgcagcaagcagggcttcaggaggtgcccgctggccacagccaggttttccctaagaagatgttattttgttgggttttgttccccctccatctcgattctcgtacccaactaaaaaaaaaaaaataaagaaaaaatgtgctgcgttctgaaaaataactccttagcttggtctgattgttttcagaccttaaaatataaacttgtttcacaagctttaatccatgtggattttttttttcttagagaaccacaaaacataaaaggagcaagtcggactgaatacctgtttccatagtgcccacagggtattcctcacattttctccatagaagatgctttttcccaaggctagaacgacttccaccatgatgaatttgctttttaggtcttaattatttcacttctttttagaaacttaggaagaagtggataatcctgaggtcacacaatctgtcctcccagaaatgaacaaaagtcatcaccttttctgcttgctacacaggcaacgattcccccatcagctgcccggaccctttggcctggcttggtgtgcaggcctgtctgtttgcttaaagtcagtgggttctggtgcagggagtgagaagtgggggaagtgaaagggaaagcatccgtgagaaagcggccacggttttccctccttgtgtgcccatggggcaccagctcatggtctttttcagtcatcccagtttgtacagacttagcttctgaactctaagaatgccaaagggaccgacgagactccccatcacagcgagctctgtccttacatgtatttgatgtgcatcagcggaggagaacactggcttggccctgctccgctgagtgtctgtgaaatacctctactttccctcccatatccagaacaaaatgatacttgacatccttccacaaaagtcagcctaaagaagttatggtatcatatgttaaactaagctttcaaaaaccttagtgaaatagcaagtgactgctttcaagcagcagtcgacatgtaaatgaaggtgttcttagaattcgcattttgccagctcagcgcacctccacaacgaatgaaatgctccgtatgatttgcacaaatgacatagacctccccaaaagttaactggctctccttcctcacacagttcatcataacccaaccccccacccccgggtcatgaaaatcacagaacttataaacacattgaaccctagatctcaggcttcctgacctaccgccagtggccccttgctggccaccctatagggtcctccttccctggcagccccccatgtgggagaaatacctgattctcccaatctgcagtgggagagctttgctgaattccatcccaaagtcaaacatgggcaagaggtgaggatttcacttttaccctcaagtccgatttgtctgtgattttaaactaactgtgtatgtattgatgtttggaagattgtttgaattttaaagtgataatagtacttaatgttatccagtattgttcattaaatggtgttatcctaaagctgcacttgggatttttacctaacgctttactgattctctcaagcacatggcaaagtttgatttgcactccgttcatttctgacacgttttgctgcctcctacctttctaagcgtcatgcaaattcgagaatggagaaggacgctgccggtccctgagcggtgtggagagggcggaaggtggactccagcgcagcttgaggggctgaggacggaggctgcagcatctgtgtcgttctactgagcacgcttctctgcctcgctcctgactcagcactttgttcactggctcagcagttatgtttacacatcatttttatgttcctgctttgtaattcatgtttgagatgggtggccactgtacagatatttattacgctttccagactttctgaatagatttttttgaataaacatggttttatgaagtgtaatctttttctagcctaacaat

SEQ ID NO: 16391 - protein, 733 aa, Homo sapiens; identical to SEQ ID NO: 1900

SEQ ID NO: 16392 - DNA, 5963 bp, Homo sapiens
gcagtacagattccgaagccgcagcgccgtcccctcctttcctcgccccagcccgagcgggaagcggcagcagctccccagagccctggcttggcagggaggggacggcgcccgagcagccatattgcagccccccgggtccctcctccggccggcgcaggccccgcgctcacgacctcctctgggagccggatctgtcctctccatcgccgccacccgccggcctctgcgtcccttggcttccgacatcccgtctggccgtccccctgtgccggtccgagcctctgtttatttcctttcctactatcaatactcgaccagcagaaaaggaaagtttaaaaatgccaatcgcacagttgctggaactatggaaaaagatcgaggtggagcctatggaaatagagaccacagaggaggatctcaacctggatgtggagcccaccacagaagacactgcagaagaagaagaaggcgtcgtgaaggagatagacatcagccatcatgtgaaggagggctttgagaaggcagatccttcccagtttgagctgctgaaggttttaggacaaggatcctatggaaaggtgttcctggtgaggaaggtgaaggggtccgacgctgggcagctctacgccatgaaggtccttaagaaagccaccctaaaagttcgggaccgagtgagatcgaagatggagagagacatcttggcagaagtgaatcaccccttcattgtgaagcttcattatgcctttcagacggaaggaaagctctacctgatcctggacttcctgcggggaggggacctcttcacccggctctccaaagaggtcatgttcacggaggaggatgtcaagttctacctggctgagctggccttggctttagaccatctccacagcctggggatcatctacagagatctgaagcctgagaacatcctcctggatgaagaggggcacattaagatcacagatttcggcctgagtaaggaggccattgaccacgacaagagagcgtactccttctgcgggacgatcgagtacatggcgcccgaggtggtgaaccggcgaggacacacgcagagtgccgactggtggtccttcggcgtgctcatgtttgagatgctcacggggtccctgccgttccaggggaaggacaggaaggagaccatggctctcatcctcaaagccaagctggggatgccgcagttcctcagtggggaggcacagagtttgctgcgagctctcttcaaacggaacccctgcaaccggctgggtgctggcattgacggagtggaggaaattaagcgccatcccttctttgtgaccatagactggaacacgctgtaccggaaggagatcaagccaccgttcaaaccagcagtgggcaggcctgaggacaccttccactttgaccccgagttcacagcgcggacgcccacagactctcctggcgtccccccgagtgcaaacgctcatcacctgtttagaggattcagctttgtggcctcaagcctgatccaggagccctcacagcaagatctgcacaaagtcccagttcacccaatcgtgcagcagttacacgggaacaacatccacttcaccgatggctacgagatcaaggaggacatcggggtgggctcctactcagtgtgcaagcgatgtgtgcataaagccacagacaccgagtatgccgtgaagatcattgataagagcaagagagacccctcggaagagattgagatcctcctgcggtacggccagcacccgaacatcatcaccctcaaggatgtctatgatgatggcaagtttgtgtacctggtaatggagctgatgcgtggtggggagctcctggaccgcatcctccggcagagatacttctcggagcgcgaagccagtgacgtcctgtgcaccatcaccaagaccatggactacctccattcccagggggttgttcatcgagacctgaagccgagtaacatcctgtacagggatgagtcggggagcccagaatccatccgagtctgcgacttcggctttgccaagcagctgcgcgcggggaacgggctgctcatgacaccctgctacacggccaatttcgtggccccggaggtcctgaagcgtcaaggctatgatgcggcgtgtgacatctggagtttggggatcctgttgtacaccatgctggcaggatttaccccttttgcaaatgggccagacgatacccctgaggagattctggcgcggatcggcagtgggaagtatgccctttctgggggaaactgggactcgatatctgacgcagctaaagacgtcgtgtccaagatgctccacgtggaccctcatcagcgcctgacggcgatgcaagtgctcaaacacccgtgggtggtcaacagagagtacctgtccccaaaccagctcagccgacaggacgtgcacctggtgaagggcgcgatggccgccacctactttgctctaaacagaacacctcaggccccgcggctggagcccgtgctgtcatccaacctggctcagcgcagaggcatgaagagactcacgtccacgcggctgtagcgggtgggaccctggccccagcgtcccctgccagcatcctcgtgggctcacagaccccggcctcggagcccgtctggcacccagagtgaccacaagtccagcagggaggcggcgcccgccctcgccgtgtccgtgttttctttttcagccccggagagggtcctgacctgggggcttctccaagcctcactgcgccagcctccccgcccgctctcttttctcccaagcgaaaccaaatgcgccccttcacctcgcgtgcccgtgcgaggccgggggcttctttcagagcccgcgggtcctctcatacatggcttctgtttctgccgagagatctgttttccaattatgaagccggtcggtttggtcagactcccgacacccacgtcccaggtacccggtgggaaagtggcagtgcgagggcgcagccattggtggttgcagggccccagagggctggggtgacctggcatcccggggctccccacgggctggatgacggggttggcactgtggcgtccaggaggagatgcctggttctgcccaaaataatccaaagagccgtttcctcctcgcccttcagtttttgcctgaggtgctgggtagcccatcctttcctctgtcccagattcaaatgaggagtaagagcccagacgagaggaaggcaggctggatctttgccttgagagctccgtgtcaccaggatggaagggggtgcctctcggaggagcctgtgtccacctccagtctcggctttccccggggggccaagcgcactgggctgccgtctgtccccagctcccgtggccacacagctatctggaggctttgcagggagtcgtgggttctcgcacctgctcagccctgtgtcggcttcctgtgtgctcacctaaagctgtggttttgctgtgttcacttcgatttttctggtctgtggagaaactgtgaattggagaaatggagctctgtggcttcccacccaaaccttctcagtccagctggaggctggagggagacacaggccccacccagcagactgaggggcagaggcacaggtgggagggcagcggagatcagcgtggacaggagcgatgcactttgtagatgctgtggctttgtgttgcgttttgtgtctctgttgcacagatctgttttttcacactgatccgtattcccctgggtgtgcacacagggcgggtgtggggcatttaggccatgctgtgctctacttcattgagtaaaatcgagtgagaggttccgggcagcaggatcgacgcccagtccagccggcagagggaacacacgggtccttcattgtcctgtaagggtgttgaagatgctccctggcggcccccaagcagactagatgggaggaggcgccgctcagcccctcaccctgcatcactgaagagcggcgcctctgcagcaagcagggcttcaggaggtgcccgctggccacagccaggttttccctaagaagatgttattttgttgggttttgttccccctccatctcgattctcgtacccaactaaaaaaaaaaaaataaagaaaaaatgtgctgcgttctgaaaaataactccttagcttggtctgattgttttcagaccttaaaatataaacttgtttcacaagctttaatccatgtggattttttttttcttagagaaccacaaaacataaaaggagcaagtcggactgaatacctgtttccatagtgcccacagggtattcctcacattttctccatagaagatgctttttcccaaggctagaacgacttccaccatgatgaatttgctttttaggtcttaattatttcacttctttttagaaacttaggaagaagtggataatcctgaggtcacacaatctgtcctcccagaaatgaacaaaagtcatcaccttttctgcttgctacacaggcaacgattcccccatcagctgcccggaccctttggcctggcttggtgtgcaggcctgtctgtttgcttaaagtcagtgggttctggtgcagggagtgagaagtgggggaagtgaaagggaaagcatccgtgagaaagcggccacggttttccctccttgtgtgcccatggggcaccagctcatggtctttttcagtcatcccagtttgtacagacttagcttctgaactctaagaatgccaaagggaccgacgagactccccatcacagcgagctctgtccttacatgtatttgatgtgcatcagcggaggagaacactggcttggccctgctccgctgagtgtctgtgaaatacctctactttccctcccatatccagaacaaaatgatacttgacatccttccacaaaagtcagcctaaagaagttatggtatcatatgttaaactaagctttcaaaaaccttagtgaaatagcaagtgactgctttcaagcagcagtcgacatgtaaatgaaggtgttcttagaattcgcattttgccagctcagcgcacctccacaacgaatgaaatgctccgtatgatttgcacaaatgacatagacctccccaaaagttaactggctctccttcctcacacagttcatcataacccaaccccccacccccgggtcatgaaaatcacagaacttataaacacattgaaccctagatctcaggcttcctgacctaccgccagtggccccttgctggccaccctatagggtcctccttccctggcagccccccatgtgggagaaatacctgattctcccaatctgcagtgggagagctttgctgaattccatcccaaagtcaaacatgggcaagaggtgaggatttcacttttaccctcaagtccgatttgtctgtgattttaaactaactgtgtatgtattgatgtttggaagattgtttgaattttaaagtgataatagtacttaatgttatccagtattgttcattaaatggtgttatcctaaagctgcacttgggatttttacctaacgctttactgattctctcaagcacatggcaaagtttgatttgcactccgttcatttctgacacgttttgctgcctcctacctttctaagcgtcatgcaaattcgagaatggagaaggacgctgccggtccctgagcggtgtggagagggcggaaggtggactccagcgcagcttgaggggctgaggacggaggctgcagcatctgtgtcgttctactgagcacgcttctctgcctcgctcctgactcagcactttgttcactggctcagcagttatgtttacacatcatttttatgttcctgctttgtaattcatgtttgagatgggtggccactgtacagatatttattacgctttccagactttctgaatagatttttttgaataaacatggttttatgaagtgtaatctttttctagcctaacaat

SEQ ID NO: 16393 - protein, 741 aa, Homo sapiens; identical to SEQ ID NO: 1898

SEQ ID NO: 16394 - DNA, 2237 bp, Homo sapiens
ccagctcccgtggccacacagctatctggaggctttgcagggagtcgtgggttctcgcacctgctcagccctgtgtcggcttcctgtgtgctcacctaaagctgtggttttgctgtgttcacttcgatttttctggtctgtggagaaactgtgaattggagaaatggagctctgtggcttcccacccaaaccttctcagtccagctggaggctggagggagacacaggccccacccagcagactgaggggcagaggcacaggtgggagggcagcggagatcagcgtggacaggagcgatgcactttgtagatgctgtggctttgtgttgcgttttgtgtctctgttgcacagatctgttttttcacactgatccgtattcccctgggtgtgcacacagggcgggtgtggggcatttaggccatgctgtgctctacttcattgagtaaaatcgagtgagaggttccgggcagcaggatcgacgcccagtccagccggcagagggaacacacgggtccttcattgtcctgtaagggtgttgaagatgctccctggcggcccccaagcagactagatgggaggaggcgccgctcagcccctcaccctgcatcactgaagagcggcgcctctgcagcaagcagggcttcaggaggtgcccgctggccacagccaggttttccctaagaagatgttattttgttgggttttgttccccctccatctcgattctcgtacccaactaaaaaaaaaaaaataaagaaaaaatgtgctgcgttctgaaaaataactccttagcttggtctgattgttttcagaccttaaaatataaacttgtttcacaagctttaatccatgtggattttttttttcttagagaaccacaaaacataaaaggagcaagtcggactgaatacctgtttccatagtgcccacagggtattcctcacattttctccatagaagatgctttttcccaaggctagaacgacttccaccatgatgaatttgctttttaggtcttaattatttcacttctttttagaaacttaggaagaagtggataatcctgaggtcacacaatctgtcctcccagaaatgaacaaaagtcatcaccttttctgcttgctacacaggcaacgattcccccatcagctgcccggaccctttggcctggcttggtgtgcaggcctgtctgtttgcttaaagtcagtgggttctggtgcagggagtgagaagtgggggaagtgaaagggaaagcatccgtgagaaagcggccacggttttccctccttgtgtgcccatggggcaccagctcatggtctttttcagtcatcccagtttgtacagacttagcttctgaactctaagaatgccaaagggaccgacgagactccccatcacagcgagctctgtccttacatgtatttgatgtgcatcagcggaggagaacactggcttggccctgctccgctgagtgtctgtgaaatacctctactttccctcccatatccagaacaaaatgatacttgacatccttccacaaaagtcagcctaaagaagttatggtatcatatgttaaactaagctttcaaaaaccttagtgaaatagcaagtgactgctttcaagcagcagtcgacatgtaaatgaaggtgttcttagaattcgcattttgccagctcagcgcacctccacaacgaatgaaatgctccgtatgatttgcacaaatgacatagacctccccaaaagttaactggctctccttcctcacacagttcatcataacccaaccccccacccccgggtcatgaaaatcacagaacttataaacacattgaaccctagatctcaggcttcctgacctaccgccagtggccccttgctggccaccctatagggtcctccttccctggcagccccccatgtgggagaaatacctgattctcccaatctgcagtgggagagctttgctgaattccatcccaaagtcaaacatgggcaagaggtgaggatttcacttttaccctcaagtccgatttgtctgtgattttaaactaactgtgtatgtattgatgtttggaagattgtttgaattttaaagtgataatagtacttaatgttatccagtattgttcattcctgctttgtaattcatgtttgagatgggtggccactgtacagatatttattacgctttccagactttctgaatagatttttttgaataaacatggttttatg

SEQ ID NO: 16395 - protein, 53 aa, Homo sapiens [sequence omitted]

SEQ ID NO: 16396 - DNA, 781 bp, Homo sapiens
tctttatttttttttttttagttgggtacgagaatcgagatggagggggaacaaaacccaacaaaataacatcttcttagggaaaacctggctgtggccagcgggcacctcctgaagccctgcttgctgcagaggcgccgctcttcagtgatgcagggtgaggggctgagcggcgcctcctcccatctagtctgcttgggggccgccagggagcatcttcaacacccttacaggacaatgaaggacccgtgtgttccctctgccggctggactgggcgtcgatcctgctgcccggaacctctcactcgattttactcaatgaagtagagcacagcatggcctaaatgccccacacccgccctgtgtgcacacccaggggaatacggatcagtgtgaaaaaacagatctgtgcaacagagacacaaaacgcaacacaaagccacagcatctacaaagtgcatcgctcctgtccacgctgatctccgctgccctcccacctgtgcctctgcccctcagtctgctgggtggggcctgtgtctccctccagcctccagctggactgagaaggtttgggtgggaagccacagagctccatttctccaattcacagtttctccacagaccagaaaaatcgaagtgaacacagcaaaaccacagctttaggtgagcacacaggaagccgacacagggtggaggtggacacaggctcctccgagaggcacccccttccatcctggtgacacggagctctcaaggcaaagatccagcctgccttcctctc

SEQ ID NO: 16397 - protein, 58 aa, Homo sapiens
MQGEGLSGASSHLVCLGAAREHLQHPYRTMKDPCVPSAGWTGRRSCCPEPLTRFYSMK

SEQ ID NO: 16398 - DNA, 579 bp, Homo sapiens
caggcaagccatcaacccattcttcagaaagcaggggctaaaatgcaagatgtttaaagccctgcggccacactgtgtcattctgacatcctgggacaaatgagatgattttaaatgtgcctggcgaatttgatcatgagactgcattttctctcgtcggtttcggcatgaattgtcccagagtctcagaaaggggggatccagggcagaattgccagtgtctgtctcgttaagctcagaatcccagcatcaggaagacattgaccggcctttaagattgcagcaagcctcgaggaagccgtccaaagggccagagtgaccggctccagttggccaccggcggcccgcacagaacctcactgcctggcccagaccagagtgagaacgcagcagcctccagcagagctgcacggccatgagggtccctgagtccagaactgagctctagatggtcacacacaagtgcccaggacaggactccaggctggatgttttctgcgaacaccgtggggaccctccctaggcaggattaaggaaaccccatgctcagtggggggcaagaccccagcctggccctgc

SEQ ID NO: 16399 - protein, 42 aa, Homo sapiens
MILNVPGEFDHETAFSLVGFGMNCPRVSERGDPGQNCQCLSR

SEQ ID NO: 16400 - DNA, 364 bp, Homo sapiens
acatacacaccccacacatcacgcacatgcactcacacagcccccatgcaaaccccacacatgcacatgcagtctcgcaaccccccaccacacatcatgcacacttgcacacactcacacatgtacacctctcccacacacgcactcttgcacacactcacacatgcacacacccccacacacacacacgcactctcgcacgtgctcacgtcctctcaatgctctccacccctcctcccctcgagtcccagacccgcattttgacagcttgtcgaatgtcctgtggcaacatcgctctctggcttctccctgctcacggtgctgcttactccgggaggctgagtcacttgagaaacggcaggac

SEQ ID NO: 16401 - protein, 111 aa, Homo sapiens
MHSHSPHANPTHAHAVSQPPTTHHAHLHTLTHVHLSHTRTLAHTHTCTHPHTHTRTLARAHVLSMLSTPPPLESQTRILTACRMSCGNIALWLLPAHGAAYSGRLSHLRNG

SEQ ID NO: 16402 - DNA, 799 bp, Homo sapiens
gaaaataagacatctcttctgtgaatcttgtgatcctcagcgcaatggcaggggttgaaagtacagagtgaggcttttctcctgggactgtagaattgggatgtaagtttcagtgctggccagcagtcctgaaggacgaggggaagacgctttgcaaggaatcggcaccaagtcagtacagggagatgtcctattcccgaggggggtgtcctttgagaagtgttctgccatccttgctgtcccgaatcaccgtgcagagtaagtatagttcccagagggatcacaaggacacagaagtccacagctcccaaggtgaccttgtctgtggtccgtgcagcaggcctttcccaaaccacccagaaggttcttctacagaaagagacacataccatgcaaacatctgagatgctgcaagggagccgaatgaaatgggagtaaacatcacttggaaagcggccagggcaggaacagcgctaacctcacgtgacgcccagccctcggtgcctccctgtggagaggtcgctcagaagaaaacccgccatggaagacgggaggagcagaatgggccaaaccagggccagtctcaaggcccctgcggggtctcagcccctgtgggttgaagattgtgccagtccttggggaggaatccaatggaaagggaataattatacgggacatgcttgtgtctgtacccattaacttagagtaaacttgcatttttttacttacagacttgtttttttcccaatacccttctttgttattaaatccagaatataatcttttgtatacgtttatt

SEQ ID NO: 16403 - protein, 72 aa, Homo sapiens [sequence omitted]

SEQ ID NO: 16404 - DNA, 1374 bp, Homo sapiens
agctgaggggagccccagtctatggcaggagcagagatttctgaaagctgttggctccctctgccctggaggtaatgctgaaatttgactttgtgtataactgatgtgtgttacctttgtcatgtcttcagaataaactgtggtcattctttttctttcctcctctggtatatatatggactagttcatgggccttattaaaagacttgtttggagaggaaggcgctcggttacattggagaactggagtggtctggagttccacggtgtagtggaccagaggccacctctcctgggcttctcagtgtctcgccggcggggttcggcctgagctggatagacatagcccttggcggatttaaacaacctaaacattaagcaatacagctgcctcaaacctttgggattttcagaatgactgacactgccgaagctgttccaaattttgaagagatgtttgctagtagattcacagaaaatgacaaggagtatcaggaatacctgaaacgccctcctgagtctcctccaattgttgaggaatggaatagcagagctggtgggaaccaaagaaacagaggcaatcggttgcaagacaacagacagttcagaggcagggacaacagatgggggtggccaagtgacaatcgatccaatcagtggcatggacgatcctggggtaacaactacccgcaacacagacaagaaccttactatccccagcaatatggacattatggttacaaccagcggcctccttacggttactactgatagaaatgttggcagcttttagtaaaagcatttactctgttaccatgagaaaagtttgggtgtcttctgttggtcatagttttacatctgattttacagaatggattattgattttttggaagttgagactttaaaaaaaatagatcttacttgcgaaatgcgatggttgctgggaatacctgaaactgtggattatattgcttgacttctacctcagaatcttctttgtttcatgacttaatagtgctttaagtttggtatattatttgacctctaggaattctttgttttacacagaaataaaaattttaaaatagaaaatgcttttactttgtaaggtaagagagtatccatatgcttagatgtgctcgtttctaaaattctagaggttgatataatcagctcatgaatgcacagctatgctttttgtgatagattgtacataacatcagcagttgaaaggtaaaacaattgcttttttttttttttgcatttgttaagtgactatggtactttgtgattccttaatctatagatgagtcagctccacacttgagtctctttttagagggaaatcagtaataaagctgtaaaataaggaa

SEQ ID NO: 16405 - protein, 118 aa, Homo sapiens
MTDTAEAVPNFEEMFASRFTENDKEYQEYLKRPPESPPIVEEWNSRAGGNQRNRGNRLQDNRQFRGRDNRWGWPSDNRSNQWHGRSWGNNYPQHRQEPYYPQQYGHYGYNQRPPYGYY

SEQ ID NO: 16406 - DNA, 1035 bp, Homo sapiens
gtgaaggaaagagtccattgaagagcaaaattcattgttgtcttaagaaattgtcacggttaccccagtcttcagcaactgccacgctgatcagttagcagacatcaacactgaggtggggagaagtggaaggaaggacgcacgagagccagcctgcgacacctaaggacagaaacacctccctcagcccagccggctgctgactccatgcgaagagggacaccaacccttacaatctcacagtgtcctgcccctgcccctgcccctgtgagggcgatgctccttccatcaaaaccagagtgtcccagctctagattccccacccaatctcctgtggctgtctcagcacctccgtcgtgaatccgtgcatcccttcagacgactgccttccgatgcggcccctgacctgccccccctcccatcactgaataggactccttttctcctggatttcctgtaggaagtttcaaaatgctctccaggttttctgtgggtggattatctctctggatctttctaagtgagtcctgtgtttcaccacagctccccccacacagttgagcagctataccgtggggaggcttggtcctcttgccccatttgtgtgatgtctattgtagtcatgccaggggcctgacgtcagagctccaccctgacatgtgctcatgccggtttacaaaccctcccaggaccaggcccccatccctcttccaggacaggctctggagctccagctattaacagaaacattccagccagcatccccagcgaccctcagcctcccacgccgctgtgtcttcatgaccacagcctggccaccacacagctccccctcgaggactgtgaccacttccagccatggtctctttgggccatgcgggatatattcccatttccccattcagctgggagattttaccaagggatttttctctcctggctccaatgccagcaagaccatgaacagctgtgtcattttcactttcaagcctcagcttctgtacataaaagaatacagttaataatgatttcctc

SEQ ID NO: 16407 - protein, 50 aa, Homo sapiens
MRRGTPTLTISQCPAPAPAPVRAMLLPSKPECPSSRFPTQSPVAVSAPPS

SEQ ID NO: 16408 - DNA, 627 bp, Homo sapiens
gaggttcgtgaacggatggggaggaccctgaaaagcactgtggaatacaggtttctagtaacttcaaaatcacatcatttggactggcttctttgggatgtccgctctgcatatctactaaggaattaagaaataatggcttcagcaagaaacaaggcaggaaagtgcagtgacatgaggaccatacagggaaggagctgtccccaaagcagggtctttgtgacttgtaccttgtgcggacctcctactcatcctgtgactaagaacactgaacttcctggggttacagcccacaggtctcagcctcatttcatccagcccctattcaagatggagtcgctctggttcaaatgcctctgacactagtaaggatcacaggtggcatcaacaggtttggagcaaacctgagtgtctcccggttggtcacatctcaactgacgaaatccacgaccagcagagagcagcctccttgccccctgtgctcactgagtcatccagcccattttgaccaagattatgtgagttgctggagcagaggttggttgagggagctcccactgtatgtaatcaccgtgtcttgcacaaaataaatagaaaacacaagaatacactcttatgcatgatcct

SEQ ID NO: 16409 - protein, 74 aa, Homo sapiens
MASARNKAGKCSDMRTIQGRSCPQSRVFVTCTLCGPPTHPVTKNTELPGVTAHRSQPHFIQPLFKMESLWFKCL
